United States Patent Application Publication US 2005/0196754 A1 - sequence listing, part 10

SEQ ID NO: 19633 - DNA, 1821 bp, Homo sapiens
  SIMILAR (181)..(1293): 941254mologous to Homo sapiens putative p150,accession number U93563,Smith-Waterman Score=1889.
atggataaattcctcaacacaaacaccctcccaagactaaaccaggaagaagttgactctctgaatagaccaataacaggatctgaaattgtggcaatagtcaatagcttaccaaccaaaaagagtccaggaccagatggattcacagccgaattctaccagaggtacaaggaggaactgagaataaaatacctaggaatccaacttacaaaggatgtgaaggacctcttcaaggagaactacaaaccactgctcaaggaaataaaagaggataaaaacaaatggaagaacattccatgctcatgggtaggaagaatcaacatcatgaaaatggccatactgcccaaggtaatttatagattcaatgccatccccatcaagctaccaatgactttcttcatagaattggaaaaaactactttaaagttcatatggaaccaaaaaagagccctcatcgccaagtcaatcctaagccaaatgaacagagctggaggcatcatgctccctgacttcaaactatactacatggctacagtaaccaaaacagcatggtactggtaccaaaacagagatatagatcaatggaacagaacagagccctcagaaataacgccgcatatctacaactatctgatctttgacaaaccggagaaaaacaagaaatggggaaaggattccctatttaataaatggtgctgggaaaactggctagccatatgtagaaagctgaaactggatcccttccttacaccttacacaaaaattaattcaagatggattaaagacttaaacgttagacctaaaaccataaaaaccctagaagaaaacctaggcattaccattcaggacacaggcatgggcaaggacttcatgtctaaaacaccaaaagcaatggcaacaaaagccaaaattgacaaatgggatctcattaaactaaagagcttctgcacagcaaaagaaactaccattagagtgaacaggcaacctacaaaatgggagaaaattttcgcaacctactcatctgacaaagggctaatatccagaatctacaatgaactcaaacaaatttacaagaaaaaaacaaacaaccccatcaaaaagtgggcaaaggacatgaacagacacttctcaaaagaagacatttatgcagccaaaaaacacatgaaaaaatgctcaccatcactggccatcagagaaatgcaaatcaaaaccacaatgagataccacctcacgccagttagaatggcaatcattaaaaagtcaggaaacaacagagccggtaggtgccaggaacagtcaggagcccagccccctaccgagttaatggggtgggagccccgtgctcccaagtgcagctgcagccgcctagccctggctcatgacccaagcatcccggcactctcagactttggcactgacaaggagggagaccaagtgttggaagttctggccagggcaatcaggcaggagaaggaaataaagggtattcaattaggaaaagaggaagtcaaattggccctgtttgcagatgacatgattgtatatctagaaaaccccatcatctcagcccaaaagctccttaagctgatagacaacttcagcaaagtctcaggatacaaaatcaatgtgcaaaaatcacaagcattcttatataccaataacagacaaacagagagccaaatcatgagtgaacttccattcataattgcttcaaagagaataaaatacctaggaatccaccttacaagggatgtgaaggacctcttcaagaagaactacaaaccactgctcaatgaaataaaagtggatacaaacaaatga

SEQ ID NO: 19634 - DNA, 1725 bp, Homo sapiens; identical to SEQ ID NO: 7071
  SIMILAR (961)..(1629): 971254mologous to Homo sapiens putative p150,accession number U93563,Smith-Waterman Score=1104.

SEQ ID NO: 19635 - DNA, 1719 bp, Homo sapiens; identical to SEQ ID NO: 5398
  SIMILAR (451)..(999): 981254mologous to Homo sapiens putative p150,accession number U93569,Smith-Waterman Score=922.
  misc_feature (1)...(1719): n = a,t,c or g

SEQ ID NO: 19636 - DNA, 2133 bp, Homo sapiens; identical to SEQ ID NO: 3488
  SIMILAR (1024)..(2130): 921254mologous to Homo sapiens putative p150,accession number U93574,Smith-Waterman Score=1812.

SEQ ID NO: 19637 - DNA, 1317 bp, Homo sapiens
  SIMILAR (1)..(987): 671254mologous to Homo sapiens putative p150,accession number U93565,Smith-Waterman Score=1072.
atgggagactttaacaccccactgccaacattagacagatcaacgagacagaaagtcaacaaggatacccaggaattgaactcagatctgcaccaagtggacctaatagacatctacagaactctccaccccaaatcaacagaatatacattcttttcagcaccacaccacacctattccaaaattgaccacatacttggacgtaaagctttcctcagcaaatgtaaaagaatagaaattataacaacgtgtctctcagaccacagtacaatcaaactagaactcaggattaagaaactcactcaaaaccactcaactacatggaaactgaacaacctgctcctgaatgactactggttacataacgaaatgaaggcagaaataaagatgttctttgaaaccaatgagaacaaagacacaacataccagaatctctgggacacattcaaagcagtgtgtagagggaaatttatagcactaaatgcccacaagacaaagcaggaaagatccaaaattgacaccctaacatcacaattaaaagaactacaaaagcaagagaaaacacattcaaaagctagcagaaggcaaaaaataactaaactcagagcagaactgaagggactagagatacagaaaacccttcaaaaaattaatgaatccaggcgctggttttttgaaagactaaacaaggaagaagttgaatctctgaatgggccaacaacaggctctgaaatcatggcagtaatcaatagcttaacaacaaaaaagagtccaggaccagatggattcacagccgaattctaccagaggtacaaggaggaactgcatataaacagaaccaaagacaaaaaccacatgattatcttaatagatgcagaaaaggcctttgatgaaattcaacaactcttcctgctaaaaactctcaataaagtagtgttggaagttctggccagggcaattaggcaggagaaggaagtaaaggttattcaattaggaaaagaagaagtcaaattgtccctgtttgcagatgacatgattgtatttctagaaaaccccattgtctcagcccaaaatctccttaagctgataagcaacttcagcaaagtctcaggatacaaaatgaatgtacaaaaatcacaaacattcttatacaccaataacagaccaacagagagccaaatcgtgagtgaactcccattcataattgcttcaaagagaataatatacctaggaatccaacttacaagggacgtgaaggacctcttcaaggagaactacaaaccactgctcaatgaaattaaagaggatacaaagtaa

SEQ ID NO: 19638 - DNA, 2001 bp, Homo sapiens
  SIMILAR (112)..(1398): 611254mologous to Homo sapiens putative p150,accession number U93563,Smith-Waterman Score=1198.
atggtaaagggatcaattcaacaagaggagctaactatcctacatatttatgcacccaatacaggagcacccagattcataaagcaagtcctcagtgacctacaaagagacttagactcccacacattaataatgggagactttaacaccccactgtcaacattagacagatcaatgagacagaaagtcaacaaggatacccaggaattgaactcagctctgcaccaagcagccctaatagacatctacagaactttccaccccaaatcaacagaatatacatttttttcagcaccacaccacacctattccaaaattgaccacatagttggaagtaaagctctcctcaacaaatgtaaaagaacagaaattataacaaactatctctcagaccacagtgcaatcaaactagaactcaggattaagaatctcactcaaagccgctcaactacatggaaactgaacaacctgctcctgaatgactactgggtacataacgaaatgaaggcagaaataaagatgttctttgaaaccaacgagaacaaagacaccacataccagaatctctgggacgcattcaaagcaaccgctagcaagactaataaagaaaaaaagagagaagaatcaaatagaccaataaaaaatgataaaggggatatcaccaccgatcccacagaaatacaaactaccatcagagaatactacaaacacctctacgcaaataaactagaaaatctagaagaaatggatacattcctcgacacatacactctcccaagactaaaccaggaagaagttgaatctctgaatagaccaataacaggctctgaaattgtggcaataatcaatagtttaccaaccaaaaagagtccaggaccagatggattcacagccgaattctaccagaggtacaaggaggaactggtaccattccttctgaaactattccaatcaatagaaaaagagggaatcctccctaactcattttatgaggccagcatcattctgataccaaagccgggcagagacacaaccaaaaaagagaattttagaccaatatccttgatgaacattgatgcaaaaatcctcaataaaatactggcaaaccgaatccagcagcacatcaaaaagcttatccaccatgatcaagtgggcttcatccctgggatgcaaggctggttcaatatacgcaaatcaataaatgtaatccagcatataaacagagccaaagacaaaaaccacatgattatctcaatagatgcagaaaaagcctttgacaaaattcaacaacccttcatgctaaaaactctcaataaattagtgttggaagttctggccagggcaatcaggcaggagaaagatataaagggtattcaattaggaaaagaggaagtcaaattgtccctgtttgcagatgacatgattgtatatctagaaaaccccattgtctcagcccaaaatctccttaagctgataagcaaattcagcaaagtctcaggatacaaaatccatgtgctaaaatcacaagcattcttatacaccaataacagacaaacagagagccaaatcatgagggaactcccattcacaattgcttcaaagagaataaaatacctaggaatccaacttacaagggatgtgaaggacctcttcaaggagaactacaaaccactgctcaacgaaataaaagaggacacaaacaaatggaagaacattccatgctcatggataggaagaatcaatatcatgaggagatcctcgagtgcaccgtcgggatgtcacctttgtccaccctccttgtaccttcattccccaaatgtggaactaaagcaagcgagttttagtgtagctggctttcagtggaagcttgggattacagcgcccacgcagccgagaggagtgggtgatgacttcgtgacctcaacgtctcccccgtccctcgacatgttcccgcgcctgaaaggtgcagaaaactccccccaccgctctggacgagactga

SEQ ID NO: 19639 - DNA, 3291 bp, Homo sapiens
  SIMILAR (565)..(1953): 931254mologous to Homo sapiens putative p150,accession number U93565,Smith-Waterman Score=2276.
atggataaattcctcgacacatacactctcccaagactaaaccaggaagaagttgaatctctgaatagaccaataacaggagctgaaattgtggcaataatcaataccttaccaaccaaaaagagtccaggaccagatggattcacagccgaattctaccacaggtacaaggaggaactggtaccattccttctgaaactattccaatcaatagaaaaagagggaatcctccctaactcattttatgaggccagcatcatcctgataccaaagactggcagagacacaatcaaaaaagagaattttagaccaatatccttgatgaacattgatgcaaaaatcctcaataaaatattggcaaaccaaattcagcagcacatcaaaaagcttatccaccatgatcaagtgggcttcatcccggggatggaaggctggttcaatatacgcaaatcaataaatgtaatccagcatataaacagagccaaagacaaaaaccacatgattatctcaatagatgcagaaaaggcctttgacaaaattcaacaacccttcatgctaaaaactctcaataaattagtgttggaagttctggccagggcaattaggcaggagaaggaaataaagggcattcaattaggaaaagaggaagtcaaattgtccctgtttgcagacgacatgattgtatatctagaaaaccccactgactcagcccaaaatctccttaagctgataaggaacttcagcaaagtctcaggatacaaaatcaatgtacaaaaatcacaagcattcttatacatcaacaacagacaaacagagagccaaatcatgagtgaactcccattcacaattgcttcaaagagaataaaatacctaggaatccaacttataagggacatgaaggacctcttcaaggagaactacaaaccactgctcaaggaaataaacgaggatacaaacaaatggaagaacattccatgctcatgggtaggaagaatcaatatcgtgaaaatggccatactgcccaaggtaatttatagattcaatgccatccccatcaagctaccaatgactttcttcacagaattggaaaaaactgctttaaagttcatatggaaccaaaaaagagcccgcatcgccaagtcaatcctaagccaaaagaacaaagctggaggcatcacactacctgacttcaaactatactacaaggctacagtaacaaaaacagcatggtactggtaccaaaacagagatatagatcaatggaacagaacagagccctcagaaatagcgccgcgtatctacaactatctgatctttgacaaacctgagaaaaacaagcaatggggaaaggattccttatttaataaatggtgctgggaaaactggctagccatatgtagaaagctgaaactggatccctttcttacaccttatacaaaaatcaattcaagatggattaaagacttaaacgttagacctaaaaccataaaaaccctggaagaaaacctaggctttaccattcaggacataggcatgggcaaggacttcatgtctaaaacaccaaaaggaacggcaacaaaacccaaaatttacaaatgggatctaattaaactaaagagcttctgcacagcaaaagaaactatcatcagagtgaacaggcaacctacaaaatgggagaaaattttcacaacctactcatctgacaaggggctaatatccagaatctacaatgaactccaacaaatttacaagaaaaaaacaaacaaccccatcaaaaagtgggtgaaggacatgaacagacaattctcaaaagaagacatttatgcagccagaaaacacatgaaaaaatgctcaccatcactggctatcagagaaatgcaaatcaaaaccacaatgagataccatctcacaccagttagaatggcaatcattaaaaagtcaggaaacaacagactaacccaggaagaagttgaatctctgaatagatcaataacaggagctgaaattgaggcaataatcaatagcttccaaccaaaaagagtccaggacccgatggattcacagccgaattctaccacagagaataaaatacctaggaatccaacttacaagggatgtgaaggacctcttcaaggagaactacaaaccactgctcaaggaaataaacgaggatacaaacaatggaagaacattccatgctcatgggtaggaagaatcaatatcgtgaaaatggccatactgcccaaggtaatttatagattcaatgccatccccatcaagctaccaatgactttcttcacagaattggaaaaaactgctttaaagttcatatggaaccaaaaaagagcccgcattgccaagtcaatcctaagccaaaagaacaaagctggaggcatcacactacctgacttcaaactatactacaaggctacagtaaccaaaacagcatggtactggtaccaaaacagagatatagatcaatggaacagaacagagcgctcagaaataacgccacatatctataactatctgatctttgacaaacctgagaaaaacaagcaatggggaaaggattccttatttaataaatggtgctgggaaaactggctagccatatgtagaaagctgaaacaggatcccttccttacaccttatacaaaaatcaattcaagatggattaaagacttaaatgttagacctaaaaccataaaaaccctagaagaaaacctaggctttaccattcaggacataggcatgggcaaggacttcatgtctaaaacaccaaaagcaatgacaacaaaagccaaaattgacaaatgggatctaattaaactaaagagcttctgcacagcaaaagaaactaccatcagagtgaacaggcaacctacaaaatgggagaaaattttcacaacctactcatctgacaaggggctaatatccagaatctacaatgaactcagacaaatttaccagaaaaaaacaaccccatcaaaaaaaaaccaaaaccaagaatacagttccaagattatcaccagcagtatccctgaactcaaatatgaagtggacgtagttcttggggccatagaaagggggaaaaaaaagcagaaggtagaagaattggactaccatgtccaaaacactcctcctccaaaactgctcagcatcaagctcgggaaaatttccttcccaactcatggtttctacaatgaaaagagtgagattgagacagacaaccagcctctccatcatcgtcaattccctggcaggagacagatcaattggaaacaataa

SEQ ID NO: 19640 - DNA, 1296 bp, Homo sapiens
  SIMILAR (625)..(1293): 921254mologous to Homo sapiens putative p150,accession number U93563,Smith-Waterman Score=1075.
atgttggaagttctggcctgggcagttaggcaggagaaggaaataaagggtattcaactaggaaaagaggaagtcaaattgtccctgtttgcagacaacatgactgtatatctggaaaaccccatcgtctcagcccaaaatctccttaagctgataagcaacttcagcaaagtctcaggatacaaagtcagtggacaaaaatcacaagcattattatacaccaataacagacaaacagagagccaaatcatgagtgaactcccattcacaattgcttcaaagagaataaaatacctaggaatccaccttacaagggatgtgaaggacctcttcaaggagaactacaaaccactgctcaaggaaataaaaaaggatacaaacaaatggaagaacattccatgctcatgggtaggaagaatcaatatcgtgaaaatggccatactgcccaaggacatcatccaggagaacttccccaatctagcaaggcaggccaacattcagattcaggaaatacggaaaacaccacaaagatattcctcgagaagagcaactccaagacacataattgtcagattcaccaaagttgaaatgaaggaaaaaatgttaagggccgccagagagaaagcatcacaccacacctattccaaaattgaccccatacttggaagtaaacctctcctcagcaaatgtaaaagaacagaaattataacaaactatctctcagaccacagtgcaatcaaactagaattcaggattaagaatctcactcaaaactgctcaactacgtggaaaccaaacaacctgctcctgaacgactactgggtacataacgaaatgaaggcagaaataaagatgttctttgaaaccaacgagaacaaagacacaacataccagaatctctgggacacattcaaagcagtgtgtagagggaaatttatagcaacaaatgcccataagaggaagcaggaaagatccaaagttgacaccctaacatcacagttaaaagaactagaaaagcaagagcaaacacattcaaaagctagcagaaggcaagaaataactaaaatcagagcagaactgaaggaaatagagacacagaaaacccttcaaaaaattaatgaatccaggagctggttttttgaaaggatcaacaaacttgacagacctctagcaagactagtaaagaaaaaaagagagaagaatcaaatagatgcaataaaaaatgataaaggggatatcaccaccaatcccacagaaatacaaactaccatcagagattattacaaacacctctag

SEQ ID NO: 19641 - DNA, 490 bp, Homo sapiens
  SIMILAR (285)..(392): 881254mologous to Homo sapiens line-1 reverse transcriptase,accession number U83303,Smith-Waterman Score=160.
acactcagcactgtgcattctgaagagtgggcctaaaagtactttaccatctcatagagaagagttctttcctagcagggtgtattgccaagccctctctgctttgtccttccctccatggtttgttaaccagcaggaatgctttttttttattattatactttaagttttagggcacatgtgcacaatgtaccggttagttacatatgtatacctgtgcaatgctggtgtgctgcacccattaactcgtcatttagcattaggtatatctcctaattgttttagcagtcttatacaccaataacagacaaacagagagccaaatcatgagtgaactcccgttcacaattgcttcaaagagaataaaatacctaggaatccaacttaacaagggatgtgaaggacctcttcaaggacaactacataccactggctcaaggaaatatgagaggacacaagcaaatggaagagcattccatgctcatggata

SEQ ID NO: 19642 - DNA, 1848 bp, Homo sapiens; identical to SEQ ID NO: 14250
  SIMILAR (565)..(1227): 931254mologous to Homo sapiens putative p150,accession number U93563,Smith-Waterman Score=1040.

SEQ ID NO: 19643 - DNA, 3147 bp, Homo sapiens; identical to SEQ ID NO: 10229
  SIMILAR (1198)..(2865): 891254mologous to Homo sapiens putative p150,accession number U93563,Smith-Waterman Score=2651.

SEQ ID NO: 19644 - DNA, 1743 bp, Homo sapiens; identical to SEQ ID NO: 8655
  SIMILAR (7)..(777): 861254mologous to Homo sapiens putative p150,accession number U93572,Smith-Waterman Score=1140.

SEQ ID NO: 19645 - DNA, 1500 bp, Homo sapiens; identical to SEQ ID NO: 4226
  SIMILAR (865)..(1389): 921254mologous to Homo sapiens putative p150,accession number U93563,Smith-Waterman Score=833.

SEQ ID NO: 19646 - DNA, 3195 bp, Homo sapiens; identical to SEQ ID NO: 3987
  SIMILAR (424)..(3150): 951254mologous to Homo sapiens putative p150,accession number U93563,Smith-Waterman Score=4504.

SEQ ID NO: 19647 - DNA, 6143 bp, Homo sapiens
  SIMILAR (5121)..(3244): 191254mologous to Homo sapiens dentin phosphoryn,accession number AF094508,Smith-Waterman Score=151.
agaattcattgttctagcattcaggaagtgtctatatagggtgtggaggaaaaaaaaggagatgtgggacatttcagagcagacactgcccagactagatcttttatccttccatgcacatgcacatgtacaccttagttccattataagcttttggtgaaaaaagtaaagcattttattgaaaaagcctcacagttctgactctttgtcattttcatccaggtagtattcatcatctgtggttgtgtctgtgtcacaatctgagtccactgggtcatcctcatagatattaagcggttcacttggagataagccatcttctggcacctgactactgggagaatttgagcttaatgactctgaggggttgggagggttcctcaaatcatcttttaggaagccagggttcttaagaaaacttggtttccataatcttccttgtgtaagtgacctctttacattttctaagaaagctaactgttgttctttcccaaagatcccatagtcgataggtctgtatatagatattgcagacctgggacctgtttttgtcccgctgcgataagcccaactttcatttccatcacaggaggggagttcagaaaaagatctgaatcttcgactgtacccattgttgacagagaattcattcccaagggtcagtcgactcagggcattgtcaatagaagtgctttcagaaaaatggcgctccctgacttttggaggatggctttttcgtagtagatcgccatgaacattaatgctttttaaactctttgaacgatagaggtgtggctcaggttcccactccagagatgaagcactcctttgttgctgcagaaaactggccagtggactgcttactctagatttctgtgcaggctccagtggaaaaggagggctcagcctcctctgattgtcagagaattctgcttccctgaggctggtgaatgtgatgggtgatggggctcctgattctcttactaaattctgagctgctgtgacgtctttagaattctcatgctttgatggtgattctgagacgtttttaaactcattctgatgtcgttgtgaaatgctgttagacttctggttgctgacgtgtgtagaaggttctctgttgggtagtacagtaatggggagaaggttctcggatttcttcacatgctttctgttctcactcaacctgctttcgccaatggactctgcagattttggagtaggctcagggaacagtgggttgcactccactgtgccaagagataaatggtcaaagccagatctgcttccactttgggggaagatagtagctacatgtcttctggggcttacatctttagctgggaattttctgctggctttagacatggctgccaatctgtgtttaactgaagatctattttccccctttactaggtcatccaagttggttttatttttgtttccttcaggaagtgaaggttgatcccaagctgacttctgcatttcatcttcagccttcctgctctctgtcatatttgcctcctgacttctttgaggtaattctcttggttcagactgcagactctctaagtttggttcatctgactgagtctcctcaccaagctgtagtttatgcaatgctggagtaagggcaaagacttgactctctgagtgagaaagtgttttattagtcattttttggcagttggttccaatgtcccctctgccttccctaggctgtgatccactggagccatcacctacagctgtggatgtgtgatctttctggggacacttgccacttccagtaaatggaatggctctaccactccctgtacactcccaagaacttcttctagtttgggaatttccaatattaacttctgaaagagctggaagactagagggaccactgttacttgaattaatggattgttgacaattttcagatttttcttcggatacattttttctctgaagcatcaatgaagtatgcagggtttcactttgcaactttttgcctctttccttcttgttttctgaatcacctagaggtgttttagctaaattatctgaaaaaatctctctagctttagattcctcttcaggaagagaaacagctgcctcaacagaagccatttcctgtaatgtaggagctaggggccccctatttgataatcggaaggcagtcatattttcagtggtgagcgtctgatcagagttgacggacatctttagattttcacatgaaggtgttcctgactgctctcgtgtagaataattctgtttgtctttttctaaagcgttaggaaatgtttcagtctccacttgaggtgattctataagtaaattagtattttgtgtatactgttgaaggaggttacagaattttttgctgggtttcctcggtagagtgtaatatattgagaccacctccagacattttacattatcttcatcaccagaaacagaaaacgtactagtcgtcttaactttatgtaatgttttcccacgttcttttcctgacaagtctgagcaaaaaggtaaagggtcttcatttgaaagagcaaatacacttctcctggaggcagccattttaccctctttctcagtgtattcttggaagttttccttttggtgttgtcttttggttaaagaacaatctctaacagatgagtcactttccacagggctaatgattctctcccaagcccttggtgttagctcagaagcatccatgcctgaggtcaatggcttttttcttccttctcttccagttgaggcatgtggctcccctgagggacatgacatagccctgttgatgaggaatggaagtggtccttttctaacggaagtagatccactgctttttacatttgtcattctctctgtggcttcaggtgcttccagggctgagtctgaaaggactttggaacattcattcgctgactcaggagaactgggactaaatttgtttaacatatagttccccattgcatcttccacattatttttgatttggaagggaggtggcccattcctcaatgaagcagccattattttacttcctgactgcctgccatgtatgagaaaactgcttgattttcttggcaaggtacaataaattgtgtcaagttcagaaactttggaattgctttgatttgcttcaatgaggctcctgtgatcactggtgggtactgatatactttctgttttgcttaacttttcaatacaggatatatgatgccttatttttccttttcctctttcattcctaaaaggagagtgtgaatggcatttgacatcaaccacttcatcatgtgtaggcacaggactatcatttctctcttggttttctgagtggcttacaataaactgattcttttggttcttcccagcattgtctttttcttctctttctcctagcgatggatctttgtctgaaggacttctcctggagaacactgtagtagatggaaccacaggagcatcaagggaagaattctttgatggtgaggaatctggtagtgcagctgatgacagatctaaagaatcacacgaggtcttgtggccaggagttaacttgcattttgagtattgtgcattttgagtatcagtcagtgcagagctccagtggttatttgtaataattcttgaaatatcttcattatttacagttaattcctggtgacaaccttggtctgtcctggggaaagatggtggtgttctgtgttcctgaatgaaaggaagggaagctgttgagccaagttttctgttttcagtaaacctcttatcttgtttaatgtcattggatttatctgtgtgcggtatatacattttggaggtatctttcctggaaaagactctgggtgacttttttgaacttattatggtagatgcattaaaaccaaacccgttgctcttggctgagtcctgggataagggattttgaaaatcaggtaaagagtttgagatccctgtctgtgaaacaggttggggtatttcacctgccttgtttgtctggtccatcttgcttagctgtttgtcttcttctgaaatagattcatttaagtctttctcattatttacttctgtgaccaagatattgggctggcttttggcaagaggcagagagtcaactgaattgctgttggtcacagtgacttctgtatggcttctcattggatgagaggcaggcttatttggaaaaattttctgcaaagtgactgtgggattctgcaagttgggactctgaggattccttctgtcatcagaaatctgggaaaaggaagttttgaatgaggatgctagagtctgagcaattccaaatgaggaagcttctttgtttatatgtacttctacaggagaactgtcctgttgacttaccaactcactagatttgacgtgatagcttgaaccagtcatggagcaaacatttggtgtgccaaaatgaggagtcaactgggtctcattaccatgtgataccaccatgctatccagtgtggatctctgaaaatcaaactgccaaggatgtggctcttcttggcctctggaaacatctgttccataaccagaagaaaatgattcccagtgttcagaagaaacattatggccatgaatggctgatacactatttgcttccatggaaatcatttcaaagtctctgtcagaagaactgaatgatttcctgcttcgatgaaagtcagaccagaaagaatgtcctttctcttggccccaaaaaggaccttgtccaaatctcctctgttctccgcttcgtccaaaggtattgctgaagaaagatctggtaaatgtgttgctttgatggtagaatggcatgttctctgagttctcaaaagtgtcgggactcattgcattctccatgggagcatttaaactaacacgttggtaaacattctgtgaatggtacgattcatatctcttattctcctgaaaacccctgggatacacatacttgtcagcgggatcaatttccattggtgatggtgccctcaggaactcttcctggttctccctgtctctagaggaatctgatctgttccatatgatggatgataaaggagttctctttggactctgctggtgccttggtggtataaacccactcttgctctgagttgtggctggaaaatgtaagcttcttgctgtgaaatgccctgtggctggtaaggccgaccgttgcctgctgtcaaaacacagcgaagtactgccaaaagtattcttttgcacataatcttctttaaagactctgggctcccttgtcctatacatatcataaattgtgcttgtcctaggagaaaaggttttaaaaccttccctaggagttcctggtcttaggatgtcatagatagacatattggaagtttcattatagtgttttttgtgcctttctgtgatattaccatgtctgttaccactggaataaaagtgaccgaactgtgttcttgatccatagttgaggggtgttctggtattcactgagcttgcagactgttcctgagccaatttgctatccaagtcatctaaaacttggaaaaactcattctccagcagtgaagcatcccacggtggaggcatgccactctcctccctcatgactgctggctttgggacaaatgtactgtcaactagatgattttccagaggtgaattgtatatttttgcctgcacagcagctcccctcacaggcataggaggtcctgcatggccatcacatcctttctgtcccagtgatggaagctttgaagtctcctttccagatttcctgaatgagaacagggaagcaaatgacgatctgaagctcatccgggaagaaaaaggtgtcggctttttttgattagttacatttttagatcttgatgtaggtaattctatcggatcattttttgccatctccttacttagcctgtatgtaagtggttgttttaacatttggctaacatctgtttcattgcaaaacttttttctttgaatttcttcaaaccattcaccagtcactccctgaagccatctgatatccctctttgtcttctgaagtttgctgatcctgtccttctcggccctctgtaactcctcattcctttccagcacctgaaggatcttcctggcctcttcgtcatttaagaaacttaatgacatgtttc

SEQ ID NO: 19648 - DNA, 3214 bp, Homo sapiens
  SIMILAR (1)..(1821): 851254mologous to Homo sapiens putative p150,accession number U93563,Smith-Waterman Score=2589.
atggtaaagggatcaattcaacaagaagagctaactatcttaaatatatatgcacctaatacaggagcactcagattcataaagcaagtccttagagacctacaaagagacttagactcccacacaataataatgggagattttcacaccccactgtcaacattagacagatcaacaagacagaaggttaacaaggatatccaggaattgaactcagctctgcaccaagaggacctaatagacatctacagaactctccaccccaaatcaacagaatatacatttttttcagcaccacaccacacctattccaaaattgaccacatagttggaagtaaagctctcctcagcaaatgtaaaagaacagaaattataacaaactgtctctcagaccacagtgcaatcaaactagaactcaggattaagaatctcactcaaaaccgctcaactacatggaaactgaacaacctgctcctgaatgactactgggtacataacgaaatgaaggcagaaataaagatgttctttgaaaccaacgagaacaaagacactacataccagaatctctgggacacattcaaagcagtgtgtagagggaaatttatagcactaaatgcccacaagagaaagcaggaaagatctaaaattgacaccctaacatcacaattaaaagaactagagaagcaagagcaaacacattcaaaagctagcagaaggcaagaaataactaaaatcagagcagaactgaaggaaatagagacacaaaaaacccttcaaaacattaatgaatccaggagctggttttttgaaaggatcaacaaaattgatagaccactagcaagactaataaagaaaaaaagagagaagaatcaaatagatgcaataaaaaatgataaaggggatatcaccaccgatcccacagaaatacaaactaccatcagagaatactacaaacacctctatgcaaataaactagaaaatctagaagaaatggataaattcctcaacacatacactctcccaacactaaaccaggaagaagttgaatctctgaatagaccaataacaggagctgaaattgtggcaataatcaatagcttaccaaccaaaaagagtccaggaccagatggattcacagccgaattctaccagaggtacaaggaggaactggtaccattccttctgaaaccattccaatcaatagaaaaagagggaatcctccctaactcattttatgaggccagcatcattctgataccaaagccgggcagagacacaacaaaaaaagagaattttagaccaatatccttgatgaacattgatgcaaaaatcctcaataaaatactggcaaaacgaatccagcagcacatcaaaaatcttatccaccatgatcaagtgggcttcatccctgggatgcaaggctggttcaatatacgcaaatcaataaatgtaatccagcatataaacagagccaaagacaaaaaccacatgattatctcaatagatgcagaaaaagcctttgacaaaattcaacagcccttcatgctaaaaactctcaataaattagacgacatgattgtatatctagaaaaccccatcgtctcagcccaaaatctccttaagctgataagcaacttcagcaaagtctcaggatacaaaatcaatatacaaaaatcacaagcattcttatacaccaacaacagacaaacagagagccaaatcatgagtgaactcccattcacaattgcttcaaagagaataaaatacctaggaatccaacttacaagggatgtgaaggacctcttcaagggagaaccacaaaccactgctcaacgaaataaaagaggatacaaacaaatggaagaacattccatgctcatgggtaggaagaatcaatatcgtgaaaatggccatactgcccaaggtaatttacagattcaatgccatccccatcaagctaccaatgactttcttcacagaattggaaaaaactactttaaagttcatatggaaccaaaaaagagcccgcatcgccaagtcaatcctaagccaaaagaacaaagctggaggcatcacactacctgacttcaaactatactacaaggctacagtaaccaaaacagcatggtactggtaccaaaacagagatatagatcaatggaacagaacagagccctcagaaagaacgccgcatatctacaactatctgatctttgacaaacgtgagaaaaacaagcaatggggaaaggattccctgtttaataaatggtgctgggaaaactggctagccatatgtagaaagctgaaactggatcccttccttacaccttatacaaaaatcaattcaagatggattaaagacttaaacgttagacctaaaaccataaaaaccctagaagaaaacctaggctttaccattcaggacataggcatgggcaaggacttcatatctaaaacaccaaaagcaatggcaacaaaagccaaaattgacaaatgggatctaattaaactaaagagcttctgcacagcaaaagaaactaccatcagagtgaacaggcaacctacaaaatgggagaaaattttcgcaacctactcatctgacaaagggctaatatccagaatctacaatgaactcaaacaaatttacaagaaaaaaacaaacaaccccatcaaaaagtgggcgaaggacatgaacagacacttctcaaaagaagacatttatgcagccaaaaaacacatgaaaaaatgctcaccatcactggccatcagagaaatgcaaatcaaaaccacaatgagataccatctcacaccagttagaatggcaatcattaaaaagtcaggaaacaaccggtgctggagaggctgtggagaaataggaacacttttacactgttggtgggactgtaaactagttcaaccattgtggaaggcagtgtggcgattcctcagggatctagaactggaaataccatttgacccagccatcccattactgggtatatacccaaaggactataaatcatgctgctataaagacacatgcacacgcaggaaacagcttgactgtgcagagcccgtggagcccagaaaagtcggggatggggagtggtccctgaccaaatggacacgccctggctccagagctctgccctggcccccagagcaagccaagccttacccaccgaccctgccaactctagcccaggacttttag

SEQ ID NO: 19649 - DNA, 2610 bp, Homo sapiens
  SIMILAR (1723)..(2163): 891254mologous to Homo sapiens putative p150,accession number U93563,Smith-Waterman Score=655.
atgacaaatcactgtttcaagagacaatttcaaaagcatgagatgctgctgaaagaggattgtgaaccaggggacagctctttcattctgggagagcaacattgggagaatatgctctgtgagcccaaacagcatcctccccagcagggtgagggcagagctgcagggcaggcccagaacccactcaacacagacgtcagccctggagctggtgcaaaggagtctgaggagaaaatttaccagcatctgaattacacttatttcaaacaaaaatgcatgtcctgctctggattcaccttcagtagctatgctatgcactgggttcaccaggctccaggaaaaggtctggagtgggtatcagctattggtgctggtggtggcacatactatgcagactccgtgaagggccgattcaccatctccagagacaatgccaagaactccttgtatcttcaaatgaacagcctgagagccgaggacatggctgtgtattactgtgcaagagacacaattgatgcttacggagatgaaaagccctcaaccattgtcaccaggatcagagtattgaggaaactcagggatacctgccatatgggagaggctgataggactttcctctctcccattgctcagcaccctccagtgtgtcatgtggagactcacctgggaatgcaagtggccaacagtagtgaagaggatgagcttgtgtggtcaaaatgggatgtggatgtgaaatttatcctgtgctgtgcaaagtaccacagagagcagctgcaggagtcagccctggacctgaagagcctgcactgcccctctgcatcacctgcactgtttctggccactccatcacaaccagtccttactactgggcctggatctgccagctcccagggaggggctgaaatgggtgcccacttcctggtgcagctggtgcagtctggggctgagacccgggaatcctttgaccctgccctccctgaaatggagacacagaggacagatgagcaatgccgggcggtgcacccaggaccacaaaaagaaagacatggaaatatgtcccctcccctcctcatgaaaggcagctcatcccctgttccttcaggccccggtgaggagccatcccatagagagcctgtctctttcatctgtggcaggtgcatcctgctgacacttttacttggtgattgtttgtggggtgaaggggcttggacacagggggatgttctccaaccttctgaccgagcctccttcttagctatgggtgtcaacaccacagtacagcaggtgggtgacttgtctgggtatttccccaattctgtaggaaaagcctgcaagtgccgggagtttcacactctcacacccttagcacacacatcctcaacaactcatgaaacatttccaggtgcccagtgtgaggtgcagctggtggagtctgggggaggcttggtacagcctggggggtccctgagactgtcctgtccagactctggattcaccttcagtaaccactacatgagctgggtccgccaggctccagggaagggactggagtggatttcatacattagtggtgatagtggttacacaaactacgcagactctgtgaagggccgattcaccatctccagggacaacgccaataactcaccgtatctgcaaatgaacagcttgagagctgaggacacggctgtgtattactgtgtgaaacacacagcgaggggaaaactagagaagcaagagcaaacatattcaaaagctagcagaaggcaagaaataactaagatcagagcagaactgaaagagacagagacacaaaaaacccttcaaaaaatcaatgaatccaggagctggttttttgaaaagatctacaaaattgatagaccactagcaagactaataaagaagaaaagagagaaaaatcaaatagatgcaataaaaaatggtaaaggggatatcaccaccgatcccacagaaatacaaactaccctcagagaatactataaacacctctatgcaaataaactagaaaatctagaaggaatggataaattcctggacgcatacaccctcccaagactaaaccaggaagaagttgaatccctgaatagaccaataacaggccctgaaattgaggcaataattaatagactccaaccaaaaaaagtccaggaccagacagattcacagcggaattctaccagagtgtcggatgttctggccagggcaatcaggcagaagaaagaaataaagtgtattcaattaggaaaagaggaagtcaaattgtccctctttgcagatgacatgattgtatatttagaaatccccatcatctcagcccaaaatctccttaagctaataagcaacttcagcaaagtctcaggatacaaaatcagtgtgcaaaaatcacaagcattcttatacaccaataacagacaaacagagagccaaatcatgagtgaactcccattcacaattgcttcaaagagaataaaatacctaggaatccaacttacaagggatgtgaaggatctcttcaaggataactgcaaaccactgctcaacgaaataaaagaggatacaaacaaatggaagaacattccatgctcatga

SEQ ID NO: 19650 - DNA, 1254 bp, Homo sapiens
  SIMILAR (598)..(1251): 901254mologous to Homo sapiens putative p150,accession number U93572,Smith-Waterman Score=998.
atgtgggactatgtgaaaagaccaaatctacgtctgattggtgtacctgaaagtgacggggagaatggaaccaagttggaagacactctgcaggatattatccaggagaacttccccaatctagcaaggcaggccaacattcaaactcaggaaatacagagaacgccacaaagatactcctcgagaagagcaactccaagacacataattgtcagattcactaaagctgtaatgaaggaaaaaatgttaagcgcagccagagagaaaggttgggttacccacaaggggaagcccatcagactaacagctgatctcttggcagaaagtctacaagccagaagagagtgggggccaatattcaatattcttaaaaaaaaagaactttcaacccagaatttcatatccagccaaactaagcttcaaaatctagaagaaatggataaattcctggacacatacactctcccaagactaaaccaggaagaagctgaatctccgaatagaccagtaacaggctctgaaattgtggcaataattaatgcttaccaaccaaaaaaagtccaggaccagatggattcacagccgaattctaccagagtgttgaaagttctggccagggcaatcaggcaggaaaaggaaataaagggcattcaattaggaaaagaggaactcaaattgtccctgtttgcagatgacatgattgtatactcagaaaaccccagcctctcagcccaaaatctcctgaagctgataggcaacttcagcaaagtctcaggatacaaaataaatgtacaaaaatcacaagcattcttatacaccaataacagacaaacagagagccaaatcatgagtgaactcctattcacaattgcttcaaagagaataaaatacctaggaatcaaacttacaagggatgtgaaggacctcttcaaggagaactacaaaccactgcttaatgaaataaaagaggatacaaacaaattgaagaacattccatgctcatggataggaacaatcaatatcgtgaaaatggccatactgcccaaggtaatttatagattcagtgccatccccatcaagctaccaatgactttcttcacagaattggaaaaaactactttaaagttcatatggaaccaaaaaacagcccacgttgccaagtcaatcctatgccaaaagaacaaagctggaggcatcatgctacctgtcttcaaactataccacaaggctacagtaaccaaaacagtatggtaa

SEQ ID NO: 19651 - DNA, 4116 bp, Homo sapiens
  SIMILAR (1)..(798): 911254mologous to Homo sapiens putative p150,accession number U93572,Smith-Waterman Score=1228.
  misc_feature (1)...(4116): n = a,t,c or g
atggataaattccttgacacatacaccctcccaagattaaaccaggaagaagttgaatctctgaatagaccaataacagactttgaaattgaggcaataatcaatagcttaccaaccaaaaaaagtccaggaccagatggattcacagccgaattctaccagaggtacaaagaggagctggtaccattccttctgaaactattccaatcaatagaaaaagagggaatcctctctaactcattttatgaggccagcatcatcctgataccaaagcctggcagagacacaacaaaaaaagagaattttagaccaacatccttgatgaacatcgatgcaaaaatcctcaataaaatactggattcggcaaaccgaatccagcagcacatcaaaaagcttatccaacatgatcaagtgggcttcatccctgggttgcaaggctggttcaacatacgcaaatcaataaatgtaatccagcatataaacagaaccaaagacaaaaaccacatgattatctcaatagatgcagaaaaggcctttgacaaaactcaacaacccttcatgctaaaaactctcaataaattcggtgttgatgggacatatctcaaaataataagagctatctatgacaaacccacagccaatatcatattgaatgggccaaaactggaagcattccctttgaaaacgggcacaagacagggatgccctctctcaccactcctattcaacacagtgttggaagttctggccagggcaatcaggcaggagaaggaaataaaggcccaaaatctcctcaagctgataagcaacttcagcaaagtctcaggatacaaaatcaatgtacaaaaatcacaagcattcttatacaccaataacagacaaacaaagagccaaatcatgagtgaactcccattcacaattgcttcaaagagaataaaatacctaggaatccaacttacaagggatgtgaaggacctcttcaaggagaactacaaaccactgctcaatgaaataaaagaggatacaaatgaatggaagaacattccatgctcatgggtaggaagaatcaatatcatgaaaatggccatactgcccanagaattggaaaaaactgctttaaagttccaatggaaccaaaaaagagcccgtgtcgccaagtcaatcctaagccaaaagaacaaagctggaggcatcatgctacctgacttcaaactatactacaaggctacagtaaccaaaacagcatgtgtaacaggctctgggccagaaactctcaaaccaattgataataacaagctcaagttcaatgccattggctgtctgcagagccccagggtggacaaggagggccagctgtgtgcagcgtctgttgtgtacagcattcaggacaatgtcctcttggatcccgagctctccacacagacagagcagataaaggaagggcactgctgtgggaccgccttccccatgcccagcgagcctcttctgcatctctttctgctgtggcaaagtgggttaaacagcgcgcggatttgcgaggaacatagccaacaaatgagatatcaaacgcagcttcccatagaatactataagcgcgtgtgtgcaaataaactagaaaatctagaagaaatggataaattcctcgacacatacactctcccaagactaaaccaggaagaagttgagtctctgaatagaccaataacagactctgaaagtgaggcaataatcaatagcttaccaaccaaaaaaagtccaggaccagatggattcacagccaaattctaccagaggtacaaggaggaactggtaccattccttctgaaactattccaatcaatagaaaaagagggaatcctccctaactcattttatgaggccagcatcatcctgataccaaagcctggcagagacacaacaaaaaaagagaattttagaccaacatccttgatgaacatcgatgcaaaaaccctcaataaaatactggattcggcaaaccgaatccagcagcacatcaaaaagcttatccaacatgatcaagtgggcttcatccctgggttgcaaggctggttcaacatacgcaaatcaataaatgtaatccagcatataaacagaaccaaagacaaaaaccacgtgattatctcaatagatgcagaaaaggcctttgacaaaattcaacagtgcttcatgctaaaaactctcaataaattaggtattgatgggacgtatctcaaaatagacgacatgattgtatatctagaaaaccccattgtctcagcccaaaatctccttaagctgataagcaacttcagcaaagtctcaggatacaaaatcaatgtacaaaaatcacaagcattcttatacaccaacaacagacaaacagagagccaaatcatgagtgaactcccattcacaattgcttcaaagagaataaaatacctaggaatccaacttacaagggatgtgaaggacctcttcaaggagaactacaaaccactactcaaggaaataaaagaggatacaaacaagtggaagaacattccatgctcatgggtaggaagaatcaatattgtgaaaatggccatactgcccaaggtaatttacatgttcgctgcgcttccggtggggggcgtcgcggcctgctcggtggttcgtctgttgcgtcgtctcggcgcgagcggcctccgtgttggcgggttgggtgctcgtcgcctattgccgcggcgcttggcggatgttgatgagtgtgcagaaaacataaacctctgtgagaacggacagtgccttaatgtcccgggtgcatatcgctgcgagtgtgagatgggcttcactccagcctcagacagcagatcctgccaagatatagatgagtgcagcaatggtgataatctctgccagcggaatgcagactgcatcaatagtcctggtagttaccgctgtgaatgtgccgcgggtttcaaactttcacccaatggggcctgtgtagatcgcaatgaatgtttagaaattcctaacgtttgcagtcatggcttgtgtgttgatctgcaaggaagttaccagtgcatctgccacaatggctttaaggcttctcaggaccagaccatgtgcatggcggcacgcaaccccacactcacgacactcacgacacgacgaagagcacgcacactcaccagcctcgcgcaacaccgacacaccaccatcacgccacgcagcagcacctacacagcaccgcagacactacctaagggtcaagggggaatccaagaagtcaaaaaccgggccataaccacggggcccaaagcccccactcttgcaactgcacagcgaacacgccgacatataatccaaccacccagtccggaaaacacccccaatcaacagcccataacacacccccacacaattcacaacccaatcggaatggaggcacccagcatgaaacgggaccacaagcaagccatacaaccaaccgagatctccagcacgccgcaagacacccatacaatgttacagctgatgaaggaggcaggctgctataatggaatcacatccagggatgattttcctgtgactgaagtgctgaaccaggtttgcccttccacatggcgaggtgcctgcaagacggcggtgcagctgctgtttggccaggctggactgagctttatgtggaagatagctggtttcggtttcattaaagctgtattcagtcgcccaaagtttcataaggtggagggagagaagattgagaatggggagagctcctctgggctctatgttgatgaacttagcctttgctctctcctcagaaattatagaaaatggtctgtatctgaattccacggcctttgtagtagtggagtaggtatcactgtggatggaagagacatgagaaaaagcttttgctaccgaagctataatggaaccacttgtgagaatgagttgcctttcaatgtgacaaaaaggatgtgctgctgcacatataatgtgggcaaagcctggaacaaaccttgtgaaccatgcccaactccaggaacagggcctgacctcgttgctgctgtcaagcagagaaggtatgaagggatttctaaaccaaggtggggagagaagggcatgtga

SEQ ID NO: 19652 - DNA, 2628 bp, Homo sapiens
  SIMILAR (1087)..(2463): 961254mologous to Homo sapiens unknown,accession number AF148856,Smith-Waterman Score=2334.
atgggagactttaacaccccactgtcaacattagacagatcaatgagacagaaagtcaaaaaggatacccaggaattgaactcagctctgcaccaagcagacctaatagacatctacagaactctccaccccaaatcaacagaatatacatttttttcagcaccacaccacacctattccaaaattgaccacatacttggaagtaaagctctcctcagcaaatgtaaaagaacagaaattataacaaactatctctcagacggcagtgcaatcaaactagaactcaggattaagaatctcactcaaaaccgctcaactacatggaaactgaacaacctgctcctgaatgactactgggtacctaacgaaatgaaggcagaaataaagatgttctttgaaaccaacgagaacaaagacacaacataccagaatctctgggacgcattcaaagcagtgtgtagagggaaatttatagcactaaatgcccacaagagaaagcaggaaagatccaaaattgacaccctaacatcacaattaaaagaactagaaaagcaagagcaaacacattcaaaagctagcagaaggcaagaaataactaaaatcagagcagaactgaaggaaatagagacacaaaaaacccttcaaaaaattaatgaatccaggagctggttttttgaaaggatcaacaaaatagatagaccgctagcaagactaataaagaaaaaaagagagaagaatcaaatagatacaataaaaaatgataaaggggatatcaccaccaatcccacagaaatacaaactaccatcagagaatactacaaacacctctacgcaaataaactagaaaatctagaagaaatggataaattccttgacacatacactctcccaagactaaaccaggaagaagttgaatctctgaatagaccaataacaggatctgaaattgtggcaataatcaatagcttaccaaccaaaaagagtccaggaccagatggattcacagccgaattctaccagaggtacaaggaggaactggtaccattccttctgaaactattccaatcaatagaaaaagagggaatcctcctgttggaagttctggccagggcaattaggcaggagaaggaaataaagggtattcaattaggaaaagaggaagtcaaattttccctgtttgcagacgacatgattgtatatctagaaaaccccattgtctcagcccaaaatctccttaagctgataagcaacttcagcaaagtctcaggatacaaaatcaatgtacaaaaatcacaagcattcttatacaccaacaacagacaaacagagagccaaatcatgagtgaactcccattcacaattgcttcaaagagaataaaatacctaggaatccaacttacaagggatgtgaaggacctcttcaaggagaactacaaaccactgctcaaggaaataaaagaggatacaaacaaatgcaagaacattccatgctcatgggtaggaagaatcaatatcgtgaaaatggccatactgcccaaggtaatttacagattcaatgccatccccatcaagctaccaatgcctttcttcacagaattggaaaaaactactttaaagttcatatggaaccaaaaaagagcccgcatcgccaagtcaatcctgagccaaaagaacaaagctggaggcatcacgctacctgacttcaaaccatactacaaggctacagtaaccaaaacagcatggtactggtaccaaaagagagatatagatcagtggaacagaacagagccctcagaaataacgccgcatatctacaactatctgatctttgacaaacctgagaaaaacaagcaatggggaaaggattccctatttaataaatggtgctgggaaaactggctggccatatgtagaaagctgaaactggatcccttccttacaccttatacaaaaatcaattcaagatggattaaagacttaaacgttagacctaaaaccataaaaaccctagaagaaaacctaggcaataccattcaggacataggcatgggcaaggacttcatgtctaaaacaccaaaagcaatggcaacaaaagacaaaattgacaaatgggatctaattaaacttaagagcttctgtacagcaaaagaaactaccatcagagtgaacaggcaacctacaaaatgggagaaaattttcacaacctactcatctgacaaagggctaatatccagaatctacaatgaactcaaacaaatttacaagaaaaaaacaaacaaccccatcaaaaagtgggcgaaggacatgaacagacacttctcaaaagaagacatttatgcagccaaaaaacacatgaaaaaatgctcatcatcactggccatcagagaaatgcaaatcaaaaccacaatgagataccatctcacaccagttagaatggcgatcattaaaaagtcaggaaacaacagtctattaattaccatcagagaatactataaacacctctatgcaaataaactagaaaatctagaggaaatggataaattcctggacacatacaccctcccaaaactaagtgaggaagaagttgaatctctggatatgctatccttttatacaactggcagcaaa

SEQ ID NO: 19653 - DNA, 2970 bp, Homo sapiens
  SIMILAR (187)..(2928): 921254mologous to Homo sapiens putative p150,accession number U93563,Smith-Waterman Score=4417.
atgactgacgagttgagagaagaaggcttcagacgatcaaactactctgagctacaggaggaaattcaaaccaaaggcaaagaagttaaaaactttgaaaaaaatttagacgaatatataaccagaataaccaatacagagaagtgcttaaaggagctgatggagctgaaagccaaggctcgagaactaccaccacaccacacctattccaaaattgacctcacagttggaagtaaagctctcctcagcaaatgtaaaagaacagaaattataacaaactgtctctcagaccacagtgcaatcaaactagaactcaggattaagaaagtcactcaaaaccactcaactacatggcaactgaacaacctgctcctgaatgactactgggtacataacgaaatgaaggcagaaataaagatgttctttgaaaccaatgagaacaaagacacaacataccagaatctctgggacacattcaaagcagtgtgtagagggaaatttatagcactaaatgcccacaagagaaagcaggaaagatccaaaattgacaccctaacatcacaattaaaagaactagaaaagcaagagcaaacacattcaaaagctagcagaaggcaagaaataactaaaatcagagcagaactgaaggaaatagagacacaaaaaacccttcaaaaaattaatgaatccaggagctggttttttgaaaggatcaacaaaattgataggccgctagcaagactaataaagaagaaaagagagaagaatcaaatagatgtaataaaaaatgataaaggggatatcaccacagatcccacagaaatacaaactaacatcacagaatactacaaacacctctatgcaaataaactagaaaatctagaagaaatggataaattcctcaaaacatacgccctcccaagactaaaccaggaagaagttgaatctctgaatagaccaataacaggctctgaaattgtggcaataatcaatagcttaccaaccaaaaagagtccaggaccagatggattcacagccgaattctaccagaggtacaaggaggaactggtaccattccttctgaaactattccaatcaatagaaaaaaaggaaatcctccctatctcatttgatgaggccagcatcatcctgttatcaaagccgggaagagacacaaccaaaaaagagaattttagaccaatatccttgatgaacattgaggcaaaaatcctcaataaaatactggcaaaccggatccagcagcacatcaaaaagcttatccaccatgatcaagtgggcttcatccctgggatgcaaggctggttcaatatacgcaaatcaataaatgtaatccagcatgtaaacagaaccaaagacaaaaatcacatgattatctcaatagatgcagaaaaggcctttgccaaaattcaacaacccttcatgctaaaaactctcaataaattaggtattgatgggacgtatctcaaaataataagagctatctatgacaaacccacagccaatatcatactgaatgggcaaaaactggaagcattccctttgcaaactggcacaagacagggatgccctctctcaccactcctattcaacatagtgttggaagttctggccagggcaatcaggcaggagaaggaaataaaggatgacatgattgcatatctagaaaaccccattgtctcaacccaaaatctccttaagctgataagcaacttcagcaaagtctcaggatacaaaatcaatgtacaaaaatcacaagcattcttatacaccaataacagacaaacagagagccaaatcatgagtgaactctcattcacaattgcttcaaagagaataaaatacctaggaacccaacttacaagggacgtgaaggacctcttcaaggagaactacaaaccactgctcaatgaaataaaagaggatacaaacaaatggaagaacattccatgctcatgggtaggaagaatcaatattgtgaaaatggccatactgcccaaggtaatttatagattcaatgccatccctatcaagctaccaatgactttcttcacagaattggaaaaaactactttaaagttcatatggaaccaaaaaagagcccgcattgccaagtcaatcctaagccaaaagaacaaagctggaggcatcacgttacctgacttcaaactacactacaaggctacagtaaccaaaacagcatggtactggtaccaaaacagagatatagatcaatggaacagaacagagccctcagaaataacgccgcatatctacaactatctgacctttgacaaacctgagaaaaacaagcaatggggaaaggaatccctatttaataaatggtgctggggaaactggctagccgtatgtagaaagctgaaactggatcccttccttatatcttatacaaaaattaattcaagatggattaaagacttaaatgttagacctaaaaccataaaaaccctagaagaaaacctaggcaataccattcaggacataggcatgggcaaggacttcatgtctaaaacaccaaaagcaatggcaacaaaagacaaaattgacaaatgggatctaattaaactaaagagcttctgcacagcaaaaggaactgccatcagagtgaacaggcaacctacagaatgggagaaaacttttgcaacctactcatctgacaaaaggctaatatccagaatctataatgaactcagacacatttacaagaaaaaaacaaacaaccccatcaaaaagtgggcaaaggacatgaacagacactgctcaaaagaagacatttatgcagccaaaaaacacatgaaaaaatgctcatcatcactggccatcagagaaatgcaaatcaaaaccacagtgagataccatctcacaccagttagaatggcgatcattaaaagtcaggaaacaacaggtgctggagaggatgtggagaaatag

SEQ ID NO: 19654 - DNA, 4142 bp, Homo sapiens
  SIMILAR (1)..(1134): 911254mologous to Homo sapiens putative p150,accession number U93569,Smith-Waterman Score=1770.
  misc_feature (1)...(4142): n = a,t,c or g
atgggagactttaacaccccactgtcaacattagacagatcaatgagacagaaagttaacaaggatatccaggaattgaactcagctgtgcaccaagtggacctaatagacatctacagaactctccaccccaaatcaacagaatatacattcttcttagcaccacatcgtacttattccaaaattgaccacatagttggaagtaaagcactcctcagcaaatgtaaaagaacagaaattataagaaattgtctctcagaccacagtgcaatcaaactagaactcaggattaacaaactcactcaaaactgctcaactacatggaaactgaacaacatgctcctgaatgactactgggtacataatgagatgaaggcagaaataaagatgttctttgaaaccaatgagaacaaagacacaacatacaagaatctctgggacacatttaaagcagtgtgtagagggaaatttatagcactaaatgcccacaagagaaagcaggaaagatctaaaattgacaccctaacatcacaattcaaagaactagagaagcaagagcaaacacattcaaaagctagcagaaggcaagaaataactaagatcagagcagaactgaaggagatagagacacaaaaaacccttcaaaaaatcaatgaatccaggagctggttttttgaaatgatcagcaaaattgatagaccgctagcaagactaataaagaagaaaagagagaagaatcaaatagacacaataaaaaatgataaaggggatatcatcaccgatcccacagaaatacaaactaccatcagagaatactataaacacctctatgcaattaaactagaaaatctagaagaaatggataaattcccatacacaaacaccctcccaagattaaatgaggaagaaattgaatccctgaatagaacaataacaggatctgaaattgaggcaataattaagagcctaccaaccaaaaaaagtccaggaccagatggattcacagccaaattctaccagaggtacaaagaggagctggtaccattccttctgaaactattccaatcaatagaaaaagagggaatcctccctaattcattttatgaggccagcatcatcctaataccaaagcctgtgttggaagttctagccagggcaatcaggcaggagaaagaaataaagggtattcatttaggaaaagaggaagtcaaattgtccctgtttgcagatgatatgattgtacatttagaaaatcccattttctcagcccaaaatctccttaagctgataagcaacttcagcaaagtctcaggatacaaaatcaatgtgcaaaaatcacaagcattcctatacaccaccaacaaacaaacagagagccaaatcatgagtgaactcccattcacaattgcttcaaagagaataaaatacctaggaatccaacttacaagggatgtgaaggacctcttcaaggagaactacaaaccactgctcaaccgaaataaaagaggacacaaacaaatggaagaacattccatgctcatggataggaagaatcaatattgtgaaaatggccatactggccaaggtaatttatagattcaatggcatccccatcaagctaccaatgactttctccacagaattggaaaaaactactttcaagttcatatggaaccaaaaaagagcctgcattgccaagtcaatcctaagccaaaagaacaaagctggaggcatcacgctacctgacttcaaactatactataaggctacagtaaccaaaacagcatggtactggtaccaaaacagagatatagatcaatggaacagaacagagccctcagaaataacactacatatctacaactatctgatctttgacaaacctgacaaaaagaagaaatggggaaaggattccgtatttaataaatgaaatacaaactaacatcagagaatatgataaacacctctacacaaataaactagaaaatctagaagaagtggataaattcctggacacatacaccctctcaagactaaaccaggaagaagttgaatccctgagtagaccaataacaagttctgaaattgaagcagtaattaatagcttaccaaccaaaaaaagtccaggaccaggcggattcacagctgaattctaccagagcatagtgttggaagttctggccagggcaattaggcaggagaaggaaataaagggtattcaattaggaaaagaggaagtcaaattgtccctgtttgcagacgacatgattgtatatctagaaaaccccatcatttcagcccaaaatctccttaagctgataagcaacttcagtaaagtctcaggatacaaaatcaatgtacaaaaatcagaagcattcttatacaccaataacagacaaacagagagccaaatcatgagtgaactcccattcacaattgcttcaaagagaataaaatacctgggaatccaacttacaagggatgtgaaggacctcttcaaggagaactacaaaccactactcangtactactcaggaagtctggaggctaagtcaacacatcatgaaactctaggactaattcacactgcaacaaaggggctgattagagcttttgaagatggggggatagattctgtgatggaatgggaagtggatgaagtgctgaactggacaaatacactgaactttgatgaaatacaagggaaaaaaatagcaaaggttataatgctgctgttggagagcagtcgggaaccacagattgcaaaagattttgcttcctttcccagcatcaatctccagcaaatgctaaaagaagtccccaaaaggtttggggatgagagaggtgccattgttcattacacgattctcaataaccatgtttaccggagatctttagggaaatacacagacttcaagatgttctctgatgagattttgttatcattgacaagaaaggtccttctcccagatttagaattttatgttaatcttggagattggcccttggagcatcgaaaagtcaatggaacccctagccccatacctatcatttcatggtgtggctctctggattcaagagatgttgtccttccaacgtatgacatcacccactccatgcttgaagccatgcgggggccttcctggatcaataaaacagagagagctttcttcagaggtagagacagccgagaggagaggctccagttggtacagctgtccaaagaaaatcctcagctactagatgcaggaattacaggatatttctttttccaagagaaagaaaaggagcttggaaaagccaagttgatgggtttctttggatttctttaagtacaagtatccaagtaaatgtggatggggaccgtggctggcttacaggtatccatatctcatggctgggcgacagtctggttttaaagcaggactcgccatattatgaacatttctacatggcactagaaccttggaagcattatgttccaattaaaagaaatctgagtgatttattagagaaagttaaatgggctaaggaaaatgatgaagaagccaagaagattgcaaaagaaggacagttgatggctagggacctactacagccacacaggctttactgctactattaccaagtactgcagggcacagacaaacaaaaagacagcagtaacctctgcagacttaaatgtccctgtctgacagctttgaagagagtagtggttctcccagcgacgcagctggagatctgagaacgggcacattgcctcctcaaaaatacaaactaccatcagagaatactacaaacacctctacgcaaataaactagaaaatctagaagaaatggataaattcctcgacacatacactctcccaagactaaaccaggaagaagttgaatctctgaatagaccagtaacaggagctgaaattgtggcaataatcaatagtttaccaaacaaaaagagtccaggaccagatggattcacagctgaattctaccagagtcaggtgccagaagatggcttatctccaagtgaaccgcttaatatctatgaggatgacccagtggactcaaattgtgacacagacacaaccacagatgatgaatactacctgcatgaaaatgacaaagagtcagaactgtga

SEQ ID NO: 19655 - DNA, 6309 bp, Homo sapiens
  SIMILAR (4135)..(5133): 901254mologous to Homo sapiens putative p150,accession number U93563,Smith-Waterman Score=1562.
atgcacattgttgtagaaacagctctgtcagcttcatggcagaacaaggccaagcccccagctagggttctgcttcaggtggtccccaatgtgtggttccttgtggctgttgtgtgggaactgtatccatctttggatctcatggatcgttccatagaatgcagttcctcaccagcaacggaacaaagctggacagagaatgactatgacaagctgagagaagaaggcttcagacgatcaaattactctgagctacaggaggacattcaaaccaaaggcaaagatgttgaaaactttgaaaaaaatttagaagaatgtataactagaataactaatacacagaagtgcttaaaggagctgatggagctgaaaaccaaggctcgagaactacgtgaagaatgcagaagcctcaggagccgatgcgatcaactggaagaaagggtatcagtgatggaagatgaaatgaatgaaatgaagcaagaagggaagtttagagaaaaaagaataaaaagaaatgagcaaagcctccaagaaatatgggactatgtgaaaagaccaaatctacgtctgattggtgtacctgaaagtgatggggagaatggaaccaagttgaaaaacactctgcaggatattatccaggagaacttccccaatctagcaaggcaggccaaagttcagattcaggaaatacagagaatgccacaaagatattccttgacaagagcaactccaagacacataattgtcagattcaccaaagttgaaatgaaggaaaaaatgttaagggcagccagagagaaaggagcacccagattcataaagcaagtcctgagtgacctacaaagagacttagactcccacacattaataatgggagactttaacaccccactgtcaacattagacagatcaacgagacagaaagtcaacaaggatacccaggaattgaactcagctctgcaccaagtggacctaatagacatctacagaactctccaccccaaatcaacagaatacacatttttttcagcaccacaccacacgtattccaaaattgaccacatacttggaagtaaagctctcctcagcaaatgtaaaagaacagaaattataacaaactatctctcagaccacagtgcaatcaaactagaactcaggattaagaatctcactcaaaaccgctcaactacatggaaactgaacaacctgctcctgaatgactactgggtacataacgaaatgaagctagaaataaagatgttctttgaaaccaacgagaacaaagacacaacataccagaatctctgggacgcattcaaagcagtgtatagagggaaatttatagcactaaatgcccacaagagaaagcaggaaagatccaaaattgacaccctaacatcacaattaaaagaactagaaaagcaagagcaaacacattcaaaagctagcagaaggcaagaaataactaaaatcagagcagaactgaaggaaatagagacacaaaaaaccctttcaaaaaattaatgaattccaggagctggtttttttgaaaggatcaacaaaattgatagatagatcactagcaagagtaataaagaagaaaggagagaagaatcaaatagacggcaataaaaaatgataaaggggatatcacccaccgatccccacagaaatacaaactacccatccagagattactacaaacacctctacgccaaataaacttgaaaatctagaaggaatggataaattcctcgacacatacactctcccaagactaaaccaggaagaagttgaatctctgaatagaccaataacagggctctgaaattgtggcagtaatcaatagcttaccaacgaaaaaaaagtccaggaccagatggattcacagccgaattctaccagaggtacaaggaggagctggtaccattccttctgaaactattccaatcaatagaaaaagagggaatcctccctaactcattttatgagcccagcatcatcctgatagcaaagcctggcagagacacaacaaaaaaaagagaattttagaccaatatctttgatgaacatcgatgcaaaaatcctcaataaaatactggcaaaccaaatccagcagcacatcaaaaagcttatccaccatgatcaagtgggcttcatccctgggatgcaaggctggttcaatatacgcaaatcaataaatgtaatccagcatataaacagaaccaaagacaaaaaccacatgattatctcaatagatgcagaaaaggcctttgacaaaattcaacaacacttcatgctaaaaactctcaataaattagtgttggaagttctggccagggcaatcaggcaggagaaggaaataaagggtattcaattaggaaaagaggaagtcaaattgtcccctctttgcagatgacatgattgtatatgtagaaaaccccttcgtctcagcccccatatctccctcaagctgataagcaacttcagcaaactctcaggatacaaaatcaatgtacaaaaatcaccaagcattcctatacaccaacaacagacaaacagagagccaaatcatgagtgaactcccattctgttattgcttcaaagagaataaaatacctaggaatccaacttacaagggatgtgaaggacctcctcaaggagaactacaaaccactgctcaacgaaataaaaagaggacacaaacaaatggaagaacattccatgctccagggtaggaggaagaatcaatctcgtgaaaatggccatacttgcccaaggtaaatttatagattcaatgccatccccatcaagctaccaatgactttcttcacagaattggaaaaaaactactttaaagttcatatggaaccaaaaaagagcccacatcgccaagtcaatcctaagccaaaagaacaaagctggaggcatcacactacctgacttcaaactatactacaaggctatagtaactcaaaacagcatggtactgctaccaaaacagagatatagaccaatggaacagaacagagccctcagaaataatgctgcatatctacaactatctgatctttgaccaacctgagaaaaacaagcaatggggaaaggattccctatttaataaatggtgctgggaaaactggctagccatatgtagaaagctgaaactggatcccttccttacaccttatacaaaaatcaattcaagatggattaaagacttaaacgttagacctaaaaccataaaaaccctagaagaaaacctaggcattaccattcaggacataagcatgggtaaggacttcatgtctaaaacaccaaaagcaaaggcaacaaaagccaaaattgacaaatgggatctaattaaactaaagagtttctgcacagcaaaagaaactaccatcagagtgaacaggcaacctacaaaatgggagaaaattttcgcaacctactcatctgacaaagggctaatatccagaatctacaatgaactcaaacaaatttacaagataaaaacaaacaaccccatcgaaaagtgggtgaaggacatgaacagacacttctcaaaagaagacatttatgcagccaaaaaacatatgaaaaaatgctcatcatcactggccatcagagaaatacaaatcaaaaccacagtgagataccatctcacaccagttagaatggtgatcattaaaaagtcaggaaacaacagagcacctgggggaaggggtggctgtgggtgcagctttggcagacttaaacgttcctgcgtgccagctctgaaaagagtagcagatctcccagcacaacgctcgagctctgctaagggagagactgcctcctcaagtgggtccctgaaccccgtgccccctgactgggagaaacctcccagcaggggtcgacagacacctcatactggagaactccggctagcatctgacgggtgcctctctgggatgaagcttccagaggaaggaataggcagcagtctttgctgttctgcagcctctgctggtgatacccaggcaaatggggtccggagtggactgccagcaaactccagcagacctgaagctgagggtcccgactgttagaaggaaaactaacaaacagaaaggacatccacaccaaaaccccatctcaccacagtgcacttattccaaaattgaccacatagttggaagtaaagcactcctcagcaaatgtaaaagaacagaaattataacaaactctctcccagaacacagagcaatcaaactagatctcaggattaagaaactcactcaaaaccgctcaactacatggaaattgaacaacctgctcctgaatgactactgggtacataatgaaatgaaggcagaaataaagatgttctctgaaaccaaagagaacaaagacacaacataccacaatctctgggacacatttaaaacagtgtgtagggggaaatttatagcactaaatgcccacaagggaaaccaggaaagatctaaaattgacaccctaacatcacaattaaaagaacaagagaagcaagagcaaacacattcaaaagctagcagaaggcaagaaataactaacatcagagcagaactgaaggagatagagacacagaaaactcttcaaaaaatcaatgaatccaggagctggttttttgaaaagatcaacaaaattgatagaccgctagcaagactaataaagaagaaaagagagaagaatcaaatagatgcaataaaaaatgataaagcagatatcaccactaatcccacagaaatacaaactaccatcagagaatactataaacacctctatgcaaataaactagaaaatctggaagaaatggataatttcctcgacacatacaccctcccaagactaaaccaggaagaagttgaatctctgaatagaccaataacaggctctgaaatggaggcaataattaatagcctaccaaccaaaaaaagtccaggaccagacggattcacagccgatttctaccagaggtacaaggaggagctggtaccattccttctgaaactattccaatcaatagaaaaagagggaatcctccctaactcattttatgaggccagcatcgtcctgataccaaagcctggcagagacacaacaaaaagaattttagaccaatatcccagacgaacatcaatgcaaaaatcctcaatacaatactggcaaaccgaatccagcaacacatcaaaaagcttatccaccatgatcaagtgggcttcatccctgggatgcaaggctgtgttggaagttctggccagggcaatcaggcaggagaaggaaataaagggtattctgttaggaaaagaggaagtcaaattgtccctgtttgcagatgacatgatcgtatatctagaaaaccccatcatctcagcccaaaatctccttaagctgataagcaacttcagcaaagtctcaggatataaaatcaatgtgcaaaaatcacaagcattcttatacaccaataacagacaaacagagagccaaatcatgagtgaactcccattcacaattgcttcaaagacaataaaatacctaggaatccaacttacaagggatgtgaaggacctcttcaaggagaactacaaaccactgctcaaggaaataaaagaggatacaaacaaatggaagaatattccatgctcgtgggtaggaagaatcagtattgtgaaaatggccatactgcccaaggtaatttatagattcaatgccatccccatcaagctaccagtgactttcttcacagaattggagaaaactactttaaagttcatatggaaccaaaaaagagcccacattgccaagtcaatcctaaggcaaaagaacaaagctggaggcatcatgctacctgacttcaaactatactacaaggctacagtaaccaaaacagcatggttccagttaactctgggcttccgcctgggaacctgcagaaacaggagacgaatgcgattcctaaattaccccactgctggactcttcgaagccccacaatcgcgacccaaggctgtcttcttttcgggaagaaagggcaggatccgtgaaaagaaaacaacacggtctgaacttgcctctgagaacccgcagggccgtaaacctgaattccgcgggagagaacggcgtccgtttctctcgcgacacttcatggataacgtagatgcttcaagtccagttcggctctcattggctaccgcacgcagtgagggggcggggaaagtagcggcgaggccccgccctcacgcaggagccaatcctgagcaggctaggagacgaacccggaagtga

SEQ ID NO: 19656 - DNA, 450 bp, Homo sapiens
  SIMILAR (11)..(217): 941254mologous to Homo sapiens Human secreted protein, SEQ ID NO: 6349,accession number G02268,Smith-Waterman Score=332.
atgcgcagtcatgagtcgcttcaagtttatcgatattggtatcaacttgactgaccctatgttcagaggaatttatttgggggttcaaaagcatcaagatgacttacaggatgtaataaggagagctgtcgagattggtgttaaaaagtttatgattacaggtggaaatctacaagacagtaaagatgcactgcatttggcacaaacaaatggtatcctcatatttcttttaccaaaaaaaaaatgaattaagtaattttgaagaagtctttctgaaaactgcttcaggtatgtttttcagtacagttggatgtcatcctacaagatgtggtgaatttgaaaagaataaccctgatctttacttaaaggagttgctaaatcttgctgaaaacaataaagggaaagttgtgggcaataggagaatgcggacttgattttgaccgactgcaa

SEQ ID NO: 19657 - DNA, 1063 bp, Homo sapiens
  SIMILAR (64)..(177): 1001254mologous to Homo sapiens Human secreted protein, SEQ ID NO: 6349,accession number G02268,Smith-Waterman Score=196.
atggggaggtcctccatgcgcagtcatgaggtcgcttcaagtttatcgatattggtatcaactttgactgaccctatgttcagaggaatttataggggggttcaaaagcatcaagatgacttacaggatgtaatagggagagctgtcgagattggtgttaaaaagtttatgattacacggtggaaatctacaagacagtaaagatgcactgcatttggcacaaacaaatggtatgtttttcagtacagttgggatgtcatcctacaagatgtgggtgaattttgaaaagaataaccctgatctttacttaaagggagttgctaaaatctttgctggaaaacattaaaggggaagttgtggcaattaggagaatgccggacttgattttgacccgactgcagttttgtcccaaagatactcaactcaaatattttgaaaaacagtttgaacctgtcagaacaaacaaaattaccaatgtttcctccattgtcgaaactcacatggctggaattttttggacataatgaaaagaaatagagatcggtgtgtagggggagtggtgcattcatttgatggtaccaaggaagcagccagctgctttgattgacttggatctttatataggatttaatgggtggcctcacctgaaaacctggaggctaatttgggaaggttttggaagtcaatttcctagtgaaaaattaatgattgaggccagatgcacccttggtgtggagtcaaaagtacacatgcttggatcaaaatatataagaactgcatttccttcccaaaaagaagtgggaaagtgggcactgcttaaaagacagaaatgaaccctgccatataattcaaatattggagataatgtcagcagtgagagatgaggatccactggaattagccaatacactatataacaatactattaaagtatttttttcctggaatataattggtatatgtcttccactttccatcatgtatgtaaaatttcatagtaaaacttcctgatagtttcaataaagagattatctgcaaaaaaaaaaatggtgtaagaagtcgg

SEQ ID NO: 19658 - DNA, 1679 bp, Homo sapiens
  SIMILAR (187)..(1401): 471254mologous to Homo sapiens coronin homologue,accession number X89109,Smith-Waterman Score=684.
aggcacgaggcttgacaagagcatcttcagcgggcgagtccccggctcctccagctccttcctcctcttcctcctcctcctccacctccggcttttgggggatcactgtcctctctcggcagcagaatgagccggcaggtgggtccgctccagcaagttccgccacgtgtttggacagccggccaaggccgaccaagtgctatgaagatgtgcgcgtctcacagaccaccttgggacagtggcttctggtgctggtcaacccttaagttttgtgggccctgatctgtgaggccagcgggggaggggccttcctggtgctgcccctgggcaagatttggacgttgtgggacaagaatgcgcccacgggctgtggctcacacagccccctgtgctagacatcgcctggtgcccgcacaatgacaacgtcattgcccagtggctccgaggacttgcacagtcatggtgtgggagatcccggatgggggcctgatgctgcccctgcgggagcccgtcgttcaccctggagggccacaccaagcgtgtggggcattgtggcctggcacaccacagcccagaacgtgctgctcagtgcaggttgtgacaacgtgatcatggtgtgggacgtgggcccctggggcggccatgcttgacactgggcccagaggggccccccagacgcgaactaccggggggactgggagcccgaatggaggcctcatttgtacctcctgccgtgacaagcgcgtgcgcatcatcgagccccgcaaaggcactgtcgtagctgagaaggaccgtccccacgaggggacccggcccgtgcgtgcagtgttcgtgtcggaggggaagatcctgaccacgggcttcagccgcatgagtgagcggcaggtggcgctgtgggacacaaagcacctggaagaaagccctgtcccctgaggaagttgcacaccagaaacggtgtccctgtggccttttttggcccttgacaccaacatcgtctaccttcgtggcaaagggtaccggcccaatccgggtctttgaggatcacttccgaaggcccctttcctgcactatctcttccatgttcagtttcaaaggagtcccagcgggggcatgggctacatggcccaaacgtgggcggaaggtgaacaagttgtgagatcgcagggttctacaaactgcacgacgggagggtgtaagcccaatgccaaagccagtgcctcgaaagtcggacctgttccaggaggacctgggacccacccccccaagagggccggacccttgccctcacggcttgaggagtggctggggggtcgggatgttggtgcccctcttcatctccctcaaggatggctacgtaacccccaaagagccgggagcttgagggtcaaccggggcctggacccccgggcgcaggaggagcagcaccagaggccagtggcactcccagctcggatgccgtgtctcggctggaggaggagatgcggaagctccaggccacggtgcaggagctccagaagcgcttggacaggctggaggagacagtccaggccaagctatgactccgcagggcctccaaccaggtcaaccaattacaaccaacccattcccttccctttcccacccacttgccggggaaaaaaatcttattaaattggctttattttttggtaaaaaaaaaa

SEQ ID NO: 19659 - DNA, 475 bp, Homo sapiens
  SIMILAR (313)..(390): 1001254mologous to Homo sapiens Human secreted protein, SEQ ID NO: 6512,accession number G02431,Smith-Waterman Score=141.
cggcggctgccaccagggccttgttacgttcccgcctagtcttccgacgacggacacgaccaggtttctcaggctgctgaaaaggctgggagactggtccctgggtatccatggtgtcctcctaagtgaaggcttccgtccctggagaggaggcggcgccctgtatcggccttcgtcctccgcgggtgtgctagcgttgggacggtcctttgttgccgcgaggggtaggagtgggcgtggcggagccagctccgttcggaacactcccgggccgacccgactcgctcatcctgcaggagctgcggcgccaagatgagtggagaggagaacccagccagcaagcccacgccggtgcaggacgtacagggcgacgggcgctggatgtccctggtgagcgttcccacctgggatattgaggagtccgggggcgcggggggtggctcaggagaacggctggttcgtgccactctcaccc

SEQ ID NO: 19660 - DNA, 1012 bp, Homo sapiens
  SIMILAR (677)..(964): 921254mologous to Homo sapiens platelet activating factor acetylhydrolase IB gamma-subunit,accession number D63391,Smith- Waterman Score=472.
  misc_feature (1)...(1012): n = a,t,c or g
tttggtcccgtgccgggtgcgcggcctgggagtcagcggcccgaggcgggaagcgccgggcgagcccactgtgcggccgtcgtgggggaagcgaaggttcctgattccacctacctcctaagtgaaggcttccgtccctggagaggaggcggcgccctatatcggccttcgtcctccgcgggtgtgctagcgttgggacggtcctttgttgccgcgaggggtaggagtgggcgtggcggagccagctccgttcggaacactcccgggccgacccgactcgctcatcctgcaggagctgcggcgccaagatgagtggagaggagaacccagccagcaagcccacgccggtgcaggacgtacagggcgacgggcgctggatgtccctgcaccatcggttcgtggctgacagcaaaagataaaggngggggnaaaaaaaaaaacccccccccccccgaagtcgtcttcatcggggactccttggtccagctcatgcaccagtgcgagatctggcgcgagctcttctctcctctgcatgcactttaactttggcattggtggtgacggcacacagcatgtactgtggcggctggagaatggggagctggaacacatccggccccaagattgtggtggtctgggtgggcaacccaacaaccacggacacacagcagagcagggcctgcttccgcgaggccaacatcccaacccacttcgggagaagaaccgacaggtgaacgagcttggtacgggcggcacttggcttggccaccctcgggcccacttcctagatgccgaccctggctttgtgcactcagatggcaccatcagccatcatgacatgtatgattacctgcatctgagccgcctgggctacacacctgtttgccgggctctgcactccctgcttctgcgtctgctggcccaagaccagggccaaggtgctcccctgctggagcccgcaccctaagcatcctgctgccttcccacaacattaaactctccttcctcagtg

SEQ ID NO: 19661 - DNA, 1088 bp, Homo sapiens
  SIMILAR (382)..(993): 501254mologous to Homo sapiens platelet activating factor acetylhydrolase IB gamma-subunit,accession number D63391,Smith- Waterman Score=340.
cccacgcgtccgccgtgaccggtgggtggtttctccctcctccccgcctcgggagctggatggtctcgcctctccctccccccaccccgtgccgggtgcgcggcctgggagtcagcggcccgagcgggaagcgccgggcgagcccactgtgcggccgtcgtgggggaagcgaaggttcctgattccacctacctcctaagtgaaggcttccgtccctcggagaggaggcggcgccctgtatcggccttcgtcctccgcgggagctgcggcgccaagatgagtggagaggagaacccagcccagcaagcccacgccgttgcaggacgtacagggcgaacgggcgctggatgtccctgcaccattcggtttcgtgggctgacagcaaagataaggaacccgaaagtcgttcttcatcgggggacttccttggtccatctcatcgctaccagtgcgagatctggcgcgattctttctgttcctctggcatggcatttaacttttgggcatttgggtggtgaacgggcacacagcatgtactgtggcggcttggaaaattggggatctgggaacacatcccggcccaagattgttggtggtcttgggttgggcacccaaccaaccacgggacacacagcaagagcaggtgtctgggggcatcaaggccattgtcacgtttggggggttggaaaaatgagccgacagcccccaggccccgggtttttgttgctgggcctgcttccgcgcaggcccaacatcccaaccccacttcgggagaaagaaccgaccaggtgagacgagctggtacgggcggcactggctggccaccctccgggcccacttcctagatgccgacccctggctttgtgcactcaagatggcaccatcagccatcatgacatgtatgattacctgcatctgagccgcctgggctacacacctgtttgccgggctctgcactccctgcttctgcgtctgctggcccaagaccagggcacaaagtgctcccctgctggagcccgcacccttaagcatcctgctgccttcccacaacattaaactctccttcctcagaaaaaaaaaaaaaaaaa

SEQ ID NO: 19662 - DNA, 1546 bp, Homo sapiens
  SIMILAR (570)..(1199): 261254mologous to Leishmania major proteophosphoglycan,accession number AJ243460,Smith-Waterman Score= 115.
  misc_feature (1)...(1546): n = a,t,c or g
actcatagccctngccgtttcgtgaactcnnnnnnnnnnnnnnnnnnnnaatacaatctctctttggtatggggtttctgttctgctgtatgcaccactccaggacctggaggtgagcccacaacccatcacaggcatccctgaggagctcatcacagcctgggccctgggtcctgtgcagggtctggagcagcctcttggctgactctaggctctggcagtgtgtccagcccaggagtacaagcaggcaactgaggggcctgaattctctatcaagtaggcagccaagatttgggaagtcttcttctttcaacaatgttagtgctgttaccagaatctgctcgaggaagtgtttgttgttgctcaggcagtagaaataggccactttccaagcctcggctgggttgggattggagaacagggctagcattgcccgctcaggatctagatgatccggtgagacttttcccgaggctgtagccctcggtggcttttctgtgaccttctctgcataggtatggccatacagggacagcaggccccggctggccttgtgcagcaggcagctgagcagccgctcctcccgcaggggactcccctcggtcctgcaggcctctagtaattcctcacacaggagatgcaactcaaccccaagtggttctgcggggcaacgcagagtccgcagggctccatagatggcatcgactaccccagggggcaccgaatcagggccctgcaaagcccgcaatgcctttcgaatgaggtccaccagtgcattctgcagaggccagtgacagaggccagtaccgtcatcctcctcaagcaggagctccagcagggcctgtgctggctggggagactgcctcaggagatcccagagcacagagacagcttcggagctgagacgaggagtccagctctccctccttggatttccgtcaggcacgtggcctactgcaccctgtgttaaggtctcatacagctcctcgaggatgttctctggaatgtcaccttggaggtcttctgacaataaaagaaactcaagctttctccggaaaacaactgggagtaacttctcagcagatttggacacaccaccaatgcctgaagtatgtcttctaccctctttgggatatccccttgtccctcctgtagctgaggtacacatgcctgtgccagctcccattctcccctccgcaggcattcgcagaaaaatccaaaaagctgcttctgcgaagcagcttcctcttttccaaatggatgattcattttcccagcacagagtgcagggagatacaaagaaatgagttatgccgaacacattctcaatgttctcattcgcggagtacctcctgggcctctgccggcctctgattggatacagtagccagaatgacgactcaatcagtgcttcggttgttgctttgcggcgttttccgcggggaaactgtgtaaagggtggggaaacttgaaagttggatgctgcagacccggtactggaaagtttcatgtggggtgccgttgtggggaagtggggttcgctcat

SEQ ID NO: 19663 - DNA, 318 bp, Homo sapiens
  SIMILAR (41)..(316): 851254mologous to Homo sapiens GTP-binding protein,accession number M28209,Smith-Waterman Score=436.
  misc_feature (1)...(318): n = a,t,c or g
cagcaagggcggcggtggcggcggcggcanctgcagtgacatgtccagcatgaatcccgaatatgattatttattcaagttacttcttaggtttgcagatgatacatatacagaaagctacatcagcacaattggtgtggatttcaaaataagaactatagagttagacgggaaaacaatcaagcttcaaatatgggacacagcaggccaggnaagatttcgaacaatcacctccagttattacagaggagcccatggcatcatagttgtgtatgatgtgacagatcaggggtccttcaataatgttaaacagtggct

SEQ ID NO: 19664 - DNA, 1193 bp, Homo sapiens
  SIMILAR (811)..(617): 1001254mologous to Homo sapiens GTP-binding protein,accession number M28209,Smith-Waterman Score=332.
acttccaataagtacaatatttattaaacatatcttcagttgttttgttacatagtgtgcaacaaattacaatattctgcagccacaaattatatgcagagtatgaagaaactattaatcagatagtgtaatctttccatttataactctacaaggaagaactagcaaatcagatcttacatataacatctcactaaactttatgcatggaaagtgacagacactgcttgtgctgtttgatacaaaatggctgaacttcatcttcagaagactaaacctgacatctaaacatgccaatataaacatcaaaacaaaatatattctaaccaaccacgggaaacagtctggtatcaggaaagcaacaaggattacacacattattttataaaccagcacacaaaggtttaaaacagttctgaaaatgaagttagctgtcttgagtcaagggaataaaaaaaaagtcagtattgaccatttacaatctctgacctttgtggagacggtaagaatctgttgtagtgcagctacatacagtacaattcaggcaattttgttttttcacttgggttcagattgcaaattcattgctgtgagaaaaggatggaggcaaattttagcagcaacctccacctgactgcttgactggagtgctctgaattttaacattggacttctcagcaccaccagctgttgctccgggacccattcgctttttaatctcagctgccatcgtcatgaaagactgttctacattcgttgcattcttagcactggtttccaaaaacggaattccaagggaatcagcaaattctatttgaagcttgattgttttcccgtctaactctatagttcttattttgaaatccacaccaattgtgctgatgtagctttctgtatatgtatcatctgcaaacctaagaagaaggcaagactttccaacccctgagtcgccaatcagaagtaacttgaataaataatcatattcgggattcatgctggacatgtcactgcagctgccgccgccgccaccgccgcccttgctgccgcagccgccgccctgactctccgcgccacgggtaatcgaaagaaaggaatgagataggctgttccgggagagcaaacgtcttcccctactccgtcccctagaacacaatcagcagccgccgccactcagctatcgcttccaccccccc

SEQ ID NO: 19665 - DNA, 516 bp, Homo sapiens
  SIMILAR (124)..(297): 551254mologous to Homo sapiens Human secreted protein fragment encoded from gene 42,accession number Y07785,Smith- Waterman Score=157.
atggatggcagagtgatggcagcaggaggcagacaggctcctgggcagaaaaaggcaggtaccagtgaagccccaccttcaagccaggaatggcctgaagcctggtacgggtgcctgcagcagaagctgcgtgcagtatatctggttcagtcacagccttgcacggggcctgtgctggcacctggagctgcttgccctgctgcagcagccagcacgcctggctgtgcacagtgggtggaccccgcgcttgctcacctacacaatcctcgcagctctgcgcctggtttgcgtttagcagccgatgccccgacttctgccccaaccctcctcgacccctttaagatcccccaagctggcccacggacccagccgaccggtgctctcctgaactcactattcgggattcatgctggacatgtcactgcagctgccgccgccgccaccgccgcccttgctgccgcagccgccgccctgactctccgcgccacgggtaatcgaaagaaaggaatgagatag

SEQ ID NO: 19666 - DNA, 737 bp, Homo sapiens
  SIMILAR (216)..(716): 441254mologous to Homo sapiens GTP-binding protein,accession number M28209,Smith-Waterman Score=256.
ctggttcgccggcggccattttgggtggaagcgatagctgagtggcggcggctgctgatttgtgttctaggggacggagtaggggaagacgtttgctctcccgggaacaagcctatctcatggcctgtctttcgattacccgaggcgcacagagtcagggcggcggctgcggcagcaagcggcggcggtggcggcggcggcagctgcaagttgacatgtccagcatgaatcccggatatgattatttatgcaagattacttctgattggcgacttcaggggttggaaaagtcttgccttcttcttaaggtttgcaggatgatacatatacaggaaaagctacatcagcacaattgggtgtgggatttcaaaataaggaactataggagttaggacggggaaaacaattcaagcttcaaatatgggacacagcaggccagggaaagatttccgaacaattcacctccagtttattacagaggagcccatggcattcattagttgtgtatgatgtgacaggttcagggagtccttcaattaatgtttaaacagtggctgcaggagatagatcgttaatgccagtgaaaatgtcaacaaattgttggtaggggaacaaatgtgatcttgaccacaaagaaagtagtggactacacaacagcgaaggaatttgctggttgccttggaataccgttgttggaaaccagtgctaagaatgcacgaatgtagaacagtctttca

SEQ ID NO: 19667 - DNA, 375 bp, Homo sapiens
  SIMILAR (216)..(374): 1001254mologous to Homo sapiens pyrophosphatase,accession number AB026723,Smith-Waterman Score=284.
ggcacgagatgtgtatggcttctcttctcaacaaggggcttcgctccaatgttatcttgaacttccgtgataagtcattccacagctctttcaaaataagtacttggaatttttgttgagtgtataattatttgtgcatcttgaaatctgcttattctcttctttctttttaaaaaaatcattctcactgtcatcttatgcttcttctcttcttagatatcaatgatgtcaaacggctgaaacctggctacttagaagctactgtggactggtttagaaggtataaggttcctgatggaaaaccagaaaatgagtttgcgtttaatgcagaatttaaagataaggactttgccattgatattattaaaagcactc

SEQ ID NO: 19668 - DNA, 1405 bp, Homo sapiens
  SIMILAR (96)..(947): 451254mologous to Homo sapiens pyrophosphatase,accession number AB026723,Smith-Waterman Score=441.
ggatttcgtcaggcgtggggctctctccttgacagtttgcgctttgtgcgggctggtggctctgtggcaggggcgggggcaggactccggcgactatgagcggcttcagcaccgaggagcgcgccgtgcccttctccctggagtaccgagtcttcctcaaaaatgagaaaggacaatatatatctccatttcatgatattccaatttatgcagataaggatgtgtttcacatgggtagttgaagtaccacgctggtctaatgcaaaaatggagattgctacaaaggaccctttaaaccctattaaacaagatgtgaaaaaaggaaaacttcgctatgttgcggaatttgttccccgtataaaggatatatctgggaactatgggggccttccctcagacttggggaagacccaggggcacaatgataaaacattactgggctgttgtgggttgacaatggaccccaattgatgtgtgttgaaattgggaaggcaaggtatgtgcaagaggtgaaataattgggcgtgaaagttctagggcatattggctatgatttgacggagggggaaccgactggaaagtcattgccattaatgtgggatgatcctggatgccagcccattaataatgatatccaatgatgtcaaacggctgaaaacctggctacctttagaagctacctgtggactggtttaggaaggtataaggttcctgatggaaaaccagaaaatgagtttgcgtttaatgcagaatttaaagataaaggactttgcccattgatattattaaaagcactccatggacccttgggaaagcattagtgacttaagaaaaccgaatgggaaaaggaatcagttgcatgaataccaactttgtgctgagagcccccttcaaggtgtgcatcctggatgctgcccagagcccattgtgggatgctttacccacccacccctgtggaatctgcccctgccacagtacccaacagaccgtggataagggggtccccatcacccagaaaaacctaatgagatttcctctggaataccaagctgatattgcctacatccgtgttccatcctggatggtattagaggtaaaagtagtagccttttccaaagcctttaaatttgtagaacctcatcctaacctaaagtaaattcctgctgtgactaatcccaatatactcaggaatgttatccatcttaaagcatttttcatatctccaacttagggtaacttttaggcacatgctttaaatatcaaagcagttgtcatttggaagtcacttgtgaatagatgtgcaaggggagcacatattggatgtatatgttaccgatatgttaggaaataaaattattttgctgaaaaaaaaaaaaaaaaaaaagtcgacgcggccgcgaattta

SEQ ID NO: 19669 - DNA, 612 bp, Homo sapiens
  SIMILAR (377)..(556): 361254mologous to Homo sapiens TGR-CL3,accession number A27280,Smith-Waterman Score=60.
gtcactcaagaggatgacataattgaggagcacaagcccaggacacccaggccgagtccaccgttgctggccccttctccagcctgccaggcttttggagagggccactcaccaggtcaccctgcgatttccacgggggcaggaccccgacccagtgcctccttctcccacccgcacctcagcggactgcatcgggagccgcccctgaattggtccgtgtgcccgggcctggtctggtccccgaaaccagctttggacgagactcaccctttcgtccagcaatttccacaccaggctactttggagtggggagtcttccacagagatgtgggaaggcgctggggcagacgccttgggaatttgcaaattggtagtgaagtggctaggaggaggcgtgtggggggaggtgggctgcagtgcagacggttgggggttggggcgtccccgggagctgattggctgccgcgggtggaggcggagcttggccgccgcccccggaccgcagaggcccggctttgtgtcagtttctaccccaagatgccgccccagatccgggatggagacccagacgcccgccctcagagtgcagcaggacgatttgtttcaaagtaa

SEQ ID NO: 19670 - DNA, 951 bp, Homo sapiens
  SIMILAR (143)..(694): 671254mologous to Homo sapiens nuclear distribution protein C homolog,accession number AF130736,Smith-Waterman Score=573.
atggaagaaggcatttcttcacagattggcaggagagagaatgagtgccagcagaagaaatgccagacgctaataaaaccatcagatcttgtgagaactcactcgtatcatgagaacagcatgggggaaaccatcctggtgattcagttacctccacctggtactgcctttgacatgtgggaattacaattcaagcttatcacacagactttcagccaccacaatcagctggcacagaagacccggcgggagaagagagcccggcaggaggcccgagcggcgggagaaggcggagcgggcggccagactggccaaggaagccaagtcagagacctcagggccccagatcaaggagctaactgaatgaagaggcagagaggctgcagctagagattgaccagaaaaaggatgcagagaatcatgaggccccagctcaagaacggccagccttgactccccagggaagcaggatactgaggaagatgaggaggaagatgagaaggacaaaggaaaactgaagcccaacctaggcaacggggaagacctgcccaattaccgctggacccagaccctgtcggagctggacctggcggtccctttctgtgtgaacttccggctgaaagggaaggacatggtggtggacatccagcggcggcacctccgggtggggctcaaggggcagccagcgatcatttgatggggagctctacaatgaagtgaaggtggaggagagctcgtggctcattgaggacggcaaggtggtgactgtgcatctggagaagagggggccagcagacgcgcactcgagggctctttctgttctgcaagcaagccgtttgttgggcgtccactgtgtaccaggcacggtgccaaacgccgagattcaggtggtggacttcgtgatctacttctggcagtctgtaattccccaggcttcgcccatctctgagg

SEQ ID NO: 19671 - DNA, 1901 bp, Homo sapiens
  SIMILAR (126)..(1121): 441254mologous to Homo sapiens nuclear distribution protein C homolog,accession number AF130736,Smith-Waterman Score=486.
ggcacgaggctccgttgcggaaggcggccaacaaaagtcgtgggccccggcgcgacccgcaggagcgtagagagcgcgggacatagagtgcagagctccgggacgtggatcggagcgcggcgcgactgggcggagagcaggaggaggagcggttcgacggcatgttgctggccatggctcagcatgcacgagggcggcgtgcaggagcttgtgaacaccttcttcagcttccttcgacgcaaaacagactttttcattggaggagaagaagggacggcagagaagcttatcacacagacttttcagccaccacaatcagcttggcacagaagaccccggcgggagaaagagagcccccgcaggagagccgaagcggcgggagaaggcggagcgggcggccagacttgccaaggaagccaagtcagagacctcagggccccagatcaaggagctaactgatgaaaaggcacgagaggctgcagctagagattgaccagaaaaaggatgcagagaatcatgaggcccagctcaagaacggcagccttgactccccagggaagcaggatactgaggaagatgaggaggaggaagatgagaaggacaaaggaaaactgaagcccaacctaggcaacagggcagaccttgcccaataacgcttgaacccagacccctgtcgggagctggacctggcggtcccttttctgtgtgaacttccggctgaaagggaaggacatggtggtggacatccagcgcggcacccctcggggtggggctcaagggccagcccagcgattcattgatgggggagctctacaatgaagtgaaggtggaggagagcttcgtggctcattgaggacggccaaggtggtgactgtgcatctggagaagatcaaataagatggagtggtggagccgcttggtgtcccagtgaccctgagattaaccacccaagaaagattaaccctgagaattccaaagcggtcagaccttggacagttgagacttcgccagcatggtggaaaaagatgatggtatgacccagcgaacagaaagtcccatggggctgcccaacttccagacgaacagaagaaaacaggagattctgaaagaagttcatggaatcaacatcccggagatgggattttttccaaaggctaaatttccaactaacccctgtttttttcctccctgaaactctttggggcttagcttgcaaccaccccaactttctttccccactcttctcttgggacttgtgggcctcagggcttggggcagccattgggaacttggcccaggcacacagttcccggggcattcaggagaaaggctgggtcttgggacctttgtcctccccagtggccttacttgttacacattaaaacgattttccccagcttctttcggggtcttcttcttgcttctgccttttctttggggcacagccttcttacagcttgctgctggaaacttggaagtttggcttctagcccagattctgccatgtgaccttaggccacatccttggcccttcttctgggcctcagtttctcattacttaaagattaaaacaaggcttggccgggtgtgatggttcatgtctgtaatcccagcactttgggaggctgaggggagcagatcacctgatgtcaggagtttgagaccagcttggccaacatggagaaacccagtctctactaaaaatacaaaaattagccgggtgtggtggtgcacacctgtaatcccagctactcgggaggctgaggcaggagaatcgcttgaacccgggtggcggaggttgcagtgagccgagattgcactacttcactccagcatgggtgacagagactccatctcaaaaaaataaataaataaaacaaggcttttagtctaaaaaaaaa

SEQ ID NO: 19672 - DNA, 403 bp, Homo sapiens
  SIMILAR (108)..(398): 971254mologous to Homo sapiens F23149_1,accession number AC005239,Smith-Waterman Score=472.
agcgggaccaggaggaggagatggactatgcaccagatgatgtgtatgactacaaaattgctcgggagtacaactggaacgtgaagaacaaagctagcaagggctatgaggaagaggaagaggagatggagacagaagagaaagaagctgggggctcatatgaggagcaggagaagggcagcagcagtgagaaggagggcagtgaagatgagcactcgggcagcgagagtgaacgggaggaaggtgacagggacgaggccagtgacaagagtggcagtggtgaggacgagagcagcgaggatgaggcccgggctgcccgtgacaaagaggagatctttggcagtgatgctgattctgaggacgatgccgactcttatgatgaggacagaggacaggccccagg

SEQ ID NO: 19673 - DNA, 2113 bp, Homo sapiens
  SIMILAR (555)..(1340): 811254mologous to Homo sapiens PD2 protein,accession number AJ401156,Smith-Waterman Score=1034.
cgtgtgtggttccgagccggacttcatttcaccgaaggcgtcgcggcctgaggagacccgttgggtcctcagcgtcttggcggcagttggtggaaccggagcttcgagtccgtccccggtgctgcctgcgcgttcacctgagtctcgctggagctcttttcgcccgcccacctcatctcaacccactttccgcggggagcggcgccaagctgggccttcctcggatcaggcgtcccctgaagtcggcacgcccctctgcgtcccccttcggtcccgctaggaccccgttccgggctgccgtcgcctcgtcgctatggcgcccaccatccaaacccaggcccagcgggaggatggccacaggcccaattcccaccggactctgcctgagaggtctggagtggtctgccgagtcaagtactgcaatagcctccctgatatccccttcgaccccaagttcatcacctaccccttcgaccagaacaggttcgtccagtacaaagccacttccttggagaaacagcacaaacatgacctcctgactgagccagacctggggggtcaccatcgatctcatcaatcctgacacctaccgcatcgaccccaatgttcttctagatccagctgatgagaaacttttggaagaggagattcaggcccccaccagctccaagagatcccagcagcacgccgaaggtggtgccatgggatgcgaaagacagagtacatctccactgagttcaaccggtattgcatcttccatgagaaagcctgaggtcaagaaatggggttctgtgaagcagcagtttaccgaggaagaaatatacaaagacagggatagccagatcacagccattgagaagacttttgaggatgcccagaaatcagtaattgagggactgggatggggagaggcaaggatctcacagcattacagcaaaccccgagtcacaccggtggaggtcatgcctgtcttcccagactttaagatgtggatcaatccatgtgctcaggtgatctttgactcagacccagcccccaaggacacgagtggtgcagctgcgttggagatgatgtcctcaggcccatgattaggggcatgatggatgaggaagggaacccagtttgtggcctatttcctgcctgtagaagagacgttgaagaaacgaaagcgggaccaggaggaggagatggactatgcaccagatgatgtgtatgactacaaaattgctcgggagtacaactggaacgtgaagaacaaagctagcaagggctatgaggaaaactacttcttcatcttccgagagggtgacggggtttactacaatgagttggaaaccaggggtccgccttagtaagcgccgggccaaggcttggggttcagtcaggcaccaacgccctgcttgtggtcaaacatcgggacatgaatgagaaggaactggaagctcaggaaacacggaaggcccagctagaaaaccacgaaccggaggaggaagaggaagaggagatggagacagaagagaaagaagctgggggctcagatgaggagcaggagaagggcagcagcagtgagaaggagggcagtgaagatgagcactcgggcagcgagagtgaacgggaggaaggtgacaggcacgaggccagtgacaagagtggcagtggtcacggacgacagcagcgactactaggcccgggctgcccgtgacaaagaggagatctttggcagtgatgctgattctgaggacgatgccgactctgatgatgaggacagaggacaggcccaaggtggcagtgacaatgattcagacagcggtcgcaatcgggggtggccagcggaccaggagccacagccgcagcgccagtcccttccccagtggcagcgagcactcggcccaggagaatggccagtgaagctgcagcttctgattccagtgaagctgatagtgacagtgactgagtcccagggcattcagggctgggttcagacaccattattgtgagcagcaaagcacttttctagtggtctgtttgtgagcctttcacttgtttgttccccacccccaaacctttgctgttaataaagtcaacttctctttacttcaaaaaaaaaaaaaaa

SEQ ID NO: 19674 - DNA, 888 bp, Homo sapiens
  SIMILAR (328)..(885): 931254mologous to Homo sapiens TTAGGG repeat binding factor 1,accession number AF003001,Smith-Waterman Score=872.
atgccggcggatggtagagatgccgaccctaccgaggagcagatggcagaaacagagagaaacgacgaggagcagttcgaatgccaggaacggctcaagtgccaggtgcaggtgggggcccccgaggaggaggaggaggacgcgggcctggtggccaaggccgaggccgtggctgcaggctggatgctcgatttcctccgcttctctctttgccgagctttccgcgacggccgctcggaggacttctgcaggatccgcaacagggcagaggctattattcatggactatccagtctaacagcttaccagttgagaacgatatacatatccctgatgatttggggttcaactgaaaaggaacatgacaaacttcaagaagaaatacagaatttaattaaaattcaggctatagctgtttgtatggaaaatggcaactttaaagaagcagaagtctttgaaagaatatttggtgatccaaattcttatatgcctctcaaaagcaaattgcttatgataatctctcagaaagatacatttcattccttttttcaacacttcagctacaatcacatgatggagaaaattaagagttatgtgaattatgtgctaagtgaaaaatcatcaacctttctaatgaaggcagcagcaaaagtagtagaaagtaaaagaacaagaacaataacttctcaagataaagctaatgaaaattatgttgaaacggaaactgaagctaatttggatacaagaaaaaggtctcacaagaatcttttcttatctaagttacaacatgggacccagcaacaagaccttaataagaaagaaagaagagtaggaactcttcaaagtacaaaaaagaaaaaagaaagcagaagagccactgaaagctga

SEQ ID NO: 19675 - DNA, 361 bp, Homo sapiens
  SIMILAR (153)..(52): 411254mologous to Bacillus subtilis membrane-bound protein,accession number Z75208,Smith-Waterman Score=65.
  misc_feature (1)...(361): n = a,t,c or g
attataatgacttggtttatggccttaatatactacttaattacttaagatgtttattaatagaatgataaatgtacagagtaacctataagcatgacatacttttgctttcagtagtttcatgtaaagaaaaaaacttgaaaatagtaatacctgagtacccatgggaataatagacactggggaggtnnnnnnnnnnnnnnnnnnnnnnnnnnnnnnnnnnnnnnnnnnnnnnnnnnnnnnnnnnnnnnnnnnnnnnnnnnnnnnnnnnnnnnnnnnnnnnnnnnnnnnnnnnnnnnnnnnnnnnnnnnnnnnnnnnnnnnnnnnnnnnnnnnnnnnnnnnatcgaaataattttttta

SEQ ID NO: 19676 - DNA, 637 bp, Homo sapiens
  SIMILAR (303)..(1): 1001254mologous to Cricetulus griseus telomeric repeat binding factor 1,accession number AF043911,Smith-Waterman Score= 536.
tgtccggttgttgaatttataatgcaacagtattttagaccagtttccctctccatatttcctcacgccagatctcaaattcttgtcttcttcccaaagccatgcctgtctttttctagctcgatgtttttcaggagttaccggctgactctttgaaacaggtattctgctttcagtggctcttctgctttcttttttcttttttgtactttgaggagttcctactcttctttctttcttattaaggtcttgttgctgggttccatgttgcaacttagataagaaaagattcttgtgagacctaaaataaaacaggaaagtttgtaattggctccagaaagatagtaaggcaatggaaaacaggtaaatgatttgccttaatctgttctaggatcttctattaatactttggcctacttcctttggtgctctccctgcttagtaccccatcttaacctgtggcctcttaagatttctgttgcctgtctcatctttctccatctcatctactccgcagaaatcaagatgttttttgatgtctcagaagaagcaggcaaaaaaaagaaaagacaagactctttcggccttccaattagatacatcaaggaaaaaaatccttaaactacaaagtattagc

SEQ ID NO: 19677 - DNA, 2700 bp, Homo sapiens
  SIMILAR (22)..(1344): 831254mologous to Homo sapiens telomeric repeat binding factor,accession number U40705,Smith-Waterman Score=1810.
ccgggtcgaaccacgcgttcgatggcggaggatgttttcttatcggccccgatcccgcggggctgtgcggatggtagggatgccgaccctactgaggagcatatggcacaaacagagagaaacgacgaggagcagttcgaatgccaggaactgctctagtgccatgtgcaggtgggggcccccgaggaggaggaggaggaggaggaggacgcggtcctggtggccgaggccgaggccgtggctgccggctggatgctcaatttcctctgcctctctctttgccgagctttccgcgaagggcgctccgaggacttccgcaggacccgcaacagcgcagaggctattattcatggactatgcagtctaacagcttgccagttgagaacgatatacatatgtcagtttttgacaagaattgcagcaggaaaaacccttgatgcacagtttgaaaatgatgaacgaattacacccttggaatcagccctgatgatttggggttcaattgaaaaggaacatgacaaacttcatgaagaaatacagaatttaattaaaattcaggctatagctgtttgtatggaaaatggcaactttaaaggagcagaagaagtctttgaaagaatatttggtgatccaaattctccatatgcctttcaaaagcaaattgcttatgataatctctcagaaagatacatttcattccttttttccaacacttcagctacaaccacatgatggagaaaattaagagttatgtggaattatgtgctaagtgaaaaatcatcaacctttctaatgaaggcagcggcaaaagtagtagaaagcaaaaggacaagaacaataacttctcaagataaacctagtggtaatgatgttgaaatggaaactgaagctaatttgggatacaagaaaaagtgttagttgacaaacagtctgcggtaactgaatcctcagagggtacagtatccttattgagggtctcacaagaatcttttctatctaaagttgcaacatggaacccagcaacaagaccttaataagaaagaaagaagagtaggaactcctcaaagtacaaaaaagaaaaaagaaagcagaagagccactgaaagcagaatacctgtttcaaagagtcagccggtaactcctgaaaaacatcgagctagaaaaagacaggcatggctttgggaagaagacaagaatttgagatctggcgtgaggaaatatggagagggaaactggtctaaaatactgttgcattataaattcaacaaccggacaagtgtcatgttaaaagacagatggaggaccatgaagaaactaaaactgatttcctcagacagcgaagactgattgtgtttgtaaaagcttgatgaaaggacagttaagtattttgatcactgcattttgtttgaaacttgtgtcattgatgtaatttaaaacttttgtttaaagcattacagtatttttctgtgacccatcaaataaatgagggtttgtgctaccagagttaaagcatatgctatcattgtattctttaagaaccttattttgataaaatgtaaatttgttgaaccctgccacatttagtatccccacccccaaatcctgttccaatgaaaaaattaaaacctgatacgaaaaaaaaaaaattccagttaacctattttgtgtctgtaggctgacctcaaccctgtaacgtaacccattaaaatgaatttctttttttttaagacagagtttctctctgttgcccaggctggagtgcagtggcgcaatttcagctcactgaacctctgcctcccaggtcaagtgattctcctgcctcagcctctgagtagctgggattacaggcacacaccaccagccagctaatttttgtatttttagtagaggcggggtttcaccatgctggtcaggatgttctccaactcctgacttcatgatccacccacctcggcctcccaaagtgctgagattacagacgtgagccactgcgtcctgcctaaaatgaattttctagatgattgaataacagtagtagtcctttgatagaagataatgacttggtttatggccttaatatactacttaattacttaagatgtttattaatagaatgataaatgtacagagtaacctataagcatgacatacttttgctttcagtagtttcatgtaaagaaaaaaacttgaaaatagtaatacctgagtacccatgggaataatagacactggggaggtagggtggggagcgggacgaagagctgaaaaacttacctactggggactgtgctcactacctgggtgacaggatcatacgtaccccaaacctcaacatcacacagtatactcagctaacaaacctgcccatgtgtttcctgaatctaaaataaaaatcgaaataatttttttaaaaaagaaaaagacaatagtattacccatgggacaaaatttgtactattagcaagaatcattttgtgtctcatttagaaacaatttgacttttgttccagtgtttaaactttgacaaaaatggttttgaatagatctttataacctgatgcctaaatacaagattctctgataccttcatttaatatatcaatattggcctaaaacgtattctgtaaagcttaaattggtattaactatgatcatcttgatgtctatgatagataataaacaaggtcatacataccttaa

SEQ ID NO: 19678 - DNA, 3019 bp, Homo sapiens
  SIMILAR (506)..(1228): 711254mologous to Homo sapiens TTAGGG repeat binding factor 1,accession number AF003001,Smith-Waterman Score=800.
  misc_feature (1)...(3019): n = a,t,c or g
attcccgggtcgacgatttcgtgcctgaaggggcagtacccaagcgagccatttaacatggcggaggatgtttcctcagcggccccgagcccgcggcggtgtgcggatggtagggatncccgaccctactgaggagcagatggcagaaacagagagaaacgacgaggagcagttcgaatgcccaggaactgctcgagtgccaggtgcaggtgggggcccccgaggaggaggaggaggaggaggaggaggacgcgggcctggtggccgaggccgaggccgtggctgccggctggatgctcgatttcctctgcctctctctttgccgagctttccgcgacggccgctccgaggacttccgcaggacccgcaacagcgcaaaggctattatttatggactatccatgctaacagcttgcccgttgagaacgatatacatatgtcaggtttttgacaagaattgcagcaggaaaaaccccttgaatgcacaggtttgaaaatgatgaaccgaattacaccccttggaatcagcccctgaatgatttggggttcaattgaaaaggaacatgacaaacttcatgaagaaatacagaatttaattaaaattcaggctatagctgtttgtatggaaaatggcaactttaaagaagcagaagaagtctttgaaagaatatttggtgatccaaattctcatatgcctttcaaaagcaaattgcttatgataatctctcagaaagatacatttcattccttttttcaacacttcagctgacaaccacatgatgggggaaaattaagagttatgtgaattatgtgctaagtgaaaaatcatcaacctttctaatggaaggcagcggcaaaagtagtagaaagcaaaaggacaagaacaataacttctcaagataaacctagtggtaatgatgttgaaatggaaactgaagctaatttggatacaagaaaaaggtctcacaagaatcttttcttatctaagttgcaacatggaacccagcaacaagaccttaataagaaagaaagaagagtaggaactcctcaaagtacaaaacaagaaaaaaggaaggcagaagagccactgaaagcagaatacctgtttcaaagagtcagccgggtaactcctgaaaacgatcgagctagaaaaaagacaggcatggctttggggaaggaaggacaagattttgagatcctggcgtgagggaatttgggagaggggaacttggtcttaaatactgttgcattataaattccaacaaccgggacaagtgtcatgtttaaaagccagatgggaggaccatggaaggaaacttaaaactggatttcctccaggacagcgaagactggattgtgtttgttaaaagctttgatggaaagggacagtttaagtattttgatcactgcattttgtttgaaacttgtgtcattgatgtaatttaaaacttttgttttaaggcattacagtatttttctgtgaccatcaattaatatgagggtttgtgctaccagagttaaagcatatgctatcattgtattctttaagaaccttattttgataaaatgtaaatttgttgaacccttgccacatttagtatccccaccgcggaaatccttgttccaatgaaaaaattaaaacctgatacgaaaaaaaaaaaattccagttaacctattttgtgtctgtaggctgacctcaaccctgtaacgtaacccattaaaatgaatttctttttttttaagacagagtttctctctgttgcccaggctggagtgcagtggcgcaatttcagctcactgcaacctctgcctcccaggttcaagtgattctcctgcctcagcctcctgagtagctgggattacaggcacacaccaccacgcccagctaatttttgtatttttagtagaggcggggtttcaccatgctggtcaggatgttctccaactcctggacttcatggatccacccacctcgggcctcccaaagtgctggaggatttacagacgtggggccactgcgtcctgcctaaaatgaattttctaggatgattgaataacagtagtagtcctttgatagaagataatgacttggtttatggccttaatatactacttaattacttaagatgtttattaatagaatgataaatgtacagagtaacctataagcatgacatacttttgctttcagtagtttcatgtaaagaaaaaaacttcgaaaatagtaatacctgagtacccatgggaataatagacactggggaggtagggtggggagcgggacgaagagctgaaaaacttacctactggggactgtgctcacctacctgggtgacaggatcataccgtaccccaaacctcaacatcacacagtatactcagctaacaaacctgcccatgtgtttcctggaatctaaaataaaaatccgaaataatttttttaaaaaagaaaaagaccatagtattaccccatggggcaaaattttgtcctattagcaagaatcattttgtgtctcatttagaaacaatttgacttttgttccagtgtttaaactttttngggacaaaaatggttttggaatagatctttataacctgatgccataaataccaagattcccctgataccttcatttaatatatcaatattgggcctaaaacagtattctgtaaagcttaaattggtattaactatgatccatcttggatgtcctatggatagataataaacaagggccataccatacccttacctaaacaatttttgggtttttcaccaacattttattccttaaaaagatttagacctaaccagaattatttagcatttcgagtcatgtgctttatttagcaagtgagtaaaaatattggaatattgaagtatttgcataaaaaatcaaatggtggtgttttgtaatctctattgtatttcctattaaggtttcatatatgactttcccattgttcctaaatttgttatcctatatataaacagaaacatggttgagtcccataaaa

SEQ ID NO: 19679 - DNA, 1023 bp, Homo sapiens
  SIMILAR (484)..(1014): 981254mologous to Homo sapiens NF-E2,accession number L24122,Smith-Waterman Score=940.
atggaggggctgttcttggctgtggatgaaattgtagatggaggggtgatcctagagagtgatccccagcaggtggtacaccgggtggcattaaggctcatcaaccaaggccccagctccattagccagggtgtgctggaactcagctgtccccaggctctggaaggtcagcagctcctatatgtgaccagagttacgggactcaactggcccaccaatcaccccattaacccaaagggcctggaggaccccatcatcccttcagttcccgttaccaccacaccccagtttcccctcccagtggacgaaagagaagggaggagggggcctgaggaacagctcatcaaccaaggccccagctccattagccagggtgtgctggaactcagctgtccccaggctctggaaggtcagcagctcctatatgtgaccagagttacgggactcaactgcaccaccaatcaccccattaacccaaagggcctggagggtctgaatgctccaagtgagccatcatttgagccccaagccccagctccataccttggacctccaccacccacaacttactgcccctgctcaatccacccagattctggcttcccacttcctccaccaccttatgagctcccagcatccacatcccatgtcccagatcccccatactcctatggcaacatggccataccagtctccaagccactgagcctctcaggcctgctcagtgagccgctccaagaccccttagccctcctggacattgggctgccagcagggccacctaagccccaagaagacccagaatccgactcaggattatccctcaactatagcgatgctgaatctcttgagctggaggggacagaggctggtcggcggcgcagcgaatatgtagagatgtacccagtggagtacccctactcactcatgcccaactccttggcccactccaactataccttgccagctgctgagacccccttggccttagagccctcctcaggcactgtgcagactgcataa

SEQ ID NO: 19680 - DNA, 1695 bp, Homo sapiens
  SIMILAR (1137)..(1000): 951254mologous to Mus musculus hematopoietic zinc finger protein,accession number AF118566,Smith-Waterman Score=234.
ctagtccaagtctgggactgcagctgcagctgttgagaatttgccacaactccacaaggcggcgccaacgacccggaaaaggagtctaagcccgaggctaagccgctcctgtaatgtgtttcgagattccacgcagatgggtctagactcagtctcagacaaagaaaagaatccaggcttttgtgtgtcaactccttcagcatgaaaccagctccttagcacgatacacaaggtcccccttgaccctgcctgctcaactctccaagctcttctctgttgttctctactcatgccctttgtggcttttcccacgggtgccccgtggtgaagacctccaggaggtagtgcaaacttgctgaccctagcaggtgtagctctaacacctcttttcctttgacacaggtttctagagccatctgggctttccgggaacctggaccagactctggcccagtaggatgtccccgtgtcctccccagcagagcaggaacagggtgatacagctgtccacttcagagctccgcctgcccttggcaactgggcccgtttaccccaggtaacagagcagtagttcaggggcctcaggaaggggagtcggactatgccagggtcctctcctcctgctacttggacaaaggggtgtctgttggcttgacaatgatgcctttgtccccagctgggctggagcagggtggctccctgatgtaggttgggggccttgtttctagcatgttctctacttctcgctgcacccttgaggtgtttttgaagatacgcggttacttcacgccgtggtgaagatgctccaccacagtgcttgttgtcaaaagactgggttccttttacttccattctgaactgccctcctctgcccccgcaaacagggttgattctttgcatggaaccataaacctcctgaagcctcatgaggcaatttatgtttgtagaggctgcagtttctgggttcttggcaatgattttttcctcctcactcttggatatggtgctgtagttgctgaagaggccaagggtaggggctggctcgagtgggaagggcaggatctgcttgaggtccagtgggggctgcatgatcgggggctgccgtagcagaggcaggggccctgcccggctcaggctgctggtggatggtggaagactagaggggcagggagccaacagcagatagcccttcccactttttgccctaccctcccctcccccatcaaatggttctgttttgacagctgtctccactgctgttttctgtccccagagctgggctcggggccagggtcctccagggtgtccacagaggcccaggtcttcaccacgggctggttggtggttgtaaatctcgtggagattcaagccgaggctgtcaaaagcacggctaccactgattctcatcaaggttacgcagttccgagcaggaaacgggtcttcctcgtatagaacttcactcttgcttgcagacgtctggaggcttatgtagccctgactcgtttcactgcagcagttacatagctgtctgcagctcaagtccattttgtgaacggtttgtttgttaataagctgtatgtaacttagttctgcttgtgtcgtcctcctgtgtgatatgctcaccatctgttgcagaaggacataatggatttcatctttggcaaacaagttgggcttattggccagctgtctcat

SEQ ID NO: 19681 - DNA, 333 bp, Homo sapiens
  SIMILAR (2)..(268): 951254mologous to Homo sapiens ribosomal protein,accession number D23660,Smith-Waterman Score=433.
cggcacgagtattgaggaagttcctgaacttcctttggtagttgaagataaagttgaaggctacaagaagaccaaggaagctgttttgctccttaagaaacttaaagcctggaatgatatcaaaaaggtctatgcctctcaccgaatgagagctggcaaaggcaaaatgagaaaccgtcgccgtatccagcgcaggggcccgtgcatcatctataatgaggataatggtatcatcaaggccttcagaaacatccctggaatctgtcttccctgactcggctcctcaggtctttagcctccaccttgtctaagctttggtctataaagtgcgct

SEQ ID NO: 19682 - DNA, 1801 bp, Homo sapiens
  SIMILAR (426)..(1103): 571254mologous to Homo sapiens NF-E2,accession number L24122,Smith-Waterman Score=513.
  misc_feature (1)...(1801): n = a,t,c or g
aggggctgtctgcttgcctctttccacaacttgttcttggggatcctcaagcatatactgtcatcatcttggaaagaaaaggctgagaacgtaaaactgaggacagaggaggaaaagcagggtgacccctgatgttgccctagaaaatggaaaacaaaacacagcaaaacagaaaaacagaagatctgactctgcctttagccagggaaaacagtttggggggagtaaaaagtattagggaaaagagtggggcattttgcctgggaaaaaaggttttctagagccatctggggcttttccggggaacctgggaccagactctgggcccagttagggatgttccccgtgtcctccccaagcagagcaaggaacagggtgatacagctgtccacttcagagctaggagagatggaactgacttgggcagggagatcatgtccatcaccgaggcttgcagggtcttgaatgctccaagtgagccatcatttgaagccccaaagccccagcttccatacctttggacctccaccacccacaacttacttgcccctgcttcaatccacccagattctgggtttcccatttccttccaccaccttatgagctcccaggcatccacatcccatgtcccagatcccccatactcctatgggcaacatggccataccagtctccaaggccactgagcctctcaggcctgctcagtgagcccgctccaagaccccttagccctcctggacattgggctgccagcagggccacctaagccccaagaagacccagaatccgactcaggattatccctcaactatagcgatgctgaatctcttgagctggaggggacagaggctggtcggcggcgcagcgaattatgtaggagatgttacccagtgggagtacccctactcactcatgcccaactccttggcccactccaactataccttggccagctgctgagacccccttggccttagagccctcctcagggccctgtgcgggctaagcccactgcacggggggagggcaagggagtcgggatgaacgtcgggcccttggccatgaagatttctttttcctacggacaagattgtcaacttcccggtagatgactttaatgagctattggcaaggtacccgctgacagagagccagctagcgctagtccgggacatccgacgacggggcaaaaacaaggtggcagcccagaactgccgcaagaggaagctggaaacccattgtgcacttggagcggaagctggagcggctgaccaatgaaccgggagcggctttctcagggccccgcggggaggcaagccgggaccctgaaggtcatgcgccaacagtttgcaagagctgtacccgtgaacattttcccagccaccttcgggaatgaaatccaggccaaacagcctactctccctgaaagaagtaacgcgcctgcaaacaggcctgcccgaatggggacccatccttcccttgtggcccccgggggacccaagatggaggcccacagactgagcttggccccanaggggtggaactgcctgatgggattttccttcattcccttctgataaaggtactccccaaccctgagtcccagaaggagctgagttctcttagaccagaagaggatgacaatggcaacaagtgttttggaagtttccaaggtgtgttcaaagaggcttgccttgagggagggctggaatctgtcttccctgactcggctcctcagggtctttagcctccaccttgtctaagctttggtctataaagtgcgctacagaaatggcaaaaa

SEQ ID NO: 19683 - DNA, 408 bp, Homo sapiens
  SIMILAR (1)..(408): 991254mologous to Homo sapiens CLN3 protein,accession number AF015602,Smith-Waterman Score=744.
ctgaacttgatgcgatgggaggctgtgcaggctcgcggcggcgcttttcggattccgagggtggacccaggcccaacgccgatcccccacaacagctcatcacgatttgactgcaactctgtctctacggctcccccgggttctcgtcagtgggatttgtgctgctggaagcttcgtcctggttgccttttctcattctgtggggaccagcctgtgtgctatttcttgttgctcacatctcctgaggcccaggaccctggaggggaagaagaagcagagagcgcagcccggcagcccctcataagaaccgaggccccggagtcgaagccaggctccagctccagcctctcccttcgggaaaggtggacagtgttcaagggtctgctgtggtacattgttcccttggtc

SEQ ID NO: 19684 - DNA, 762 bp, Homo sapiens
  SIMILAR (1)..(759): 1001254mologous to Homo sapiens CLN3 protein,accession number AF077965,Smith-Waterman Score=1334.
atgggaggctgtgcaggctcgcggcggcgcttttcggattccgagggggaggagaccgtcccggagccccggctccctctgttggaccatcagggcgcgcattggaagaacgcggtgggcttctggctgctgggcctttgcaacaacttctcttatgtggtgatgctgagtgccgcccacgacatccttagccacaagaggacatcgggaaaccagagccatgtggacccaggcccaacgccgatcccccacaacagctcatcacgatttgactgcaactctgtctctacggctgctgtgctcctggcggacatcctccccacactcgtcatcaaattgttggctcctcttggccttcacctgctgccctacagcccccgggttctcgtcagtgggatttgtgctgctggaagcttcgtcctggttgccttttctcattctgtggggaccagcctgtgtggctccagctccagcctctcccttcgggaaaggtggacagtgttcaagggtctgctgtggtacattgttcccttggtcgtagtttactttgccgagtatttcattaaccagggactttttgaactcctctttttctggaacacttccctgagtcacgctcagcaataccgctggtaccagatgctgtaccaggctggcgtctttgcctcccgctcttctctccgctgctgtcgcatccgtttcacctgggccctggccctgctgcagatggagtctcgctctgttgcccaggctggaatgtag

SEQ ID NO: 19685 - DNA, 1818 bp, Homo sapiens
  SIMILAR (1258)..(1803): 951254mologous to Homo sapiens putative p150,accession number U93569,Smith-Waterman Score=892.
atgaccgctcggcgaagacaaactagaactgacacacgaaacaacacccaccagcggaagatctttctccttgttttcggatttacacaaccgctgcggcgaggccatcgcacggcaacaaaaaccagggcacacctcagaaactccaagcgggaaccacccaacccagaaataaaaacccccacccgccccccccctcccattttattaaatccaaatcggcgctatacgatggcagtagtcagtagccacaagcagacgaaccaagcacgcacggaccacagcaccccgcaccgcccacacacaaggcgacacggacacaactcttttcaagtattcttggagtgcccccgcgcacccacgggggccaccctccaccgctccccccccgacgacacgcatacccgcgtactccaaaacggacccccccggcgcctctccaaaggccctatacaaggacacttgccgttttctttcctaggtatccaaagtgtactagcgtgggcacttcgggtagtgcccaaaaatcggcgctatacgatggcagtgctcttttcattacctgaaaatcggcgctatacgatggcagtaaccattggtcgagctatcgtggctgctgatttctttatcatctttcagctctggcagaatacggttcgccagctgtttacccagttccacgccccactggtcgaagggaagcttggctggcaaggtgtcggtgtgaccatcccagtgcttgtcctccccccaggtgtggtcttcgctagcatctcatcaggccttggggaggtcaccttcctctccctcactgccttctaccccagggccgtgatctcctggtggtcctcagggactgggggagctgggctgctgggggccctgtcctacctgggcctcacccaggccggcctctcccctcagcagaccctgctgtccatgctgggtatccctgccctgctgctggccagcaactcactctccccacggcaagtgaaaggcatgtcgatctgccgcgcgcaaatcggtcaacctgtcggctctccggaaatgtctcggagtagttcctcgcccagcgtatttaacgtcgtagttcgggttgcccctcgggtagctcccggaagaaacgaaagaggagctgtccacccccatgggttggaccataggatgcgcacttattcaggagatcatcgtgcttggttgaccaccctcaagttatacgggtgtgtgaaggcacaaagacagcgtaacggcattagaagtccaggaccagatggattcacagccgaattctaccagaggtacaaggaggaactggtaccattccttctgaaactattccaatcaatagaaaaagagggaatcctccctaactcattttatgaggccagcatcatactgataccaaagccgcgcacagacacaaccaaaaaagagaattttagaccaatatccttgatgaacattgatgcaaaaatcctcaataaaatactggcaaaccgaatccagcagcacatcaaaaagcttatccaccatgatcaagtgggcttcatccctgggatgcaaggctggttcaatatacacaaatcaataaatgtaatccagcatataaacagaaccaaagacaaaaaccacatgattatctcaatagatgcagaaaaggcctttgaaaaaattcaacaacccttcatgttaaaaactctcaataaattaggtattcacgggacgtatctcaaaataataagagctatctatgacaaacccacagccaatatcatactgaatgggcaaaaactggaagcattgcatgcgttgtga

SEQ ID NO: 19686 - DNA, 1131 bp, Homo sapiens
  SIMILAR (1)..(609): 1001254mologous to Homo sapiens CLN3 protein,accession number AF015598,Smith-Waterman Score=1114.
atgggaggctgtgcaggctcgcggcggcgcttttcggattccgagggggaggagaccgtcccggagccccggctccctctgttggaccatcagggcgcgcattggaagaacgcggtgggcttctggctgctgggcctttgcaacaacttctcttatgtggtgatgctgagtgccgcccacgacatccttagccacaagaggacatcgggaaaccagagccatgtggacccaggcccaacgccgatcccccacaacagctcatcacgatttgactgcaactctgtctctacggctcccccgggttctcgtcagtgggatttgtgctgctggaagcttcgtcctggttgccttttctcattctgtggggaccagcctgtgtgctatttcttgttgctcacatctcctgaggcccaggaccctggaggggaagaagaagcagagagcgcagcccggcagcccctcataagaaccgaggccccggagtcgaagccaggctccagctccagcctctcccttcgggaaaggtggacagtgttcaagggtctgctgtggtacattgttcccttggtcgtagtttactttgccgagtatttcattaaccagggacttgtaagtgaggggtgcctttttaggccatttcctttttctgccctcaatgtctgtgaagtgaaccttgttaaagtcagtcaacaccagggtggatgggttgccgttgtcacccaaggaaaaaagcatcccatttcctgccgccgtttgaatgttgacgggatgaacataataagcaatgacggcagcaataaactcaacaggagcaggaaagcgagggtatcctacaaagtccagcgtaccataaacgcaagcctcaacgcagcgacgagcacgagagcggtcagtagcaatccaaactttgttactcgtcagaaaatcgaaatcatcttcggttaaatccaaaacggcagaagcctgaatgagcctcggaatccgaaaagcgccgccgcgagcctgcacagcctcccatcgcatcaagttcaggtcccccgagggtccagggtcatagagtgtccaaagggggctcccacgggagggatgagggttgtttgttccagccaacacctgaggatagggccccat

SEQ ID NO: 19687 - DNA, 1858 bp, Homo sapiens
  SIMILAR (209)..(1015): 661254mologous to Homo sapiens CLN3 protein,accession number AF077972,Smith-Waterman Score=766.
tggagcccccagcttccttgatggatcgcgggggcagctgccctagacaagccggagctgggaccggcaatcgggcgttgatccttgtcacctgtcgcagaccctcatccctcccgtgggagccccctttggacactctatgaccctggaccctcgggggacctgaacttgatgcgatggataggctgtgcaggctcgcggcggcgcttttcggattccgaggggggaggagaccgtccctgagccccggctccctctgttggaccatgagggcgcgcattggaagaacgcggagggcttctggctgctgggcctttgcaacaacttctcttatgtggtgatgctgagtgccgcccacgacatccttagccacaagaggacatcggggaaaccagagccatgtgggacccagggcccaacggcgattcccccacaacagcttattcacgatttgactgcaactctgtcttttacgggtgctgtgctcctgggcggacatcctccccacactcgtcatcaaattgttgggctcctcttgggctttcacctgctgccctacaggtctggcccccgggttctcgtcagtggggatttgtgctggtgggaagtttcgtcctgggtttgccttttctcattctgtgggggaccagcctgtgtgggtgttggtctttcgctagcatctcatcaggccttgggggaggtcaccttcctctccctcactgccttctaccccagggccgtgatctcctggtggtcctcagggactgggggagctgggctgctgggggccctgtcctacctgggcctcacccaggccggcctctcccctcagcagaccctgctgtccatgctgggtatccctgccctgctgctggccagctatttcttgttgctcacatctcctgaggcccagggaccctgaaaggggagaagaagcaaaaaggccaggccggccagcccttcataagaaccgagggcccggaagtggaagccaggctccagctccagcctctccccttcgggaaaggtggacagtggtcaagggtctgctgtgggtaccattgttcccttggttcgaggttacttttccgaagtatttcataacccagggactttttgaactccctcttttttctggaccacttccctgagtcacgctcagcaataccgctggtaccagatgctgtaccaggctggcgtctttgcctcccgctcttctctccgctcgatgtagtattggtttcacctggggccctggccctgttgcaatgccttcaacctgggtgttcctgctggcagacgtgtggttcggctttctgccaagcatctacctcgtctttcctgatcattcctgtatgagggggctccctggggaagcgcaagcctacgtgaaaaacctttccaacaacattcgcccttggagaccaagtgatgagcaccgggaagtttgcaaatggcggccaccctgccatctctgacacactggaggattcatcctgtcgggggcttccctggctttgcctctgcatgacttccttctgcccagctctcctgatactcgggatcctcaggacgcaggtcacattcacctgtgggcaagagggacaggttatcaatagtctggctgtctatcgtcatcgtgagactgactttggtgtaggagttcgagaccaccctggccaacatggcaaaaccccatctcccacgaaaaattggataatttgataattatcattattgggtttctgagacgttacacatttaacgttctcttctgcacaagttgcctttgtgtgagtatactaactttctgtagaggtatacttgtaatcacaaataagaataaattatataaaac

SEQ ID NO: 19688 - DNA, 1184 bp, Homo sapiens
  SIMILAR (291)..(737): 651254mologous to Homo sapiens Human secreted protein sequence clone mh703_1,accession number Y22499,Smith-Waterman Score =416.
atgacaattgtgggacatacggatgttgtaaaagatgtggcctgggtgaaaaaagatagtttgtcctgcttattattgagtgcttctatggatcagactattctcttatgggagtggaatgtagagagaaacaaagtgaaagccctacactgctgtagaggtcatgctggaagtgtagattctatagctgttgatggctcaggaacctaaattttgcagtggcctccctgggataagatgctaaagatcctggtctacagtccctacagatgaagaagatgaaatggaggagtccacaaaatccgaccaagaaagaaaccagaagaccagaacagttgggacttaaccaaggactccccatagtgaccctctctggccacatggaggcagtttcctcagttctgtggtcagatgctgaagaaatctgcagtgcatcttgggaccatacaattagagtgtgggatgttgagtctggcagtcttaagtcaactttgacaggaaataaagtgttaattggaatttcctattctcccactttgtaaacgtttagcatctggaagccacagataggcatatccagactgtgggatccccgaactaaagatggtttctttggtgtcgctgtcccctaacgtcacatactggttgggtgacatcagtaaaatggtctcctaccccatgaacagcagctgatttcaggatctttagataacattgttaagctgtgggataccaagaagttgtaaggctcctctctatgatctggctgctcatgaagacaaagttctggagtgtagactggacagacacagggctacttctgagtggaggagcagacaataaattgtattcctacagaatattcacctaccacttttcccaatgtttgggggcatggaaatgtgaacaattaatttgactaaatagagattattttctgtaaaatgaaattggtaagagaaccaatgaaattacatagatgcagatgcagaaagcagccttttgaagtttatataatgttttcacccttcataacagctaacgtatcactttttcttattttgtatttataataagataggttgtgtttataaaatacaaactgtggcatacattctctatacaaacttgaaattaaactgagttttacatttctctttaaaggtaaaaaaaaaaaaaaaaaa

SEQ ID NO: 19689 - DNA, 465 bp, Homo sapiens
  SIMILAR (403)..(2): 821254mologous to Homo sapiens MAP kinase kinase MEK5b,accession number U71087,Smith-Waterman Score=564.
  misc_feature (1)...(465): n = a,t,c or g
cggcatttccatcattgaactgcacgatgaacgggtggcccatcaattcttcaggtgctggcctttcttttggctgttttcgcatacactgagtgatgaaatgtacaaatggctccgagaactctccaactggaaggacgggcgaatcctcatcaacaatgcactgcagaagctggagaggcattaaagatccctggtttttctgaatctgaggatatggaaacctcccaagagcaagctccataaaagagattcctaagctccagacatcagaatgaattccatactgctcccctgaaatcctttcaggtgctactgcaattcttccaaggacatgttctggcattttcctatatacatccaaagatcccccatccatgaattctgtacatattgaaatcctgttttctacaaaaaatgctccataaaatccgaattcgnnngnnnggnctaatgtctaccaan

SEQ ID NO: 19690 - DNA, 413 bp, Homo sapiens
  SIMILAR (52)..(144): 961254mologous to Rattus norvegicus MEK5beta,accession number U37463,Smith-Waterman Score=161.
cagtatggaattcattctgatgtctggagcttaggaatctcttttatggagcctctccagcttctgcagtgcattgttgatgaggattcgcccgtccttccagttggagagttctcggagccatttgtacatttcatcactcagtggtgagcccgtttacaaacatgccatgccctcaatgtaaatgatacatgccattaactcggcagctccgtgagaccttatggctctccctgcatccttttggagacaggagggacttcggggccttgggcagatggggcagcaaagctgaagaaattgtttaaattatgtaaacgttatttacacaaagggtcataagcatacttcagagcctttttcctgatttaataaactgctgaaagtcatgatacttctttaagcacaaaaaa

SEQ ID NO: 19691 - DNA, 1717 bp, Homo sapiens
  SIMILAR (1)..(1140): 1001254mologous to Homo sapiens MAP kinase kinase MEK5b,accession number U71087,Smith-Waterman Score=1965.
atgctgtggctagcccttggcccctttcctgccatggagaaccaggtgctggtaattcgcatcaagatcccaaatagtggcgcggtggactggacagtgcactccgggccgcagttactcttcagggatgtgctggatgtgataggccaggttctgcctgaagcaacaactacagcatttgaatatgaagatgaagatggtgatcgaattacagtgagaagtgatgaggaaatgaaggcaatgctgtcatattattattccacagtaatggaacagcaagtaaatggacagttaatagagcctctgcagatatttccaagagcctgcaagcctcctggggaacggaacatacatggcctgaaggtgaatactcgggccggaccctctcaacacagcagcccagcagtctcagattcacttccaagcaatagcttaaagaagtcttctgctgaactgaaaaaaatactagccaatggccagatgaatgaacaagacatacgatatcgggacactcttggtcatggcaacggaggcacagtctacaaagcatatcatgtcccgagtgggaaaatattagctgtaaaggtcatactactagatattacactggaacttcagaagcaaattatgtctgaattggaaattctttataagtgcgattcatcatatatcattggattttatggagcattttttgtagaaaacaggatttcaatatgtacagaattcatggatgggggatctttggatgtatataggaaaatgccagaacatgtccttggaagaattgcagtagcagttgttaaaggccttacttatttgtggagtttaaagattttacatagagacgtgaagccctccaatatgctagtaaacacaagaggacaggttaagctgtgtgattttggagttagcactcagctggtgaattctatagccaagacgtatgttggaacaaatgcttatatggcgcctgaaaggatttcaggggagcagtatggaattcattctgatgtctggagcttaggaatctcttttatggagcttgctcttgggaggtttccatatcctcagattcagaaaaaccagggatctttaatgcctctccagcttctgcagtgcattgttgatgaggattcggcccgtccttccagttggagagttctcggagccatttgtacatttcatcactcagtgtatgcgaaaacagccaaaagaaaggccagcacctgaagaattgatgggccacccgttcatcgtgcagttcaatgatggaaatgccgccgtggtgtccatgtgggtgtgccgggcgctggaggagaggcggagccagcaggggcccccgtgaggctgccgcagggcactgaaagcccaggaccagtaaccaaggagaacaacccacccgtcgcccttctccgtatgctgcctgcgccagaagagcttttgctgggccctgggcttccctgccctcgccttcacctctgtcagcaggtggccttgcctggggagccccatgtgtggcccaccccaccaggccatccccataccttctggtttgaaggcgctgacactggcagagaggtaaagggtggggcattgagaatggaggctcccagggtccctgcccacttctgttttcctaatgtttttctctataaagggtcaggcccgtcagcatcactgatgggaataaaagtattaatgctttgtgacagcc

SEQ ID NO: 19692 - DNA, 2949 bp, Homo sapiens
  SIMILAR (1481)..(2866): 271254mologous to Leishmania major L8453.1,accession number AC008054,Smith-Waterman Score=215.
  misc_feature (1)...(2949): n = a,t,c or g
gactctgaaacctctgacgcccccgcgggacctgatgggcagccacgccgcaaccgcaccgggccacccaccaccattatcacttctccacttctcatcatcacacactccctttatgctgtgattcagaaaaaccagggatctttaatggattcgcccgtccttccagttggagagttctcggagccatttgtacatttcatcactcagtggggctgtgtcagcaaggatctttggttacaggtgacagaaacccaatttggacaatctaaaggaaacaagaaatgtgttaagaaggccctggcatgtgtcccgggacccatgctgagcatgcagcggcacctcagaggcttttcactggcatgggagagtgtgaataacaaattggatgcacctgagattcggatgattagtgtgttttgtgaatctccacgacttgaggggaactacaacacatttaaagatgctgcaagaaatcagaagggagcctgtgagtggacggatgctactcaggaaaacacatacaccaaaataagctcagctaagctttgcctctggaatactctcgctctaactctggggaaggcagatcggcaaccctggaatgctggtttatgcaaggcctgtggcaccagctctggactggaaagtgccttctccaaaacaagctttcctcccgtcaaggaggtcacaccagtcaccaccatcaaaaacgcatttcaggcttctgtacatttaattttcttcaacatcaccctggaaaccacaggaaaacaaaaaaagaacaacgaaaaaacccttactcaagaggccagtggcacaattctgccattcacaaggatcagcttcctccgacaaactcatgagtgtcggcaccccaagtgtctagccacctcaccatggcccactggagtcatcctgtgccccatccaacaccgtacaacactggtcctgcggctgctctctcagaccagggacaggagctgggtgggtctcctggcactggccaaagcgcggggagctgtccgtagcttggtgctgaacggggacgcagagtcgacgctgcacaccccctggagcggcggcatggaggctctcaccactcagctggggccggggcgcgagggcagttcctcgcccaactccaagcaggagctgcagccgtactcgggctccagcgctctcaaacccaaccagatctccaacaccctcctcaagaactacagctataatgagatccacaaccgccgcgtggccctgggcatcacgtgcgtgcagtgcacgccgagaagctgcggcatgatcactaagcgagaggccgaaagaatgtgcaagtcgttcctgggcgagcacaaaccacccaagctgcccgagaacttcgccttcgatgtggtgcacgagtgcgcgtggggctcgcgtgtgcatcaagggcggctacaacagtgtgtacccaagcccaacaagttcatcttccactcgcaccgaactccgcacgcaaagtacacgcagcccgacgccgccaacttcaactccgggcgtcctcacctcaaactcagtcacaagtcgcccacagacgaactgagccacgccccccagcaagaaaagcccatgtttaatggcggcacgcgcaagcgcaccttctccctacaaggaggcggcggaggcggtcccaatggcgggtcgggagggcccggtggcggcgccggcgtacgaagctacccggtgatcccggtgcccagcaaaggctttgggctcctgcaaaagctgcccccaccacttttcccccatccttacggcttccctacggccttcggcctatgccccaaaaaggacgacccggttttaggcgcgggcgagccaaagggcggtcctggcactgggagcggcggcggcggcgcggggacaggcggggccaagccaaggccgtggcggcagccgtggcggcggcagcggcggcggcagcggcagctgctggcagcggtgccccagagcccctggacggtgccgagccagccaaagagagtggcctcggcgcggaggagcgctgcccgagcgctctgtcccgcgggcccctggacgaagatcgcacggacgaggcgctgccaccgcccctggccccgttgcctgcgccgcccccgcccgcccgcacgcaaaggctcctacgtgtcggccttccggccggtggtcaaggacaccgagagcatcgctaagctctacgggagcgcccgggaggcgtacggcgcggggcctgctcgggggccgggacccggcgctgggagcggcggctacgtgagcccggactttctgagcgagggcagctccagctacaattccgcctcgcccgacgtggacaccgcggacgagcccgaggtggacgtggaatccaaccgcttccccgacgacgaggacgcccaagaggagaccgagcccagcgcacccagcgcagggggcggcccagacgctggccggcccgcatttggggacttggcagccgaagacttggtgcggagacctgagaggagcccgccaagcggcggcggcggctacgagctgcgagagccttgcgggcccctaggaggccccgcgccggccaaggtgttcgcgcccgagagggatgagcacgtaaagagcgcggcggtggcgctggggcccccggcctcctacgtatgcacccccgaggcccnacgaacccctcttacctgcccctgtatcccaggcgaagatgggcttaccttggatgtcacaggaactcatttggtggagaaagatatcgagaacctggccagagataccctgtgtaacgaactcgaccaggagcggaaggcgcgctatgccatccagcagaaattgaaagaagcccaagacgccctgcaccatttctcctgcaagatgctgacgccccgccactgcactggcaactgctccttcaagccaccgctgttgccctag

SEQ ID NO: 19693 - DNA, 2577 bp, Homo sapiens
  SIMILAR (1679)..(2170): 471254mologous to Homo sapiens ribosomal protein L7,accession number X57958,Smith-Waterman Score=216.
tcctgaagagatgctatgttacctttgaatcagaccctgatggacactgagaagcaggttgctctgcaagcagcagagagatttggggatgagctttgtatcacacatagtgccagggaagggggtgaatattatccaaccagaagagaagcagtatcaatggatgaccctaaatgggatcccatgcccctatcctgggcctatataaacctgagaccctagtgggcagacacacgagcagctggatgtcatgaggaacacatcggcagaagaagatgtaagtggctggtcatagagaggacgtcgagaggagcactccagcaaaagagttagagccccatagcctgcccatctctatgctcccctagaggttttgagcagcaggacactgaagaagcgagctacacccccatcgcatgttctgcgaggtggatgagagaaccctccccacctaactccaaccttcttgcctctcttataaggacgcttctgataacatttcactcatctggacaatccagtcttgcaaatgagggcatcaggggttatcctgatgaacgacagttggcctaaagtggactggttcttggtgccccaggtggtgcacatggtgccaatggtagcagtcacagctctgggtggacaagtctttgggtgcccagatgccatgtgcaggcaccagaagtggcagtggaaggctgggaaggctggtatttgggtccccagacaacacacacaggccgtggtagtggcaatggcagtcgcagacattcagaggccttcatggtggtggcagtggggcctaagagaaccaatccctggattcccaagcagctcgtgcagcctcctaatgtgctggactgcctgttttctgagttgtagggcactcaggtgccagggatgtgcccgtcttctgaattcaactggtgtatcaatgctggctgggattgggctggcagtgggtcctctctcgtcacagggctggagtgggaagagagctgctggagccatggtttctctcgggtggtgagatttgcagccaggtctagcttggcaacctgggaccagttttgcagccataaaaaaggattacttcatgtcctttgtaggacatggatgaagctggaaaccatcaatgcaattcccatcaaaatatcaccataattcttcacagaactagaagaaacaatcctcaaatttatatggaatcaaaaaagagcctgcatatccaaagcaagagtgaatacaaacgataaatctggaggcatcacattacctgacttcaaactatacaacgaggctatagttgccaaaacaacatggtactggtataaaagcaggcacatagaccaagagaagagaagagaagagaagagaagagaaaagaaggatccttctgtgccagaaacccttaagaaaaagcaaaggaatttcacagagctaaagatcaagcgccttgagaaagaagtttgcccaacagatgctttcgaaaggcaaggcagcaagctaatctatgaaaaagcaaagcactatcccaaggaaatataggaaaatgtacagaacttgaatttcgaatgggcgaggatgggcaagaaaaagctggccaactttatttggtcctcaagaaccccaaattcgccgttgctcataagaaatcagaaggtatcaatgggagtgagccccacagcttcgaaaagttgttgtcagctttcttcgcccttcgtcaaaatcttcaaatgaaacctttgtgaaagccctcaaacaaaggccctccgattaaaccatgccctgaggattggtaagaggccccatataattgccatgggggtaccccccccaatcctgaagtccagtaaatgaaccctaatcctacaagccgtggttatggccaaaatccaataagaagcggaattgcctttgacagataacgctttgattgcctcgatctcttgggtaaattccgccttcatctgcatgcgacgatttgattcatgagatctatactgtttggaaaacgcttcaaaagaggcaaataacttcctgtggccccttcaaattgtccttctcccacgaggtggaaatgaagaaaaagaccacccattttgtagaaggtggagatgctggcacacagcggagtgaccagatcaacaggcttattagaagaatgaactaaggtgagagacctcatcctgagaaaggttgagttaatgttagagtataagtggtggtaatcttgaatacttttcccattaaatattgatgggggtttgaattttaatcagtgcttttgtggggagtgggggtcaactatcttaatgattacaggtgggtttgtttacgtgcttttgaggacctttctggaggaaaggaaaagcctgttttggggagtctttaaagatggaaattgggtggtcttaaaaatgtaaactcaatcattactttataactgcctagtttatgttaattgttagctgcctaaagtgttttctaatggttttcttttttcctttcaggtgtctaccatgattatttttctaagctggttggttaataaacagtacctgctctcaaattgaa

SEQ ID NO: 19694 - DNA, 361 bp, Homo sapiens; identical to SEQ ID NO: 1462
  SIMILAR (3)..(170): 891254mologous to Homo sapiens Polypeptide identified by the signal sequence trap method,accession number Y02377,Smith-Waterman Score=255.

SEQ ID NO: 19695 - DNA, 428 bp, Homo sapiens
  SIMILAR (287)..(415): 971254mologous to Homo sapiens unnamed protein product,accession number AX059850,Smith-Waterman Score=237.
tatatggcttcctctcccccatcaccccttaatcctgaaacagctgtgaggtagataccattatctgcactttatataaatacttagtcttctacggctaagagcagggttcaaacccaggtattccaacctgtgctatttggagtatattaatccacctgtctttactaaaggtgaaaacttttgcatgtggttcaatagtcagggagaagttagaaaaaaagtaatggaagaataatcatgaatttgtatgcttctatacattaactagctctttctccctttttccagagttctcttggaacggttgattgtaaataggccacatccttggggtcttcttattaccttcattgagctgattaaaaacccagcgtttaagttctggaaccatgaatttgtacactgtgcccccggacgcgtgggtc

SEQ ID NO: 19696 - DNA, 2239 bp, Homo sapiens
  SIMILAR (920)..(1453): 951254mologous to Homo sapiens Polypeptide identified by the signal sequence trap method,accession number Y02377,Smith-Waterman Score=892.
atgagtttcctgtatgaattattaagacttttaaagtttgcgtttttaaagaagtttaaaggcatttatatgcagtatattgagtatggacaagcagtctagagatcctcctgtgaaaatgcaaggctctatcacaacccctggaagtattgcactggctcaggcccaggctcaggcccaggttccagcaaaagctcctcttgctggtcaagttagcactatggtaaccacctcaacaactaccactgttgctaaaacggttacggtcaccaggccaactggagtcagctttaagaaagatgtgccaccttctattaatactacaaatatagatacgttgcttgtggccacagatcaaactgagagaattgtggagcccccagaaaatatccaggagaaaattgcttttattttcaataatctctcacagtcaaatatgacacaaaaggaggagctggtgaacaacacagagttggtgcagagctaccggcagcagattgggaacgtggtgaaccaggccaacctgcagctcttctggaacatgtacaacagccgcagagacctggacattaaccggcctggaacggtgcccaatgccaagacgctccgctgccccgtgatgctggtggttggggataatgcacccgctgaggacggggtggtggagtgcaactccaaactggacccgaccactacgaccttcctgaagatggcagactctggagggctgccccaggtcacacagccagggaagctgactgaagccttcaaatacttcctgcaaggcatgggctacatgccctcagccagcatgacccgcctggcacgctcccgcactgcatccctcaccagtgccagctcggtggatggcagccgcccacaggcctgcacccactcggagagcagcgaggggctgggccagttaaacttgaagtttgaaatcgaggttctctgcaagaaccttgcattagacatcaatgagctaaaacctggaaacctcctaaaggataaagatcgcctgaagaatttagatgagcaactctctgctccaaagaaagatgtcaagcagccagaagaactccctcccatcacaaccacaacaacttctactacaccagctaccaacagcacttgtacagccacggttccaccacagccacagtacagctaccacgacatcaatgtctattcccttgcgggcttggtaccacacattactctaaatccaacagcccatccacagttgaagcagtgtgtgcgtcaggcaattgaacgggctgtccaggagctggtccatcctgtggtggatcgatcaattaagattgccatgactacttgtgagcaaatagtcaggaaggattttgccctggattcggaggaatctcgaatgcgaatagcagctcatcacatgatgcgtaacttgacagctggaatggctatgattacatgcaggaaccttgctcatgagcatatctaccaacttaaaaaacagttttgcctcagcccttcgtactgcttccccactacaaagagaaatgatggatcaggcagctgctcaaatttaagctcaggacaattgttttcttctttcaaggttggtggtgtggacccaaagcagttggctgtttacgaagagtttgcacgcaatgttcctggcttcttacctacaaatgacttaagtcagcccacgggatttttagcccagcccatgaagcaagcttgggcaacagatgatgtagctcagatttatgataagtgtattacagaactggagcaacatctacatgccatcccaccaactttggccatgaaccctcaagctcaggctcttcgaagtctcttggaggttgtagttttatctcgaaactctcgggatgccatagctgctcttggattgctccaaaagtcaatggagaatggcttaaactacatggctgtggcatttgctatgcagttagtaaaaatcctgctggtggatgaaaggagtgttgctcatgttactgaggcagatctgttccacaccattgaaaccctcatgaggattaatgctcattccagaggcaatgctccagaaggaatggatataacaactaggcagaaggtcaacaagaaaagagaaggcttcaacgataccataaatcaaccagctacacctaatagacaatctatagaacacttgacccaacaagagcagaatatgcagtcttctcaaatgcacatggaacattctccagagtag

SEQ ID NO: 19697 - DNA, 4071 bp, Homo sapiens
  SIMILAR (854)..(2005): 911254mologous to Homo sapiens Polypeptide identified by the signal sequence trap method,accession number Y02377,Smith-Waterman Score=1757.
aagaatcctgaatttaacaagatggttctgaatgagacctacagaaacattaaagtgctcctgacctctgataaagctgcagccaatttctcagatcgttctttgctgaagaacttgggacattggctaggaatgatcacattagctaaaaacaaacccatcttacacactgacttggatgtgaaatcattgctgctagaggcttatgttaaaggacaacaagaattgctctatgtagtgccctttgttgccaaagtcttagaatctagcattcgtagtgtggtttttaggccaccaaacccttggacaatggcaattatgaatgtattagctgagctacatcaggagcatgacttaaagttaaacttgaagtttgaaatcgaggttctctgcaagaaccttgcattagacatcaatgagctaaaacctggaaacctcctaaaggataaagatcgcctgaagaatttagatgagcaactctctgctccaaagaaagatgtcaagcagccagaagaactccctcccatcacaaccacaacaacttctactacaccagctaccaacaccacttgtacagccacggttccaccacagccacagtacagctaccacgacatcaatgtctattcccttgcgggcttggcaccacacattactctgaatccaacaattcccttgtttcaggcccatccacagttgaagcagtgtgtgcgtcaggcaattgaacgggctgtccaggagctggtccatcctgtggtggatcgatcaattaagattgccatgactacttgtgagcaaatagtcaggaaggattttgccctggattcggaggaatctcgaatgcgaatagcaagcttatcacatgatgcgtaacttgacagcttggaatggctatgattacatgccagggaacctttgctcatgagcatatctaccaactttaaaaaaacagtttttgccctcagcccttcgtactgcttccccacaacaaagagaaatgatggatcaggcagctgctcaattagctcaggacaattgtgagttggcttgctgttttattcagaagactgcagtagaaaaagcaggccctgagatggacaagagattagcaactgaatttgagctgagaaaacatgctaggcaagaaggacgcagatactgtgatcctgttgttttaacatatcaagctgaacggatgccagagcaaatcaggctgaaagttggtggtgtggacccaaagcagttggctgtttacgaagagtttgcacgcaatgttcctggcttcttacctacaaatgacttaagtcagcccacgggatttttagcccagcccatgaagcaagcttgggcaacagatgatgtagctcagatttatgataagtgtattacagaactggagcaacatctacatgccatcccaccaactttggccatgaaccctcaagctcaggctcttcgaagtctcttggaggttgtagttttatctcgaaactctcgggatgccatagctgctcttggattgctccaaaaggctgtagagggcttactagatgccacaagtggtgctgatgctgaccttctgctgcgctacagggaatgccacctcttggtcctaaaagctctgcaggatggccgggcatatgggtctccatggtgcaacaaacagatcacaaggtgcctaattgaatgtcgagatgaatataaatataatgtggaggctgtggagctgctaattcgcaatcatttggttaatatgcagcagtatgatcttcacctagcgcagtcaatggagaatggcttaaactacatggctgtggcatttgctatgcagttagtaaaaatcctgctggtggatgaaaggagtgttgctcatgttactgaggcagatctgttccacaccattgaaaccctcatgaggattaatgctcattccagaggcaatgctccagaaggattgccccagcttgattggaagtagtgcggatccaactatgaagcaatgatttgatcgtgctcatggaggcccaaactttatgatgcattctgggatctctcaagcctcagagtatgatgaccctccaggcctgagggagaaggcagagtatcttctgagggaatgggtgaatctctaccattcagcagcagctggccgcgacagtaccaaagctttctctgcatttgttggacagatgcaccagcagggaatactgaagaccgatgatctcataacaaggttctttccgtctgtgtacttgaaatgtgtgttgaaatcagttaccgtgctcaggctgagcagcaggacaatcctgctggcaatcccaacatgatccgagccaagtgctatcacaacctggatgcctttgttcgactcattgcactgctcgtgaaacactcaggggaggccaccaacactgtcacaaagattaatctgctgaacaaggtccttggtatagtagtgggagttctccttcaggatcatgatgttcgtcagagtgaatttcagcaacttccctaccatcgaatttttatcatgcttctcttggaactcaatgcacctgagcatgtgttggaaaccattaatttccagacacttacagctttctgcaatacacttccacatgttgaggccctaccaaagctccctggctttgtatatgcctggcttgaactgatttcccatccggatatttattgcaagaatgctgggcacataccgccacaagcagaaggtgggtggcctatggtatgcacagctacctgattgatttaattccaaattatttaagcgcctttccttagaaatgtggaactcaccaaaacctatggcaaatcctctacaaggggcactttaagaagtgcctgctggttcttttgcatgatttcccagagttccttttgtgattaccattatggggttctgttgatgtgatcccacctaattgtatccagttaagaaatttgatcctgagtgtcctttccaagaaacatgaggctccccgacccattcactcctaatctaaaggtggacatgttgagtgaaattaacattgctccccggattctcaccaatttcactgggagtaatgccaccttcagttcaaaaaggatttggaggcctatcttaaaactcggttcaccagttcactttcctgtctgatctgcggcgaacccttacaggtattccatggaaccgggggattcggttacaacctccagcttcatcaatggcactgggtgcttctaatgtcggggactcaaggccattgcggcacatccacaacaaggggcaggcacacctttcaatggaggcaccattcactcacttcaggcacacatgggattatctttccaggaattttgggctgtgggatttgggacactggaggggtcgctattctcttttttggaatggcaatttggcaaatcagcttccgggtaccccaaataggcacactcactaccttcaggttggaaccatggcggaaccttttttgcagagggccaatacgggaagccatcccaagaacagatcacaagagtcctcttgggaacggttgattgttaaataggcccacatccttggggtcttcttattaccttcattgagctgattaaaaaccagcggtttaaggttctggaacccatgaaatttgttacacttgtgccccaggaaattcggaaaagttatttccagtcgggtcggcacagttgctggcatggggacaggaagggcagggccccagcaagttaattgggagggggacagggttgcccagttagggacggaaacttgcatctctgttgtacgtgttcagtcttggaggtctcacttgcaccgagttcataaaactgactgaagaatcctttcagctccttcctgaactttccccaggccctttggttttgtgggtaatctggcccaactaactggtggggatcagccctcctggcctaatgtgggcacggttcccaaggtttaaatgccatttttttgacccttggccaaaatttagaagatgctgtgaatatcattttgaaacttgtgtaaatacatgaaagagaaaaaaaaaa

SEQ ID NO: 19698 - DNA, 1817 bp, Homo sapiens
  SIMILAR (218)..(1000): 471254mologous to Homo sapiens 2,3 biphosphoglycerated mutase (AA 1 - 259),accession number X04327,Smith-Waterman Score=450.
  misc_feature (1)...(1817): n = a,t,c or g
aggggctagaaaagagcgtcgatgccggcggcagtgatgagtcctaggaggcgctggctctttggcggctcggaggagccgctgcttgctgctgctgctgctgctgctggtggcccctttgcaagatgtattgctgtccttgaatattagcccatttgaaaacgcctcggaagttcagccatcagtatgtccaagtacaaacttattatgttaagacaatggagagggtgcttggaataaggagaaccgtttttgtagctgggtggatcaagaaactcaacagcgaaggaatggaggaagctcggaactgtgggaagcaactcaaagcgttaaactttgagtttgatcttgtattcacatctgtccttaatcgggccattcccaccgcccggcttgatcctgggaagagctaggccaggaatgggtgcctgtggaaagctcctggcgtctaaatgagcgtcactaatggggccttgaatcggtctcaacagggagcagaatggcttttgaatcatggtgaaagaacaagtgaggctcctggagaagaagctacaatgtaacccccgcctcccattgaggaagtctcatccttacctaccaagaaatctacaaccgacccggaggtataaaagtatgcgatgtgccctytggatcaactgccacggtcggaaagctttaaaggatgttctgggagagattccttccctattgggaatgaaaggattgctcccgaagtatttacgtgggcaaaaccattctgatatctgctcatgggaaataggcagtaggggcactcctaaaacacctgggaaggtatncttcaggattgaagacatccatcaacatttactctttcctactgggagtccccattcttctgggaattggatggaaaacctgcgtgctgttgggcctcactcaattcctgggtgaccaagaggcgatccaagcagccattaagaaagtagaagatcaaggaaaagtgaaacaagctaaaaaatagtctttctcaactgttggctaagaagaaatgcaaaagaagtggcataggagtgtgttatgggtgctgaactctctctctttttccccgattttccagagctaggctgtggagtaaagtccgcataggttacttagggaacctattgtgtcccaagataacgcttttaggatgcctcagtgcttatgtcatagccttatgagttagctttcttgctagcccccttagtcggtcacaacatagttacctagtggggcttaatgaaggtccataagtttctgagatgggagaagcaacaaagtagagatgacagttaaagggtatttatcattcaagaaattcattattgagtcaccaattgacaggcactattctaatccagtagtccacctttaatatttaataaaaatttttctgggataaccagtaagggatattgggataatatccccgtatgtatttattacctagtcctttccccctaggaaaagggatactttgataattaaggccagaggccccattagttgaggaaagtcacagattctattttctcccaagaaagcccaacaacccacccacccacaatgacagaaatgacaacaaggccctttaacttgtcttcctagtttagagacatcccttcatttgacatttagtagaattcctctttggccacaagaataaggcagcaaataaacaactatggctgttgaggttctcattttggtttgttttaattttttgaactttgggtacctgtaattagtttaaaaataaagttcctgataataaagtgactgaaaatggcatcccc

SEQ ID NO: 19699 - DNA, 1620 bp, Homo sapiens
  SIMILAR (1324)..(1211): 711254mologous to Homo sapiens PNAS-104,accession number AF275800,Smith-Waterman Score=129.
atccgagactctgtctaaaaaaaaatagtattaaagatactctaaatttggaaagggaaatgaggttattacaatactaagcatctgacaggtcacttgtcatggctgaacaaagctgggataaaattacagcatttcaaatcccctcttcaagatggttgggtgtcaagttactttaagattttcttttcaaaattaaaatcactacatttcattgtttcaatactcacaggacacctgtaagctcttattcagaaatcaaatgacaatttctcaaatttttctatgtattttctctggtgttttaatggttttttttctaattattactacttcacaagtttctttcacaaacttcttcacagggttaaaaattttttttcttgttataaagttctgggtttcagaatttcttcaccaccagactggtacatatatccacatttatcttttattcatttctatgaagtcgttttttctatatgcttcacctttgacattcatgatcctgtcacattttcaggcctctctgtccagtatttttggcttttgtagctctctttttagacaaagcagcttcttcagtaatatcctcttcttctaagtatacactcagtcttacagggaattcagaacttactatgaaactatcccctgccaatttgatatcacattcgttatcttcaagatgtgttgcatcctcatcctctgctgttgacctcctcaataggagaaatggatccatcatcatccaaaaatttggtatctacggactggtcaaaatcttcattttctaaatcttcaccaacattcatttgcttcaatgattctttcaggtggtgttcatacttcagtttttcaatatagttaaaaaatccttcttgcaaccagctggctccaaacgttaaaaatttttctccaaggtgcggtttttttcatttctctgattctaaaaatgggaagccagatcctctgcttctaaattgtttcttcttatctattagtgagtatataggatttctccttccttctggtcttccccgtggtcttcctgttggctggtacctcctctttttcttttttttatatctctttttcctgttcttgaatctttcaaaaaatagcttttatagtcaatggtattggttcaaaagatgagtcaacttgatgaatcacttgcgtgaacaacttttcagggtgtacggaacaaaattttcgaatgggggtttcttttctccccgttaggtgagctaagggatacactgagttttaaataagctgctatcagaagagttatcacttcgatttgcaagttccacagcatcagatgtcacatgggtcaagagaatctattcctgatttatccgatcaattgctctttgttttaaacagttttctaaaacggcctcgcagtggccccaacccgcgcacttgctgcttgtaacccaggcctcggcccaaaaccccgccgactggcctggtgccgtgagtcctagagctctggtacacaccaccctccccgaccttccagcccctcccaactccccgataacccagccgacctcctccaaccggacgcgtgggcggacgcgtgggcggacgcgtgggcggacgcgtggg

SEQ ID NO: 19700 - DNA, 433 bp, Homo sapiens
  SIMILAR (157)..(432): 791254mologous to Homo sapiens FLJ00075 protein,accession number AK024481,Smith-Waterman Score=344.
  misc_feature (1)...(433): n = a,t,c or g
cgtccgtggctccatcttcacgggcgcccaggaccctggcctgcagagacgcccccgccacaggatccagagcaagcaccgccccctggacgagcgggccctgcaggagaagctgaaggactttcctgtgtgcgtgagcaccaagccggaggccgaggacgatgcanaagagggacttgggggtcttcccagcaacatcagctctgtcagctccttgctgctcttcaacaccaccgagaacctgtcccagagaactacttctatgtgccagacctgggccaggtgcctgagattgatgttccatcctacctgcctgacctgcccggcattgccaacgacctcatgtacattgccgacctgggccccggcattgccccctctgcccctggcaccattccagaactgcccacctttcacactgaggtagccgagg

SEQ ID NO: 19701 - DNA, 549 bp, Homo sapiens
  SIMILAR (280)..(477): 761254mologous to Homo sapiens Extended human secreted protein sequence, SEQ ID NO. 164,accession number Y35915,Smith- Waterman Score=272.
cctgtaggccaaggcgccaggcaggacgacagcagcagcagcgcatctccttcagtgagagccacgagccaaggtgggcacttgatgtcggatctcttcaacaagctggtcatgaggcgcaagggcatctctgggaaaggacctggggctggtgaggggcccggaggagcctttgtccgcgtgtcagactccatccctcctttgccgccaccgcagcagccacaggcagaggaggacgaggacgactgggaatcgtagggggctccatgacaccttccccccccagacccagacttgggccgttgctctgacatggacacagccaggacaagctgctcagacctgcttccctgggagggggtgacggaaccagcagtgtgtggagaccagcttcaaggagcggaaggctggcttgaggccacacagctggggcggggacttgtctgcctgtacttcatggggggacggctccacccagcctgcgccactgtgttcttaagaggcttccagagaaaacggcacaccaatcaataaagaactgagcagaaa

SEQ ID NO: 19702 - DNA, 969 bp, Homo sapiens
  SIMILAR (637)..(849): 951254mologous to Homo sapiens Extended human secreted protein sequence, SEQ ID NO. 185,accession number Y35936,Smith- Waterman Score=357.
ggggctcaggcatggcagggctgggagtaccagcaggcactcaagcggcttaagtgttccatgacagactggtatgaaggtggccacaattcagaaagaaaaaagaagagcaccatctcctttcaggttgtggcccgattcagcatgactgacttcacagcccacagaacaggatgtcaggccccatgcgatgttaaggctgaggctgaaactgatgaagccttggggatctcccagcaggtagagcagagccggagccaggtgcaggccattggagagaaggtctccttggcccaggccaagattgagaagatcaagggcagcaagaaggccatcaaggtgttctccagtgccaagtaccctgctccagagcgcctgcaggaatatggctccatcttcacgggcgcccaggaccctggcctgcagagacgcccccgccacaggatccagagcaagcaccgccccctggacgagcgggccctgcaggagaagctgaaggactttcctgtgtgcgtgagcaccaagccggagcccgaggacgatgcagaagagggacttgggggtcttcccagcaacatcagctctaagtatgtcttcctggaccccctggctggtgctgtaacaaagacccatgtgatgctgggggcagagacagaggagaagctgtttgatgcccccttgtccatcagcaagagagagcagctggaacagcaggtccctgagaactacttctatgtgccagacctgggccaggtgcctgagattgatgttccatcctacctgcctgacctgcccggcattgccaacgacctcatgtacattgccgacctgggccccgcattgccccctctgcccctggcaccattccagaactgcccaccttccacactgaggccaaggcgccaggcaggacgacagcagcagcagcgcgtctccttcaggtgggagcagctctttgaggccacctga

SEQ ID NO: 19703 - DNA, 436 bp, Homo sapiens
  SIMILAR (129)..(422): 351254mologous to Caenorhabditis elegans Y48E1B.1,accession number Z93393,Smith-Waterman Score=105.
aactgagactgtcagagcatttctagcttttgggtccagctctgcagggtgggggctagagaggaagcagggagtatctgcacacaggatgcccgcgctcaggtggttgcagaagtcagtgcccaggcccccccacacagtctccaaaggtccggcctccccagcgcggggctcctcgtttgaggggaggtgacttccctcccagcaggctcttggacacagtaagcttccccagccctgcctgagcagcctttcctccttgccctgttccccacctcccggctccagtccagggagctcccagggaagtggtcgacccctccggtggctgggccactctgctagagtccatccgccgagctgggggcatcggcaaggccaagctgcgcagcatgaaggagcgaaagctggagaagaagaagcagaaggagcagga

SEQ ID NO: 19704 - DNA, 1666 bp, Homo sapiens
  SIMILAR (1028)..(1207): 981254mologous to Homo sapiens FLJ00075 protein,accession number AK024481,Smith-Waterman Score=320.
atgactcctgtgaggatgcagcactccctggcaggtcagacctatgccgtgccccctcatccagccagacctgcggtgagaggaggccgtccagcagatggcagatgccctgcagtacctgcagaaggtctctggagacatcttcagcaggagccagccacagggatgtctggggaaatggcgttccatgagatgcaagcacacaagaatgcacttggcacatctggggaacagcaggcagctgatatcactgggcccaccctgcaccagggaggatggaagcagatagcatgtacaggtggcagcatagggcctgtccctactgagagtgcagggaactcagcaccgtcaactcctcgaccctgcaggtcagattatccttgtagaggccccctggatggcaccaagatcggccctggcaagcaggtagagcagagccggagccaggtgacaggccattggagagaaggtctccttggcccaggccaagagttgagaagatcaagggcagcaagaaggccatcaaggtgttctccagtgccaaagtaccctgctccagagcgcctgcaggaatatggctccatcttcacgggcgcccaggaccctggcctgcagagacgcccccgccacaggatccagagcaagcaccgcccccgtggacgagcgggccctgcaggagaagctgaaggaatttcctgtgtgcgtgagcaccaaggccggagcccgaggacgatgcagaagagggacttgggggtcttcccagcaacatcagctctgtcagctccttgctgctcttcaacaccaccgagaacctgtatggccagagggcagggccgaggggtgtgggcgggaggcccggcctggcttagtggggacccagggcatcagacacaggtacaagaagtatgtcttcctggaccccctggctggtgctgtaacaaagacccatgtgatgctgggggcagagacagaggagaagctgtttgatgcccccttgtccatcagcaagagagagcagctggaacagcaggtccctgagaactacttctatgtgccagacctgggccaggtgcctgagattgatgttccatcctacctgcctgacctgcccggcattgccaacgacctcatgtacattgccgacctgggccccagcattgccccctctgcccctggcaccattccagaactgcccaccttccacactgggtaccgagctcgaattcgcgctgttgtaggagcaagggatacaatgatgatcaaggcagatgcagcccttaccttcaggtcgtggagtccggatacagactggaggcaggcagctgtaagatgtgtgacaaatgctgcgctggatcagcccatggtattaggagagcaggtggggcgtacacccccggcgatgtttgaagtaatatcaacttctccccctctggatgttagaaacaatatcacaggggggtgtacacccccctgcgatcctgggagtaacatcatcctctttcccccggatattaggaacaatatcacagaaggcatctctgggaaaggacctggggctggtgaggggcccggaggagcctttgcccgtgtgtcagactccatccctcctctgccgccaccgcagcagccacaggcagaggaggacgaggatgactgggaatcctag

SEQ ID NO: 19705 - DNA, 1567 bp, Homo sapiens
  SIMILAR (304)..(462): 961254mologous to Homo sapiens FLJ00075 protein,accession number AK024481,Smith-Waterman Score=258.
ggaggcaggaggaagacttgggggtcttcccagcaacatcagctctgtcagctccttgctgctcttcaacaccaccgagaacctgtatggccagagggcagggccgaggggtgtgggcgggaggcccggcctggcttagtggggacccaggtcatcagacacaggtacagcacataggccaggagccagggggtgactggggtggctcggcttgggaggcctgggaccccacagtgcacgctgtgcccctgatgatgtgggagaggaacatgggctcaggacagcgggtgtcatcttgcctgacccccatgtcgcctctgtaggtagaagaagtatgtcttcctggaccccctggctggtgctgtaacaaagacccatgtgatgctgggggcagagacagaggagaagctgtttgatgcccccttgtccatcagcaagagagagcagctggaacagcaggtcccagagaactacttctatgtgccagacctggggccagggtgcctgagattgaatgttccatcctacctgcctgacctgcccagcatttgccaaccgacctcatgtacattgccgacctggggccccggcatttgccccctctgcccctggcaccattccagaactgcccaccttccacactgaggttagcccgagccactcaaggcagaccttacaagatggggttacttaaacagcaccaccaccacccccaccgcccccaccacctcccccagctcctgaggtgctgggccagttgcaacccccacttcccacccttcaaccgcggcccctgttagggcaaggcgccagggagggacggacagcagcagcagcgcgtctccttcagtccagggagctcccagggaagtggtcgacccctccggtggctgggccactctgctagagtccatccgccaagctgggggcatcggcaaggcctagctgcgcagcatgaaaggaagcgaaacgtggagaagaagaagcagaaggagcaggagcaagtgagagccacgagccaaggtgggcacttgatgtcggatctcttcaacaagctggtcatgaggcgcaagggccatctctgggaaaaggaccctggggcttggtgaggggccccggaggagccttttgccccgtttgtcagactcccatccctccctctgccgccaccgcagcagccacaggcaagaggaggacgcaggacgactgggaatcctagggggctcccatgacacctttcccccccagacccagacttgggccgttgctctgacatggacacagcccaggacaagctgctcagacctgcttccctggggagggggtgacggaaccagcactgtgtggagaccagcttcaaggagcggaaggctcggcttgaggccacacagctggttcgggtgacttctgtctgcctgttgctccatggggggacggctccacccatgcctgcggccactgtgttcttctcttaagaggcttccagagaaaacggcacaccaatcaataaagaactgagcagaaaccaacagtgtgcttttaataaaggatctctagctgtgcagga

SEQ ID NO: 19706 - DNA, 600 bp, Homo sapiens
  SIMILAR (1)..(225): 631254mologous to Mus musculus gamma actin-like protein,accession number AF195094,Smith-Waterman Score=228.
  misc_feature (1)...(600): n = a,t,c or g
atgcagaagtagatcaccgcctgggcgccagcacccatgaagatcaagatcatcgcaccnccagagcgcaagtactcggtgtggatcggtggctccatctggcctcaactgtccacctccagcagatgtggattagcaagcaggagtacgacgagtcgggcccctccatcgtccaccgcaaatgcttctaaacggactcagcagatgcgtagcatatgctgcatgggttaattgagaatagaaatttgcccctggcaaatgcacacacctcatgctagcctcacgaaactggcaagaaccagttgttttgtcttgcgggtctgtcagggttggaaagtccaagccgtaggacccagtttcctttcttagctgatgtctttggccagaacaccgtgggctgttacttgctttgagttggaagcggtttgcatttacgcctgtaaatgtattcattcttaatttatgtaaggttttttttgtacgcaattctcgattctttgaagagatgacaacaaattttggttttctactgttatgtgagaacattaggccccagcaacacgtcattgtgtaaggacccataaaagtgctgccgtaacc

SEQ ID NO: 19707 - DNA, 1013 bp, Homo sapiens
  SIMILAR (980)..(627): 411254mologous to Homo sapiens coding sequence (1 is 3rd base in codon),accession number V00478,Smith-Waterman Score=163.
  misc_feature (1)...(1013): n = a,t,c or g
tttttttttttttttttttggttacggcagcacttttatttttccttacacaaagacgagcccgctggggccctaatgtgtctcacataactaggagaaaaccaaagatttgttgtcatctctttaaagaatcgagaattgcgtacaaaaaaaaccttacataaattaagaatgaatacatttacaggcgtaaatgcaaaccgcttccaactcaaggcaagttaacagcccaccggggttttggccaaagacatcagctaagaaaggaaaactgggtcctatcggcttggactttccaaccctgacagacccgcaagacaaaaacaactggtttcttgccagcctctagaggaaatcccaggaacactcagccctggacacgtttanttaccaagggggaacagtttaactttcaatacaagggtcaaatttcaggcaacaagtttcttacaatccagttgcttgattttcggatacaagctttcaagggacatttcttttcgaaggcttatttccagtttcgtgagggctagccatgaggtgtgtgcatttgcccaggggcaaatttccaatccccatttaacccatgcagcaaatggctacggcatctggctgagtccgtttagaaagcattttgcggttggacgaatggaggggccccgacctcgcgtacttcttgcttgctaatcccacatctgcctggaaggtggacagtgaggccaggatggagccaaccgatccacccaccgagtacttgcgcttcctgggggtgcaatgatcttgaatctcaatgttgcctgggcggcaggggcgtggatttctttctgcatccctgtcaacaatgcccccgatacctggtggttgccgcccggaagcaacgtgttggcgtaaaggtctttggcggattgccacgtcaaactttatgaatgggagtgaaaggtggtctcgtggatgccgcaagatttcataacccggaaagaaaggttggaagaggccttccggaaaccgggacc

SEQ ID NO: 19708 - DNA, 2009 bp, Homo sapiens
  SIMILAR (100)..(1239): 621254mologous to Homo sapiens gamma-actin,accession number X04098,Smith-Waterman Score=998.
  misc_feature (1)...(2009): n = a,t,c or g
atccttaattaaattaatccccccccgctcagtcgccgctgccaactctcgcactctgttcttccgccgctccgccgtcgcgtttctctgccggtcgcaatggaagaagagatcgccgcgctggtcattgacaatggctccggcatgtgcaaagctggttttgctggggacgacgctccccgagccgtgtttccttccatcgtcgggcgccccagacaccagggcgtcatggtggggcatgggccaaaaaggactcctacgtgggcgacgaggcccagagcaagcgtggcatcctgaccctgaagtaccccattgagcatggcatcgtcaccaactgggacgacatggagaaagatctggcaccacaccttctacaacgagctgcgcgtggccccggaggagcacccagtgctgctgaccgaggcccccctgaaccccaaggccaacagagagaagatgactcagaattatgtttgagaccttcaacaccccggccatgtaccgtggcccatccaggccgtgctgtccctctaaagcctctgggcgcaccactggcattgtcatggactctgggagacggggtcacccacacggttgcccatcttacgagggctaccacactgctccacgccatttctgcgtctgggacctggcttggcccgggacctgaccgactacctcatgaagatcctcactgtagcgaggctacagcttcaccacccacgggccgagcgggaaaacgttccgcaacatcaagggagaagcttgtgctacgtcgcccctggacttcgagcagggagatgggcacccgncgcatcctcctcttctctggagaagagctacgagctgcccgatggccaggtcatcaccattggcaatgagcggttccggtgtccggaggcgctgttccagccttccttcctgggtatggaatcttgcggcatccacgagaccaccttcaactccatcatgaagtgtgacgtggacatccgcaaagacctgtacgccaacacgggcgctgtcgggcggcaccaccatggatccgggacattgccgacaggatgcagaagggagatcaaccgccctggcggccccagcaccatgaaaaatcaggaatcatcgcacccccagagcgcaagtaactcggtgtggatcggtggctccatcctggcctcactgtccaccttccagcagatgtggattagcaagcaggagtacgacgagtcgggcccctccattcgtccaccgcaaatgcttctaatcgaactcagcagatgcgtagcatttgctgcatgggttaattgaagaaatagaaaatttgcccctggcaaatgcacacacctcatgctagcctcacgaaaactggaataagccttcgaaaagaaattgtcccttgaagcttgtatcttgatatccagcactggattgtagaacttgttgctgattttgaccttgtattgaagttaactgttccccttggtatttgtttaatacccctgtacatatcttggagttcaaccctttagtacgtgtggcttggtcactttcgtggctaaggtaagaacgtgccttgtggaagacaagtctgtggcttggtgagtcctgtgtggccagcagcctctgatctgtgcagggtattaacgtgtcagggctgagtgttctgggatttctctagaggctggcaagaaccagttgtttttgtcttgcgggtctgtcagggttgaaaagtcccaacccgtaggacccagtttcctttcttagctgatgtctttggccagaacaccgtgggctgttaacttgccttgagttggaagcggtttgcatttacgcctgtaaatgtattcattcttaatttatgtaaggttttttttgtacgcaattctcgattctttgaagaagatgacaacaaacttttggttttctacatgttatgtgagaacattagcgccccacgcaacactgtcattgtgtaaggaaaaataaaagtgctgccgtaaccaaaaaaaaaa

SEQ ID NO: 19709 - DNA, 534 bp, Homo sapiens
  SIMILAR (102)..(533): 981254mologous to Gallus gallus reading frame,accession number V00389,Smith-Waterman Score=771.
ggcctcgtgccacgccttcccggtgaccccgcagtgggtgtgtgatgggaggacggacagacccaaacgccgccggaccaggaggacgctgacgaggcaccatgcgtgagatcgtgcacatccaggcgggccagtgcggcaaccagatcggcgccaagttttgggaggtcatcagtgatgagcatgggattgaccccactggcagttaccatggagacagtgatttgcagctggagagaatcaatgtttactacaatgaagccactggtaacaaatatgttcctcgggccatcctcgtggatctggagccaggcacgatggattcggttaggtctggaccattcggccagatcttcagaccagacaatttcgtgtttggccagagtggagccgggaataactgggccaagggccactacacagagggagccgagctggtcgactcggtcctggatgtggtgaggaaggagtcaaagagctgtgactgtatccagggctttcagctgacccactctcttgggggcggcacggggg

SEQ ID NO: 19710 - DNA, 1753 bp, Homo sapiens
  SIMILAR (483)..(1040): 501254mologous to Bombyx mori beta-tubulin,accession number X74951,Smith-Waterman Score=330.
tgggaggtctctgcgcagcccagcccggcggttccacgccgcgcaccgctccgagggctcagcgccacccgctccgcagccggcaccatgcgcgagatcgtgcacatccagggcgggccagtgcggcaaccagatcggcgccaagttttgggaggtcatcagcgatgagcattgggatcgaccccacaggcagttaccatggagacagtgacttgcagctggagagaatcaacgtgtactacaatgaggctgctggtaacaaatatgtacctcgggccatcctggtggatctggagcctggctctcatggactctgtcaggtctggacccttcggccagatctttagaccagacaacttcgtgttcggccagagtggagccgggaataactgggccaagggccactacacagagggagccgagctggtcgactcggtcctgggatgtggtgaggaaggagtcagagagctgtgactgtctccaggggcttccagctgacccactctctgggggggcggcacggggttccgggatggggcaccctgcttcatcagcaaggatccggggaagagtacccagaccgcattcatgaaacacctttcagcgttcatgcccttcacccaaggtgttcaagacacggttgttggagcccttacaacgccacacctctcggttccaccatctggtggaaaacacagatgaaaccctactccattgataacgaggccctgtattgacatctgcttgcccaccgctgaaagctgacccacccccacctacggggaccctcaacccacctgggtgttcggccaccatgagcggggttaccaccttgcttgcggtttcccggggccagctgaacgcagacctgcgcaagctggccggtgaacatggtgcccttccctcgcctgcacttcttcatgcccggcttcgcgcccctgaccagccggggcagccagcagtaccgggcgctcacggtgcccgaagctcacccagcagatgttcgactccaagaaaatgattgcccgccctgcgacccgccgcccacgggccgctaacctgacggtggctgccatcttccggggccgcatgttccatggaaggaggtgggacgaggcagatggttcaaacgttgcaggaacaaggaacaggcaggtaatttcgtgggagtgggttccccaacaacgtgaagacggcccgtgtgcgaacatcccgcccccgggggcctggaaaatgtcgggccaccttcatcggcaaccagccacgtccatccaggagactgttcaagcgcatctacgagccagttcaacggccatgtttccggcgcaaggcccttccctgcactggttacacgggcggagggccatggacggagatgggagttcacccgaggsccgagagcaacatgaacgaccctggtgtcccgagtaccagcagtacccaggaacgccacggccgacgaracaaggggagtttcgaggaggaggaggggcgaggacgaggcttaaaaacttcctcagatcaatcgtgcatccttagtgaacttctgttgtcctcaagcaatggtctttctacttgtaaactatggtgctcagttttgccactgttagaraattcacactgttgatgtaatgaatgtggaacttcctctaaaatattacaagtattgtgctgtgaagggtattctatactaaataaaaaaagcatgtgtagaaaaaaaaaaaaaaaaaaaaaaaaaaaaaagtcgtatcga

SEQ ID NO: 19711 - DNA, 386 bp, Homo sapiens; identical to SEQ ID NO: 433
  SIMILAR (381)..(262): 951254mologous to Homo sapiens calbindin D28K,accession number S46006,Smith-Waterman Score=214.

SEQ ID NO: 19712 - DNA, 455 bp, Homo sapiens
  SIMILAR (9)..(152): 891254mologous to Homo sapiens calbindin D28K,accession number S46006,Smith-Waterman Score=232.
ggacgtgcatgaaatttggtgccgtgactcgatcgggggacctcccttgggagatcaatcccctgtcctcctgttctttgctccatgagaaagatccacctacgacctcaggtcctcagaccgaccagcccaaggaacatctcaccaattttaatcagaccatcacggatgccgagcttcgggtaactctcacagtggaaggaccatcacagatgctctgggtaactctcacagtggaagacataattcctcggtttagccttcccacctctatacagtctgataatggaccagcctttactagtcaaatcacgcaagcagtttctcaggctcttggtattcagtggaaccttcatatcccttacagtcctcagtcttcaggaaaggtagaacggactaatggtcctttaaaaacacacctcaccaagctcagccaccaatttaaaaaggactag

SEQ ID NO: 19713 - DNA, 309 bp, Homo sapiens
  SIMILAR (194)..(75): 901254mologous to Homo sapiens calbindin D28K,accession number S46006,Smith-Waterman Score=197.
ctgaagctcggcgtccgtgatggtctagggggcttctgaggcgatcgggcagtgtcagtcttaagctgctaagctgatttaaaattggtgagatgttcattgggctggtcggtctgaggacctgaggtcgtaggtggatctttctcacggagcaaagagcaggaggacgggggattgatctcccaagggaggtcccccgatccgagtcacagcaccaaatttcatgcgcatctgtgtgaagagaccaccaaacaggctttgtgtgagcaacatggctgtttatttcacctgggtgcaggcgggctgagt

SEQ ID NO: 19714 - DNA, 667 bp, Homo sapiens; identical to SEQ ID NO: 3060
  SIMILAR (461)..(583): 901254mologous to Homo sapiens calbindin D28K,accession number S46006,Smith-Waterman Score=207.
  misc_feature (1)...(667): n = a,t,c or g

SEQ ID NO: 19715 - DNA, 443 bp, Homo sapiens; identical to SEQ ID NO: 9689
  SIMILAR (134)..(256): 901254mologous to Homo sapiens calbindin D28K,accession number S46006,Smith-Waterman Score=190.
  misc_feature (1)...(443): n = a,t,c or g

SEQ ID NO: 19716 - DNA, 436 bp, Homo sapiens; identical to SEQ ID NO: 15035
  SIMILAR (145)..(240): 961254mologous to Human endogenous retrovirus tripartite fusion transcript PLA2L,accession number Z14310,Smith-Waterman Score=169.
  misc_feature (1)...(436): n = a,t,c or g

SEQ ID NO: 19717 - DNA, 756 bp, Homo sapiens; identical to SEQ ID NO: 3068
  SIMILAR (67)..(186): 971254mologous to Homo sapiens calbindin D28K,accession number S46006,Smith-Waterman Score=213.

SEQ ID NO: 19718 - DNA, 825 bp, Homo sapiens
  SIMILAR (188)..(63): 801254mologous to Homo sapiens Human secreted protein, SEQ ID NO: 7115,accession number G03034,Smith-Waterman Score=170.
atggtgtgtctggagtttgttccttcagatgttcagatgtgtccagagtttcttccttccagtgggtttgtggtctcactgacttcaggagtgaagccacagaccttcgcagtgagtgttacagctcataaaggtggcacacccagagttgtttgttcctcccagtgggttcgtggtctcgctgacttcaggaatgaagctgcagaccctcacgaccagggaatggatgagaatcctactgattttctggaacggctaagaggggccttggtaaagcacatgtctctatctcctgatttagtcgagggacaattaatcctaaaggataaatttattactcaggcagcccctgatattgagaggaagctgcagaaacagaatgggccatctctcagggacatatttttcagtccccagaatggctacaattggaggatggcaagcttttatctaccagttgcgaacaaatggaaaattcttaaaagcctttaccagatcttacacctaggcccagattgggagggaccttacactgtatttctttctactcctatggcagtggaggtcactggaatagactcttggattcattacacccaagtgaaggcctggaaagctgatggagccacctctgtcaacccagaagagcacccaaagtaccaaggtgaaataaacagccatgttgctcacagaaagcctgtttggtggtctcttcacacggacgtgaatgaaatttggtgccgtgactcggatcgggggacctcccttgggaaatcaatccccggtcctcctgctctttgctccatgagaaagatccacctatga

SEQ ID NO: 19719 - DNA, 942 bp, Homo sapiens
  SIMILAR (142)..(600): 961254mologous to Homo sapiens potassium channel homolog; KvEBN2,accession number AF033347,Smith-Waterman Score=757.
atggccatgggattgttcttcattccctttctcaactgcacccagcagcagtggtttttgctaggccttttgaagacagcaggaatctgggagaaggaacatcatcgtctttcacagcatggaaacatcaatcttattccagagaagggaagaagtccccaaagccaaaagctgggtctcttggatcgggttcgcctttctaatcctcgtggtagcaatactaaaggaaagctatttacccctctgaatgtagatgccatagaagaaagtccttctaaagaaccaaagcctgttggcttaaacaataaagagcgtttccgcacggccttccgcatgaaagcctacgctttctggcagagttctgaagatgccgggacaggtgaccccatggcggaagacaggggctatgggaatgacttccccatcgaagacatgatccccaccctgaaggccgccatccgagccgtcagaattctacaattccgtctctataaaaaaaaattcaaggagactttgaggccttacgatgtgaaggatgtgattgagcagtattctgccgggcatctcgacatgctttccaggataaagtaccttcagacgagctgtttaagttctttgaagtcaatttatcctgctcagaagatagggtgtagaagggagggagaagtggtgggcaaggcgcagaggaaggaggaacaagagaggagaggagcagtggaggaaaggatgcaggagaaggagaggaaaagaactcaggaacgccagggcaaaagtgggttcctgcggttgctggtgaggcgtgagaagcgcggggctacgccgggcctctgctgccccctcctggccaaagatgggctccgcaggctccctgcggatgggaatcggctgaaactgcattttggtggttggcgaaggcgaaattatcccttctcctggctctaa

SEQ ID NO: 19720 - DNA, 996 bp, Homo sapiens
  SIMILAR (381)..(289): 931254mologous to Homo sapiens calbindin D28K,accession number S46006,Smith-Waterman Score=153.
tcattgaccccaggagcccacttggtgctctaccgccctgtactcatgctggtatctaaggtgcaagacaaagtctcctctacttttctctctgcttttctcaagcagaaggggtttcaccacatattcaccactgctggcaatttgctgagtctcacctttgaaacgtggatgaataatcagaaaggcgtccttgcaatgattaaacaccaaggaaaggctgccttcccagtccatgactggcgccagagttttgggtccacggataaaacatgtctcctttatctcagatttgaaattggtgagatgtttcttgggctggtcagtctgaggacctgaggtcataggtggatctttctcatggagcaaagagcaggaggaggggactgatctcccaagggaggtcccctgatccaagtcacggcaccaaatttcatgcgcgtccatgtgaagagaccaccaaacaggctgaagtacggtcatccaacagccaatcttctctatttctgtccccagccaaactccttgttcagatgctccttcttttctctccttctcagccatgccagtgtggtgctcgccccttcttctgctttttcctcctctgtttgtggagcttggtttccacatggccccaaaatggggtcgtggagccccatagtgttcttgaaaaccacaacttttggtgacgacaacaaaaccgcctgttctattttctacaccacccctccaccaacccgaggcagagcagcatggaaagagaatcagtatgctcaggaagggagagtgaagtgagtgtgggtctttgcactggaactcagtgtttcccaccagctgattaaggtgcccactggtccagaacaaatttgagtgataggccacaataactggagtttttggacaaacactcatgctgcactgatcttggagccagtggacttgggatgtgcatgacccagtgcgataccagttgtggcaagaaaagggagtacccat

SEQ ID NO: 19721 - DNA, 1320 bp, Homo sapiens; identical to SEQ ID NO: 9070
  SIMILAR (13)..(864): 991254mologous to Homo sapiens potassium channel homolog; KvEBN2,accession number AF033347,Smith-Waterman Score=1479.

SEQ ID NO: 19722 - DNA, 1665 bp, Homo sapiens
  SIMILAR (1120)..(1260): 841254mologous to Homo sapiens calbindin D28K,accession number S46006,Smith-Waterman Score=210.
atgactaatgcagagcattataagcatagtctccatgcttatggagcatgggccattatggcccagtgggaaatggagaattgtaaacatgaagagggaacttttccagtaagctcggggagggagcggcagagagggggagaagttactagaacccaatgctgcaatggcccccagcatatcctaagagtgtccaggttcttcacagaacctgacggtcttaatatcattggtgattattctgggcctgctcaagcagccacacaactacctatgagttggatgctgttgcatttgggctacccggaaaggaaagagatgcccttgggcaaagcagctgtctatggcaagcacactctgaaggagctgacagctggaggcaagtccttccctccagaaagggcatttgggcagtgcatctcctgtcctaccactttcttcatctgcaaaatggggatcatgatagtaccagcttgcagggttaaatgttcttccacactgactctgggcctagccatgtgtcctgttttggtccatgtgacatcagctaacataacccaagcagagacttgctgcccattttctctgaatggtggcccagcacctggagggacagagtacaaaggactctggcatgttgaattcctcaagcaacctgctggtaagcatggactctatgatgcgccagcaacacgttttgctttatccaacacatgtcctgttaagtcacggactagtgtggtctatgggctggcagaggtgaaaagatctcccttttcatgtagcttgcccacctacttacagcgttgcatcacagggtcaagtgtttctcctccacttcacgcagctcgggagccctcttgtctggaaaggctcttccctgctggtgcctccaggctgggctggttgttgctcctctatgctcccgaggtcctcagtgcctgcctttatcagaacagaggccacagcgcaccttggttaaatgtacagtctctgggaccagactgcctggactcacaactctggctccgccatttacagcccacctgcacccaggtgaaacaaccagccatgttgctcacacaaagcctgtttggtggtctcttcacacagacgcgcatgaaatttggtggatcaggggacctcccttgggagatcaatcccctgtcctcctgctctttgctccatgagaaagctccacctaccacctcaggtcctcagactgaccagcccaagaaacatctcaccaatttcaaatccgaagcgtttaggctgtttttcatcaaatataaaaatccagcccagttcacggctcgtttggcagcaaccctgagacgctttacagccctagaccctaaaagagaacaaccccctttgactgtaattttccattaccttcccaaatcctataaaacggccccacccccatctcccttcgctgactctcttttcggactcagcccacctgcacccaggcatttccctaaaaatgcactcccaagtccagggttaagccatgttttccagctcctagaagcagtgctggcagcagcagtggttgggtccatagtggtggtcaaggcaggacccacagcaggaagactctggtgctacagcagcagcagcaacgtggttctaatggcagcagcctctgtgatgaactga

SEQ ID NO: 19723 - DNA, 1384 bp, Homo sapiens
  SIMILAR (1384)..(1037): 931254mologous to Homo sapiens p40,accession number U93564,Smith-Waterman Score=571.
ttagggtctagagctgtaaagcatctcagggttgctgacgaacgagccatgaactgggctgggtttttcatatttgatgaaagagcctaaacactcactgatttgggagaggtctgataaagaaaaaggagcattaaccttgactatgcctttagcttcagccaccggatttgaaatggtgagatgtttcttgggctggtcggtctgaggacctgaggtcgtaggtggatctttctcatggagcaaagagcaggaggacagggtattgatctcccaagggaggtcccccgatatggcaggcagttgttgctgtttgttgacgaggaacacagctgtgtctgttgaccagcagaggcttgggcagtatggccattttcacgatattgattcttcctacccatgagcatggaatgttcttccatttgtttgtatcctcttttatttcattgcgcagtggtttgtagttctccttgaagaggtccttcacatcccttgtaagttggattcctaggtattttattctctgcaagtcacaggggatgcgatggcttggcttgggctcagaggcctgatattcctgccttcttatattaataagaaaaataacacaaaatagtgttgaagtgttggggcggcgaaaatttttgggcggtggtatggagagagaatgggtgatgtttctcagggctgcttcaagcgggattaggggcagcgtgggaaccaatttcaaatccgagtcacggcaccaaatttcatgtgcgtctgtgtgaagagaccaccaaacaggctttgtgtgagcaataaagctgtttatttcacctgggtgcaggtaggctttcagatttttgaaaagcctgaacccattgaagagatatgcaaggtatgttggaggccgatggcttagagaggattgggcctttgagaggctaaggtaagcttttatttgaattgatattctaatacaaagagttagatgctcagttattaaatcaaattctggattagcctgatgagaatggagtttttttaataagcaatcttccagttgatcgcatcggctcctgaggcttctgcattcttcacatagttctcgagccttggttttcagctccatcagctcctttaagcacttctctgtattggttattctagttatacattcttctaaatttctttcaaagttttcaacttctttgcctttggtttgaatgtcctcccgtagctcagagtaatttgatcgtctgaagccttcttctctcagctcgtcaaagtcattctccatccagcttttttccgttgctggtgaggaactgcgttcctttggaggaggagaggtgctctgctttttagagtttccagtttttctgttctgttttttccccat

SEQ ID NO: 19724 - DNA, 2580 bp, Homo sapiens
  SIMILAR (2485)..(2363): 751254mologous to Homo sapiens neutral protease large subunit,accession number M27826,Smith-Waterman Score=159.
tcaggctgcctgcagctgcgataaggaggacaggatggggctctgcaaaggacatcctgcagcagccaggggagctttccatgcagaagcacatgtggaaacccacagcctgagggattcctggcctgcatactgcacagagtccttgggatggtggggcttggcagtgtcccagactgtgagggcaggtgcattgacagcaagtaccccagaatggtgaagcacagctgtcgttttgccctgactagtgcttcttaaaactgttaaggtcattaaaaacaaggacaacctgagaaactggcagagcacgtaggagtctaacgggacaggatgactcaatttgatatagttttcaggtaaaaacggatttgaaattggtgagatgttccttgggctggtcggtctgaggacccgaggtcgtaggtggatctttctcatggagcaaagagcaggaggacaggggattgatctcccaagggaggtcccccaatccgagtcacggcaccaaatttcatgcgcgtccatatgaagagaccaccaaacaggctttgtgtgagcaacaagactgtttatttcacctgggtgcaggcgggctgagtctttgtcaaaaatcagttgaccataaacatatgaatttatttctggactttcaatgtcattctgttgatcaatgtatctgtccttatgccagtaccacatagttttgattactgcaaatttgtggtaagttttgaaatcaagaagtgtaaattctccaacttcattcttttccaagattgttttggttattctgggtcccttgcatttccacatgaattttggaatcagcttgtcagtttttctctcccgctctcggtttgttattgggaaggtgctgaaggatgctggggctgccaacctggtgcctaattccccaaagcagaggcagctgtggtccagaagccccagggcctgtttccactgtcctccctggggaaatgcgggtattaggcccagagaggcccaggacttatctcgacactctcctttccccggccaagaaaatgcttcctcttcttggaggatggagatgcaaacactccctttctggagcaggtagtaagaatccaggagagcatagcctggggattctgcagtgtggaatactgcaagggcttttatcagggagccagccaaggccttggtgactgatatctcccctagtaacatcatggggtggataggcaaaacaatttggttgataaggcgcagattctgaactaacttgtaagccttgtctggttttaggacaggtaaaatgggggaatggtaaggagagtttataggttttagaagcccatgctgtagcaggcgagtgataacaggctttaatccttttaaagcgtgctgagggattggatattggcgttgagtggggtaagggtgattaggttttaatgggatggtaatgggcatgtgatcagttgccagggaaggagtagagatgtcccatacttgtgggttaaggtagggggatatgagaggaagacgcgaaggaggctttgggttggggagaaggacggcaatgagatgtggctgtagtccaggaatcgtcagggaagcagataatttagttaaactgtctcggccttccactgtgagagttacccgaagctcggcgtctgtgatggtcttgactatgcctttggctccagccacctttttaagagtaaattgctgggcaggtgggggagggctagtcacagaacgaaactgtaagccggaccaggtgtgaggaggggaggtgataaaaagattatagggtggaggagcagaggctgaggaagaattgggacctagctcggcctggcgaggagcagcttgcccctgccccaggaaagcgggacttgtcgctaaggctgaaggaccaaggcaggcgtccctgcgtggtctgacacccttgaaacgtgagtgtataatcagagaggcgtccctgcaatgattaaacaccaagggaaggctgccttcccagtccgtgaccggcgctggagttttgggttcacggataaaacatgtctcttttgtctcggatctgaaattggtgaggtgtttcttgggctggtcggtctgaggacctgaggtcgtaggtggatctttctcatggagcaaagagcaggaggacaggggattgatctcccaagggaggtcccccgatccaagtcagggcaccaaatttcactcgtgtccatatgaagagaccaccaaacaggatttgtgtgagcaataaagctgtttatttcacctgggtgcaggcgggctgagtccgaaaagagagtcagcaaagggagataagcgtggggccatcttataggatcctccacttgagagtcacctgaagttgggcatctgtgatggtccagggggcttctgaggtgatcaggcagcattaatcttcagtcgctaagctgagcagatcagatttgaaattcgtgagatgtttcttgggctggtcagtctgaggacctgaggtcataggtggatcgttctcacagagcaaagagcaggaggacaggggattgatctcccaagggaggtccccca

SEQ ID NO: 19725 - DNA, 4154 bp, Homo sapiens
  SIMILAR (947)..(2152): 881254mologous to Homo sapiens potassium channel,accession number AF071491,Smith-Waterman Score=1752.
gacccgcgcgggatgtgaccccctgaccccctgcctggcctcccctgccccccagggggcccgcctttgcctgcttttgggggtgggtggggaggggcgcgcggatcatggcattggagttcccgggcttgcagccgccgccgccgcctcgttcacgcaccccgagcgccccttcttcccagagcagcagcggagaaggcgaagcggccggcgggggcgaggcagatggggctcaaggcgcgcagggcggcgggggcggctggcggcggcggcgacgggggcggcggaggcggcggggcggctaacccagccggaggggacgcggcggcggccggcgacgaggagcggaaagtggggctggcgcccggcgacgtggagcaagtcaccttggcgctcggggccggagccgacaaagacgggaccctgctgctggagggcggcggccgcgacgaggggcagcggaggaccccgcagggcatcgggctcctggccaagaccccgctgagccgcccagtcaagagaaacaacgccaagtaccggcgcatccaaactttgatctacgacgccctggagagaccgcggggctgggcgctgctttaccacagcgttggtgttcctgattgtcctaggggtgcttgattctggctgtcctggaccacattcaaggagtatgagactgtctcgggagactggcttctgttactggagacatttgctattttcatctttggagccgagtttgctttgaggatctgggctgctggatgttgctgccgatacaaaggctggcggggccgactgaagtttgccaggaagcccctgtgcatgttggacatctttgtgctgattgcctctgtgccagtggttgctgtgggaaaccaaggcaatgttctggccacctccctgcgaagcctgcgcttcctgcagatcctgcgcatgctgcgggatggaccgggagaaggtggcacctggaagcttctggggctcagccatctgtgcccacagcaaagaactcatcacggcctggtacatcggtttcctgacactcatcctttcttcatttcttgtctacctggttgagaaagacgtcccagaggtggatgcacaaggagaggagatgaaagaggagtttgagacctatgcagatgccctgtggtggggcctgatcacactggccaccattggctatggagacaagacacccaaaacgtgggaaggccgtctgattgccgccaccttttccttaattggcgtctccttttttgcccttccagcgggcatcctggggtccgggctggccctcaaggtgcaggagcaacaccgtcagaagcactttgagaaaaggaggaagccagctgctgagctcattcaggctgcctggaggtattatgctaccaaccccaacaggattgacctggtggcgacatggagattttatgaatcagtcgtctcttttcctttcttcaggaaagaacagctggaggcagcatccagccaaaagctgggtctcttggatcgggttcgcctttctaatcctcgtggtagcaatactaaaggaaagctatttacccctctgaatgtagatgccatagaagaaagtccttctaaagaaccaaagcctgttggcttaaacaataaagagcgtttccgcacggccttccgcatgaaagcctacgctttctggcagagttctgaagatgccgggacaggtgaccccatggcggaagacaggggctatgggaatgacttccccatcgaagacatgatccccaccctgaaggccgccatccgagccgtcagaattctacaattccgtctctataaaaaaaaattcaaggagactttgaggccttacgatgtgaaggatgtgattgagcagtattctgccgggcatctcgacatgctttccaggataaagtaccttcagacgagaatagatatgattttcacccctgggacctccctccacgccaaaacacaaggaagtcttcagaaagggtcagcatttcaccttcccatcccagcaatcttcccggggattgaaccatatgtaggccagaccatccacattcagaaattcgaagaccaaaggcattgatgggggaagtttgttaaaagtttgaaaggacaggtttcagggactggggaggaagctggacttcctcgtggatatgcacatgcaacacatggaacggttgcaggtgcaggtcacggagtattacccaaccaagggcacctcctcgccagctgaagcagagaagaaggaggacaacaggtattccgatttgaaaaccatcatctgcaactattctgagacaggccccccggaaccaccctacagcttccaccaggtgaccattgacaaagtcagcccctatgggttttttgcacatgaccctgtgaacctgccccgagggggacccagttctggaaaggttcaggcaactcctccttcctcagcaacaacgtatgtggagaggcccacggtcctgcctatcttgactcttctcgactcccgagtgagctgccactcccaggctgacctgcagggcccctactcggaccgaatctccccccggcagagacgtagcatcacgcgagacagtgacacacctctgtccctgatgtcggtcaaccacgaggagctggagaggtctccaagtggcttcagcatctcccaggacagagatgattatgtgttcggccccaatggggggtcgagctggatgagggagaagcggtacctcgccgagggtgagacggacacagacacggaccccttcacgcccagcggctccatgcctctgtcgtccacaggggatgggatttctgattcaactgtacctttatttctgagctctgaaattctgcagaaacaggtgggccagagtatcacaagcatgctgggcttcctgtcacgtggtccttcaatgaagctgtgcatgggcctggcatgtgtcttgtccctttggaacacagtgtctggcatcaaaggagaagccaagaaagagaagggaatgacctttttacctacaacagatagcaagaagttcttctccttgctgagtgtcacttcctacagttccttcgccttccacaagttttctgtagctgtttacaacatttctaacctgaagacagtggaccccgccaaattccccacaaggtattgctactgtttaaacaatcggaccaatgacttatcagattttacagctctactggtagatatcattggcaattctaccagctacctcacagagatttttaagtcaacctccatcctctcagtgaatcaaagcaatgaatcagattgcatcttcatctgtgtgatgacaggaaagtcaggaaggaatctttctgacttctgggagatagaagaaaaatatcccattatcaattacacatttaccagcggcttgtctggtgttctggctttattgctcacacaaagcctgtttggtggtctcttcacacggacgcgcatgaaatttggtgccgtcactcggatcgggggacctcccttgggaaatcaatccccgtcctcctgttctttgctccatgagaaagatccacctacgacctcaggtcctcagacagaccagcccaagaaacatctcaccaatttcaaatccgcggcacgtcccactttcctggggcaggggcaagtacccctcaaccccttctccttcacccttagcggcaagtcctgctttcctaggcggcaagaaccccccaatcgcttatttccacaccccaacctcttatctctgtgccccaatcccttatttctgtgccccaaccccttctctacttttctggagggcaagaaccaccacccccaccccttctctgtgtctcaagtcttttctctaggcttgcctccttcactatgggagcattcacccatggcacacagactccgagtccaaccaaggcaacagcccccagatatccacaaacaggtgatctctctgcagagtggccattcactgctggtgaagagccagtcctggtcccaagaccccatcaagtttcaattgcctcatcatcataaaaacacggcatctgtgtgcattaatccatctgtatacgagaaagaagaagaaagatatggagacctttttatgaggaaaaaccaaaagacttcctag

SEQ ID NO: 19726 - DNA, 1068 bp, Homo sapiens
  SIMILAR (912)..(754): 811254mologous to Homo sapiens Human secreted protein, SEQ ID NO: 5210,accession number G01129,Smith-Waterman Score=227.
ctaagccaagaagatctgggaaggagtcagagagccttgggccagagttccaggggctctgggagtggctgccaggtgagttggacagtccgatttccagtggggtcccacacagatgggatgtggcttaggaggaatcctgggctgcaggcattccttggcccggtggccagatttctggaacttgtagcaagctcctcggggaggaggttctggaggaacacctggctgctgcagttcaggcgtttggaagttcttgtgtgctggagatgtggctggggtttgtctcacagtggaggcaaggaactgcaacttttttctattattgtacaccttgaaggtgaggttaattaaatccttgactatgtctttagctccagccacctttttcagagtaaattgctgggcaggagggggagggctagtcacggaacgaaactgtaagccggaccgggtgtgaggaggggaggtgataaaaggattatagggtggaggagcagaggctgaggaagaattgggacctagctcagcctggcaaggagcagcttgctccttccccagaaaagcgggacttgccgctaagggtgaaggaccaaggcaggcatccctgcatggtctgacacccttgaaatgtggctgaatgatcagagaggccgtccctgcaatgattaaacaccaagggaaggctgccttcccagtccgtgaccggcgccagagttttgggttcatggataaaacatgtctcttttgtctcggatttgaaattggtgagatgtttcttgggctggtcggtctgaggacctgaggtcgtaggcggatgtttctcacagagcaaagagcaggaggacaggggattgatctcccaagggaggtcccccgatccgagtcatggcaccaaatttcatgcgcgtccgtgtgaagagaccaccaaacaggctttgtgtgagcaataaagctgtttatttcaccaggctccatcacataaaggggaggctgttgttcctggcctgggccctgttcatcaggcctgagcaccacctgatgaatgctcatgctcagcgggtccat

SEQ ID NO: 19727 - DNA, 458 bp, Homo sapiens; identical to SEQ ID NO: 2019
  SIMILAR (232)..(128): 941254mologous to Homo sapiens Human secreted protein clone cw1475_2 protein sequence SEQ ID NO:102,accession number Y94948,Smith-Waterman Score=175.
  misc_feature (1)...(458): n = a,t,c or g

SEQ ID NO: 19728 - DNA, 432 bp, Homo sapiens
  SIMILAR (96)..(395): 971254mologous to Homo sapiens COBW-like protein,accession number AF257330,Smith-Waterman Score=497.
  misc_feature (1)...(432): n = a,t,c or g
tttcgtgccgggagtnnnncctgggcgtgcgcggctgcggtacggcgtgttggtcccagcggttcagctgaggtagggacgtgctgtaggccggaatgttaccggctgttggatctgtggatgaggaagaggatcctgcggaggaagattgtcctgaattggttcccattgagacgacgcaaagcgaggaggaggaaaagtctggcctcggcgccaagatcccagtcacaattatcaccgggtatttaggtgctgggaagacaacacttctgaactatattttgacagagcaacatagtaaaagagtagcggtcattttaaatgaatttggggaaggaagtgcgctggagaaatccttatctgtcagccaaggtggagagctctatgaagagtggccttagagctattgagaatttgatgcanaagaagggg

SEQ ID NO: 19729 - DNA, 881 bp, Homo sapiens
  SIMILAR (582)..(680): 961254mologous to Homo sapiens Human secreted protein clone cw1475_2 protein sequence SEQ ID NO:102,accession number Y94948,Smith-Waterman Score=166.
  misc_feature (1)...(881): n = a,t,c or g
ttggaaaagtttctgttctttagctgattttttagctataaaaatgtatttgaaaagctcataaatttcaggattgaaaagataattggaagtttaaaaaaaacctaattcattgaagtaataaccaaataattttcaatcttgattcaactgtgattcaaatcttacaccatttgcccacttctatgaattttatgtataaaattttttaagagtcagagtttttttttcttgattaattggatgtatttcacagaatttccaactgctcacgttagttttcttccttttagagttgatctctctaatgtattagatcttcatgcctttgatagtctctctggaataagtttgcagaaaaaaacttcagcatgtgccaggaacacaacctcaccttgatcagagtattgttacaatcacatttgacgtaccaggaaatgcaaaggaagaacatcttaatatgtttattcagaatctcctgtgggaaaagaatgtgagaaacaaggacaatcactgcatggaggtcataaggctgaagtttgaactgaggctgatcaatgttcagtcaattctcctttgagcagggattggtgtcaatcaaagacaaatcacaacaagtgattgtccagggtgtccatgagctctatgatctggaggagactccagtgagctggaaggatgcactgagagaccaaancgattggtcctcattggcagaaatttagataaggataccttaaccactgtttatantctgtgccagaacagaaagcagtggcaccattcaagaagtcagttgtcatacctagtgcattcttncaaaggntgatataaatngttctctggaaaaaaaaaaaattggccggantttcctnaggggt

SEQ ID NO: 19730 - DNA, 545 bp, Homo sapiens
  SIMILAR (94)..(192): 1001254mologous to Homo sapiens COBW-like placental protein,accession number AF065414,Smith-Waterman Score=176.
tgctttaagatctccattattgagttatcctcatctttgtttttttttggctaatggacataagctaaagagtgctgtttgttaattattctaggaagtgcgctggagaaatccttagctgtcagccaaggtggagagctctatgaagagtggctggaacttagaaacggttgcctctgctgttcagtgaagtgaggaatgtgtttactgtgtacatggtttactagaaatgtttattgattatatttccagctttaattttcttgagtaatttaactgaatttacacagtttgcttcattgtattttcaaacaaatagaaaataaacttattaggaagcattttcttaaagtgtttcttgctgtcttttctatctgctctaatgttttggtccttttattgagtttttattgcttttgatgtcagggcttatttaatctctagtgcatgaaagtctcatatgtaaaaaatgattattctgaatttaatctgtcattggtcatacttctaagcgcccaaccttataaaaaaaataaatgactatc

SEQ ID NO: 19731 - DNA, 536 bp, Homo sapiens
  SIMILAR (279)..(97): 911254mologous to Homo sapiens COBW-like protein,accession number AF257330,Smith-Waterman Score=279.
aagaaagaatttctcaagtagagactgagtggaactagactgccagctgtgagcctcagagctcctggctgcctgttgctgagtctatcagctgctgagccttgatctttgtgtttctaagatttgtcctagtccatttatggatctaattgttgttcttaatttctttacatcttcttctggaaccaagtctgttttattaatgagaacgatatctgccaaagcaacttgcctagtagcttcattgataaggccatcaggtttctcttctgttaaatgtgctttgggccctatccatatgctcagattgggaacgggtcagtgggtgggatgatttcattctcttctgcctttagtggtatttcacttttaatccatattttgaatccacaatagttatgataccatcaaggtaaatatcactccctaattcagcatcaacccaaaacatagaagccactgcaccttcccctcatgggccttctgccggacgcgtgggtcgacccagggttctcgacggtaccacgggcgtctat

SEQ ID NO: 19732 - DNA, 1801 bp, Homo sapiens
  SIMILAR (131)..(766): 531254mologous to Homo sapiens COBW-like protein,accession number AF257330,Smith-Waterman Score=436.
  misc_feature (1)...(1801): n = a,t,c or g
tacgtgcggtggaattccaggccccggccaggccgggagtggcgtgctgggcgtgcgcggctgcggttctgcgtgttggtccccagcggttcagctgaggtagggacgtgctgtaggcccggaatgttacccggctgttggatctgtggatgaggaagaggaatcctgcggaggaggattgtcctgaattggttcccattgagacgacccaaaagcgaggaggaggaaaagtctggcctcggcgccaagatcccccatcacaattatcaccgggtatttaggtgctgggaagacaacactttttgaactatattttgacagagcaacataggtaaaagagtagcgggccattttaaattgaatcctggggggaaggaagttgcgcctggagaaatccttaggctgtgcagcccaaggtggaggagctctattgaagagtggctggaacttagaaacggttgcctctgctgttcaagtgaaggacaatggcctttagaggctattgagaatttgatgcaaaagaaggggaaattttgattacatactgttagagaccactggatttgcagacccaggtgcagtggcttctatgttttgggttgatgctgaattagggagtgatatttaccttgatggtatcataactatagtggattcaaaatatggattaaaacatttagcagaagagaaacctgatggccttattcaatgaagctactagacaagttgctttggcaggatgccatttctcattaataaaacagaccngggtttccagaagaagatgtaaagaaattaagagcgacaattagatccataaatggactaggacaaatcttagaaacacaaagatcaagagttgatctctctaatgtattagatctttcantgcctttgatagtctctctggaataagtttgccagaaaaaaacttcagcatgtgcccaggaaccacaacctcaccttgatcagagtattgttaccaatcacatttgaagttaccaggaaatgcaaaggaagatccatccttaatatgtttattcaggaatcttcctgtgggaaaagaaatgtgagaaacattgacaatcactgccatggaggtccataaggcctgaagggattggtgtcaatcaaagacaaatcacaacaagtgattgtcccagggtgtcccatgagcctctatgatctggaggagactccagtgagcctggaaggatgacactgagagaacaaatcgattggtcctcattggcagaaatttagataaggatatccttaaacagctgttttaaagctactgtggacaaaaaccggaaaagccagtggaccaacacgtttcccaagaagatccaagtttgtacataaccactagaggcatttccttatccaaaaggattgggttaataaaaattaagttttctactgggtatattttcaagcatttatttattactttagttaccgaattccaatatactttaaaatggtatttgttttacagcatacctaaaatggtagcaaatccggtactgtaaaacatttaacattcatacaattatatataatatccttttttttaaagaatggtatttcacaaaaatatcttttgaaattggctttggagtttacatatactgaacatgaaagtttataataatgatgatacaactttcaacattgtcattttttcttagaacttcagctgattgcagagatataatgattacattgttattaaatttttttaacacaagtaagtgtcaccattttatgacatgaaataaaaggttatgactgttaa

SEQ ID NO: 19733 - DNA, 543 bp, Homo sapiens
  SIMILAR (430)..(543): 1001254mologous to Homo sapiens Human secreted protein, SEQ ID NO: 5014,accession number G00933,Smith-Waterman Score=197.
tcagctccagccaatcggcttcggacaagtcggaggggagggagacgcagaggcggacaagatggcggcggcagctgtacagggcgggagaagcggtggtagcggaggctgtagtggggctggtggtgcttccaactgcgggacagcaacgtggccgtagcggcttgttggataaggtgaggagccggttcttgggaacagttgaatcctggggaggcctgggaggcggcgagcccacctacccatcccggtctcccttattttctacggccttttgaggggagcccttgtgtgaccactatcacaaccctacgcacgcttggagcctgcccttgccctcatcacacttcaaacctggacccagtcctctttagaacttcttcttttctcgcaagtgttctggtcctggtcgccacacctttttcgcggaagatagatgataagcctgtcaaaattgacaagtgggatggatcagctgtgaaaaactctttggatgattctgccaaaaaggtacttctggaaaaatacaaatatgtggagaat

SEQ ID NO: 19734 - DNA, 597 bp, Homo sapiens
  SIMILAR (289)..(546): 931254mologous to Canis familiaris signal peptidase complex 25 kDa subunit,accession number U12687,Smith-Waterman Score=416.
atgacccctggggaggataaggaactagaaattaagttcaatcaggtggccagtgagcctccaataaaagctctggactctgaggtgtgggtgagcttcctggttggtgagcacatcaatgtgctgggagggagacatgccctgattccacagggagggggcatgaaagctctcagacctcaccttatatgccttttcatttggctggtcctgattcgtgtcatttatagctggggtcccaaccctcgagccacaaaccggtgccagtccctggcttgttgggaactgggccgcacagcaggaagtgagcagtggtggaagatagatgataagcctgtaaaaattgacaagtgggatggatcagctgtgaaaaactctttggatgattctgccaaaaaggtacttctggaaaaatacaaatatgtggagaattttggtctaattgatggtcgcctcaccatctgtacaatctcctgtttctttgccatagtggctttgatttgggattatatgcacccctttccagagtccaaacccgttttggctttcccagaacttttcccgttagacgtggctgcttcaagccactcattctag

SEQ ID NO: 19735 - DNA, 1747 bp, Homo sapiens
  SIMILAR (16)..(747): 471254mologous to Canis familiaris signal peptidase complex 25 kDa subunit,accession number U12687,Smith-Waterman Score=407.
  misc_feature (1)...(1747): n = a,t,c or g
tttcgtgggagacgcagaggcggacaagatggcggcggcagctgttacagggcgggagaagcggtgtgtatcggaagctgtaatgcggctggcggtgcttccaactgcggtacaggaagtggccgtagcggcttgttggataagtggaagatagatgataagcctgtaaaaattgacaagtgggatggatcagctgtgaaaaactctttggatgattctgccaaaaaaggtacttctgtgaaaaatacaaatatgttgagaattttgggtctaattgatggtcgcctcaccatcttgtacaatctcctgtttctttgccatagtggcgttttgatttgggattatatgcacccctttccaagagtccaaacccgtttttggctttgtgtgtcatatcctattttgtgatgatggggattctgaccatttatacctcatataaggagaagagcatctttctcgtgggcccacaggaaagatcctacagggaatgggatcctgatggatatttgggcagctgtcctcccagtcttaaaagggttttgatggaccaaatacaccttgaaggctggaccttccatcagtggggaggaacaaaggcaggcagcggggaagccgagtttcacaaagtcccatttgctaaagttttttggaccacagtggggacacctggtccatggatgcatatgagccctgaaatatcccaggctcccatngacagtcttgccatcagaaagaaaaataaagtagcccaattctaaaaagtagccctctttctcctggatcttgctgaattagtggcttggggggtggggggagataaaaagaacttaaaatgggtaaagtaaagaaatgtttaaaaagtcccctgttttgtcctggaaattttagtctaattcctggggtaaaatagggattttcctgacaccagatatggagaagttgtagctctgatgtctagctggagcccccttggatctgctggattgcattatttcaatctggcttttctggggaaagcagttttgctaaaaggctgtacagactttttccttttgtaccctagccagtactttatatagtatagctttgggcccatgtagccattttaaggactccaattttaaaaaattattaatcctgttgcctgactccttaattccctatttccaatatgtggtttccttgaagaattcggggatacaacgttcttgtgtatggacagctttccctcacacacctatttttggtgggtgtggtatataccggatttgggaaggaatttaaaaaaccaccatagcctttttaaatttgtttgaaacagactcttctgcctgttacatttttgcttttaaccaattaaagaaagccaatggaaaatttagttttaatattgtgttttccactagtatatccctgttgatttgtttgtgccttttattaactgccattttctaaaatttttttcaataaaaggaaggaagatgtgaaaaaaatggagtcatagttttgatggagagaacagagaaacaagtgttaacatctttctactataggtttttttcatttttaggctattttacttgtcaaaggcccctgagaacctgtagctaaggaactcttagctttccagtgataataacaataataacaacattctgtacttactttgtgccagaaatgctccaagtactttacatgtgttaataatgctcacagcaatcctaagaggcaggtgctgttatta

SEQ ID NO: 19736 - DNA, 362 bp, Homo sapiens
  SIMILAR (140)..(361): 1001254mologous to Homo sapiens KIAA0174,accession number D79996,Smith-Waterman Score=359.
ccctgaagtcggtgtctgctgcgttcacggcaggattgggttaggaggaacagcacagcatgctgggctctggatttaaagctgagcgcttaagagtgaatttgagattagtcataaatcgccttaaactattggagaaaaagatgaacgagctcggatccgtgtggagcacattatccgggaagactacctcgtggaggccatggagatcctggagctgtactgtgacctgctgctggctcggtttggccttatccagtctatgaaggaactagattctggtctggctgaatctgtgtctacattgatctgggctgctcctcgactccagtcagaagtggctgagttgaaaatagttgctg

SEQ ID NO: 19737 - DNA, 951 bp, Homo sapiens
  SIMILAR (442)..(708): 941254mologous to Homo sapiens Similar to KIAA0174 gene product,accession number BC000430,Smith-Waterman Score=399.
ttttaaagcatgcaaaggaagactttattcaggatcatcgtgataggtattggaagcacagcagtgagattttgcaatgggtacaagagattgggttcaactccaaattcagcatgaacgagtaggaatttatagtcaaggagcaggttagggatcactggatgacaaaatactaagaggaaatgtctgggataagtaggattctggctaaacgcacctgttgggattctttctgaagagagagacctggatgataagacatcatcgcctgggggatagtggaggatggtgaaccctgattctgaagtcggtgtctgctgtgttcatggcaggattcggttaggaggaacagcacagcatgctgggctctggatttaaagctgagcacttaagagtgaatttgagattagtcataaatcgccttgaactattggaggaaaaaaaaaaaaaaaaacagaactggcccagaaagcagggaaggagattgctgactatctggctgctgggaaagatgaacgagctcggatccgtgtggagcacattatccgggaagactacttcgtggaggccatggagatcctggagctgtactgtgatctgctgctggctcggtttggccttatccagtctatgaaggaactagattctggtctggctgaatctgtgtctacattgatcctggctgcttctcgacttcagtcagaggtggagggctttcccaatatttattcatcttagatccccagcaactcccccatcatattgaatctgtagatggccataaagggctgtaagaattatctcttctgcaccagattgtggtccctggaccaagccagaagcctttgcaaaactttcttcttgacctgcggttaccttggacaaccctgtggccgatctttgggcttgagggcaaaattcccttatgggagcgcattaaatcggaacctg

SEQ ID NO: 19738 - DNA, 1254 bp, Homo sapiens
  SIMILAR (226)..(513): 611254mologous to Arabidopsis thaliana putative protein,accession number AL163815,Smith-Waterman Score=299.
atgaatgatgcttttggtggtggctccttgactgctttgctagtcatagaaacacaggccgatgatgtgtctgcttacattccaacaaatgtcatttccatcactgacagacagatcttggaaacagaattgttctacaaagatatccgctctgccattaacattgggtctgtctgtgtcttgtgttggatctgctgcccaaaccaggactatgaagcaggcggcagactctctttggctcatgtataccttcaattgcataagggagagaatatagaggacattccaaaggaagtgctgacagactgcgcccaccttgtgaaggccaatagcactcaaggctgcaagaacaacgttaatgtggtaaatactccacggtctaacctgaagaaaacagctgacgtggatgtgaggcagataggctttcacaggcagaaggatgtaaaaattgtgacaatggagaagaaagtaaatgagatcctgaaccgattagaaaaaacaaagtggagccgggcacgaaggctcatgtttgtaatccagaactttgggaaggagaagaggggggttgtcatcaccctctatggatcagagggacggagtgagccccatcacctctgtgacccccagaagacagtctttgaacgagggggcctggatgtcttccttctcaccacttggacctctctagggaacctgcacagccttcggctctggcatgacaattctggcgtcagtccctcctgggagatgcagcttatggatatatgctacgtgggcatagacattggccacacaagcctgaagtggctcccctggccttactacaatcacaccatcaccccaccagctactttcctcaaatctaagcaggctcttggacagatggcttttgtagcggaactggcccagaaagcaaggaaggagattgctgactatctggctgctgggaaagatgaacgagctcggatccgtgtggagcacattatccgggaagactacctcgtggaggccatggagatcctggagctgtactgtgacctgctgctggctcggtttggccttatccagtctatgaagtaagatattttgattcagagacctaaatcatttctggaatttgagaaaggagtaatatgatctctttctgcattaagggactatttcacatgcccaaggatctgctgcctaacagttgctgaaaggcctgttaaaaggaaaatacggaatctgaaactgagaagcctaaatttgaat

SEQ ID NO: 19739 - DNA, 1143 bp, Homo sapiens
  SIMILAR (379)..(1140): 681254mologous to Homo sapiens KIAA0174,accession number D79996,Smith-Waterman Score=852.
atgcacggcacatttctcaggttccacccagactcgcctcctactggcgctgagaacgcagcgactccacccttagcctcaggtcgggggccccagcatttgtctgatctgcgcttgcgtactcctaggccagggttgcctgcggtcctgactgttccgtcttggactacatattccacgggcgacggagaaatcttgtacctctggctccgtctcctggacctctgcgctgcccgtgacctggtcccacctgaggaagaaggcggcgcgggtcgctgccggagcttctgcagccccagcccgcagcccgcgcgggaccctgcgtggcggaaaaaaaaaaaaacagaactggcccagaaagcaaggaaggagattgctgactatctggctgctgggaaagatgaacgagctcggatccgtgtggagcacattatccgggaagactacttcgtggaggccatggagatcctggagctgtactgtgatctgctgctggctcggtttggccttatccagtctatgaaggaactagattctggtctggctgaatctgtgtctacattgacctgggctgctcctcgactccagtcagaagtggctgagttgaaaatagttgctgatcagctctgtgccaagtatagcaagctaatgcacaatctgagtgtggaagccccatccaaaatcctggtggagagatacctgattgaaattgcgaagaattacaatgtaccctatgaacctgactctgtggtcatggcagaagctccttctggggtagagacagatcttattgatgttggattcacagatgatgtgaagaaaggaggccctggaagaggagggggtggtgggttcacagcaccagttggtggacctgatggaatggtgccaatgcccatgcctatgcccatgccatctgcaaatactcctttctcatatccactgccaaagggaccatcagatttcaatggactgccaatggggacttaccaggcctttcccaatatttatccatctcagataccagcaactcccccatcatatgaatctgtagatgacattaatgctgataagaatatctcttctgcacagattgttggtcctggacccaagccagaagcctctgcaaagcttccttcctga

SEQ ID NO: 19740 - DNA, 3429 bp, Homo sapiens
  SIMILAR (1300)..(1806): 401254mologous to Homo sapiens Spinocerebellar ataxia type 1 (SCA 1) protein product,accession number R71111,Smith-Waterman Score=200.
atggctggaggccaggaagtggaggctgtggttgctgatcagctctgtgccaagtatagcaaggaatatggcaagctatgtaggaccaaccagattggaactgtgaatgacaggctaatgcacaagctgagtgtggaagccccacccaaaatcctggtggagagatacctgattgaaattgcaaagaattacaacgtaccctatgaacctgactctgtggtcatggtagaagacatcctggaaatgtccttggtggagtttgggaatatcggggaagcatttctagagcagaaccagtctcccgagtcttcagtgactttgacctctgccaatgctactctgctgctgagcagacaaaacatatcaactttaccgctgagctcttacactctgggtcacccagcccctgtgaggctaggctttccgtcggctttagctttgaaggagctcttgaataaacatccaggagttaatgtccaagttttcgctttagacccagtcctgggcacctttctgatcctcaccagtgtcatcttgatggtacttgtggtaattaatcttttcgtttcggccattctcatggcctttggaaaagaaagaaagtcgcttaaggtagtaatgcaatccaacacaatatgctacagggaaaacagaatttccacggtgccgccctctggtacaagggaaacagcacgcaaagcaaaaggccacagagggctccctgagaatccagtacaactaagcgaggccttcaactgtcaagacaaactttgcaactggatcccggtgggacagtgccctgcagcgaggagtactgtatatgccaatgagagggcccagcttccaggaaccgttacaatggcgtcccgagtcattttccctctcccacttgcattcgagagtcttcacactccgggaaaatcctcaagtcaaggctccgatgctggggctggcccaccgatccttggtctgttttgcccatggacccgcggacctcgcctctctgcgctgcgggctcgcaggctgtcgtcgcccatagcggacgtcaacaaaaatatcccgccctctaaacaccggacaatactatcatctagaccagacggtagtattctttttcttccgcccttctttgtcgttactatcacaccgcccgcccgcgctgacgtacaagagaaagatggacacacaatagaacaagatgaaggagagagacaacaccaaatagaaaaaacagaagaggagaacacaaacaaaccaaaacgaaaacagaaactggctccaggaacaccacaaagcaatatgaaacctgttcatgaaaggagtcaggaatgccttccaccaaagaaacgagacctccccgtgaccagcgaggatatggggagaactaccagctgctccactaaccacacaccctccagtgatgcttctgaatggtcccgaggggttgtggtggctgggcagagccaggcaggagccagagtcagcctggggggtgatggagctgaggccatcaccggtctgacagtggaccagtatggcatgctgtataaggtggctgtgccgcctgccaccttttcaccaactggactcccatctgtggtgaatatgagtcccttgcccccaacgtttaatgtagcgtcttcactaattcaacatccaggcatccactatcctccactccactatgctcagctcccatccacctcgctgcagttcattgggtctccttatagccttccctatgctgtgccacctaatttcctaccgagtcccctcctatctccttctgccaaccttgccacctctcaccttccacactttgtgccatatgcctcacttctggctgaaggagccactcctcccccacaggctccctccccggcccactcatttaacaaagctccctctgccacctccccatctgggcaattgccacatcattcaagtactcagccgctggaccttgctccaggtcggatgcccatttattatcagatgtccaggctacctgctgggtatactttgcatgaaacccctccagcaggtgccagcccagttcttacccctcaggagagccagtctgctctggaagcagctgctgcaaatggaggacagagaccacgagagcgaaatttagtaagacgggaaagtgaagcccttgactcccccaacagcaagggtgaaggccagggactggtgccagtggtagaatgtgtggtggatggacagttgttttcaggttctcagactccacgggtagaggtagcagcaccagcacaccgggggaccccggacactgaccttgaggtccagcgggtggttgccagccaagttgggccacagagcacaattctgaggacacagtgtctctgtaaccacctgaccttctttgccagcgacttctttgtcgtgcccaggaccgtgaatgttgaagacacgatcaaactgttccttcgcgtgaccaacaatcctgttggggtgtcactgctggccagccttttaggattttatgtgatcacagttgtgtgggctcggaaaaaggatcaagcagatatgcagaagggctgccagacacctgccggagttcatcctcctgctcctcagctggaggaggcaggaactataccaagtggaggcctagtgaaggtcactgtcctggctgataatgaccccagcgctcaatttcactaccttattcaggtctacaccggatatcgaagaagcgctgctacaacagctaagttgtcagtgtacctcattcttcctggatgcaggacaagaactcgggacccgctgagtggtgtgggatccaggccagtagcaggagctgagtacaggctaccaggccaattcggcagaacgagcacagtggctgcaagcaatactcaggcagaaggtgctgccggccacagaggtttctggctggcaaagcaacaccctaaggatgctgtgacattagaactaagatgtaccccttgtaggtccatcgcaaggctgtcagacgccgggggcgtgcccgccggggcccgacgagtgcggtgtgccgcggtgctcgcaaattgctcgttggatatgaaacgcggggtgtgtgcctcaagaagtgctactgtgcgcaaaaggagtgacaaggacgttgaggagttgggtgatagagaatccgcagtaggcgtgagtgactttttggacggagatgcccattatgaaagaaatggaaataattcccatttgtaccagagacacaagaagacaaaaagaggagttgcaatagcaagagacaaaatgcccccagactttcaggatcatgtgattcctggccaagaaataaaagcaaaatcattttattccccagtggattcggatgaaaccggtgataaaatcaggtacaactccaagaggagacactggagaacaggcatgctgggtctgtaa

SEQ ID NO: 19741 - DNA, 945 bp, Homo sapiens
  SIMILAR (430)..(942): 1001254mologous to Escherichia coli ORF_f325,accession number U28377,Smith-Waterman Score=894.
atgcgctcggtaaaccagcgttatctggaaacttactttcgtctgccggagcagttccgtagccttgaacctgtcgttcgcgagcgtattcgttctcgcctgacgcgcggtaaagtggaatgtaccctgcgctatgagccagatgttagcgcgcaaggtgagctgatcctcaacgaaaaactggctaaacagctggtaactgccgcgaactgggcagaagctcctcctggggtagagacagatcttattgatgttggattcacagatgatgtgaagaaaggaggccctggaagaggagggagtggtggcttcacagcaccagttggtggacctgatggaacggtgccaatgcccatgcccatgcccatgcctatgccatctgcaaatacgcctttctcatatccactgccaaagggaccaaggatcccctttgactttggttttgcgggttttgttattgcctggtacgtgtcgaatctggttggcggcaccatgtactggtggtttgccgcgcgcgaattacgccgccgaaatatccataacgccttcaaattgaatctgtttgagtctgcccgatacattaaaggcgcgtggagttttgtctggtcaaccaacattgcccactccatctggtcggcgcgtaactcgtgcagcacagtgttggtggggatcgtgttaggacccgctgccgccgggttatttaaaatcgccatgacattcttcgacgccgccggaacgccagcgggtttgctgggtaaaagtttttacccagaggtgatgcgtttagatccgcgcaccaccagaccgtggttgttaggtgtgaagtccggtttactggcgggcggaatcggtattctggtggcgctcgcggtgttgatcgtcggcaagccgctcatttcgctggtgtttggcgttaagtatctcgaagcgtatgacctgatttag

SEQ ID NO: 19742 - DNA, 2779 bp, Homo sapiens
  SIMILAR (980)..(1330): 761254mologous to Homo sapiens Similar to KIAA0174 gene product,accession number BC000430,Smith-Waterman Score=416.
  misc_feature (1)...(2779): n = a,t,c or g
ctgtggctggcctccccgcgcccagagcgaaattaagggcatgcccccagcagctgactcagtcggcgtggcgcttcccccaacgtctgccgtgcccccgccgcgggaagtagtccccggccgcgccgactccaaaggaaaccgagggagggtgccccgagtcagcgcgtgggtcccggcagcggcgatcgcgcagccaatccctggaaaggagggcgtggctatatcggccccgtggatccctccgcccgcgcttgttgtgctgaggccgagggagtcgccattttggatggcgatttctgaagtcggagccggctgcgttcacggcaggattcggttaggaggaacagcacagcatgctgggctctggatttaaagctgagcgcttaagagtgaatttgagattagtcataaatcgccttaaactattggagaaaaagaaaacggaactggcccagaaagcaaggaaggagattgctgactatctggctgctgggaaagatgaacgagctcggatccgtgtggagcacattatccgggaagactacctcgtggaggccatggagatcctggagctgtactgtgacctgcctgcctggctcggcttggccctattccagttattgaaaggaactagattctggtctggcttgaatctgtgtctacattgatctggggctgctcctcgactccagtcagaagtggcttgagttgaaaatagttgctgatcagctctgtgccaagtatagcaaggaatatggcaagctatgtaggaccaaccagattggaactgtgaatgacaggctaatgcacaagcctgagtgtgggaaccccacccccaaatcctggtggagagatacctgattgaaattgcaaagaattacaacgtaccctatgaacctgactctgtgggtcatggcagaagctcctcctggggtagagacagatcttattgatggtggattcccagatgatgtgaaaaaaagggaggccctggaagaaggaggggagtggtggcttcacagcaccagttggtggacctgatggaacggtgccaatgcccatgcccatgcccatgcctatgccatctgcaaatacgcctttctcatatccactgccaaagggaccatcagatttcaatggactgccaatggggacttatcaggcctttcccaatattcatccacctcagataccagcaacttcccccattcgtattgaatctgttagatggacatttaattgcttgattaaggaatattcttctttcttgcacagatttgtttgggtcctggacccaaggccagaaggcnttttgcaaagtttcctttccagacctgcagataacttttgacaacttttgttcctaccagagttgccatctgtgccagacacactaccaactgcatctgctggtgccagcaccttcaggcatctgaaggacattgactttgatgatctttcccggaggtttgaaggagctggaaaaaggaaaacatagggtctctttaaaccagggcaactttcacgttttggggagttgagactgagcaatttctccttggtaacaaagaatctccatgaaattcctgtttcatctgttaaccgtcactcagcacaacactccctcctgggctctcttcctgctccctccaagattctgctgcttttccagttctctgtttgaattcctgaagactaacaattggagactgaggccagagcaactggctcctggcagctgtgcttgtccgtttcctgtcagagtgatcccaggtttcctcctggcccgtcccatggtccctccacaggagtgtgagaggatgggggaagcactgcgggaagaccaccaaagatgggctgggacagtgggaagagagcaccgttgtgaaagcatcccagcctccgtgttgaggttccagacttaagaaacaagacccctctgtacagggggattgtggtgagtgagaatcaaggccaccttgtgtgttttctcactctcgaatgcaagtgggagagggaaaatgactcgggacgccattgtaacggttcctggaagctgggccctctcattggcatatacagtactcctcgctgcagggcactgtcccaccggggatcccagttgcaaaagtttgtcttgaccagttgaaggcctcgcttagttgtactggattctcagggagccctctgtggccttttgctttgcgtgctgtttcccttgtaccagagggcggcaccgtggaaattctgttttcccctgtagcatattggggtggattccattactggcaaaaaaaaggaccagggtgcccattcaagtccctagggtgggccctccccagctgcccttaatagaaagtacctcaaagccctttggggtaagtgaagcctggaaaagcccctacaggaaaagagggggacccctgtattccatttgaaaaaactttgaattccatggaaccctttaaaaacctaatcctcagaaaaaatttttggtgccccatgccagctgtagttgttcactgctttccctggatggatgggactccttatgtcataacttctgttaactcctttggcccaatagctaaggtcatccgttccaacgaggggtggcttttggggattgggatgatacagcttttgcttctgtgtagtatacctgtacatacttgtttcaggcagcctttctttaatgttttcaagttggtttgtattctgtagctcagtagctgtctaataaagttaaagatcctgaaaaaaaaaaaaaaaaaaa

SEQ ID NO: 19743 - DNA, 255 bp, Homo sapiens
  SIMILAR (1)..(255): 731254mologous to Homo sapiens Similar to gp25L2 protein,accession number BC001123,Smith-Waterman Score=346.
cgggtgcatctcgacatccaggttggggagcatgccaacaactaccctgagattgctgcaaaagataagctgacggagctacagctccgcgcccgccagttgcttgatcagtatcgtgaagagcgcttccgactgacgagcgagagcaccaaccagagggtcctatggtggtccattgctcagactgtcatcctcatcctcactggcatctggcagatgcgtcacctcaagagcttctttgaggccaagaagctg

SEQ ID NO: 19744 - DNA, 279 bp, Homo sapiens
  SIMILAR (102)..(206): 971254mologous to Homo sapiens Secreted protein encoded by gene 16 clone HPTWA66,accession number W88742,Smith-Waterman Score= 187.
acatactttgaagacaaccctagggacctccagctgctgcggcatgacctacctttgcaccccgcagtggtgaagccccacctgggccatgttcctgactacctggagagcaaagtcccagaacccactgcgcagcttcaagcacaaaggaaagaaattcagacccacagccaagccctcctgaggttgttgggcctctctggagctgagcacattgtggagcacaggcttacacccttcgtggacaggcgaggctctggtgcttactgcacagcctga

SEQ ID NO: 19745 - DNA, 270 bp, Homo sapiens
  SIMILAR (127)..(270): 831254mologous to Homo sapiens Similar to gp25L2 protein,accession number BC001123,Smith-Waterman Score=218.
gtggtgctgtcccggcagtacggctcggagggccgcttcacgttcacctcccacacgcccggtgaccatcaaatctgtctgcactccaattctaccaggatggctctcttcgctggtggcaaactgtatcgtgaagagcgcttccgactgacgagcgagagcaccaaccagagggtcctatggtggtccattgctcagactgtcatcctcatcctcactggcatctggcagatgcgtcacctcaagagcttctttgaggccaagaagctg

SEQ ID NO: 19746 - DNA, 386 bp, Homo sapiens
  SIMILAR (1)..(240): 861254mologous to Homo sapiens nucleolar RNA- helicase,accession number AJ131712,Smith-Waterman Score=354.
gactgtgtcatagcaactgatgctgaagtcctgggggccccagtcaagggcaagcgtcggggccgagggcccaaaggggacaaggcctctgatccggaagcaggtgtggcccggggcatagacttccaccatgtgtctgctgtgctcaactttgatcttcccccaacccctgaggcctacatccatcgagctggcaggtagtagtgtgacggcccaggcatctgcatggtaggcacactgagggacttggggtgtgctggacagagcctgcgggttggagatgcaagctgcactgtcttcccttgcaggacagcacgcgctaacaacccaggcatagtcttaacctttgtgcttcccacggagcagttccacttatgcaagattgc

SEQ ID NO: 19747 - DNA, 1020 bp, Homo sapiens
  SIMILAR (2)..(577): 511254mologous to Homo sapiens Human translocation associated protein designated Gp25L-H,accession number W80293,Smith-Waterman Score=402.
  misc_feature (1)...(1020): n = a,t,c or g
aggggcaaggggttttatttccaacatgggcagaccgagaaggcgctgtttcatcgagaaatccccgacgagacccatggtcatcggcaactatcgtacccagatgtgggataagcagaaggaggtcttcctgccctcgacccctggcctgggcatgcacgtggaagtgaaggacacgacggcaaggtggtgctgtcccggcagtacggctcggagggccgcttcacgttcacctcccacacgcccggtgaccatcaaattctgtctgcactccaattctaccaggatggctctcttcgctggtggcaaactgcgtgtgcaatctcganatccccaggttggggagcatgccaaacaaactaccctgagattgcctgcaaaaagataaagctgacggagctaacagctccgcgcgccgcccagttgctttgatcaggtggaacagattcagaaggagcaggattacccaaaggtatcgtgaagagcgcttccgactgacgagcgagagcaccaacccagagggtcctatggtggtcccattgctcagactgtcatcctcatcctcactgggcatctgggcagatgcgttcaccttcaagagcttctttgaggcccaagaagctggtgtagtgccctctttgtatggacccttcctttttacctcattttattttggtacttttccccacacagtcctttatccacctggatttttagggaaaaaaaatgaaaaagaataagtcacattggttccatggccacaaaccattcagatcagccacttgctgaccctggttcttaaggacacatgacattagtccaatctttcaaaatcttgtcttagggcttgtgaggaatcagaactaaccccagactcagtcctgcttcttttgcctcgagtgattttcctctgtttttcactaaataagcaaatgaaaactctctccattaccttctgctttctctttgtccacttacgcagtaggtgactggcattgcccacagagcaggcctgcctca

SEQ ID NO: 19748 - DNA, 2427 bp, Homo sapiens
  SIMILAR (44)..(862): 471254mologous to Homo sapiens nucleolar RNA- helicase,accession number AJ131712,Smith-Waterman Score=422.
ggcacgagggcagcgcgtgcgtgctgcgctactgagcagcgccatggaggactctgaagcactgggcttcgaacacatgggcctcgatccccggctccttcaggctgtcaccgatctgggctggtcgcgacctacgctgatccaggagaaggccatcccactggccctagaagggaaggacctccatggctcgggcccgcacgggctccgggaagacggccgcttatgctattccgatgctgcagctgttgctccataggaaggcgacaggtccggtggtagaacaggcagtgagaaggccttgttcttgttcctaccaaggagcttggcacggcaagcacagtcccatgattcagcagctggctacctactgttgctcggggatgtccgagttggccaatgtctcagcttgctgaaagactcagtctctcagagagctgtgcttgatggagaagccagattgtggtagtagggaccccatcttcgcatattaagccactttgcagcaagacagcctgaaactttcgtgactccctggagctttttggtggtggaacgaagcttgaccttcttttttccttttggctttgaagaagagctcaagaagtcttcctctggtaaggcagagtcacttgccccggattttaacaaggcttttctcatgtcagctacttttaacgaggacgtacaagccactcaaggagctgatattacataacccgggttacccttaagttacaggagtcccagctgcctggggccagaccagttacagcagtttcaggtggtctgtgagacttgagggaagacaaattcctcctgctgtatgccctgctcaagctgttcattgattcgggggcaagtctctggctcttttgttcaacactctaggaacgggagtttaccggcttacgcctgtttctttgggaacagtttcagcatcccccacctgtgtgctcaatggagagcttccactgcgctccagggtgccacatcatcttcacagttcaaccaaggtttctacggactgtgtcataggcaactgatgctgaagtcctgggggccccagttcaagggcaagcgtcggggccgagggcccaaaggggacaaggcctcttgatccggaagcaggtgtggcccggggcatagacttccaccattgtgtctgctgtgctcaacttttgatctttccccccaacccctgaggcctaacatccatcgagctggcaggtagtagtgtgacggcccaggcatctgcatggacagcacgcgctaacaacccagggcatagtcttaaccttttgtgcttcccacggagcagttccacttaggcaagattgaggagcttctcagtggagagaacagggggccccattttgctcccctacaagttcgggatggaggagatcgagggcttccgctatcgctgcaggtgtccacccccaggatgccatgcgctcagtgactaagcaggccattcgggaggcaagattgaggtttgatcaaggaagagcttctgcattctgagaagcttaaagacatactttggaagacaacccttaggggacctccaggctgctgcggcatggaccttacctttgcaccccgcagttggttgaagccccaacctggggccatgttcctgacttacctggttcctcctgcttctccgtggcccttggtgcgcccttcacaaagaagcgggaagaagcttgtcttccctcttgtaggaaggcccaagagagcaaagtccccagaaccccactgcgcagcttcaagcacaaaggaaagaaattcagacccgacagccaagccctccgtgaggttgttgggcctctataggagctgagctcaatgtggagcacaggctaacacccttcgtggacaggcgaggctctggtgcttaactgcacagcctgaaaaggacagttctgggcccggcagtgctgggccctttagctcctttggcacttccaagctggcatcttgcccccttgaccaacagaaataaaaaatttttagctggccccaagttttgtgcctccaagcatatgaaaaaggactatttgaatcccccaaaacatcaggagtcgggaaacttccgaagaacagctgtgcctggctctgtggctgcatgcagtgcttcacttggccagcagaggtcagctgtgccgagctgccccagccatgagaagagaatgcctgcccttgctggcaggtggctatggccggcccagagccttcctgcccagctcctgcagccctgctgcctgggatcaggctgggagatgggccttcctgaccgccagccttcctctccccgagcacacgcacatgtagattcggggggaagctgcctgctcttccttagaggagccggggcagctatctgctggtccctttctgaacaactgttgatgtgtgaaa

SEQ ID NO: 19749 - DNA, 497 bp, Homo sapiens
  SIMILAR (56)..(358): 971254mologous to Homo sapiens immunoglobulin lambda light chain,accession number X57822,Smith-Waterman Score=507.
ctactactactaaattcgcgggccgtcgacccaaggtgaccgtcctaggtcagcccaagctgccccctcggtcactctgttcccgccctcctctgaggagcttcaagccaacaaggccacactggtgtgtctcataagtgacttctacccgggagccgtgacagtggcctggaagcgaggtagcagccccgtcaaggcgggagtggagaccaccacaccctccaaacaaagcaacaacaagtacgcggccagcagctacctgagcctgacgcctgagcagtggaagtcccacaaaagctacagctgccaggtcacgcatgaagggagcaccgtggagaagacagtggcccctacagaatatttattgagggtttattgagtgcggggagaagggcttgatgccttggggtgggaggagagacccctccactgggatcctgcagctctagtctcccgtggtggggggtgagggatgagaacctatgaacattcgtcga

SEQ ID NO: 19750 - DNA, 546 bp, Homo sapiens
  SIMILAR (1)..(351): 841254mologous to Homo sapiens immunoglobulin lambda light chain variable region,accession number AF216776,Smith-Waterman Score=507.
atggcctggactcctcttcttctcttgctcctctctcactgcacaggttccctctcccagcctgtgctgactcagccaccttcctcctccgcatctcctggagaatccgccagactcacctgcaccttgcccagtgacatcaatgttggtagctacaacatatactggtaccagcagaagccagggagccctcccaggtatctcctgtactactactcagactcagataagggccagggctctggagtccccagccgcttctctggatccaaagatgcttcagccaatacagggattttactcatctccgggctccagtctgaggatgaggctgactattactgggctgtttcacagtattctggagtaccttttgagtattggttcctgaacatcagcagtcttggctgcctctgtggactcccggagttgtctccctgcttgtgttctggtgccatcctttgttcctccacccctgaccaaggtgcccagcagcctgtcttcaccagtcaaggaatccgccatcttggctgtagacatacatag

SEQ ID NO: 19751 - DNA, 1190 bp, Homo sapiens
  SIMILAR (20)..(271): 761254mologous to Homo sapiens immunoglobulin lambda light chain,accession number D01059,Smith-Waterman Score=314.
  misc_feature (1)...(1190): n = a,t,c or g
acgcgtccgtgtgtccaccatggcctggactcctcttcttctcttgctcctctctcactgcacaggttccctctcccagcctgtgctgactcagccaccttcctcctccgcatctcctggagaatccgccagactcacctgcaccttgcccagtgacatcaatgttggtatctacaacatatactggtaccaacagaagtcagggagtcctcccagatatctcctatactactactcggactcatataagggcctgggctctggaagtccccagccgcttctctggatccaaagatgcttcagccaatacagggattttactcatctccgggctccagtctgacgatgagggatgactattactgtgcaacatgggatagcagcctgactggacaggtcttcggcggaggggaccaaagctgacccgtccctagggtcagcccaaggcctgcccccctggggtaactcttgttcccaaccctccctcttgaggagctttcaagcccaacaagggccacaactggtgatgtcctcataaagtgactttcttaccccgggaagcccgttgaacagttgcccctggaaaggcagatagccagcccccgttcaaggcgggaagtggagaccacccacacccctcccaaacaaagcaataatcaagtacgcggcccagcaggctatctgagcctaacggcttgagcagtgggaagttcccacagaaagctacagctgccagggtcacgcattgaaggggagcaccgtgggagaagacagtgggcccttacagaatgttccataggtttctcaacccctcacccccccaccacgggatgacttagagctgcaggattcccaggggagaggggtcttctcctcccaccccaaggcatcaagacccttctccctgcactcaataacaccctcaataaatatttctcattgtcaatcagnnnnnnnnnnnnnnggggggccctttttaaagaatccttgggggggcccaatctttggcggggaaggcaaggcttaacttttttccttttggggggcggatttaaaccctggctgggaatcttgggaaaggaccttaattttgggggggtgccttatttgggcaacctccctccagaaattaaaggctttagggaaaatataaatttttaaagggaaaggggggtaaacaaccggcctcg

SEQ ID NO: 19752 - DNA, 1857 bp, Homo sapiens
  SIMILAR (1296)..(1150): 951254mologous to Homo sapiens Human FADD-interacting protein (FIP),accession number W96153,Smith-Waterman Score=266.
atggcgaaacctaaatcttacttggtggctatgctgaaacttgacccaggccctggcttgcaagtggacgtcagaactgccccagatgctatcttaaatattcagctgcaagaattccaaccaagttggaaagaaactttatttcattatacttccaggtctgggaatgatgccagtgaacagctctccttgacaggtctctcatcacttacagctcaaaggaaaagagaactcactcatttcacccgtttgatttgggtgaaatcatcaactggggacatcattaggagactaagactagatgcctctaggaaggctttgcaggatggttttgatctagttattgaagagactgattactttttcatgagcaggtggtccaggtaccttgtggaggtaaaagagataaaggtgctgtggtatgatgatggagccccatttccaaatggagaaacgaaggctcaagacattcagataacatgtctccagttgccatctagtaaagtgggacactcaggattcaaactcaggtgtccatctgtggagcaccctgagcagcacgccccactgtggcctcacagctccccaagcaagcagctggagcagggattacactacatcagaaaagagtgcatcagggatgcggggaagaatatagggtctgatgagcaagacagaaaccaacaaggtcaagaacacaagcagactcagcttaccctggcaagcaaggaagaagaagaagaaactagagatgaaggcagtcaattccagggaggtcatgttctgaagggggtggacaaagcagagaagcttaaagggggatccaagaggtggagggaaggccccttccccgacagatcttgcaatattgacaaggcatcccaaactaatgctatgaaagaaaacattcgccttgataacgtgtcccaagaaaaactctctgctggtggctccaacttagacaaaggaacaaagctgctccaagcgtacccccagagggatgagggatgtttgtctttctccattcttgaagcaactatcattgcaatcttcctcatttccccaccttgccaattgccttctgcacacagccaagggaccatgcagcaggcccctttagcgctgcgggaatcccctgcctctatccgagatccacattaccttgttgaagtcttcagaagttgccctcatttccttccatgtcttgttcaggagctggatacagatgcagaaaaactcctcaaaggatctgtcgtgggtgaagaacatcgggtggaagtcgttgcaggtctcactagctggaggaaagagatggaaaataagagaaaaagttttaaaacagtgaaacacgagaacataaccacaggtatgtgccccaaagggagacaagcggaggcacagatggctggaagtcaaagcaacctgaatagctttgaaggcggcaactggtccagtcctgggcaaaatcataaaatcagccaaaactgccttcaagcccccattgtagagcttccttgggtcacacctagtgctcggaactttaggtctggtccctactctcctcctcctcctcctcctcctcagcccctcccatcatcccatctgtcaagcttacatttttatagcccttttgtaagttatacctcatttgatctttacagttcctcttaccactcgtatcttatggatgaggatactgtggagcccaaggaactaaggtcaagccaaaaagtgatcggccattcttttactgggttccagccaactctgtccgctaacccctatgacagaggagatgggaaaataattgagctgctacctaggaaggcacaaacatttcctgtggtgaggacttag

SEQ ID NO: 19753 - DNA, 500 bp, Homo sapiens
  SIMILAR (261)..(488): 421254mologous to Mus musculus WW domain binding protein 11,accession number AF071186,Smith-Waterman Score=132.
ggcagcacctacagcgagctgctcagcggcaccgcctgcgtggtcacggcactgcaccttgcgcagcagcggcgccaccacctcctcgggggcttggcgtcccggcacgatgcgcctgagcagctcgctgtaggtgcgcccgtccagccccggcctcttcctgcgcccgccggcgctcaggcactcgtaggccacgctcacgttgttgttgaaggcggccctctgggagtggtgggccaggcgaaggtgccatagcgcgcggcccaggcgctgctgctgcagcaggagctggcccgggggctccccggcgccgccgtttacaggcgagcgcaggcccatgttctcgaagtagtgagccaggaaggcgatcggctcctcgggccgcgcctccagcaccttcagcagggccgcacgtagcatttccgtcacgccgacctgccgcaggaagtcctcctcgctctcggccgcccccgccgcccgggataccgactggcggccgc

SEQ ID NO: 19754 - DNA, 599 bp, Homo sapiens
  SIMILAR (536)..(48): 801254mologous to Homo sapiens ubiquitin conjugating enzyme,accession number L22005,Smith-Waterman Score=643.
ttttttttttttgaggtaaactcggcaagtttattctggtggtgtcaggactcctccgtgccagagtcatcctcatcgtccccgaagcagctgtcggcctcctcctccacctcgccgtcctcgtagtagtcgtcgtagaagaggtctgagccctcgtcgggcgccggcgcattggtcttcacgcagtactcggccagcgtggtgggcaccttcacgccgtcacgctccgcgtccaccttggtccccaggacctgcttccggatgatgttctgtgtacttcccgatccttccccttgctctctttccacttcctgtacatcacggaggcgtccacgtttgcgggcgagaaggtgttgggctcgttcaggagggagattcacactcaggagaatggtcctgacgttctgcgtggggttccacctctctgagggcagctccccgctctgggggtcgtccaccggcgggtggaggatggagatacacacgtcccccgtctcgtagatgttagggtgccacatcttggttaagaaaccgaaaggctggtggagagtatgggtagtcgatggggaacttgaggcgcgccttgaagtagccgccct

SEQ ID NO: 19755 - DNA, 1655 bp, Homo sapiens
  SIMILAR (222)..(1007): 381254mologous to Herpesvirus papio NTR,accession number AF200364,Smith-Waterman Score=252.
tcagagctgaattaagaggacacccggctggcgtctgctggttgtgtgtgggaaaaaacgctcccacatgtggtcacagaagtcttttctgttggatgactgtgatgtggcggtgacagcaggggagaaacaaggcttgaggttctctatgtccgattggaccccctccaccagaacaggcaatgtcactaccatctgcccagctgcctcttcatttgacatctggggagactgaggctcagggaggatacctggccgggcggggctggagggcccgggccctgcgttccagaagagccgcctgtctccggcttcaggctccgcagggccccgtggggcgtccccctccgctgtcccaccaggccgggtccaggggtcccggcgtttccggcctcgaatccacctccagtcgccgcggttccggggccgtgggtgacctgctggggaaaaggtcttcagggcgaagggaaggctccgcgcgccccgcacgcggggaccccccagcgcagatcccggatccgcgcggcccacgggcctcagcccaccggcttgaccttcgcgatgaagagcgcggcggccctctccagaaactcctcgcgggtcatgggcgcgctgggccgccgccccccgacggcgcggtccagcgccagggcccaggctgtcgggccccaagcgcgagccggcctccaggaagcgcgcgggcgcggcggcgtcgctggcctgcagcgcgccctccagggtgtccagcacggcctggcccacgcggcggtcggccacggcggcggccgagtcctccagcagctggaagagcgcgccggcgcgcgccacgaactccagcagcacgaagcaggtgagtgtgcccgcgcggaagacgctcagcggcaccgcctcgtggtcacggcactgcaccttgcgcagcagcggcgccaccacctcctcgggggcttggccgtccggcagatgcgcctgagcagctcgctgtaggtgcgcccgtccagccccgcctcttcctgcgcccgccggcgctcaggcactcgtaggccacgctcacttgttgttgaaggcggccctgggacacgacttcacctttctgtgggccaccatccatgaggtcatccccaaaatgcgctgggggcagtcgcagtgtcagcgcggcggcccgagctcccacacgcctgacctctccgcatgacccagcaggagccgcaccggggccccttcatcaggatctgctgtgaggccgggcaggctgctgccgcctcacagatacaccccaaacccaggagggagggggacaccacgatgtccttcgtgacccgctcggaggccacactctgtccgttgcttctgcagtcccgttccggcctgtccccccaggaagcaggcctggggaccaaggtggacgcggagcgtgacggcgtgaaggtgcccacccgctggccgagtactgcgtgaagaccaaggcgccggcgcccgacgagggtcagacctcttctacgacgactactacgaggacggcgaggtggaggaggggccgacagctgcttcggggacgatgaggatgactctggcacggaggagcctcccccacaggaagcgcgtgtggggaggctcggggccggggccagccccacactgggtctccacagcggcat

SEQ ID NO: 19756 - DNA, 1860 bp, Homo sapiens
  SIMILAR (709)..(1623): 641254mologous to Homo sapiens FLJ00044 protein,accession number AK024452,Smith-Waterman Score=1032.
  misc_feature (1)...(1860): n = a,t,c or g
atggtgtttaaccttcgatctagctacgtggtcagaaggttcttctcctgggtgacagagcgagactgtctcaaaaaaagaaagaaagaaagagagagagagagagagagagggaaggacacggaaggaacggaagggacggaacggacagggacggggaccggaaggtcaaaggtaaaacgaacggacaggacaggaacggacaggacacggaagggaaggaaggaaggaaggaaggaaggaaggaaggaaggaaggaaggaacgaaagggaaaggggttactagtattggaatctactgctccatcaggagacctcacccgcccacaccacattgcatcagttgttcccaaccgttaccctcgctggttcactctaagccacattgagtcccagcagtgtgagctggcatccaccatgctaactgcagccaaaggcgatgttcggaggctggaaacagtattagaatccatccagaaaaacattcactcctcatcacacatcttcaagcttgcccaagatgcatttaaaatagcaactctcatggacagtttgccagacatcactcttttcaaagtgtctctggagctgggcctgcagatgagaaaagatagagtaactggttcagataccacatctagtcagtgggcccaccaggaggagaatatgggcctcttgccaggaggagaatgtggctgtggcaaggccacctggggttatgcgaatgacactgtcaaccttaaattggcgacggcgggagatggggtttatgccctggacagcatcatgcagacctggtttacactctttactcccaccgaggccacaagtatagttgcaactaccgtgatgtccaacagcaccatcgtccgcctccacctggactgccaccagcaggaaaagctggccagcagcgcccggacacttgcactgcagtgtgccatgaaggatccacagaactgtgccctctctgcgctaaccctttgtgaaaaggatcacatagcttttgagacggcgtaccaaattgttctcgacgctgctacgactggcatgagctatacacagctctttacaatagcacggtacatggagcaccgcgggtaccccatgagggcctacaagctggccaccctggccatgacccatctcaacctgagctacaatcaggacacacaccctgccattaatgatgttttgtgggcctgtgcgcttagccactcccttggtaaaaatgagcttgcagctataatacctctggtggtcaagagtgtcaagtgtgcaacggtactgtcagacattttgcgcagatgcactctgaccactcctggcatggtgggacttcatgggaggaggaactctggtaagctcatgtcactggacaaagcccccttgaggcaactcttggatgccacgatcggggcctacatcaacacaacgcactcacggctcacacacatcagtcctcggcactatagtgagtttatagagttcctcagcaaagcccgagagaccttcttaatggcgcatgatggacacattcagtttacacagtttattgacaacctgaaacaaatctacaaaggcaaaaagaaactgatgatgttggttcgggagaggtttggttgatagatcttgtatgaatggggtggggggtggggatgggagggatgctnncctccttccccactgcnttttcactccgccaccgaactgatctattgttagccttaaactgcgcgaaggacatatccttttctactcctcaaactgggagtttgtttcctactgcaaaggattttaatttaatttattcgctaacatgactattttttaattgactattgccctgtgtttacgacg

SEQ ID NO: 19757 - DNA, 373 bp, Homo sapiens
  SIMILAR (209)..(370): 621254mologous to Homo sapiens Polypeptide fragment encoded by gene 165,accession number W89030,Smith-Waterman Score=143.
ggaaaactgcagaaaccctgtttctgtgaaaacttacgttagccccgtttcacagatgagaacctggagatgtgtactgtcatacagtcagttcagtgctaccaccgctcctggcatcctcctcgccccctgaacctgccccccaccaccagagccccccagcccactcacctgtgctgtgttggttccgcagactcggcggtggcgaggactgggctccctcttccggagggcgtgctgtgtggcgctcccactgcagctgcttctgctgctgttcctcctcctgctgttcctgctcccaatcagggaagaggaccgcagctgcaccctggccaacaacttcgcccgctccttcacgctcatgctgcgctaa

SEQ ID NO: 19758 - DNA, 4083 bp, Homo sapiens
  SIMILAR (3462)..(3854): 621254mologous to Plasmodium lophurae histidine-rich protein,accession number X01469,Smith-Waterman Score=535.
atgggggaagggcactgctgcaagctgagttctttgaaggatctggtagtaggcaaggctgtcattgcttgcccatttacagatgagaaggctgatatccagcggctggatgtggtttcccgggaaatgaatggaaacatcctcgtgcctaagcctctggatccaggaaaggatttggctctgccagtcaagggcccaggcactgcagggccatggatctccttaagggttcaccatcagccagcaggcccggtgctcagcacaccaaggagctttcaaggaggagatccctgggaagtgctcagcacagagtctgggagctcagttaggccgtcctacaccacaaatgccaaaaccagtgagaaatgcaagccacagggtgaggtgggagaagttgcattcattaatattgactcagagcaggtgctgagctccacgaaggaggggcagttctattggatgccccacgcccctgcaggtgccatgactcagcagccccaggacgactttgacaggagcgtggaggatgcccaggcatggatgaaggctgtgcaggaccagctgcaggtcaatgacaacacgcagggaccccgcgcggccctggaggccaggctgtgggagaccgaggggggacccgtgcagcctgagccctgtcacgttcaagctctctgctgtgctcccttcaccttctgtctgggaagctccctcacagatcacccaagagtggaataccccctgctttctgccatccctatgccagggctggggctgtgcagcctgtgcctctttcatgaggataagaaggacgaaggtccaggggtctggggggaccacacagtcaggacaccaggctttggagaaggggccattgtccgcatgggacattccagacctggctgctccttctggaaaatatgccagctggagcccgaggggcgtgtgagggtggacctcgtgctacggatggctgaagccctcttggcatgctgccctggggaccagaagcccgggatcctggcccggctgaaggacatcaaggcccaatgggaggagacagtcacctacatgactcactgtcacagccgcatcgagtgggtgtggctgcactggagcgagtacctgctggcccgagatgagttctaccgctggttccagaagatgatggtcacactggagccccacatcgagctccagctgggcctgaaggagaagcagtggcagctgagccacgcccaggtgctgctgcacaacgtggacaaccaggcggtgctcctggaccggctgctggaggaggcagcctccctgttcaacaggatcggggaccccagcgtggacgaagatgcccagaagagaatgaaggctgagtacgatgcagtgaaggccaaggcccagaagcgtgtagatctgctggagcaggtggcccgggagcatgaggagtaccaggcaggtgtggacgagttccaactgtggctgaaggcggtggtggagaaggtgaatggctgcctggggcggaactgcaagctgcccatcacgcagcgcctctccacactgcaggacattgccaaagattttcccaggggcgaggagtctctggagacgctggaggagcagtctgcgggtgtcattcggaacacctctcctttgggtgcagagaagatcaccggagaactggaagagatgaggaaagttctggagaagctgcgcgccctctgggaggaggaggaggagcggctgcggggcctgctccggtccaggggagcctgggagcagcagattaagcagctggaggctgagctcagtgagttcaggatggtcctgcagaggctggcccaggagggcctgcagcctgcggcgaaagcggggaccgaggacgagctggtggcacactggagacgctactcggcaacacgggcggcgctggcctcggaggagccccgggtggaccggctgcaagcccagctgaaggagctcatcgtcttccctcacaacctgaagccactctctgatagtgtcatcgctaccatccaggagtatcagagcctgaaggtgaagagcgcgaggctgcgcaatgccgcggcggtggagctgtggcagcatttccagcggcctctgcaggatctgcagctgtggaaggccctggcccagcggctcttggaggtcactgccagcctgccggacctgccttcccttcacaccttcctgccccagatcgaggcagccctgatggaaagctcccgcctgaaagagctgctgacgatgctgcagctgaagaaagacctcctgattggcatctttggccaggagagagccacggcactcctggagcaggtggcaggttccatgagggacagagacctgctgcataacagcctcctgcagaggaaaagcaaactgcagagcctgctcgctcagcacaaagactttggagcagcttttgagcccctgcagaggaagctcttggacctccaggtcagggtccaagccgagaaggggcttcagcgggaccttcctggaaaacaggcccagctctcaaggttgcaggggctgcaggaagaggggctggacttgggggcacagatggaggctgcaaggcctctggtccaggagaaccccaaccaccagcacaaaatggaccagctttcctccgacttccaggccctgcagaggtctctggaggaccttgtggacaggtgtcggcagagtgtgcaggagcactgcaccttcagccaccagctgctggagctgcggcagtggatcgttgtgaccacgcaaaagctggaggcacaccggggagaggcgggcccgggggatgccgagtcccaagaggccgagtttgagaggctggtggcagaattcccggagaaggaggcccagctgtccctggtggaagcgcagggctggctggtgatggagaagtcttctccggagggtgctgccgtggtgcaggaggagctcagggagctggcagagtcgtggcgggccttgaggctgctggaagaaagtctgctgagcctcatcagaaactggcatctgcagaggatggaagtggattcggggaagaaaatggttttcaccaacaacatcccaaagtcaggatttctcatcaatcccatggatcctattcccaggcatcgtcgacgcgcaaatcttctacaggaagaagaagggagccatgaagatttctcccagctcctgaggaactttgggcagtggttgcaggtggaaaactccaagctggttagaatcatcgcaatgagaacttctacagctgaggacttgaggaccagaaaatcgaagctgcaggagctggaggctcgggtgccagaaggtcagcatctctttgagaacctccttcgtctcgggccagcaagggggacctcggatgagctggaagatctgcgctaccagtggatgctgtacaagtccaagctgaaggactctggccacctgctgtgcttcttcatcaccatcatcaccctcaccatcactaccaccactaccaccatcaccaccaccatcaccatcatccttaacaccatcaccctcaccatcaccaccatcaccatcgcaatcatcatcatcaccatcaccatcatctccatcaccatcatcaccatcaccatcatcatctctatcactcacacttaccatcaccatcacatcaccatgatcatcaccattatcaccatttccatgatcattatcaccatcatcaccaccttactctcaccaccccacccccaccccaccaccattagcgtcatgatcattatcgcatcaccaccatcatcaagcatcactgccatcattgccatcacccccatcgccatggtcactatcactatcatcatcacgggactgtggcttttggtgccctggaggactcggcggtggcgaggactgggctccctcttccggagggcgtgctgtgtggcgctcccactgcagctgcttctgctgctgttcctcctcctgctgttcctgctcccaatcagggaagaggaccgcagctgcaccctggccaacaacttcgcccgctccttcacgctcatgctgcgctacaatggcccaccacccacctaa

SEQ ID NO: 19759 - DNA, 538 bp, Homo sapiens
  SIMILAR (3)..(326): 1001254mologous to Homo sapiens dJ477O4.2 (CGI-54),accession number AL121586,Smith-Waterman Score=595.
gtagaggctgggccttcaagaacccagatactattgagcagtgccggcgagagggcttcagccagaagatgcaggagcagaagaatgaaggctgccaggtgtatggcttcttggaagtcaataaggtggccggaaacttccactttgcccctgggaagagcttccagcagtcccatgtgcacgtccatgacttgcagagctttggccttgacaacatcaacatgacccactacatccagcacctgtcatttggggaggactatccaggcattgtgaaccccctggaccacaccaatgtcactgcgccccaagcctccatgatgttcacagtggctggactcatcgattcgctcatctaccactcagcacgagccatccagaagaaaattgatctagggaagacaacgtagtcaccctcggtgcttcctctgtctcctctttctccctggcctgtggttgtcccccagcctctgccaccctccacctcctcggtcagccccagccccaggttgataaatctattgattgattgtgatag

SEQ ID NO: 19760 - DNA, 1098 bp, Homo sapiens
  SIMILAR (1)..(750): 861254mologous to Homo sapiens dJ477O4.2 (CGI-54),accession number AL121586,Smith-Waterman Score=1086.
atggaggcgctggggaagctgaagcagttcgatgcctaccccaagactttggaggacttccgggtcaagacctgcgggggcgccaccgtgaccattgtcagtggccttctcatgctgctactgttcctgtccgagctgcagtattacctcaccacggaggtgcatcctgagctctacgtggacaagtcgcggggagataaactgaagatcaacatcgatgtactttttccgcacatgccttgtgcctggtcccagtaccttagcctgattttcctgcttccagatctgagtattgatgccatggatgtggccggagaacagcagctggatgtggaacacaacctgttcaagcaacgactagataaagatggcatccccgtgagctcagaggctgagcggcatgagcttgggaaagtcgaggtgacggtgtttgaccctgactccctggaccctgatcgctgtgagagctgctatggtgctgaggcagaagatatcaagtgctgtaacacctgtgaagatgtgcgggaggcatatcgccgtagaggctgggccttcaagaacccagatactattgagcagtgccggcgagagggcttcagccagaagatgcaggagcagaagaatgaaggctgccaggtgtatggcttcttggaagtcaataagatcaacatgacccactacatccagcacctgtcatttggggaggactatccaggcattgtgaaccccctggaccacaccaatgtcactgcgccccaagcctccatgatgttccagtactttgtgaaggtggtgcccactgtgtacatgaaggtggacggagaggtactgaggacaaatcagttctctgtgaccagacatgagaaggttgccaatgggctgttgggcgaccaaggccttcccggagtcttcgtcctctatgagctctcgcccatgatggtgaagctgacggagaagcacaggtccttcacccacttcctgacaggtgtgtgcgccatcattgggggcatgttcacagtggctggactcatcgattcgctcatctaccactcagcacgagccatccagaagaaaattgatctagggaagacaacgtag

SEQ ID NO: 19761 - DNA, 474 bp, Homo sapiens
  SIMILAR (1)..(402): 901254mologous to Homo sapiens dJ477O4.2 (CGI-54),accession number AL121586,Smith-Waterman Score=593.
atggaggcgctggggaagctgaagcagttcgatgcctaccccaagactttggaggacttccgggtcaagacctgcgggggcgccaccgtgaccattgtcagtggccttctcatgctgctactgttcctgtccgagctgcagtattacctcaccacggaggtgcatcctgagctctacgtggacaagtcgcggggagataaactgaagatcaacatcgatgtactttttccgcacatgccttgtgcctggtcccagtaccttagcctgattttcctgcttccagatctgagtattgatgccatggatgtggccggagaacagcagctggatgtggaacacaacctgttcaagcaacgactagataaagatggcatccccgtgagctcagaggctgagcggcatgtctgtgagcttcagctagaaagtggtaataaaacagtagtaccaaccacatggaattgtaagatcaaatga

SEQ ID NO: 19762 - DNA, 690 bp, Homo sapiens
  SIMILAR (315)..(539): 941254mologous to Homo sapiens serologically defined breast cancer antigen NY-BR-84,accession number AF308298,Smith-Waterman Score=368.
tttcgtggccggctggcgtcccctttccggccggtccccatggaggcgctggggaagctgaagcagttcgatgcctaccccaagactttggaggacttccgggtcaagacctgcgggggcgccaccgtgaccattgtcagtggccttctcatgctgctactgttcctgtccgagctgcagtattacctcaccacggaggtaaggggcggggcttaatgcgtgggcggggcttggcattctaggagtaggacctttaggggtgggagtggggaaggagaggtttggggctaagtcttactgaggtagcgctgccccaggtgcatcctgagctctacgtggacaagtcgcggggagataaactgaagatcaacatcgatgtactttttccgcacatgccttgtgcctatctgagtattgatgccatggatgtggccggagaacagcagctggatgtggaacacaacctgttcaagcaacgactagataaagatggcatccccgtgagctcagaggctgagcggcatgttttatcattcgttgtttcagcagattaatgcaggacaccagtggaaccaacataatttgctataggactggatgtggagtggaggagagcaaagtcatggttgttgattccaacgctttcagcctgagcaaatgaatgacttgagatggagatgactggaggag

SEQ ID NO: 19763 - DNA, 1517 bp, Homo sapiens
  SIMILAR (1428)..(337): 471254mologous to Homo sapiens dJ477O4.2 (CGI-54),accession number AL121586,Smith-Waterman Score=543.
  misc_feature (1)...(1517): n = a,t,c or g
aagaggagacagaggaagcaccgagggtgactacgttgtcttccatagatcaattttcttctggatggctcgtgctgagtggtagatgagcgaatcgatgagtccagccactgggagagagacaagggctggcactggcccagtgggggccttggcttttgacgctgagagccttgtcacttaactggccaggccagcatctgccccttcacccccaaccaaacctggggcacccaggctttaccctccccaccccacagctcacagacgccctgggcctcttacctgtgaacatgcccccaattgattgggcggacacaccctgtcaggaagtgggtgaaaggaacctgtgcttctcgcgtcaagcttcacccatcatcgggcgagacttcataagaggacgaagactcccgggaaagccttggtccgcccaacgagcccattgggcaaccttctcatgtctgggtcacagagaacttgatttgttcctcagtaccctggggtgggaggggagcctctccgtccaccttcatgtacacagtggggcaccacctttcacaaagtactgggaaacatcatggagggctttggggcgcagtgacattgggtgttggtcaaggggggttcacaatgccctggatagtcctcccccaaatgaccaggtgctggatgtagtggggtcatgttgatgttgtcaaggccaaagctctgacaagtcatgaacgtgacacatgggaactgctggaagctctttcccaggggacaaagtggaagtttccggccaccttattgacttgcaagaagccatacaccttggcagccttcattcttctgctcctgcatcttctggctgaagccctctcgccggcactgctcaatagtatctgggttcttgaaggcccagcctctacggcggatatgcctcccgcacatcttcacaggtgttaacagcaacttgatatcttctgcctcagcaccatagcagcttctcacagcgatcagggtccagggagtccagggtcaaacaccgtcacctcgactttcgcagagctcatgaccgctcagcctctgagctcacgggggatgccatctttatctagtcgttgcttgaacaggtttgtgttccaacatccagctgctgttctccggccaacatcccatggcatcaatactcagataggcacaaggcatgtgcggaaaaagtacatcgatgttgatcttcagtttatctccccgcgacttgtccacgtagagctcaggattgcacctccgtggtgaggtaatactgcagctcggacaggaacagtagcagcatgagaaggccactgactaatggtcacggtggcgcccccgcaggtcttgacccggaagtctctccaaagtgttggggtaggcatggaactgcttcagcttccccagcgcctccatggggaccggccggaaaggggacgccagacgaaatcgtcgacccggnanttccggngcggtncgtcacgcttcagtatcaaaggggcacg

SEQ ID NO: 19764 - DNA, 473 bp, Homo sapiens
  SIMILAR (37)..(432): 791254mologous to Homo sapiens A human pathogenesis-related protein designated HPRP,accession number W63115,Smith-Waterman Score=549.
  misc_feature (1)...(473): n = a,t,c or g
nattgattagcatctcnccagngcggnggaattcccaagacagagaggatcggctgtggttcccacttctgtgagaagctccagggtgttgaggagaccaacatcgaattactggtgtgcaactatgagcctccggggaacgtgaaggggaaacggccctaccaggaggggactccgtgctcccaatgtccctctggctaccactgcaagaactccctctgtgaacccatcggaagcccggaagatgctcaggatttgccttacctggtaactgaggccccatccttccgggcgactgaagcatcagactctaggaaaatggtttttccagcccaggacaagccaggtgagctgcaggccacactggaccacacggggcacacctcctncaagtccctgcccaatttccccatacctctgccaccgctaatgccacgggtgggcgtgccctgctctgcagcgtccttgcangg

SEQ ID NO: 19765 - DNA, 448 bp, Homo sapiens
  SIMILAR (177)..(347): 981254mologous to Homo sapiens A human pathogenesis-related protein designated HPRP,accession number W63115,Smith-Waterman Score=281.
  misc_feature (1)...(448): n = a,t,c or g
accagggcaacctgtagtgccagtgcctggttccacccggggggcatctgagaactgtgtccttccattcctgagtccagcacttcccaggccagccagggtggtgcttgtgtgggaaggactttaaatccagctgccagacccctggacgggagaaggagagacggctggccaccatgcacggctcctgcagtttcctgatgcttctgctgccgctactgctactgctggtggccaccacaggccccgttggagccctcacagatgaggagaaacgtttgatggtggagctgcacaacctctaccgggcccaggtatccccgccggcctcagacatgctgcacatggtggtatgggccaagacagagaggatcggctgtggttcccacttctgtgagaagctccagggtgttgaggagaccaccatcgagttatggtgtgcactagn

SEQ ID NO: 19766 - DNA, 1227 bp, Homo sapiens
  SIMILAR (1120)..(506): 991254mologous to Homo sapiens 11-DEC-1998 Sequence encoding human neuron-associated protein,accession number A47414_cd1,Smith- Waterman Score=1032.
tttgggcaagacaaccccaagcccaagttaggcagtgagcttccctcaaaatccttcccaccccccaggactcaggttgggagggccaggagaggtgtgggcccggtgtgcagtccttcaggcggccccccttgagctcgcaagccagccaaggccttgtgccttccaggattggattggtgtgatgaggcacatgccccgtagcctttcccttccggagggccttaaccaagaagtatcttgtttaggggctggggacagggtggggaagatgacaggaggacagctgtcctcttcaccctttgagtggtatccccttcagaagattccagccaacaccagaggaggcaggagcagtagtcccaggagagggccccacacatgaccagggcccgagttcagccctgacacgacgctaggcttgtcagggccctctgcacctggcaaggacgactgcagagccagggcacgcccacccgtggcattagcggtggcagaggtatatggggaaattgggcagggacttggagaaggtgtgccccgtgtggtccagtgtggcctgcagctcacctggcttgtcctgggctggaaaaactgaggccaagacctcactggaaggaggcaactcagcctcagcctcagcctcctcctgggcatggggtaggagttcccttgcccctgtcagggacatcttggggtccagagagttctctgggctcctagagggcacttttgttttgtctgtcactttgtctgctgattttgggataggaacatgggtcgatttggggaaggtaactggctcctcatccaaggagggcaggctgtgagctgccaaaatggaagggacctcagttgttacgcaaggtggagcctctgttgccatggagggcgggtctttcgttgctaaggaagttggggcctgggtttccacagcaggcagagccttggttgccagggagcctgagacctctgttaccaagaaagccggaatccccgttgctagggaagaaggagtacccattttcctagagtctgatgcttcagtcgcccggaaggatggggcctcagttaccaggtaaggcaaatcctgagcatcttccgggcttccgatgggtttggttggcacataccaccttggttcactttcttcacagcacttctcctctgcggcttgatgtttaagattcactgagtgtccgttgtctcccagtggaatgtgagctc

SEQ ID NO: 19767 - DNA, 1288 bp, Homo sapiens
  SIMILAR (454)..(780): 991254mologous to Homo sapiens 11-DEC-1998 Sequence encoding human neuron-associated protein,accession number A47414_cd1,Smith- Waterman Score=574.
  misc_feature (1)...(1288): n = a,t,c or g
aggggcaggactggtggcagaggccacagagatgaccacaccagggcattctgtagtgccagtgcctggttccacccggggggcatctgagaactgtgtccttgcattcctgagtccagcacttcccaggccnnnnnnnnnnnnnnnnnnnnnnnnnnnnnnnnnnnnatttccctaatggatctgtccacaacttaggaactcacacagcttttggcctgagcccccgttaccaagagaaaggaggtttttgccaaggactccaaggggagtgcacttgatgctggtcgggacccaaagcgcccagccctccctgagacattgtgtgagtcgggctgggcctcaaacacggcccccactgccccaccccagccagggtggtgcttgtgtgggaaagactttaaatccagctgccagacccctggacgggagaaggagagacggctggccaccatgcacggctcctgcagtttcctgatgcttctgctgccgctactgctactgctggtggccaccacaggccccgttggagccctcacagatgaggagaaacgtttgatggtggagctgcacaacctctaccgggcccaggtatccccgccggcctcagacatgctgcacatgagatgggacgaggagctggccgccttcgccaaggcctacgcacggcagtgcgtgtggggccacaacaaggagcgcgggcgccgcggcgagaatctgttcgccatcacagacgagggcatggacgtgccgctggccatggaggagtggcaccacgaggcgtgagcactacaacctcagcgccgcctcctgcagcccaggccagatgtgcggccgctacacgcaggtggtatgggccaagacagagaggatcggctgtggttcccacttcttgtgagaagctccagggtgttgaggagaccaacatcgaattactggtgtgcaactatgagcctccggggaacgtgaaggggaaacggccctaccaggaggggactccgggctcccaatgtccctctggctaccactgcaagaactccctctgtgaacccatcggaagcccggaagatgctcaggatttgccttacctggtaactgaggccccatccttccgggcgactgaagcatcagactctatgaaaatgggtgcagagggccctgacaagcctagcgtcgtgtcagggctgaactcgggccctggtcatgtgtggggccctctcctgggactactgctcctgcctcctctggtgttggctggaatcttctgaaggggataccactcagaggc

SEQ ID NO: 19768 - DNA, 404 bp, Homo sapiens
  SIMILAR (7)..(270): 751254mologous to Homo sapiens dihydrolipoamide succinyltransferase,accession number L37418,Smith-Waterman Score= 325.
  misc_feature (1)...(404): n = a,t,c or g
tttcgtgcccgccctcggctcctccgccgtgatgctgtcccgatcccgctgtgtgtctcgggcgttcagccgctcgctctccgccttccagaaggggtctccttatgccagggaccaggttaccctaacagcaggaaggttgtcattaacaacagtgtcttcagtgttcgctttttcagaactacagctgtatgcaaggatgacttggttacagtcaaaaccccagcgtttgcagaatctgtcacagagggagatgtcaggtgggagaaagggaagatttagtttcctannnnnnnnnnnnnnnnnngaaaaaaagttttgtnnnnnnnnnnnnnnnnnnnnnnnnnnnnnnnnnnnnnnnnnnnnnnnnnnnnnnnnnnnnnnnnnnnnnnnnnnnnnnnnnc

SEQ ID NO: 19769 - DNA, 1323 bp, Homo sapiens
  SIMILAR (526)..(1320): 811254mologous to Homo sapiens alpha-ketoglutarate dehydrogenase complex dihydrolipoyl succinyltransferase, KGDHC E2k component,accession number S72422,Smith-Waterman Score=1062.
atgccagcagtaacaatattgaagccaaatttaaaacaaataattctaggattaaaagctgcagaggtgtcatcacttccaccatcaattgtcttggatgccaaggaaatcacaactcaaattacgagacaaattttgaaggggaactgccctctagggagacattccctgcctggggtctccttatgccagggaccaggttaccctaacagcaggaaggttgtcattaacaacagtgtcttcagtgttcgcttcttcagaactacaactgtatgcaagtatgacttggttacagtcaaaaccccagcgtttgcagaacctgtcacagagggagatgtcaggtgggagaaagctgttggagacacagttgcagaagatgaagtggtttgtgagattgaaactgacaagacattggtgcaggttccatcaccagcaaatggcatgattgaagctcttttcgtacctgatgggggaaaagtcgaaggaggcactccgcttttcacactcaggaaaactggtgctgctcctgctaaggccaagccggctgaagctcctgctgctgcagccccaaaagcagaacctatagcagcggcagttcctccccgtgcagcacccatacccactcgatgccaccagtgccctcgccctcacaacctccttctagcaaacctgtgtctgcagaggcccagaatacatgtgccaatgctgacaatttttaatgagattgatgtgagtaacatccagaagatgagggctcggcacaaagaggcttttttgaagaaacataacctcaaactaggcttcatgtcggcatctgtgaaggcctcagcctttgccttgcaggaacagcctgttgtaaacgcagtgattgatgatataaccaaagaggtggtatatagggattatattgacatcagtgttgcagtggccaccccacagggtctggtggttccagtcatcaggaatgtggaagctatgaattatgcagatattgaacagaccatcactgaactgggagagaaggcccgaaagaatgaatttgccattgaagatatggatggtggtaccttcaccattagcaatggaggtgtttttggctcactctttgaacacccattatcaacccccctgtctgccatcctggggatgcatggcatctttgacaagccagtggctataggaggcaaggtagaggtgcagcccatgatgtacgtggcactgacctatgatcaccggctgattgatggcagagaggctgtgactttcctccgcaaaatcaaggcagcggtagaggatcccagagtcctcctctttgatctttag

SEQ ID NO: 19770 - DNA, 1561 bp, Homo sapiens
  SIMILAR (884)..(1558): 861254mologous to Homo sapiens alpha-KG-E2,accession number AC006530,Smith-Waterman Score=951.
atggagtcagaagccctggtggtctgcatcaaccactgcatggctgtgaactatggaatgatctaccagagaggcagctccaatatgaacatcctctccctgtccctcaagcatcctgagaagactggaatcagcccaacagcaaaccatggcatctcagatctgcaggaaggagaggctgcgtgtggttcgctccgaacacccctcgtcgggcggcgggtactgcggcccgccccacttccggttgttgtccggccctatatccggtgtccgcccgccctcggctcctccgccgtgatgctgtcccgatcccgctgtgtgtctcgggcgttcagccgctcgctctccgccttccagaaggggaactgccctctagggagacgttccctgcctgaggatgacttggttacagtcaaaaccccagcgtttgcagaatctgtcacagagggagatgtcaggtgggagaaagctgttggagacacagttgcagaagatgaagtggtttgtgagattgaaactgacaagacatctgtgcaggttccatcaccagcaaatggcgtgattgaagctcttttggtacctgatgggggaaaagtcgaaggaggcactccacttttcacactcaggaaaactggtgctgctcctgctaaggccaagccggctgaagctcctgctgctgcagccccaaaagcagaacctacagcagcggcagttcctccccctgcagcacccatacccactcagatgccaccggtgccctcgccctcacagcctccttctggcaaacctgtgtctgcagtaaaacccactgttgccccaccactagctgagccaggagctggcaaaggtctgcgttcagaacatcgggagaaaatgaacagggatgcggcagcgcattgctcagcgtctgaaggaggcccagaatacatgtgcaatgctgacaacttttaatgagattgacatgagtaacatccaggagatgagggctcggcacaaagaggcttttttggaggaaacttaagctcaaactaaggctcatgtcggcaattgttgagggctcagccgtttgccttgcaggaaaacgcctttgttaatggagggaattgacgacacaaccaaagaggtggtgtatagggattatattgacatcagtgttgcagtggcccacccacggggtctggtggttccagtcatcaggaatgtggaagctatgaattttgcagatattgaacggaccatcactgaactgggagagaaggcccgaaagaatgaacttgccattgaagatatggatggcggtaccttcaccattagcaatggaggcgtttttggctcgctctttggaacacccattatcaacccccctcagtctgccatcctggggatgcatggcatctttgacaggccagtggctataggaggcaaggtagaggtgcggcccatgatgtacgtggcactgacctatgatcaccggctgattgatggcagagaggctgtgactttcctccgcaaaatcaaggcagcggtagaggatcccagagtcctcctcctggatctttag

SEQ ID NO: 19771 - DNA, 3289 bp, Homo sapiens
  SIMILAR (239)..(907): 931254mologous to Homo sapiens alpha-KG-E2,accession number AC006530,Smith-Waterman Score=1078.
gcaagataaggagggactatagtatgctatttaactttcttttagtaatatgagttgcaagtaaaaattcctggtatagtattattattacaacaagacagtctatgcctgttgaaactggcactttttctttcccaaaactaattttattctttaaggggcatgctatcttggaaaggagggcaaatagagctgcctgtgaaaaggaataatataaaacggagacccggccgccgtgatgctgtcccgatcccgctgtgtgtctcgggcgttcagccactcgctctctgccttccagaaggggaactgccctctagggagacattccctgcctggggtctccttatgccagggaccaggttaccctaacagcaggaaggttgtcattaacaacagtgtcttcagtgttcgcttcttcagaactacaactgtatgcaagtatgacttggttacagtcaaaaccccagcgtttgcagaacctgtcacagagggagatgtcaggtgggagaaagctgttggagacacagttgcagaagacgaagtggtttgtgagattgaaactgacaagacattggtgcaggttccatcaccagcaaatggcatgattgaagctcttttcgtacctgatgggggaaaagtcgaaggtggcactccgcttttcacactcaggaaaactggtgctgctcctgctaaggccaagccggctgaagctcctgctgctgcagccccaaaagcagaacctatagcagcggcagttcctccccgtgcagcacccatacccactcagatgccaccagtgccctcgccctcacaacctccttctagcaaacctgtgtctgcagtaaaacccactgctgtcccaccactagctgagccaggagctggcaaaggtctgcattcagaacatgcaggagaaaatgaacaggatgcggcagtgcattgctccagcgtctgaaggaggcccagaatacgatgtgccaatgctgacaatttttaaatgagattgacatgagtaacatccaggagatgagggctcggcacaaagaggcttttttgaagaaacataacctcaaactaggcttcatgtcggcatttgtgaaggcctcagcctttgccttgcaggaacagcctgttgtaaatgcagtgattgacgacacaaccaaagaggtggtgtatacggattatattgacatcagtgttgcagtggccaccccacggggtctggtggttccagtcatcaggaatgtggaagctatgaattttgcagatattgaacggaccatcactgaactgggagagaaggcccgaaagaatgaacttgccattgaagatatggatggtggtaccttcaccattagcaatggaggcgtttttggctcgctctttggaacacccattatcaacccccctcagtctgccatcctggggatgcatggcatctttgacaagccagtggctataggaggcaaggtagaggtgcggcccatgatgtacgtggcactgacctatgatcaccggctgattgatggcagagaggctgtgactttcctccgcaaaatcaaggcagcagtagaggatcccagagtcctcctctttgatctttaggaggaacccacacaccctacaaattgatcatgcaggaactgaaaaccagtctttctccctgtccccctcatgggtcccgggttagcctggtgacagcaagacacatgctgttggcctcaagcaaggaagcagagcactgtgtaaccagcagtcacaggtcttttttttggcgttcctgcctggctctctccctctctgcacctgtctcataccctcgaatatcttaattccttaggcttaagagagagagccttaatggatgctcattcatattcctgcctttcttccatcagctctctgcaaagatgattttgcttctccctagtgctggtatattatagagaaacccccggcggcccatgtgattaagttcctatcttttgaaagtttgttcgacagagacttctaggaggatgctgtgcctcccaagctcagagcagcctctgtcctggctgtgcacattctcccttgattccactttgtgtggagggattgaacacaggcaaagaggtgctgctttgcttcttcaatggcaccttcattctcccgttgtcattgacttcaagatgcctcttctacctcttccaggaagcacaggccaggggatctgggtgtgtgagtgggaggagagggcagaggtcccctgaggtcaatgcattgtaatcatcatacgaaggagagcccaggtctgcccctcacgcttcccatcatagggctgacaccaagaagactccgtctttggcacaatctcacacagctggggctgtagcaaccctttccaacccctcttgctggtttgctggcacacattacaccaaccttgtcctagacaagattctcacaccatcatcgccacgtggaccaagcagtggtcccgagaaagaggccagagcctgggtagagattaggggaagggaggtctcctctagactgaccttacattgcctggagcttttcgagttaaagttgcttgtaagcacctgggcttgaggaggccagttttttgtcccttccggcgcttatagcggggcccttgtctcttccctctgcaggacacaagatctggaggacgtggactggggtaggaaacccaccctgaggggtgttagtacctagtggtgaaacggatgaggtcatttctaaggtgtgttgccccggtggatactgggcaacaatcattggaattccttggagccactgggattcatggctttgtatccaactgcatccaggctctgaggctgctgtcgtttgacaccagggccagtagagagatgcccttttgtatcttaagccaaggaagtgaggcctgggggtgtcgggaggggggaaggggtgggagcccaatactgagtgcctgcagcatctactactctgtcttcactattcagaaccttgtaactaaagtatttaaagaagctgattttaaatgcaaattaaagggcagatattctcaaacagggttcctgtatctgttccttttggctactgaggtggtacaagtccccagcactgttgcactgaaattattgaaagccactcaaggtcctgttgcttattttgtgaaatcagaaatcccttatgtggaacttaacactcataatttgacagaaggtagaaccctgactgccagccgggaaagtgttgccaaaaagagtcaacctctgtaaaaatatttgaagag

SEQ ID NO: 19772 - DNA, 1211 bp, Homo sapiens
  SIMILAR (150)..(725): 481254mologous to Homo sapiens heme-binding protein,accession number AF167473,Smith-Waterman Score=317.
cgcgtggtcgatttctgccgccctgccaccctgccgccctgccgccctgccgccctgccgccctgctgccggtggtcgctgcccgtggtgctccgtcgcccccgccacctcacgtcctcccgtgcgtcgggagcggtctcggctacaacatgttgggcatgatcaagaactcgctgttcggaagcgtagagacgtggccttggaaggtcctaagcaaaggggacaaggaagaagttgcctatgaagaaagggcctgtgaaggcgggcaaatttgccacagtagaagtgacagataagcctgtgggatgaggctcttacggggaagcaattgcccaaggttcgcaaagtatgcggggggcaccaatgacaaagggaattgggatggggatgacagtccctatttcctttgcatgtgttccccaattgaagatggctctcttgcagaaagaaattaaaagtctggtttccggatttccaaaccaattttcaaagcgacccaccagctcccagttgacaaaagcgttaagatttgaggaacgggaaggcatccactgtctaattccatgccagtttggtggttatgccaagggaagcagactacgtagtcacaagccacccgttttgcgtgctgccctgggagggcacagccacctaccggggggacatctacttctgcacgggttatgaccctcccatgaaagccctacggacggcgcaatgagatcttggctgtttgaagacatgagtgaccccactgaaccaagaacttactgggaagtgtgcctctgtgtctccttccttcgggggtaaggaggggacagtgcttcccaagttcccagctggcaagtcccaactttaaccaacttttcctttcaaagtcagttacttgccaatttttcttgaaaaaagcatgtttccatatactaagtctcttttctcacggtagggaaataatacagccaagatatgcagcatccttctcatttgatgtagaaaaattcttgcggatagacccagaaaaatccctggcagcttttctcccaggcatctgggtcactaaaaacttgattttctaaaattattgggatttgtatttttgtttattaagggggaaaatgtgatttgtgcctgatctttcatctgtgattcttataagagctttgtcttcagaaaaactaaaaataaaaggcattgacttaaaaaaaaaaaaa

SEQ ID NO: 19773 - DNA, 404 bp, Homo sapiens; identical to SEQ ID NO: 804
  SIMILAR (265)..(143): 871254mologous to Homo sapiens calbindin D28K,accession number S46006,Smith-Waterman Score=190.
  misc_feature (1)...(404): n = a,t,c or g

SEQ ID NO: 19774 - DNA, 2206 bp, Homo sapiens; identical to SEQ ID NO: 15055
  SIMILAR (2)..(889): 1001254mologous to Homo sapiens potassium channel homolog; KvEBN2,accession number AF033347,Smith-Waterman Score=1565.

SEQ ID NO: 19775 - DNA, 684 bp, Homo sapiens
  SIMILAR (376)..(681): 821254mologous to Homo sapiens unnamed protein product,accession number AK000541,Smith-Waterman Score=428.
atgcccgaaccgcagcggccaggcgttcctccagaacctcctcccccaggagcttgctacgcgtgccggaaatctggccactgggccaaggaatgcccgcagcccgggattcctcctaagccgcgtcccatctccccctggaccatcacggacgccgagcttcgggtaactctcacagtggaagcccacctgcacccaggtgaaataaacagccatgttgctcacacaaagcctgtttggtggtctcttcacagggacgcgcatgaaaactacaaacacctctgtgcaaacaagctagaaaaccttgaagaaatggacaaattcatggaaatattcagcatcccaagattgaaccagataaaaatgatgttaggtacagagagctccctgaaacagatgctgacctcaagagaatttgcaagacaacagttgaggctgaaagcttttgctcccattcaggaaatgatgacttttgtgcagtttgctaataatgaatgtgattatgggatggggcttgagttgggaatggacctcttttgctatggctcacattattttcataaagttgctgtccagcttttacctcttgcatataatctgttgaagaggaatctgtttgcagaaattattgaggatcatctggcaaacagaagtaaagagaacatagaccaacttgctgcatga

SEQ ID NO: 19776 - DNA, 1665 bp, Homo sapiens; identical to SEQ ID NO: 19722
  SIMILAR (1120)..(1260): 841254mologous to Homo sapiens calbindin D28K,accession number S46006,Smith-Waterman Score=210.

SEQ ID NO: 19777 - DNA, 915 bp, Homo sapiens
  SIMILAR (145)..(348): 651254mologous to Homo sapiens lipase related protein 2,accession number M93284,Smith-Waterman Score=238.
atggagctagaagccacgaatatagttgttagggctgttctcctgtttccaaggaccacaggccagccccttagcacaaggaggagagctcctatagaaggcattcttccaagctcatctgttctccttcagttggataaggatgtaggcagagggttggacccagctgggccatttttccacaacactccaaaggaagtcaggctagacccctcggatgccaactttgttgacgttattcatacaaatgcagctcgcatcctctttgagcttggtgttggaaccattgatgcttgtggtcatcttgacttttacccaaatggagggaagcacatgccaggatgtgaagacttaattacacctttactgaaatttaacttcaatgcttacaaaaaagaccacagctcttgggctgtcccagccccactgcagcttcctgatgcgtggggtgggatggctacagtgtttcagcagctcctttggcacctgctgtttggtgggtctcaggttcttgtcccacgtccaggaagaaagaggttacacagacaactgaagagtgagcatggtggagaagagttttatcgagtgaccaaacagctcttggatgagaggggaacccaaaaaagatccacctacgacctcaggtcctcagacccaccagcccaagaaacatctcaccaatttcaaatccgggacgcctctctgattattcacccaggtttcagaggtgtcagaccacgcagggacgcctgccttggtccttcacccttagcggcaagtcccgcttttctggggaaggggcaacctggggtcttaagacctaattggcgcgtccttccaccccagatgaagacgaatgggaatctgtattttaacaggatctccataggactttgtgagcacattgaagtttga

SEQ ID NO: 19778 - DNA, 2664 bp, Homo sapiens; identical to SEQ ID NO: 3058
  SIMILAR (970)..(1689): 1001254mologous to Homo sapiens heat-stable enterotoxin receptor,accession number M73489,Smith-Waterman Score=1251.

SEQ ID NO: 19779 - DNA, 344 bp, Homo sapiens; identical to SEQ ID NO: 436
  SIMILAR (8)..(130): 901254mologous to Homo sapiens calbindin D28K,accession number S46006,Smith-Waterman Score=204.

SEQ ID NO: 19780 - DNA, 513 bp, Homo sapiens; identical to SEQ ID NO: 3059
  SIMILAR (25)..(507): 451254mologous to Murine leukemia virus gag-pol polyprotein,accession number U13766,Smith-Waterman Score=295.

SEQ ID NO: 19781 - DNA, 408 bp, Homo sapiens; identical to SEQ ID NO: 439
  SIMILAR (176)..(301): 881254mologous to Homo sapiens calbindin D28K,accession number S46006,Smith-Waterman Score=198.
  misc_feature (1)...(408): n = a,t,c or g

SEQ ID NO: 19782 - DNA, 441 bp, Homo sapiens
  SIMILAR (131)..(262): 721254mologous to Homo sapiens Human secreted protein, SEQ ID NO: 5210,accession number G01129,Smith-Waterman Score=174.
  misc_feature (1)...(441): n = a,t,c or g
tgcggtaccgctccggaattcccggnnnnnnannnnnnnnnnnnnnnnnnnnnnnnnnnnnnnnnnnnnnnnnnnnnnnnnnnnnnnnnnnnnnnnnnnnnnnnnnnnnnnnnnnnnnnnnnnnnnnntttggtgtcgtgactcagattgggggacctcccttgggagatcaatcccctgtcctcctgctctttgctctgtgagaaagatccacctacgacctcaggaccgaccaagaaacatctcaccaatttcaaatccagtaagcggcctctttttactctcttctccaacttgcctcactatccctcaacctctttctcctttcaatcttggcgctacacttcaatctctcccttctcttaatttcaattcctttcattttctggtagagacaaaagagacacgttttatccgtggacccaaaactccggcgccggt

SEQ ID NO: 19783 - DNA, 667 bp, Homo sapiens; identical to SEQ ID NO: 3060
  SIMILAR (461)..(583): 901254mologous to Homo sapiens calbindin D28K,accession number S46006,Smith-Waterman Score=207.
  misc_feature (1)...(667): n = a,t,c or g

SEQ ID NO: 19784 - DNA, 419 bp, Homo sapiens; identical to SEQ ID NO: 18547
  SIMILAR (329)..(198): 861254mologous to Homo sapiens calbindin D28K,accession number S46006,Smith-Waterman Score=207.
  misc_feature (1)...(419): n = a,t,c or g

SEQ ID NO: 19785 - DNA, 756 bp, Homo sapiens; identical to SEQ ID NO: 3068
  SIMILAR (67)..(186): 971254mologous to Homo sapiens calbindin D28K,accession number S46006,Smith-Waterman Score=213.

SEQ ID NO: 19786 - DNA, 1080 bp, Homo sapiens; identical to SEQ ID NO: 5255
  SIMILAR (529)..(1074): 451254mologous to Feline leukemia virus gag-pol precursor polyprotein gPr80,accession number M18247,Smith-Waterman Score=402.

SEQ ID NO: 19787 - DNA, 915 bp, Homo sapiens
  SIMILAR (481)..(894): 391254mologous to Human endogenous retrovirus tripartite fusion transcript PLA2L,accession number Z14310,Smith-Waterman Score=199.
atgactgacaacattctggaattagctcaaaacatggataaatacacaaagtatgaaatgactactacttcaatcttaagtcaaccctcatcctcacagagggagcaagatggccaaggtttccaggaattgacggtcacttctgaaatgttcaggaaaggaaaaggaagtttctgctcccatcctcaccctgagaagttcctcagaacatttaatgaaatagaaacttacctcataggcaattttcaggacttagaattagaaagtagtgatgacctgccaagaggctgcacaaatgaaaaggccaggaagacctatgacccaaagaagcttccactcccatacacagcaggccttgctggatactggctagtaaattacacatatgagaatcatatgggtgaaggcagtgagcatagtgatgccatcagtagacaccatggccacggcctgtttggtggtctcttcacacggaggcgcatgaaatttggtgccgtgactcggatcaggggacttcccttgggagatcaatcccctgtcctcctgttctttgctcgtgagaaagatccacgtacgacctcaggtcctcagaccgaccagcccagtaaacatctcaccaatttaaaatccgcctccactcctccaccctataatccttttatcacctcccctcctcacacccggtccggcttacagtttcgttccacctctagccctccggcacctgctcagcaatttactcttaaaaaggtggctgaagctaaaggcatagtcaaggttaatgctcctttttccttatcagacctctcccaaatcagtgtgcgtttaggctctttcatcaaatatgaaaaatccagcccagttcatggctcgtttggcagcaaccctgagacactttacagccctagaccctga

SEQ ID NO: 19788 - DNA, 864 bp, Homo sapiens; identical to SEQ ID NO: 1393
  SIMILAR (151)..(783): 791254mologous to Cloning vector pZC320 SopA,accession number U26464,Smith-Waterman Score=871.

SEQ ID NO: 19789 - DNA, 845 bp, Homo sapiens
  SIMILAR (235)..(8): 781254mologous to Homo sapiens neutral protease large subunit,accession number M27826,Smith-Waterman Score=276.
tttcgtttttaagaggtttagaagcctggccgtcaatacctacaacagttatggaggcaagggaaacaggcccttgaaaagaaggtaatgtggagtgggtagcctccgtattgattaagaaggggacggacttaccctccaccgtgagagttacctaaagctcggcatccgtgatggtctacggggcttctgaggcgatcaggcagcatcagtcttcagccggtaagtcaagaaggagtcagtcagagaaccttgagccagagttccaggggctctgggagtggctgccaggtgagttgaacagtccgattttcagtggggtcccacacagatgggatgcggcttaggaggaatcctggcctgcgggcattccttggcccagtggccagatttccggcacgtgtagcaagctcctgtgggaggaggttctggaggaatgcctggccactgcggttcaggtgtttggaagttcttgtgtgccggagatgtggttgccccttccccagaaaagcgggacttgccgctaagggtgaaggaccaaggcaggcgtccctgcgtggtctgacacccttgaaacgtgggtgaatgatcagagaggcgtccctgcagtgagtaagcgtccctgtgtggtctgacacgtatgaatctggcaacataacaggaagcagcatagatgcccagagccaaaaataaagccccagttccatgtctggaagtcccaagacaatctgagacttgggatctgagctcagcagaatccggggagcctgagggccttcgatgtgcttcaagccagagaaaccttggagaccactgggaccaatttctgggcctgctgtggccat

SEQ ID NO: 19790 - DNA, 759 bp, Homo sapiens
  SIMILAR (511)..(654): 851254mologous to Homo sapiens calbindin D28K,accession number S46006,Smith-Waterman Score=217.
atgcaggcaatggagaaatggaaaagagaggccaaagtggagacagaaaaagaccaaaagaatcaatatcagcagacctggctttccgacagcgcttctggatacaggtataccaaacttcctttttacttccgacacaacaacctcattcctgcactagcacatttgctcttcctggattccctttattcagatctgctcacggctgctttcttcatgcaattctggctctcagctcaaatgtcgtctgatcagagagggcttccaggatatttactttgggctgaagaaatatcgctgctagaaatttctgaactcaccagtggaaagcaggattcttcatggccagaggtaaaagcaggactaaagaaagaagcaaattacttgtcatcagactcagcccgcctgcacccaggtgaaataaatagcctcgttgctcacacaaagcctgtttggtggtctcttcacatggacacacatgaaatttggtgccgtgactcgaactggggggacctcccttgggagatcaatcccctgtcctcctgctctttgctccatgagaaagatccacctacgacctcaggtcctcagactgaccagcccaagaaacatcttaccaatttcaaatccgcccagctcaaagcatcaggaaaaacctccagaagccatatcaacacttccaaacgctgcagcaactgctgccgctgcagtgggctccctgctatggtccctctagtgtgtccatctgaaattcagtga

SEQ ID NO: 19791 - DNA, 1852 bp, Homo sapiens
  SIMILAR (1031)..(1189): 981254mologous to Human endogenous retrovirus tripartite fusion transcript PLA2L,accession number Z14310,Smith-Waterman Score=281.
atgacgattaaggcatgtgctgaaagcactgatggaggacctgcacgaaggcaccttacacatgagttccgcttccgctctcttcccacaataaaaaaaaccaatgcttctgagtacctgggttgcccagcgctttatgtgaagacgacaaccagacaagccagacgacaagccagacgactcgggcaaagacccaaaccagacttccccaaattcctaagcctcctgggcacagagatcattgagatgcagtcgagttcatcctccgctccatgtccaggagcacgatttatggaatttgatgatatgaaggaaaacattcatcaaagtgacatcctcagatacctgtccctggacattagagaaagtgaaatatccaaaactggtgaagttacaaattccttcagaaattcaaaaacatcaaaagccaaagttgccattgtagggttcagccacagacctcaggacaacttcatttgtgagcagaagtcctggagttctttgggcatcgagtgggcccgacatgcaaggaagaggcctgtttggtggtctcttcacacggacgcgcatgaaatttggtgctgtgactcggatcgggggacctcccttaggagaccaatcccctgtcctcctgctctttgctccgtgacaaagatccacctacgacctcaagtcctcagacccaccagcccaagaaacatctcaccaatttcaaatccggctgctcctcaccaggccgagctaggtcccaatccttcctcagcctctgctcctccaccctataatctttttatcacctcccctcctcacacctggtctggcttaccgtttcgttccgtgactagccctccccctcctgcccagcaatttactcttaaaaaggtggctggagctaaaggcacagtcaagaccatcacggacatcgagcttcaggtaactctcacagtggaagcccgcctgcgcccaggtgaaataaacagccatgttgctcacacaaagcctgtttggtggtctcttcacacggacgcgcatgaaatttggtgccgtcactcggatcgggggacctcccttgggaaatcaatccccgtcctcctgttctttgctccatgagaaagatccacctacgacctcaggtcctcagacagaccagcccaagaaacatctcaccaatttcaaatccgcggcacgtcccactttcctggggcaggggcaagtacccctcaaccccttctccttcacccttagcggcaagtcccgctttcctggggcagcggcaagtcccgctttcctggggcaggggcaggtgcccctcaaccccttctccttcaccctcagcggcaagtcccgctttcctggggcaggggcagcggcaagtcccgctttcctggggcaggggcaggtgcccctcgaccccttctccttcaccctcagcggcaagtcccgctttcctggggcaggggcagcggcaagtcccgctttcctggggcaggggcaggtgcccctcgaccccttctccttcaccctcagcggcaagtcccgctttcctggggcaggggcagcggcaagtcccgctttcctggggcaggggcaggtacccctcaaccccttctccttcaccctcagcggcaagtcccgctttcctggggcaggggcagcggcaagtcccgctttcctggggcaggggcaggtgcccctcaaccccttctccttcaccctcagcggcaagtcccgctttcctggggcagcggcaagtcccgctttcctggggcaggtacccctcgaccccttctccttcaccctcagcggcaagtcccactttcctggggcaggacttgccgctttcctggggtag

SEQ ID NO: 19792 - DNA, 2268 bp, Homo sapiens
  SIMILAR (1618)..(1776): 831254mologous to Homo sapiens Human secreted protein, SEQ ID NO: 5210,accession number G01129,Smith-Waterman Score=224.
cagaaggtgccaggagaagagctcctttgcaatgcacctgggcacatgcaatcagacatccacaaagagtgcgatgtctatgcagaatgcaccaattccaacttccaggtccctggagatgcttcggacatgggaagggaagtgattggatctctgtctcccataccctgttggtgggtatacagtgtgcctatatttaattcagcacctactatgccctggcgctgtggcattcataggcaaggaggactggacctggaaggggcctttgggtctcagaggacaggatgtggaccgggcctctactattccaagcgacaaggccacccggatttcattcttcctgggagacgggagcgctcatttctgctcctggtggtcactcacctccacgtgacctttggcatccaggctttctgggtctctggctccttgatgatgccatgcagaggtcctgaggttgagatgtccctgcttgtggctgtggctcctgggcacacgtatggcatatttcagatagaaaaacttatgaatatggaagggacatggatggtgctggaaggcgttatcctcagcagactaacgcaggaacagaaaacccaaacatcgcctgttgtcactgataagtgggagctgaacgacgagaacacgtggacacatgatgggaaacaacacacaccgcggcctgtttcaggagtatggtttttcaaggtgtccagtgcgcacacagaaagcccagctgcggaggccggccgccagaccccaaagggacgaaccgtcatgggacgccggttctcttccaaagcttcgctgcgggaagccagccttctcgctggggccctcgaggctgacagattcctctccaagcctcactcaggccctcgagggaaggagcgcctgtctctgtgcacgctgttggtgctgagtgatgctcgggtcctgcaggagaggagcctctggacatcgcttagtgccagaagaggcttcgtggttcctgctggtctagaggaaaggtttaggaataaagacacaggctcggacagccctggacaccccagggttaggagccttaaggaaaaatgggaggagaaatggcttttcaaaatggaaagtgttatgcagacagagctggacacagagctgctatttgctaagatccggggtttggaggccgccattcagcaattaaacgccctagcccattcttcactggctcatccttcattggctgaattagtcagaaaatatgcatctcagggggctctgatacgcatcactgctcacgcatgtgtacacgagcacacctggccacgagtccacgccaaacacacgcttgccagggatgctggcagggttctgtggggacagccccaggaggcgatggaccagtggacagccaaggccagcaccaacatcccccagttaccaaagcctggaatcaatgtgcctgactgtgccttgccccagggctggtggatcatcaggtcccagccacagctgtccctgaacatctctcggccactgactgaagggagctgggactcagcccacctgctcccaggtgaaataaacagctttattgctcacacaaagcctgtttggtggtctcttcacacggacgcgcatgaaatttggtgccgtgactcggatcgggggacctcccttgggagatcaatccctcgtcctcctgctctttgctccgtgagaaagatccacctacgacatcgggtcctcagaccgaccagcccaagaaacatctcaccaatttcaaatccgcgtgaaaacggactaatacagcttcttacaaatgcactcacagagcagagtgcctgccccccgagacggcctggtagcggctcctacggagtccgaggtggcctttctgcctgtgcctccccaccagggccctccgctggggaaccttggtccgtccactgtgaccacgagctttcggtgctggttgctggacccgcggtcatgaccctgaagggaagagtcctcactacccaaggcgtggtcctcagacatcacccgggagctggttataaatggagagtctcaggccccgccctggaggccctggttcagaacctgcgtttcagcaagagctggagtgattcaggcaggcacccccttctgcaggtctcagctccggtgaagaagaaggccagctgcccagcagacagggacaaggagtgtgcccacatctctggggcagactctgctgttgtgcagggcgaggggcacctgcgagacatccagtcctag

SEQ ID NO: 19793 - DNA, 2589 bp, Homo sapiens
  SIMILAR (1)..(906): 571254mologous to Homo sapiens zinc finger protein,accession number U68536,Smith-Waterman Score=818.
atgtctgcaaaattgggaaagtcatcatcactcctaacacaaacttcagaggagtgtaatgggattctgacagagaagatggaagaggaagagcagacctgtgatccagactctagcctccactggagcagcagctacagcccagagaccttccgccagcaattcaggcagtttggctaccaggattcacctgggccccatgaggctctgagccggctctgggaactttgtcatctctggctgaggccggaagtgcacaccaaggagcagatcctggagctgctggtgctggagcagttcctggccatcctcccaaaagagcttcaggcctgggtgcagaagcatcatccagagaatggagaggaaactgtgactatgctggaggatgtggagagagagcttgatggaccaaagcagatcttttttggacgaaggaaggacatgattgcagagaagctagcaccttcagaaatcactgaggaattgccaagtagccagctcatgcccgtgaagaagcagctccagggagcatcatgggagcttcagtccttaagaccacatgatgaagacatcaaaactacaaatgtgaaatctgcttcaaggcaaaagacttctttaggcatagaactgcattgcaatgtttccaatatccttcatatgaatggctcccagagttccacatatagaggaacctatgaacaagatggtaggtttgaaaagagacaaggaaacccttcttggaaaaaacaacagaaatgtgatgaatgtggcaaaatctttagtcagagctcagcccttattttacatcagagaatccacagtggaaagaaaccttatgcatgtgacgagtgtgcaaaggcattcagccgaagcgcaattctgattcagcatcgacgaacccatactgactcagcccgcctgcacccaggtgaaataaacagtcttgttgctcacacaaagcctgtttggtggtctcttcacatggacgcgcatgaaatttggtgccgtgactcggattgggggacctcccttgggagatcaatcccctgtcctcctgctctttgctccatgagaaagatccacctacgacctcgggtcctcagaccgaccagcccaaggaacatctcaccaatttcaaatccgatgaagactgaccctacccaatcgccttggaagcctacaggaccatcacagacactctgggtaactatcacagtggaggttcaaaacctccttcacatcctccccttgtatctccccaccttaacccacaagtatgatacctctactccctccttggtgaccgatcatgcaccccttaccatcccattaaaacctaatcaaccttaccccgatgaatgccaatatcccatcccacagcacactttaaaaggattaaagcctgttatcactcacctgttacagcatggccttttaaagcctagaaactctccttacaattcccccattttacctgtcctagaaccaaacaagccttactggttagttcaggatctgcgccttatcaaccaaattgttttgcctatccaccccatgctccttcagctgtactcactctttgttgagtctcccacagttaccatttttcctggcccggacttcagtccggcctcccacattattcctgatgctacacctgacccccataactgtatctctctgatccaactgacattcaccccatttccccatatttccttctttcctgttcctcaccctgatcacacttggtttattgatggcagttccaccaggcctaatcgctacacaccaacaaaggcaggctatgctataatatcttccacatctatcgttgaggctaccactctgcctccctccactacctctcagcaagccaaactagttgccttaactcaagccctcactcttgcaaaaggactacgcgtcaatatcttactgattctaaatatgcctttcatattcggcaccaccatgcagtcatatgggctgaaagagggattgttcaggtctcctccctttcctacacatcaagctaggggatttgcccctgcccaggactggcaaattgactttactcacatgcctcgagtcagaaaactaaaatatctcttagtctgggtagacgctttcactggatgggtagaggccttccccacagggtctgagaaggccactgcggtcatttcttcccttctgtcagacataatccctcggtttggccttcccgcctctacacagtctgataacggaccggcctttactagccaaatcacccaagcagtttctcaggctcttggtattcagtggaaccttcatatcatttaccgtcctcaatcttcaggaaaggtagaacggactaatggtcttttaaagacacacctcaccaagctcagcctccaacttaaaaaggattggacagtacttttaactcttgctcttctcagaatcagagcctgtcctcgagatgctacagggtacagtccatttgaactcttatatggacacactttcttgcttggccccaacctcatcccagacaccagccctctaggcaactatcttccagtcctccaacaggctagatag

SEQ ID NO: 19794 - DNA, 3024 bp, Homo sapiens; identical to SEQ ID NO: 18558
  SIMILAR (376)..(3021): 991254mologous to Homo sapiens synuclein alpha interacting protein,accession number AF167306,Smith-Waterman Score=4474.

SEQ ID NO: 19795 - DNA, 1823 bp, Homo sapiens
  SIMILAR (1299)..(1466): 831254mologous to Homo sapiens Human secreted protein, SEQ ID NO: 5210,accession number G01129,Smith-Waterman Score=249.
atgaataatgatccttacattcctgcatctgcttttggggctcgccctgttaaaaccacagaagctcccccactgagcaccttgagacccctgcccctgcccaccaaagaacaaccccctttgactgtaattttccattaccttcccaaatcctataaaacggccccacccctatctccctttgctgactctcttttcggactcagcccgcctgcacccaggtgaaataaacagccgtgttcctcacacaaagcctgtttggtggtctcttcacacggacgcgtatgaaatttggtaccatgactcggattggggggacctcccttgggagatcaatcccctgtcctcctgctctttgctccatgagaaagatccacctacgacctcaggtcctcagaccaaccagcccaagaaacatctcaccaatttcaaatccgcatgctttgaaaggattaaagcctgttatcactcgcctgctacagcatggccttttaaagcctataaactctccttacaattcccccattttacctgtcctaaaaccagacaagccttacaagttagttcaggatctatgccttatcaaccaaattgttttgcctatccaccccatgatgttactaggggagatatcagtcaccaaggccttggctggctccctgataaaagcccttgcagtattccacactgcagaatccccaggctatgctctcctggattcttactacctgctccagaaagggagtgtttgcatctccatcctccaagaagaggaagcattttcttggccggggaaaggagagtgtcgagataagtcctgggcctctctgggcctaatacccgcatttccccagggaggacagtggaaacaggccctggggcttctggaccacagctgcctctgctttggggaattaggcaccaggttggcagccccagcatccttcagcaccttcccaataacaaaccgagagcgggagagaaaaactgacaagctgattccaaaattcatgtggaaatgcaagggacccagaataaccaaaacaatcttggaaaagaatgaagttggagaatttacacttcttgatttcaaaacttaccacaaatttgcagtaatcaaaactatgtggtactggcataaggacagatacattgatcaacagaatgacattgaaagtccagaaataaattcatatgtttatggtcaactgatttttgacaaagactcagcccgcctgcacccaggtgaaataaacagtcttgttgctcacacaaagcctgtttggtggtctcttcatatggacgcgcatgaaatttggtgccgtgactcggattgggggacctcccttgggagatcaatcccctgtcctcctgctctttgctccatgagaaagatccacctacgacctcgggtcctcagaccgaccagcccaaggaacatctcaccaatttcaaatccgtttttacctgaaaactatatcaaattgagtcatcctgtcccgttagactcctacgtgctctgccagtttctcaggttgtccttgtttttaatgaccttaacagttttaagaagcactagtcagggcaaaacgacagctgtgcttcaccattctggggtacttgctgtcaatgcacctgccctcacagtctgggacactgccaagccccaccatcccaaggactctgtgcagtatgcaggccaggaatccctcaggctgtgggtttccacatgtgcttctgcatggaaagctcccctggctgctgcaggatgtcctttgcagagccccatcctgtcctccttatcgcagctgcaggcagcctga

SEQ ID NO: 19796 - DNA, 1374 bp, Homo sapiens
  SIMILAR (492)..(614): 901254mologous to Homo sapiens calbindin D28K,accession number S46006,Smith-Waterman Score=198.
catggactctatgatgcgccagcaacacgttttgctttatccaacacatgtcctgttaagtcacggactagtgtggtctatgggctggcagaggtgaaaagatctcccttttcatgtagcttgcccacctacttacagcgttgcatcacagggtcaagtgtttctcctccacttcacgcagctcgggagccctcttgtctggaaaggctcttccctgctggtgcctccaggctgggctggttgttgctcctctatgctcccgaggtcctcagtgcctgcctttatcagaacagaggccacagcgcaccttggttaaatgtacagtctctgggaccagactgcctggactcacaactctggctccgccatttacagcccacctgcacccaggtgaaacaaccagccatgttgctcacacaaagcctgtttggtggtctcttcacacagacgcgcatgaaatttggtgccaagacccgggacttggatcaggggacttcccttgggagatcactcccctgtcctcctactctttgctccatgagaaagatccacctacgacctcaggtcctcagaccgaccagcccaagaaacatctcaccaatttcaaatccgggagagacaaaggagacacgttttatccgtggacccaaaactccggcgccggtcacggactgggaaggcagccttcccttggtgtttaatcattgcagggacgcctctctgattatacacccacgtttcaagggtgtcagaccacgcagggatgcctgccttggtccttcacccttagcggcaagtcccacttttctggggaaggggcaagatttaattaacctcgccttcaaggtgtacaataatagaaaaaagttgcaattccttgcctccactgtgagacaaaccgcagccacatctccagcacacaagaacttccaaatgcctgaaccgcagcggccaggcgttcctccagaacctcctcccacaggagcttgctacatgtgccggaaatctggccactgggccaaggaatgcccgcagcccgggattcctcctaagccgcgtcccatctgtgtaggaccccaccgaaaatcggactgttcaacttacctggcagccactcccagagcccctggaaatctggcccaaggctctctgactgactccttcccagatcttctcggcttagcagcttgaagactgacactgcccgatcgcctcggaagccccctgggtatattgcatgatgttgaggtttggggtatgattgattctgtcacccagatactgagtatagtacacaatagttaatttttcaattgtctcttctccctctctccctccatagtagtccccagtgtcttttgttgccatcagcag

SEQ ID NO: 19797 - DNA, 3142 bp, Homo sapiens
  SIMILAR (638)..(2398): 901254mologous to Homo sapiens putative p150,accession number U93569,Smith-Waterman Score=2663.
atggacccgctgagcatgagcattcatcaggtggtgctcaggcctgatgaacagggcccaggccaggaacaacagcctcccctttatgtgatggagcctggtgaaataaacagctttattgctcacacaaagcctgtttggtggtctcttcacacggacgcgcatgaaatttggtgccatgactcggatcgggggacctcccttgggagatcaatcccctgtcctcctgctctttgctctgtgagaaacatccgcctacgacctcaggtcctcagaccgaccagcccaagaaacatctcaccaatttcaaatccgagacaaaagagacatgttttatccatgaacccaaaactctggcgccggtcatggacttgggtaggcagccttcccttggtgtttaatcattgcagggacggcctctctgatcattcagccacatttcaagggtgtcagaccatgcagggatgcctgccttggtccttcacccttagcgaccatcacagatgccgagctttatgtaactctcacagtggaggggaagtccatccccttcttaatcgatacagaggctacccactccacgttaccatcttttaaagggcctgttgcccttgcctccatacatgtgcagaatgtgcagatcaaaagagacaaagaaggccattacataatggtaaagggatcaattcaacaagaagagctaactatcctaaatatgtatgcacccaatacaggagcacccagattcataaagcaagtccttaatgacctgcaaagagacttagactcccacacaataataatgggagactttaacaccccactgtcaacattagacagatcaacgagacagaaagttaacaaggatatccaggacttgaactcagctctgcaccaagcagatctaatagacatctacagaactctccacaccaaatcaacagaatgtacatttttttcagcaccacaccgcacctattccaaaattgaccacatagttggaagtaaagcactcctcagcaaatgtaaaagaacagaaattataataaattgtctctcagaccacagtgcaatcaaactagaactcaggattaagaaactcactcaaaaccactcaactacatggaaactgaacaacctgctcctgaatgactactgggtacataaagaaatgaaggcagaaataaagatgttctttgaaatcaacgagaacaaaaacacaacataccagaatctctgggacacattcaaagcagtgtgtagagggaaatttatagcactaaatgcctacaagagaaagcaagaaagatccaaaattgataccctaacatcacaattagaagaactagaaaagcaagagcaaacacgttcaaaagctagcagaagggaagaaataactaaaatcagagcagaactgaaggaaatagagacacaaaaaacccttcaaaaaattaatgaatccaggagctggttttttgagaagatcaacaaaattgatatactgctagcaagactaataaagaagaaaagagagaagaatcaaatagacgcaataaaaaatgataaaggggatatcgccaccgatcccacagaaatacaaactaccatcagagaatactacaaacacctctgcccaaataaactagaaaatctagaagaaatggataaattcctcgacacatacaccctcccaagactaaaccaggaagaagatgaatctctgaatagaccaataacaggctctgaaattgtggcaataatcaatagcttaccaaccaaaaaaagtccaggaccagatggattcacagcaaaattctaccagaggtacaaggaggagctggtaccattccttcagaagtacaaggaggagctggtaccattccttctgaaactattccaatcaatagaaaaagagggaatcctccctaactcattttctgaggccagcatcatcctgataccaaagcctggcagagacacaaccaaaaaagagaattttagaccaatatccttgatgaacattgatgcaaaaatcctgaataaaatattggcaaaccaaatccagcagcacatcaaaaagcttatccaccatgatcaagtgggcttcatccctgggatgcaaggctggttcaacatacgcaaatcaataaatgtaatccagcatataaacagaaccaaagacaaaaaccacatgattatctcaatagatgcagaaaaggcctttgacaaaattcaacatcgcttcattttaaaaactctcaataaactagatattgatggaatgtatctcaaaataagagctatttatgacaaactcacagccaatatcatactgaatgggcaaaaactggaagcattccctttgaaaaccggctcccgaccacaccgacaggggtgttcgggctatagcggtcaggtttcagcatgcgatccgccaccgggcccaggcggagttcctgtcactctttctcaatctggctgccaccactggcaaggaggtcatgaatgtgagggccgtggcgacagacgcctcaagcaagggcgtcaaggcggcctattttcccggaaacaatccggcgcgttcatcgacagcatcgttgcccgaaaggggaacgccgacgagaatttcagcaacatccgtatcgcaggcgatggtggatcggctgcgatgtcgttcgactatgcgttcaagatcgacgacgtggtcccgaactctggcatggaacattggcttcttgtaaacacgaacaatggatggcggatcgtatcggtggcttggtcggctgctcctctccaggccgatctaggtcccaattcttcctcagcctctgctcctccaccctataatccttttatcacctctcctcctcacacctggtccggcttacagtttcgttccgtgactagccctcccccacctgcccagcaatttactcttaaaaaggtggctggagccaaaggcatagtcaaggagcttgctacacttgccggaaatctggccactgggccaaggaatgcccgcagcccgggattcctcctaagccacgtcccatctgtgtgggaccccactgaaaatcggactgttcaactcacctggcagccaatcccagagcccctggaactctggcccaaggctctctga

SEQ ID NO: 19798 - DNA, 941 bp, Homo sapiens
  SIMILAR (259)..(414): 841254mologous to Homo sapiens Human secreted protein, SEQ ID NO: 5210,accession number G01129,Smith-Waterman Score=234.
atggtcaaccccaaattctttgccagtgaaaagattactcaagaacacaatgataaagactttttcagacatacaaagttaaaagaagttactaacagcagatctacactacacttgacgccagcacatcttagagtctcactcaaggcccatactgtgtactacctggctaccactgttgattattcaggacccaaggactcttcagtcagcagccatgttgctcacacaaagcctgtttggtggtatcttcacacggacgcgcatgaaatttggtgccgtgacttggatcgggggacctcccttgggagatcaatcccctgtcctcctgttctttgctccgtgagaaagatccacctacgacctcaggtcctcagacccaccagcccaaggaacatctcaccaattttaaatcatgtaagcaagcctctttttactctcttctccaacctccctcactatccctcaaccactttctcctttcaatctttgcaccacccttcaatctctcccttctcttaatttcaattcctttcattttctggtagagacaaaggagacatgttttatccgtgtacccaaaactccggcgccagtcacggactgggaaggcagccttcccttggtgtttaatcattgcagagatgcctgattattcacccacgtttcaaaggtgtcagaccacgcagggacgcctgccttggtccttcacccttagcagcaagtcccgcttttctggggaaggggcaagagcttgctacaagtgccagaaatctgaccaccaggccaaggaatgcccgcaacccgggattcctcctaagccatgtcccatctgtgcgggaccacactggaaatcggactgttcaactcacctggcagccactcccagagcccctggaactctggcccaaggctctctgactgactccttcttggcttag

SEQ ID NO: 19799 - DNA, 1986 bp, Homo sapiens
  SIMILAR (1366)..(1812): 871254mologous to Human endogenous retrovirus tripartite fusion transcript PLA2L,accession number Z14310,Smith-Waterman Score=647.
atgtggccacaagccaagggacacaggcagccgccagcgctgagagaggcaagaacagattctcctttagagcccttgaagggagggtgccctactgagtttcagacttctagcccccagaactatagcaagaagttcttctccttgctgagtgtcacttcctacagttccttcgccttccacaagttttctgtagctgtttacaacatttctaacctgaagacagtggaccccgccaaattccccacaaggtattgctactgtttaaacaatcggaccaatgacttatcagattttacagctctactggtagatatcattggcaattctaccagctacctcacagagatttttaagtcaacctccatcctctcagataatcagtgtggtccagtttccacaccagtaaatgcaccaatatttaagtcttcatatttctgggatccacaaagttggaggaagaatccaaagctcaaaagtttaaggaacgtaggcagactcaagaaaacatctggaaggaatctttctgacttctgggagatagaagaaaaatatcccattatcaattacacatttaccagcggcttgtctggtgttttggctttattgctcacacaaagcctgtttggtggtctcttcacacggacgcgcatgaaatttggtgccgtcactcggatcgggggacctcccttgggaaatcaatccccgtcctcctgttctttgctccatgagaaagatccacctacgacctcaggtcctcagacagaccagcccaagaaacatctcaccaatttcaaatccgaggcaaaggagatatgttttatccgtgaacccaaaactccagcgccggtcacggactgggaaggcagccttcccttggtgtttaatcattgcagggatgcctctctgattatacactcacgtttcaagggtgtcagaccacgcagggatgcctgccttggtccttcacccttagcggcaagtcccatttttctggggaaggggcaacggctgaagactgacactgcccgattgcctcggaagccccctagaccatcacggatgccaagcttcggtgtcaagcatgttaatgttaccattgactgcctccctgaaggtgcagctaccaggggaactgccaggacttcaaagcccacaaccaaaagccagaaaacactaccaagtacaagccccggacactggacccagagcacaccctgggcatctgctctgagatcctctccctggacagagacagctgctccttcagaaacagaggagaccctgaacacaggcaggcctcctgagcttccagccagggccacagccacatggttcagtgcctcccacactctcccagccttggctaccaggagggtggccagaactcagtggttgacagctgacagacagacgtgggcttccatatcgtccgtgccctgggctcaaaccatcagtgagaaaaaacctggagggtctctctgggaaactcgttcttccccaccgactactgcagggaccgaggaagccatgaacactaccagccttttggcgcctgctgctgagataatggccacacctggcagcccatcccaggccagccctacctcgggagcattcacccatggcacacagactccgagtccaaccaaggcaacagcccccagatatccacaaacaggtaattccattctgacttttggaaggccattcctgccctttgcaggtgatctctttgcagagtggccattcactgctggtgaagagccagtcctggtcccaagaccccatcaagtttcaaaaactcgatcaccaccttctttccacctgactcttaaaactgttacagtagctttattgggtaatggtgaggaatgctatgtttacctgtctgtctcagagctacgtgagatcaggacaagattatattcacctgatgcagggcttaacgaagagaagatgcttactaaactcttactgatttaa

SEQ ID NO: 19800 - DNA, 432 bp, Homo sapiens
  SIMILAR (183)..(428): 961254mologous to Homo sapiens phosphofructokinase (AA 1 - 780),accession number Y00698,Smith-Waterman Score=396.
agagctaagactaaaagagtggatcatgacccatgaagagcaccatgcagccaaaaccctggggattggcaaagccattgctgtcttaacctctggtggagatgcccaaggtatgaatgctgctgtcagggctgtggttcgagttggtatcttcaccggagcccgtgtcttctttgtccatgagggttactgtcttggggcatgtgcagaggggtggaacgccatcatcctttgacagaattctgggcagcaggatgggtgtggaagcagtgatggcacttttggaggggaccccagataccccagcctgtgtagagagcctctctggtaaccaggctgtgcgcctgcccctcatggaatgtgtccaggtgaccaaagatgtgaccaaggccatggatgagaagaaatttgacgaagccctgtatctgacag

SEQ ID NO: 19801 - DNA, 289 bp, Homo sapiens
  SIMILAR (95)..(289): 1001254mologous to Homo sapiens phosphofructokinase (AA 1 - 780),accession number Y00698,Smith-Waterman Score=345.
  misc_feature (1)...(289): n = a,t,c or g
cccatttntggtcattcctgctacagtntccaacaatgtccctggctcagacttcagcgttggggctgacacagcactcaatactatctgcacagcaaatgttgaacatctggtgcaaaagatgaaaacaactgtgaaaaggggcttggtgttaaggaatgaaaagtgcaatgagaactataccactgacttcattttcaacctgtactctgaggaggggaagggcatcttcgacagcaggaagaatgtncttggtcacatgcagcagggtgggagcccaaccccattt

SEQ ID NO: 19802 - DNA, 516 bp, Homo sapiens
  SIMILAR (172)..(516): 981254mologous to Homo sapiens phosphofructokinase (AA 1 - 780),accession number Y00698,Smith-Waterman Score=587.
tctcgtctcaacatcatcattgtggctgagggtgcaattgacaagaatggaaaaccaatcacctcagaagacatcaagaatctsgtggttaagcgtctgggatatgacacccgggttactgtcttggggcatgtgcagakgggtgggacgccatcagcctttgacagaattctgaccaaagatgtgaccaaggccatggatgagaagaaatttkacgaagccctgaagctgagaggccggagcttcatgaacaactgggaggtgtacaagcttctagctcatgtcagacccccggtatctaagagtggttcgcacacagtggctgtgatgaacgtbggggctccggctgcaggcatgaatgctgctgttcgctccactgtgaggattggccttatccagggcaaccgagtgctcgtygtccatgatggtttcgagggcctcgccaaggggcagatagaggaagctggctggagctatgttgggggctggactggccaaggtggctctaaacttggg

SEQ ID NO: 19803 - DNA, 3305 bp, Homo sapiens
  SIMILAR (768)..(2834): 571254mologous to Canis familiaris muscle type phosphofructokinase,accession number U25183,Smith-Waterman Score= 1579.
  misc_feature (1)...(3305): n = a,t,c or g
tttcgtcgggccggctgaccgggtccgacacagacttttggttcaggctccctccatcctcacccctcccccaggttcccgccgccactcaccgaaccggaaccggctgccatgcgaaggggtttccggccgggcgcggaacgcaaaacccgggaaccgccgcgaaccggaaccgccttcacagcaccggaagaggcgctaggaggcagccatgcataaagacgagtttcatctgaaatttttcatgggtgtgaatcagtctcgccagttagtcaggactcctcagagaacagctggggaagcttctacttccagcatgctcataccaaagccaccaccaaagacagacatcttgaagagtctagatactatggatgatccagacaccgtgggaagcatacctgttttcaaaactgagtggatcatgacccatgaagagcaccatgcagccaaaaccctggggattggcaaagccattgctgtcttaacctctggtggagatgcccaaggtatgaatgctgctgtcagggctgtggttcgagttggtatcttcaccggtgcccgtgtcttctttgtccatgagggttatcaaggcctggtggatggtggagatcacatcaaggaagccacctgggagagcgtttcgatgatgtttcagcttgggaggcacggtgattggaagtgccccggtgcaaggactttttggaacccagaatgacgacattcgaactggctaacaccttggtgaagcgtgggactcaccaactctctgtgtcattgggggtgatggcagcctcactggggctgacaccttccgttctgagtggagtgacttgttgagtgacctccagaaagcaggtaagatcacagatgaggaggctacgaagtccagctacctgaacattgtgggcctggttgggtcaattgacaatgacttctgtggcaccgatatgaccattggcactgactctgccctgcatcggatcatggaaattgtagatgccatcactaccactgcccagagccaccaggaggacattttgtgttaagaagtaatgggccgccacttgtggatacctggcccttgtcacctctctggtcctgtgggggccgactgggtttttattcctgaatgtccaccagatgacgactgggaggaacacctttgtcgccgactcagcgagacaaggacccgtggttctcgtctcaacatcatcattgtggctgagggtgcaattgacaagaatggaaaaccaatcacctcagaagacatcaagaatctggtggttaagcgtctgggatatgacacccgggttactgtcttggggcatgtgcagaggggtgggacgccatcagcctttgacagaattctgggcagcaggatgggtgtgggaagcagtgatggcactttttggaggggaccccagataccccagcctgtgtagtgagcctctctgggtaaccaggctgtgcgcctgcccctcatggaatgtgtccaggtgaccaaagatgtgaccaaggccatggatgagaagaaatttgacgaagccctgaagctgagaggccggagctctcatgaacaactaggagggtgtacaagcttctagctccatgtcagacccccggtatctaagagtggttcgcacacagtggcttgtgatgaacgtgggggctccggctgcaggcatgaatgctgctgttcgctccacttgtgaggattggccttaatccagggcaaccgagtgctcgttgtccatgatggtttcgagggcctggccaaggggcagatagaggaagctgggctggagctatgttgggggctggactgggccaaggtggctctaaacttgggactaaaaggactctacccaagaagagcttttgaacagatcagtgccaatattaacttaagttttaacattcagggccttgtcatcattggggggctttggaggcttacacaggggggcctgggaactgatggagggcaggaagcagtttgatgagctctgcatcccatttgtggtcattcctgctacagtctccaacaatgtccctgggctcagacttcagcgttggggctgacacaacactctaatactatctgcacaagctatgacctgcatcaagcagtcagcagctaggcaccaagcgtcgggtgtctatcattgaaactttggttggctatttgtggctacctggcctaccatggctggacttggcagcctgggggccgatgcttgcctacatttttgaaggaagcccttcaccattcgagacctgcaggcaaaatgttgaacattgtggtgcaaaaaggatgaaaacaactgtgaaaaggggcttggtgttaaagggattgaaaagttcaattgggaactataccacttggctttcattttcaaacctggtactctgaggagggggaagggcatccttcgacagcaggaaggaatgtgcttggtcacatgcagcagggtgggagcccaaccccatttgataggaattttgccactaagatgggcgccaaggctatgaacatggatgtctgggaaaatcaaagagagttacccgtaatgggcggatctttgccaatactcccagattcgggctgtgttctggggatgcgtaagagggctctggtcctccataccagtggctgtagctgtaaggaccagacagattttgaagcatcgaatccccaaggaacagtggtgggctgaaactgaggcccatcctccaaaatcctttgcccaagtacgaggattgacttgggacactttcagaccatgccccacctgggagcacattcacccgggaagcggtccggggaaagctgcccgtctaaaacctctctggagtggagggggaatcggattaccctgatccatggtccagcttcacacccctaattaagtccaacatctttctccagtgtttttaagctgtttttttttcattagggtttcccttttaaatcctgtacccttgcagcccatgacccagttctggcccaggagctggaggagcaggcagtgggtgggagctccttttaggtagaatttaacatgacttctgccccagctttatctgtcacacaaggctgggcacctctaggtgctactgcctaggatatcacttactcagttagaattttcctaaaaataagctttatttatttcgtttgtgataacaaagagtcttggttcctctactacttttacttacagtgacaaattgtaacttacacttaattaaatgnccaactggtcactgtgaaaaaaaaaaaaaaaataaacaataaaaat

SEQ ID NO: 19804 - DNA, 444 bp, Homo sapiens
  SIMILAR (431)..(3): 961254mologous to Homo sapiens Human secreted protein clone pt31_4 protein sequence SEQ ID NO:18,accession number Y53006,Smith- Waterman Score=789.
attggatcaagtaggtcttttagtactatgtgattaattttgttcttgcaaatgggacaagatataaatccaaatgttatccttgggccaagccatcgattttctaatactcgccgacagcactgtaagtggaatatgtgactacaatccagtgccgagagcgcttcggtgaaacatatcatgcacatgtcatcggcgtcttgcttcaggcttgtggcacttttgtcacagccgtgtagacagggcagacagtgctcttcgtttttaacacccccgcatggatggccacaaggatgcgtcttactacaggctatcttagcgtattcctggcaatctgcatcagaacaaacactgccaacagcagataactctgttccactcctggaaccacagaagcgacatgcttctgagctactcgtggtgggtttgcctcccacgcgtccg

SEQ ID NO: 19805 - DNA, 485 bp, Homo sapiens
  SIMILAR (276)..(482): 981254mologous to Homo sapiens protein associated with Myc,accession number AF075587,Smith-Waterman Score=354.
  misc_feature (1)...(485): n = a,t,c or g
atggccccnnaatagaatctgtancgccgcacnaccggnccggaattnnngttgcgacgatttcgtatgagcggccccagtagcggcgagggcggcgctttggggaggaggagaagaaggaggaggagaaggaggtcgctgtctttgtagtctccccggggtcactaccagctgctgctgtcaggccgggccctggccgaccgctaccggaggatttataccgctgcgctcaatgacagggaccaggggggcggcagcgctggacacccagcctccagtctgaaaacttagagaatacagtaatcataccagatatcaaactacatagcaatccttctgctttcaatatttactgtaatgtacgccattgcgttctggaatggcagaaaaaggaaatatcattggcagccgcatctaagaactctgtgcagagtggagaatcagatagtgatgaagaagaggaatccaaagagccccctatcaac

SEQ ID NO: 19806 - DNA, 3468 bp, Homo sapiens
  SIMILAR (1)..(1419): 971254mologous to Homo sapiens protein associated with Myc,accession number AF075587,Smith-Waterman Score=2446.
gtgtgtgctcatattgtccaagctattcgcatggaagctaccagagtccgtgaagaatgggaacatgctatatcaagcaaagaaaatgccaattctcagccaaatgatgaagatgcctcctctgatgcctactgctttgagctgctctctatggttttagcactgagtggctctaacgttggccggcaatatctggctcaacagctaaccctgcttcaggatctcttctcgctgcttcacacagcctctcctagagtccagagacaggtaacctctttactaagaagagttttgcctgaagtaacccctagtcgtctggccagcatcataggagtgaaatccctccccccagcagatatcagtgatatcattcactcaacagagaaaggagactggaataagctgggtatcttggacatgtttctaggatgcattgccaaagcactcactgtacagctaaaagccaaaggaaccaccatcactggaacagctggtaccactgtgggcaaaggagttacaacagttactcttccgatgattttcaattccagttatctccgacgaggtgaaagtcattggtggatgaagggctcaacccctacccagatctcagagatcatcattaaacttatcaaggatatggcagcaggtcatctgtcagaagcttggtcccgagtgacaaaaaatgctattgcagaaaccatcattgccttgaccaagatggaagaagaatttaggtctccactctggcttgctctcgcatccctatgtgttcttgatcaggaccacgtagatcgtctctcctcggggagatggatgggaaaggatggacaacaaaaacaaatgcctatgtgtgataaccatgatgatggtgaaactgcagcaatcattttatgcaatgtctgtggaaatttatgtacagactgtgacagattccttcaccttcatcgaagaaccaaaactcatcaaagacaggtcttcaaagaagaagaagaagctataaaggttgaccttcatgaaggttgtggtagaaccaaattgttctggttgatggcactggcagattctaaaacaatgaaggcaatggtggaattccgagaacacacaggcaaacccaccacgagtagctcagaagcatgtcgcttctgtggttccaggagtggaacagagttatctgctgttggcagtgtttgttctgatgcagattgccaggaatacgctaagatagcctgtagtaagacgcatccttgtggccatccatgcgggggtgttaaaaacgaagagcactgtctgccctgtctacacggctgtgacaaaagtgccacaagcctgaagcaagacgccgatgacatgtgcatgatatgtttcaccgaagcgctctcggcagcaccagccattcagaacaaaattaatcacatagtactaaaagacctacttgatccaataaaagaactctatgaggatgtcagaagaaaagccttaatgagattggaatatgaaggtctgcataagagtgaagctatcacaactcctggtgtgaggttttataatgacccagctggctatgcaatgaatagatatgcatattatgtgtgctacaaatgcagaaaggcatattttggtggtgaagctcgctgcgatgctgaggctggacggggagatgattatgatcccagagagctcatttgtggtgcctgttctgatgtttccagggctcaggtttgggaatatttgcattaccagttgagcatcccaaatctgaaatccaaaatgctccaagcagctttgactgagcagtggaggcttgaggctttcaaatttgcaaagcctgagaagaacctgaagcgacatcagactaaaggacctgaaagaagagagcttcaggaaaaagagccagagccgcaaaggtggagccgcgttggcgccctccgcgggaccagcgcctcggatgcgggcggagcgcggggggccgcggctgcgggagcgcgaagcggggggccaggggcgcctcatgtgagagccgcgggacctgcagccgccgccgtccccggagcacggggtggtgtgtgggggaagccgcccccggcagcagcaaaaatagagtcgggtgtggtggtgcatgcagatactctggaggctgaggtggaaggattgcttgatctcaggaggtcgaggctgcagatgaaacgaggaggaagagatagtgaccgtaattcatcagaagaaggaactgcagagaaatccaagaaactgaggactacaaatgagcattctcagacttgtgattggggtaatctccttcaggacattattctccaagtatttaaatatttgcctcttcttgaccgggctcatgcttcacaagtttgccgcaactggaaccaggtatttcacatgcctgacttgtggagatgttttgaatttgaactgaatcagccagctacatcttatttgaaagctacccatccagagctgatcaaacagattattaaaagacattcaaaccatctacaatatgtcagcttcaaggtggacagcagcaaggaatcagctgaagcagcttgtgatatactatcgcaacttgtgaattgctctttaaaaacacttggacttatttcaactgctcgaccaagctttatggatttaccaaagtctcactttatctctgcactgacagttgtgttcgtaaactccaaatccctgtcttcgcttaagatagatgatactccagtagatgatccatctctcaaagtactagtggccaacaatagtgatacactcaagctgttgaaaatgagcagctgtcctcatgtctctccagcaggtatcctttgtgtggctgatcagtgtcacggcttaagagaactagccctgaactaccacttattgagtgatgagttgttacttgcattgtcttctgaaaaacatgttcgattagaacatttgcgcattgatgtagtcagtgagaatcctggacagacacacttccatactattcagaagagtagctgggatgctttcatcagacattcacccaaagtgaacttagtgatgtatttttttttatatgaagaagaatttgaccccttctttcgctatgaaatacctgccacccatctgtactttgggagatcagtaagcaaagatgtgcttggccgtgtgggaatgacatgccctagactggttgaactagtagtgtgtgcaaatggattacggccacttgatgaagagttaattcgcattgcagaacgttgcaaaaatttgtcagctattggactaggggaatgtgaagtctcatgtagtgcctttgttgagtttgtgaagatgtgtggtggccgcctatctcaattatccattatggaagaagtactaattcctgaccaaaagtatagtttggagcagattcactgggaagtgtccaagcatcttggtagggtgtggtttcccgacatgatgcccacttggtaa

SEQ ID NO: 19807 - DNA, 398 bp, Homo sapiens
  SIMILAR (1)..(168): 981254mologous to Homo sapiens protein associated with Myc,accession number AF075587,Smith-Waterman Score=292.
aatccttctgctttcaatatttactgtaatgtacgccattgcgttctggaatggcagaaaaaggaaatatcattggcagccgcatctaaaaactctgtgcagagtggagaatcagatagtgatgaagaagaggaatccaaagagccccctatcaagcttccaaaggtaagccactgagttctattaatatttagatgtgtaacctgcaggtgttctgggctataatgcatatatacgcattgctaaaatactttgctttatgtaaaattgcacactaaaaataacacgggcttatggggcaaaaataggtttgggagccaggaaaaggggaaactctggcaactttattaactaaggtgctaacaaagtcaataattgataattcactgggaagcgca

SEQ ID NO: 19808 - DNA, 14910 bp, Homo sapiens
  SIMILAR (1921)..(7197): 991254mologous to Homo sapiens protein associated with Myc,accession number AF075587,Smith-Waterman Score=9131.
  misc_feature (1)...(14910): n = a,t,c or g
tcttggagcgttctcagtttctcaacagatcttcacttgctaggcagccagaagccggcggcagtggcggcaccgcctcctcctcacattcccggggtggcggggttagatgagcggccccagtcgcggcgccgggggcgctgttcatgccggttcccgacggctccgtggctgctgcggggctggggctggggctacccgccgcggactccccgggtcactaccagctgctgctgtcaggccgggccctggccgaccgctaccggaggatttataccgctgcgctcaatgacagggaccaggggggcggcagcgctggacacccagcctccaggaataagaaaattttaaataagaagaaattgaaaagaaaacagaagagcaaatcaaaagtgaagacaagaagcaagtctgaaaacttagagaatacagtaatcataccagatatcaaactacatagcaatccttctgctttcaatatttactgtaatgtacgccattgcgttctggaatggcagaaaaaggaaatatcattggcagccgcatctaagaactctgtgcagagtggagaatcagatagtgatgaagaagaggaatccaaagagccccctatcaagcttccaaagattattgaggttggcctttgtgaagtttttgaattgatcaaagagacacgattttctcatccatccctgtgtctcaggagtctccaagccctgctcaacgtgctgcagggccagcagccagaagtgctccagtctgagccacctgaggtcctagagtctctcttccagcttcttttggaaatcaccgttcgaagtactgggatgaatgacagcacaggacagtccttaacagcactttcctgtgcttgcctctttagtctggtggcttcttggggagaaacaggaaggacacttcaggccatctctgctatcctcaccaacaatggaagccatgcttgccaaactattcaggtgccaacaattctaaattcgctacagagaagtgtacaagcagttttggtgggaaaaattcaaattcaggactggtttagtaatggcattaagaaagcagctttaatgcacaagtggccattaaaagaaatatctgttgatgaagatgaccaatgtctacttcagaatgatggattttttctttatctattatgcaaggatggattatataaaataggctctggatacagtggaacagttaggggccatatatacaattctacatcccgtattagaaacagaaaagaaaaaaagtcttggttagggtatgctcagggttatttattatatagagatgtgaataaccacagcatgacagccataaggataagccctgaaacactggagcaagatggtactgtgatgttaccagattgccacactgaaggtcaaaatattttattcactgatggagaatatattaatcagatagctgcttcaagagatgatggctttgttgtcagaatatttgccacaagcactgaacctgttctacagcaagaattgcaacttaaactggctagaaaatgcttacatgcctgtcgtatctcattattcgatctggaaaaggacttgcatattataagtacaggatttgatgaggagtcagcaattcttggtgcaggacgagagtttgcgctaatgaaaacagcaaatggaaagatatattacactggcaaataccagagtcttggaatcaaacaaggtggtccttcagcaggaaaatgggttgagctaccaattacaaaatctccaaagatagtacacttctcagttggacacgatggctctcacgcccttttagttgcagaagatgggagcatattctttacaggatctgctagtaaaggagaagatggagaatcaattaagagcagacggcaatccaaaccttataaacctaaaaagataattaagatggaaggaaagatttgtggtatatacagcctgcaataatggaagtagttctgttatttctaaagatggagaactctacatgtttggaaaagatgccatttactctgatagttcaagtgtggtaactgatttgaagggccattttgtaactcaggtagctatgggcaaagctcacgcttgtgttttaatgaagaatggagaggtgtggacatttggtgtaaataataaaggacagtgtgaacgagatactggtgccatgaaccaaggtgggaaagggtttggagttgaaagtatggcatcagcaatggatgaagccctggaagaagagctagatgaaaaagatgagaagtatatgatgtgccctccaggcatgcacaaatggaagctggagcagtgcatggtttgcactgtctgtggagactgtacaggttatggagccagctgtgtcagtagtggacggccagacagagtccccggagggatctgtggttgtggttccggagaatctggttgtgctgtgtgtggatgttgcaaggcctgtgcaagagagttagatggtcaagaggcaagacaaagaggaattcttgatgcagtgaaagaaatgatacctttagatcttcttttagctgtcccagtgcccggggttaacattgaagaacaccttcagttacgacaagaagaaaaacggcaacgtgtaatcagaaggcacagattagaggaaggaagaggcccccttgtatttgctggtcctatttttatgaaccatcgagaacaggctctagccagactcagatcccatccagcacacgtaaagcataaacgggacaagcacaaagatggaagtggagaaagaggcgaaaaggatgcaagcaaaatcacaacataccctccaggctctgtgcgatttgactgtgagctccgggcagtccaagtcagctgtggatttcaccattcagtggttttaatggaaaatggagatgtctatacatttggttatgggcagcatgggcagctaggacatggagatgtcaactccaggggatgtcccactcttgttcaagcattgccaggccctagcacacaagtcactgcaggcagcaaccatacggcagtacttttaatggatggacaggtcttcacatttggaagtttttctaaaggacaactgggcagaccaattttggatgtgccatattggaatgcaaagccagctcccatgcctaacattggatcaaaatatggaagaaaagctacttggataggtgcaagtggggaccaaacttttttacgaattgatgaagcacttattaattctcatgtacttgctacatcagaaatttttgccagtaaacacataataggcttggtacctgcttctatatcagaacctcctccatttaaatgccttctgataaataaagtggatgggagttgtaaaacttttaatgactcagaacaagaggatctgcaaggatttggtgtgtgtcttgatcctgtatatgatgtaatttggaggtttcgaccaaatactagagagctgtggtgttacaatgcggtggttgctgatgccaggcttccctctgcagcagacatgcagtccagatgtagtatcctaagtcctgaacttgccttaccaacaggatcaagggccctcactacccgatctcatgcagctttgcacattttaggttgtcttgataccttggcagctatgcaggacttaaaaatgggtgttgcaagtacagaggaagagactcaagcagtaatgaaggtttattctaaagaagattatagtgtggtaaacaggtttgaaagtcatggaggaggctggggttattctgcccattcagtagaagctatacgtttcagtgccgacactgatattttacttggtggtcttggtctgtttggaggtagaggagaatatactgctaaaattaagctgtttgaattgggtcctgatggaggagatcatgaaactgatggtgaccttcttgcagagactgatgtattggcttatgactgtgctgctagagaaaaatatgcaatgatgtttgatgagcctgttctcctgcaagctgggtggtggtatgtggcatgggcccgagtgtcaggacccagcagtgactgtggatctcatggacaggcatctattaccacagatgatggggttgttttccagttcaagagttcaaagaaatcaaataatggtacagatgttaatgcgggtcagatacctcagttattatacagacttccaaccagtgatggcagtgcttcaaaaggcaaacagcaaaccagtgaacctgtacacattttaaagaggtcttttgcaagaactgtctcagtggaatgttttgagtcattgttgagtattcttcactggagctggaccaccttagtcttaggagttgaagaacttagaggattaaaaggattccagttcacagctacactcctagatttagagagactgcgctttgtgggtacctgttgtctgaggttattgcgtgtctatacctgtgaaatttacccagtgtcagctacaggaaaagcagttgtagaagaaactagcaaattagcagagtgtattggaaaaaccagaactttgttaagaaaaattttatcagaaccacttgatcactgcatggtgaaattggataatgatcctcaaggatatctcagtcaacccttgagtcttctagaagctgtccttcaggaatgtcataatactttcactgcctgctttcattctttctacccaactcctgccttacagtgggcttgcctttgtgatctgctgaattgtttggatcaggatatccaagaagcaaacttcaagacatcaagtagccgactccttgcagctgttatgtcagctctgtgtcacacgtctgttaagctgacttccatcttcccgattgcgtatgatggagaagtattactacgatcaattgttaaacaagttagtacagagaacgactcaacactagttcatcgttttccccttttggtggcacatatggaaaaactcagccagagtgaagagaatatctcagggatgacaagcttccgtgaagttctggagaaaatgctggtcattgttgtgctaccagtcaggaacagcctgaggagagaaaatgaactcttctcctcccacctcgtctctaacacctgtggattactggccagcattgtcagtgaactgacagcgtcagccctgggatctgaggttgatggacttaattctcttcactctgtaaaagctagtgctaaccgatttacaaaaacaagtcagggcagaagttggaacactgggaacgggtcccctgatgcaatctgtttttcagtagacaaacctggaatagttgtggttggtttctctgtctatggaggaggtggaattcatgaatatgaattagaggtgttggttgatgatagtgaacatgcaggagattcaactcattcccacagatggacatctctggaattagtgaaaggaacgtacacaacggatgactcacccagtgatatagctgagatcagacttgacaaagtggttcctttaaaggaaaatgttaaatatgctgtgcgcttgaggaactatggaagccgtacagccaatggagatggaggaatgaccacagttcagtgccctgatggtgtgacattcacattcagcacgtgcagcttgagcagtaacggcacaaaccaaaccagaggacagatcccacagatactctactataggagtgaatttgatggagatttacaatcccaacttctgagtaaagccaatgaagaagataaaaactgtagcagagcattgtctgttgtaagcactgtcgttcgagcctctaaggacctcctgcacagagctcttgctgtggatgctgatgacattccagaactgctgagttcttccagtctgttttccatgctgctcccccttattatagcctacataggaccagtagctgctgctattcccaaggtggctgtagaagtctttggccttgtccaacaattgcttccgtcagttgccattttgaatcagaagtatgcaccgcctgccttcaaccctaatcagtcgacagatagcaccacaggaaaccagcctgaacagggcctctctgcttgtacaacctccagtcactatgctgtcatagagagtgagcacccgtataaacctgcctgtgtgatgcattacaaggtgacattcccagaatgtgtgaggtggatgacaatcgaatttgaccctcagtgtggtactgcacagtcagaagatgtccttcgtttgttgattcctgtcagaactgttcagaattcaggatatggaccaaaattgacatctgttcatgaaaatcttaattcatggatagaattaaagaaattttcaggatcctctgggtggcctactatggttttggtgttgccaggaaatgaggcccttttttcattggagactgcatcagattatgtgaaagatgacaaagcttctttctatggttttatgtgttttgcaattggatatgaatttagccctggacctgatgagggagtcatccaattggaaaaagaattagccaatcttggtggggtttgtgcagcagctctgatgaagaaggacctagcacttcctattggtaatgaattagaagaagaccttgaaattcttgaggaggctgcattgcaggtgtgcaaaacccattctggaattcttggaaagggtctagctctttctcattcaccaactatattagaagcacttgagggaaatttaccactccaaatccaaagcaatgaacagtcttttctggatgattttattgcctgtgtcccaggatcaagtggtggaaggcttgcaaggtggcttcagccagattcatatgcggatcctcagaaaacatctttgatcctgaataaggatgatattcgttgtggttggcctaccaccataactgttcaaacaaaagaccagtatggggatgtggtacatgttcccaatatgaaggtggaagtgaaagctgtccctgtttctcagaaaaaaatgtctttacaacaagatcaagcaaagaaacctcaaaggattcctggcagtcctgcagtaacagctgcatcttctaatactgacatgacttatggagggctggcatcaccaaagctagatgtttcatatgaaccaatgatagtgaaggaagctcgatatattgccataacaatgatgaaggtttatgaaaattattcatttgaagaactacgttgttgcatcaccaactcctaagagacccagtgagaatatgctgatccgtgtcaataatgatgggacttattgtgcaaattggactccaggggctattggactctacactcttcatgttaccattgatggcattgaaatcgatgctggtctggaagtaaaagtaaaagacccaccaaaagggatgataccaccaggaactcagttggtcaaaccaaagtctgaacctcagcctaataaggttcgaaaatttgtggccaaggacagtgcggggcttcgcatcccgtagccacccttcccttcagaagtgagcagataggcactagtgaaaagtcaatggaaactatcacttttattgatgagatccataatgatgatgggtgtgtgggctgaggctgaatgatgagacaataaagaagtatgtccctaacatgaatggttacactgaagcctggtgcctctcttttaatcaacatcttggcaagagtcttctggtccctgttgacgaatctaaaactaatactgatgactttttcaaagacataaactcctgctgcccacaggaagcaacaatgcaagaacaagatatgccattcttgcgaggagggccaggcatgtacaaggtagtgaagacgggaccttcaggtcacaacatcagaagctgccctaaccttagaggtatcccaattggaatgttagttctgggaaacaaagtcaaagcagtgggagaggtaaccaattctgaagggacatgggtgcaactggatcagaacagcatggtagagttctgtgagagtgatgaaggagaggcatggtccttagctagagacagaggcggaaaccagtacctccgacatgaagatgaacaagctcttctggatcagaattctcaaactcctcctccaagccctttctcagtgcaagcttttaataaaggggcaagttgcagtgcccaaggatttgattatggactcggaaatagcaaaggtgatcgaggaaacatctcaacatcttctaaaccagcctctacatcaggaaaatcagagctgtcctctaaacacagcagatcgcttaaacctgatggacgtatgagccggactactgctgatcagaagaagccaaggggcacagaaagtttatctgctagtgaatccctcatcttaaaatctgatgctgcaaagttgaggtcagattcccacagtaggtcattatcccccaaccataacaccttgcagacattgaaatctgatgggaggatgccttctagctccagagctgaatccccaggaccaggttctcggttgtcatctcctaagccaaagactctcccagccaataggtctagcccatcgggtgctagttctccacgctcctcctcaccacatgataaaaatctacctcaaaaaagtactgctcctgttaagacaaagcttgatcctcctcgggaacgttctaaatcagactcttacacacttgatccagataccctccgcaagaagaaaatgcccctcacagaacctttgagaggacggtcaacgtcaccaaaaccaaaatcagtaccaaaggattctacagattcccctggatctgaaaatagagctccctctccccatgtggtacaggaaaacctccacagtgaggtggtcgaagtctgcacctcaagtactttaaaaacaaatagtctaacagacagcacctgcgatgacagtcagtagaatttaagagttttggatggaaggtttcaaataaagttcattttagcattggaaaagcaccactgaaagatgaacaggaaatgagagcatctcccaaaataagtcgaaaatgtgctaatagacacaccaggcccaaaaaagaaaaatcgagttttcttttcaaaggagatggatccaagcctttagagccagccaagcaagccatgtctccttctgaggccgaatgtgccagagctgagatagcttccttcctctggcatgaaggcatagtacatgatgcaatggcttgatcttctttcctaaagtttcatcctgaactttccaaagaacatgctcctataaggagtagtttaaatagccaacaacctacagaggaaaaagaaaccaagttaaaaaatagacattcattagaaatatcatcctgcacctgaatatgtttaatattggcaccccccatggacccagatatatcctaagatggggtagcatcaacaaaaacaaggtattgtcctatgccttaaggaacccacctctgcatgaaaaatgtgaggatgggaaaactgagacccacttttgaaatgtcccatgcataacacaatgaagtcctaagtctcctcttcccttaactttacaacatttagtggctttttgggaagacatctctttggctactatcaaagctgcttcccagaatatgatttttccaagtcctggttcctgtgcagttcttaaaaagaaagagtgtgagaaaggaaggaataagaagtccaaaaaggaaaaaaagaaaaaagaaaaggcagaagttaggcccaggggtaatttgtttggagagatggcccagctggcagtaggaggaccagagaaagataccatctgtgaactgtgtggggagtcacatccatacccggtgacctatcacatgagacaagctcacccaggttgtggccgatatgctggtggacaaggttacaatagcattgggcatttttgtggaggatgggctggtaactgtggtgatggtggcataggaggaagcacttggtatctggtatgtgatcgctgtagagaaaaatacctccgcgaaaaacaggctgctgcaagggagaaggtcaaacaatctaggagaaaaccaatgcaagtcaagacccctcgtgccttgcccaccatggaagctcaccaggtgattaaaagcccaatgccagtctttcctgctgtccctgagcagtgcagcagaaccgagcattctgtgttaccatcctgcaaagccattccaatctcagttgcccagtgtaaaagaaggcatttctgaggatcttcctgtgaaaatgccttgtctctacctgcagacattagctaggcatcatcatgaaaattttgtgggctatcaagatgacaatctattccaggatgaaatgagatatctacgttcaacatctgtacctgccccgtatatatcagtaactcctgatgcaagtcctaatgtatttgaagagccagagagcaatatgaagtctatgccaccaagtttagaaaccagtcccataactgatactgatcttgcaaagagaactgtcttccaaagatcatactcagttgttgcttccgaatatgataaacaacactccattttacctgcacgagttaaagctattcctagaagaagagttaacagtggagacactgaagttggttcttcccttttgagacatccgtctcctgagctttctcggctaatctcagcccacagctctctttctaaaggagaacgaaatttccagtggccagttttagcttttgttatacaacatcatgatctagaaggtcttgaaatagcaatgaaacaggccctaaggaaatctgcttgtcgagtttttgctatggaggctttcaactggcttctgtgtaatgtcatccaaaccacttctctccatgatattctgtggcattttgtggcatcactgactcctgcaccagtggaaccagaggaagaagaggatgaagaaaataaaacaagcaaagaaaattcagaacaagagaaagatacaagagtatgtgaacatccactctcagacatagtgattgccggggaacgtgctcatcctttaccacacacctttcaccgcttgctgcagaccatctcagaccttatgatgtctctccccagcggcagttcattacagcaaatggccctgaggtgctggagtctcaaattcaagcaatctgatcaccagttccttcatcagagcaacgtctttcatcacattaacaatattttgtcaaagtcagatgatggcgatagtgaagagagttttagcatcagtatacagtctggctttgaagctatgagtcaggaattatgcatagtaatgtgcttaaaggacttaaccagcattgttgacataaaaacttcaagccgacctgccatgattggcagtttgacagacggctccacagaaaccttttgggaatcaggagatgaagataaaaacaaaactaagaacatcaccatcaactgtgtaaaggggaatcattgccccgctatgtgtcctgtttcaccgtggacatttccccgagatcttggggaataaagttacctcaatgaccttcttaactggcaaagcagtacaagattttgtnccagaataaagcagggttgatctggattccaggcacattggctgggtaacaagtgaacttccaggaggggataatcacatcataaaaattgaattaaaaggcccagaaaatacactgagagttcgacaagtcaaagtcctgggctgggaaagatggtgaaagcacaaaaatagctggccagatttccagccagtgtggccccagccagagggaactgtgaagctggagactcctgccgagtattcagactgattacgtctcaagtatttggaaagctcatctctggagatgctgaacctacaccagaacaagaggaaaaagcactattgtcatcacctgaaggagaagaaaaagtatacaatgcaacatcagatgctgacctgaaagaacatatggttggaatcatattcagcaggagtaagctgactaacttacaaaaacaggtgtgtgctcatattgtccaagctattcgcatggaagctaccagagtccgtgaagaatgggaacatgctatatcaagcaaagaaaatgccaattctcagccaaatgatgaagatgcctcctctgatgcctactgctttgagctgctctctatggttttagcactgagtggctctaacgttggccggcaatatctggctcaacagctaaccctgcttcaggatctcttctcgctgcttcacacagcctctcctagagtccagagacaggtaacctctttactaagaagagttttgcctgaagtaacccctagtcgtctggccagcatcataggagtgaaatccctccccccagcagatatcagtgatatcattcactcaacagagaaaggagactggaataagctgggtatcttggacatgtttctaggatgcattgccaaagcactcactgtacagctaaaagccaaaggaaccaccatcactggaacagctggtaccactgtgggcaaaggagttacaacagttactcttccgatgattttcaattccagttatctccgacgaggtgaaagtcattggtggatgaagggctcaacccctacccagatctcagagatcatcattaaacttatcaaggatatggcagcaggtcatctgtcagaagcttggtcccgagtgacaaaaaatgctattgcagaaaccatcattgccttgaccaagatggaagaagaatttaggtctccagtgagatgtattgcaacaactagactctggcttgctctcgcatccctatgtgttcttgatcaggaccacgtagatcgtctctcctcggggagatggatgggaaaggatggacaacaaaaacaaatgcctatgtgtgataaccatgatgatggtgaaactgcagcaatcattttatgcaatgtctgtggaaatttatgtacagactgtgacagattccttcaccttcatcgaagaaccaaaactcatcaaagacaggtcttcaaagaagaagaagaagctataaaggttgaccttcatgaaggttgtggtaggaaccaaattgttctggttgatgggcactgggcagattcttaaaacaatggaagggcaatgggtgggatttcccaggaacacacagggcaaacccaccacgagtagctcaaaagcatgtcgcttctgtggttccaggagtggaacagagttatctgctgttggcagtgtttgttctgatgcacattgccaggaatacgctaagatagcctgtagtaagacgcatccttgtggccatccatgcgggggtgttaaaaacgaaaagcactgtctgccctgtctacacggctgtgacaaaagtgccacaagcctgaagcaagacgcccatgacatgtgcatgatatgtttcaccgaagcgctctcggcagcaccagccattcagctggattgtagtcacatattccacttacagtgctgtcggcgagtattagaaaatcgatggcttggcccaaggataacatttggatttatatcttgtcccatttgcaagaacaaaattaatcacatagtactaaaagacctacttgatccaataaaagaactctatgaggatgtcagaagaaaaggctttaatgagattggaatatgaaggtctgcataagagtgaagctatcacaactcctgggtggtgaggttttataatgacccagctggctatgcaatgaatagatatgcatattatgtgtgctacaaatgcagaaaggcatattttggtggtgaagctcgctgcgatgctgaggctggacggggagatgattatgatcccagagagctcatttgtggtgcctgttctgatgtttccagggctcagatgtgtcccaaacatgggcacagactttttgggaatataaatgtcgctactgctgttcagtggctgtttttttctgttttggaacaacacattttttgtaatgcttgtcatgatgattttcaaagaatgactagcattcctaaggaagaactaccacactgtcctggcaggtccaaaggcaaagcagttaagaaggaactgaatgtccactccatgttgttcatccacccacctgggaaagaggtttgctctgggatgtggagtgtgcagaaatgcccacacttttaagaccacgcagatcctttgtctacagagagaaaaattgccttcatcccccacggaggatggcggtgaagtttaaaacccctgctcaggataaggacgggaccatttttacatccatgaaaatgaacccattccacagtgcaagaaggatacccaaatacccatgtacataattccttgcctatgaaaagtttcccccattattttggtttatccttccttttgaacaaaatgacatcaaacttgtgaggtgtttgcatgtggccattaccgtcattggccctgtgaagcattggacatttatagataattgatataaaagaatcgccatgcccatggactaagaacgatgctggctttcaagcaaaaaaagaaaaataatcattgtttattgtatactgcctttttgtaatcctgtacaattgcatcacgggtgggggataaaaagaggaatattctgggtttatttcctaggactgttatttaaaaaaaaaaaaaacattgtgttagggacagcatataaatgtaataagtatcacactgtatataaacatatcaatgtttgtcctgtataagaattactaaattacaaatgcaatttcatttaaacttctaggttaagtttgagcctgaaattttaatgaagtgcaataatgaggcacactcagtattgcacttcattatcttgcagctgtaaacatattggaatgtacatgtcaataaaaccactgtacatttttatacagtgataaagtctaaaaaaaaaaaaaaa

SEQ ID NO: 19809 - DNA, 1431 bp, Homo sapiens
  SIMILAR (504)..(821): 371254mologous to Caenorhabditis elegans contains similarity to Pfam domain: PF01484 (Nematode cuticle collagen N-terminal domain), Score=27.5, E-value=0.0001, N=1,accession number Z67990,Smith-Waterman Score=111.
atggctccgagcagccgctgggacgccatgggccctaaaaattcctacagatccgtgcatggtaggattgttccagaactgctagaaagttctgtggccagggttaggcccttacagtatgtgcaaagacaaccatcccaggcctcagcccgaagtggtgcaaaccccacccacaggccctctgcagaggtaaggcccgtcatccgcactggggagatgacacactcctcggtcattcctccgctggccccgggagttcggagggtgtctctaggctatgagtcttccccaagtggttccctgccacccctttttaaccaggagtcaccgtggagacggcaggactcctatagcccccagaatcctgccgttagtcacaaggcatccctgaactccactatactccagggccccgcggacgctggtgtggttggtggccaatcgtggaaccgcgcatgggagccagccaggggtgctgcgtcctgggacacctggcgcaacaaggcggtggtgcctcccaggcggtccggggagccaatggtgtccatgcaggctgcagaggagatccgcatcctcgcagtgatcactatccaggcgggcgtccgtggctacctggcgcgtcgcaggatccggctgtggcaccggggggccatggtcatccaagctacttggcgcggctaccgtgtgcggcggaacctggcacacctctgcagagccaccacgaccatccagtctgcctggcgcggctacagcacccgccgggacttagctcggcactggcagatgctccaccccgtcgcgtggggggagctgggcagccgggccggggtcatgtctgaccgaagctggttccaggatggcagagccaggacagtatctgaccatcgctgcttccagtcctgccaggcacacgcttgcagcgtctgccactccctgagctccaggatcgggagcccgcccagcgtggtgatgctagtgggctccagccctcgcacctgtcatacctgtggacgcacacagcccacccgtgtggtgcagggcatgggccagggcactgagggccccggggcagtgtcttgggcctccgcctaccagctggctgccctgagtcccaggcagccgcatcgcccaggacaaagcgggccacagccatccagtccgcctggaggggctttaagatccgccagcagatgaggcagcagcaaatggcagcgaagatagttcaaagccacctggcgagggccaccatacccggagctgtctgaagaacacagaggcgctcttgggaccagcagacccctcggccagctcacggcacatgcattggcctggcatctaggaccctggctccctgcagtggggacttcgtgggaggcactcatggctctctgggtctaatgaataaagtcctccacagcctagatcttgggt

SEQ ID NO: 19810 - DNA, 546 bp, Homo sapiens
  SIMILAR (3)..(248): 1001254mologous to Homo sapiens hypothetical protein,accession number AL050225,Smith-Waterman Score=454.
ccagtgatgatcagccagagaagcctcactttgactctcgcagtgtgatatttgagctggattcatgcaatggcagtgggaaagtttgccttgtctacaaaagtgggaaaccagcattagcagaagacactgagatctggttcctggacagagcgttatactggcattttctcacagacacctttactgcctattaccgcctgctcatcacccacctgggcctgccccagtggcaatatgccttcaccgagctatggcattagcccacaggccaaggggatcacaaaggctacatgtgaatggggcgagcacatcattccactgggaagcatggcaattaacagcatctcaaaactgactcagctcacccagtcttccatgtattcacttcctaatgcacccactctggcagacctggaggacgatacacatgaaggtaggaaaggaacagaaggcagtcagttaaaatgcgaacaccaactgcctcctcctatgagtcatgttggaggtgggcaaagggagagtttggcccgaaaggaaaaataa

SEQ ID NO: 19811 - DNA, 442 bp, Homo sapiens
  SIMILAR (260)..(183): 381254mologous to Homo sapiens F-box motif of FBP- 13,accession number Y83074,Smith-Waterman Score=43.
ttcctggacagagcgttatactggcattttctcacagacacctttactgcctattacccgcctgctcatcacccacctgggcctgccccagtggcaatatgccttcaccagctatggcattagcccacaggccaagataacttataatatcaaaatgaatagaagaaaatgtgttcactggaaactggctgttgagcccctccaatgggagctgaggagctgtgtctctgcaggcatggggactggccccaagcaaaaagtcagcagcatgaagccccggagctgtagcgtgtgcagcaggcgccaatccaacagcatgggaacaacagtgtcgcaatcattcctcagttatggcaagaatgtgctatttttccctgttaggtgttgcttttgagaactacaaataaaactctcccaccaagtgaaaaaaaaaaaaaaaaaa

SEQ ID NO: 19812 - DNA, 1754 bp, Homo sapiens
  SIMILAR (151)..(339): 801254mologous to Homo sapiens Human secreted protein, SEQ ID NO: 7443,accession number G03362,Smith-Waterman Score=252.
cgagccatggaggaggaggcatcgtccccggggctgggctgcagcaagccgcacctggagaagctgaccctgggcatcacgcgcatcctagaatcttccccaggtgtgactgaggtgaccatcatagaaaagcctcctgctgaacgtcatatgatttcttcctgggaacaaaagaataactgtgtgatgcctgaagatgtgaagaacttttacctgatgaccaatggcttccacatgacatggagtgtgaagctggatgagcacatcattccacttggggaagcattggcaattaacaagcatctcaaaactgacttcagcttcacccagtcttccatgttattcactttcctaattgcacccactcttgggcagacctgggaggacgatacacatggaagccagtggatgattcagccagagaagcctcactttggacttttcgcagtgttgatattttgaggttgggtttcatggcaatggcagtggggaaagtttgccttgttttacaaaagtggggaaaccagcattagcagaaggacactggaggttcttgtttcccgggacagagctgttatactggcattttctcacagacacctttactgcctattaccggtctgctcatcaccccacctgggcctgccccaggtgggcaatattgcctttcaccagctatggcattagcccacaggccaagcaatgggttcagcatgtattaaacctattcaccttacaacacaaacctggttcacagaaggagaccgattccttttgtggaattaagctagatcccagcaaagtgttttaaggaggcaagaacaagatcgtaatcccaaaaaagaaagggcctgtgcagcctgcaggtgggccagaaagggcccttcagggaccctccggtcccttccatttcctccatttttaaatcctcctctgggctctggggaaaccccacccgggaagtgagcacccctccctccaactccctaccagctccagagtggtggtttccatgcacagatggccctaggggtgacctccagttttgcgtgtggaccgtaggcctctttctagttgaatgaccaaaattgtaaggcttttagtcccaccgacattagccaggctcgtaagtgaggcctccagagcaggttgtgctgtcccctgcctctggaagcaatggggaatttggaatcttgtgtaagtgcccaaataagtcttgagtgctttcctcttcttcaacaatcaaccctcaaatccctttagcactgattgattagagaggtcccccaaaagaaaccactggttttggacccatggaagcattaggaactgcatttgttcatttcagggagccactagttcacatatggactattttaaattttaaagtaaattgtatgaaaaaaatccaattccttcaattggcattagcccacattttgagtaattcatgtggctggtagattctgtattagcacaaaggatatggaacatttcccatcacccacagaaagttctgttggacagccctgcaatagaaatattttcaaacgggctttcccccaaataatttttgttgttaatgttgatgtcttctattggatgggtcataatgttccatgaaacctctcaaggtacacaattgtatgttctttgtatcccttaccacaaatatcttctctctgctcatttcttttgcagcttcctataaagtttgtcttcctcatcaaaaaaaaaaaaaaagggcggccgct

SEQ ID NO: 19813 - DNA, 2838 bp, Homo sapiens
  SIMILAR (274)..(699): 821254mologous to Homo sapiens A human proliferation and apoptosis related protein,accession number Y84901,Smith-Waterman Score=643.
atggatgctctgatgctggccctgggcgctctgatgctggccctgggcctcggggatcccaaatctgcccaggtttccgatcccgatggggcagagcctggtcctggcagagccactggtacagatccactggtacagatccactggaaactgggcatctctgaggccctgagcatcccaggaggccgattgtacagagacctctggtcgctgaccccagtctgcctccacatccctggaatagcccatcatgggcccttcacccttggcaggatggacgtggtagaggtcgcgggtagttggtgggcacaagagcgagaggacatcattatgaaatacgaaaagggacaccgagctgggctgccagaggacaaggggcctaagtcttttggaagctacaacaacaacgtcgatcatttggggattgtacatgagacggagctgcctcctctgactgcgcgggaggtgaagcaaattcggcgggagatcagccgaaagagcaagtgggtgaaaatgctgggagaatgggacacctacaaaaacagcagaaagctcatagatcgagcgtaccagggaattcccatgaacatccggggcccgatgtggtcagtcctcctgaacattgaggaaatcaagttgaaaaaccccggaagataccaggtacgctcagccagagcacaaccaacaggacaggccgtgtcaggggcccaggtctccagctggagggaacgtcaagaccaccctggggagctgggggtgaagatcatgaaggagaagggcaagaggtcatctgaacacatccagcagatggacctggacgtaagcgggacattaaggaggcatatattcttcagggatcgatacggaaccaagcagcgggaactactttacatcctcctggcgtatgaggagtataacccggaggtgggctactgcagggacctgagccacatcgccgccttgttcctcctttatcttcctgaggaggatgcattctgggcactggtgcagctgctggccagtgagaggcactccctgcaggagcgcctcacgaagacgtccaggtgtggcccgtgggcacgtttttggaaccggttcgttgatgcctgggccagggatgatgacactgtgctcaagcatcttagggcctctatgaagaaactaacaagaaagcagggggacctgccacccccagcttgccaggacaacgagcctggagccagggagacaagggaatcggtgtccctgacccacggagctttcagggagagggcgcaggcgggaccccgggcccagggccagagccaagagttcagccagaagtgggaacgccaaacccgagcaagggtcgtcggcatccaggcctgtgccagcttcacgtggcgggaagaccctctgcaagggggacaggcaggcccctccaggcccaccagcccggttcccatggcccatttgggaggacctcagggttcctggagattcctgcagtggaactccatgccccgcctcccaacggacctggacgtaggggacccttggttccgccgttatgatttcagacagagctgctgggtccgtgccatatcccaggaggaccagccggccacctgctggcaggctgaacaccctgcggagcgggaaacccagagcgtctactgggagctgaaggcttatgtctacctcaatgctgtccgcgttcgctgtatgaacaagttcaggctgagctgcctggaggaggagcagctgctgttgctggtgaccagcacgttcgggaacggagactgctctggccagtttgaaatagaaaaaagttgtgagttactttttcagatggcagagtctgttgattatgattatgatgttcaagataccatcctcgatggcttgttaatattgccgtgttatggatcaatgacaactgatcaacagaggaggatatttttgccaccgccacctggaattagaaaatgtgtcatatccaccaatatttctgcaacgtctttgacaatagatggaaccagatatgtggtagatggtggctttgtgaagcagttaaatcacaaccccagattagggttggacatcctggaggtggttccaatttcaaagagcgaggcattacagcgaagtggccgagctggcaggacttcttcaggaaaatgctttcggatctatagtaaagatttttggaaccagtgtatgcctgaccatgtgatccctgaaattaagagaactagtttgacatctgtagttctgaccttaaagtgccttgccatacacgatgtcataaggtttccctatttggatccacctaatgagagacttattttagaagctcttaaacagctttaccagtgtgatgctattgacaggagtggccatgtcaccagattgggtttgtctatggtggagtttcctttgcctccacatctgacatgtgcagtaataaaagctgcttccctggattgtgaagatttactacttccaatagcagcaatgttgtctgtggaaaacgtcttcattagacctgttgatccagagtaccagaaggaagcagaacagagacatcgagaattggcagctaaagctggaggatttaatgactttgcaactttagctgtcatctttgaacaatgcaaatcaagtggcttccggaagttcctggtccacaacgtcaaggagctggaagtgctgctgatgtgcaacaaatcttactgtgccgagatcactcaccatgtttcctccaagaaccgcaaagccatcgtggaaagagctgcccaactggccatcaaagtcaccaaccccaatgccaggctgcgcagcaaagaaaatgagtag

SEQ ID NO: 19814 - DNA, 853 bp, Homo sapiens
  SIMILAR (788)..(841): 611254mologous to Arabidopsis thaliana F24O1.6,accession number AC003113,Smith-Waterman Score=67.
tcaccatatcttccattatcagaaaggcccggaaaccgccaggacctcttgaataattacaccccccgctcttcaccccttagaagcagcgggcgcacacgaatgtacaaaggaaaaaacgtccgcccggggaattcttcctgagcgaggtggcccgaggacgcttccttcttccaggtctggccgccgcctgagtccactcccagtgcttgcaagattccaagttctcacctcttaaagaaaaccacccccgtagattcccatcatacactccttttttttaaaaaagttggtttcctccattcaggattctgttccttaggtttttttccttctgaagtgtttcacgagagcccgggagctgcctgctgcggccccgtctgtttgtttcagcttctgggtctgagtcatggccgggtggaggcacagccttctccactggccggagtcagtgccaggtccttgccctttgtggaaagtcacaggtcacacgaggggccccgtgtcctgcctgtctgaagccaatgctgtctggttgcgccatttttgtgcttttatgtttaattttatgagggccacgggtctgtgttcgactcagcctcagggacgactctgacctcttggccacagaggactcacttgcccacaccgagggcgaccccgtcacagcctcaagtcactcccaagccccctccttgtctgtgcatccgggggcagctctggagggggtttgctggggaactggcgccatcgccgggactccagaaccgcagaagcctccccagctcacgtggaacccccctcccacccaccgccacaataaagatcgcccccacctccaaaaaaaaaaaaa

SEQ ID NO: 19815 - DNA, 2019 bp, Homo sapiens
  SIMILAR (982)..(2016): 931254mologous to Escherichia coli put. methylase (cysG) (AA 1-457),accession number X14202,Smith-Waterman Score=1620.
  misc_feature (1)...(2019): n = a,t,c or g
atgctgcccgctgagaagctggcggacccagcgggagcaccgggaccggtgcagatggcgcctgggagcccgggactcctggaaaggtggctgggggcagctcggctgcgggccccacctggtcctcctcactttcctgtgtgccctgccctgcctggaggcagagccagggacccccttgcccccgacccaaaacccccgagcctgctctgctcagttctggccccagaagcaagaagatctgttctttgctgtatttcagttctgctggtacgttgctcatcaatcaatctccaaaaaagtaaatcacgcgacggctttgccgttacgcacaaaaacaggttttgtcactttaaccggcatttcacggttgcgaatttgcacaatcgccgtttcgccaataccttccggcacgcgcgccagcgcaatgctgtaacccagcgtcggggagaaagacgcgccggctccggcaggctcacgctacggaatccgggcggcggcgcacgtgacccggcgttgctaggaaacgggagtggggcctgcggggacgcggctggagcctgcgcatttcttccttcctgctttcaaagttgcaatgagcgcagagcgagatgttttggaaagcccttggggaaaaaagttgacacgcttggggaactgggggttgagaggcctagactgggggtccggacccagccctcagactgggtgaggggcctagactgggggtcccggacccagccctcaggactgggtgaggggcctagactgggggtcccggacccagccctccggactggccctcaggactgggtgaggggcctagactgggggtcccggacccagccctccggactgggtgaggggcctagagtgggggtcccggactcagccctccggacntgggccctcatgaacggctccgagagcaggttcttcgtgagttcctcgcagggccggtcagagctggtaccgaattctattatgctgtcgattattgaccgctcaccgctcatgcggtctcctctggcggcacctctccggttctggcacgcctgttgcgcgaaaaacttgaatcactgcgtgccgttacatctgggccaggtagcgaaatacgccgggcaattacgcgggcgagtgaaacaacagttcgccacgatgggtgagcgtcgccgtttctgggagaaattgttcgttaacgaccgcctggcgcagtcgctggcaaacaacgatcagaaagccattactgaaacgaccgaacagttaatcaacgaaccgctcgaccatcgcggtgaagtggtgctggttggtgcaggtccgggcgatgccgggctgctgacactgaaaggactgcaacaaattcagcaggcagatgtggtggtctacgaccgtctggtttctgacgatattatgaatctggtacgccgcgatgcggaccgtgttttcgtcggcaaacgcgcgggataccactgcgtaccccaggaagagattaaccagatcctgctgcgggaagcgcaaaaaggcaaacgcgtggtgcggctgaaaggtggcgatccgtttatttttggccgtggtggcgaagagctggaaacactgtgcaacgcgggtattccgttctcggtggttccgggtattaccgcagcttctggttgctctgcctattcgggtattccactcacgcatcgcgattatgcccagagcgtacgcttaattaccggacacttaaaaaccggtggcgagctggactgggaaaacctggcggcagaaaaacagacgctggtgttctatatggggttgaatcaggccgcgactattcagcaaaagctgattgaacacggaatgccaggcgaaatgccggtggcaattgtcgaaaacggtacggcagtcacgcagcgcgtgattgacggtacgctcacacagctgggagaactggcgcagcaaatgaacagtccatcgctaattattattggtcgggttgttggcctgcgcgataaactgaactggttctccaaccattaa

SEQ ID NO: 19816 - DNA, 1050 bp, Homo sapiens
  SIMILAR (82)..(297): 611254mologous to Homo sapiens HSPC107,accession number AF161370,Smith-Waterman Score=207.
atggccatgacagtgaacttagtgaatagctgcagggtgggtccagtgacggacttcttagaagctatgccagtgacccccttctgcacggagctaaaccagccgaccctgcccaacatccgcaagtggaaggggccccggggatgctggaaggctgttgttgctgagaagccctcgagtcagctccagaagggagctgggtatgcaggattcctatgggacgcggctgccggcatggagctgagagacgcgggttcacaggagagctcgccaagcaacgggcacgggaagctggcgggccccagcccatacctcgggaggttcaaggtgggaagtcacgacctgacccttgttaaccttcacctggcagccctgaccctcctggggagcgagaatcccagcaagaatcacagtgatggccaccggttggcgagctttgcacagaccctacaggaaaccctgaaagaggagggcgccatctgcaatgcacatgcgccctctggtggtggcctgagtggcttcccttcagattcctttccctgcagttgttattacggaagcacacccgtggccaggaaaaaaagatttgccaagtgtcgtggatacatttatgacttcgtttatgaactgctttccctaaagcctccttcacaaggagaaaaggatgtcattatcttaggggattttggccaagggccagacagcaatgactatgatatcctgaggaaagaaaagttccaccacctgatccccgcgcacaccttcaccaacatcagcaccaagaaccctcaaggctcgaagtctctggacaacatctggatcagtaaaagcttaaagaaggttttcacaggtcactgggctgtggtgagagaaggcctcacgaacccttggattccggataactggtcttggggcggggtggcttctgaacactgcccagtgctagccgagttctacactgaaaaggactggagcaagaaggatgcccctcggaacggcagcggggtggccttggagcgaagtgaagccaacatcaagcacgagcgatga

SEQ ID NO: 19817 - DNA, 384 bp, Homo sapiens
  SIMILAR (202)..(53): 361254mologous to Homo sapiens Human secreted protein, SEQ ID NO: 6601,accession number G02520,Smith-Waterman Score=74.
ctgtgaaaaccttctttaagcttttactgatccagatgttgtccagagacttcgagccttgagggttcttggtgctgatgttggtgaaggtgtgcgcggggatcaggtggtggaacttttctttcctcaggatatcatagtcattgctgtctggcccttggccaaaatcccctaagataatgacatccttttctccttgtgaaggaggctttagggaaagcagttcataaacgaagtcataaatgtatccacgacacttggcaaatctttttttcctggccacgggtgtgcttccgtaataacaactgcagggaaaggaatctgaagggaagccactcaggccaccaccagagggcgcatgtgcattgcagatggcgccctcct

SEQ ID NO: 19818 - DNA, 2210 bp, Homo sapiens
  SIMILAR (289)..(402): 1001254mologous to Homo sapiens HSPC107,accession number AF161370,Smith-Waterman Score=214.
atggccatgacagtgaacttagtgaatagctgcagggtgggtccagtgacggacttcttagaagctatgccagtgacccccgtgagagaagacaggactctgaaacaggctccagcagtggggctggagaacagaaaggaagcacccaagacacatgcgacagtggaatcagtgcgctggtgggaggcgaggaaggagttcgagcagcgggaaggatggaagtgctttggaccaagatgggcactgggtggaggaaggaataatgtgttccctttgggacctgctgctttctgcacggagctaaaccagccgaccctgcccaacatccgcaagtggaaggggccccggggatgctggaaggctgttgttgctgagaagccctcgaatcagctccagaaggtggcgctagggctctggcaccaagactctgtctccctctccgctgcagggagctgggtatgcaggattcctatgggacgcggctgccggcatggagctgagagacgcgggttcacaggagagctcgccaagcaacgggcacgggaagctggcgggccccagcccatacctcgggaggttcaagagcagttcttgaacctgacagtcacctcaaaccccagcccagggagtatctgccagctgagggttgggagcagcccctgtgttgaggctacaaggccctgtgccaccttgcacactgtgggaagtcacgacctgacccttgttaaccttcacctggcagccctgaccctcctggggagcgagaatcccagcaagaatcacagtgatggccaccggttggcgagctttgcacagaccctacaggaaaccctgaaagaggagggcgccatctgcaatgcacatgcgccctctggtggtggcctgagtggcttcccttcagattcctttccctgcagttgttattacggaagcacacccgtggccaggaaaaaaagatttgccaagtgtcgtggatacatttatgacttcgtttatgaactgctttccctaaagcctccttcacaaggtgtggcagaaatgccacctcctgctgtgggacaacaagggtcaagcagagcccaggggaatcccgcagagcccagctggggggcgagtgttctttcaggatttctactcgctttgcttggaaaatacttcataactatcccacttcctctaggtctgtctctcagagcaggagttgcattttattcatctctggatttcctgcatagagaaaaggatgtcattatcttaggggattttggccaagggccagagcagcaatgactatgatatcctgaggaaagaaaagttccaccacctgatccccgcgcacaccttcaccaacatcagcaccaagaaccctcaaggctcgaagtctctggacaacatctggatcagtaaaagcttaaagaaggttttcacaggtcactgggctgtggtgagagaaggccgcacgaacccttggattccggataactggtcttggggcggggtggcttctgaacactgcccagtgctagccgagttctacactgaaaaggactggagcaagaaggacgcccctcggaacggcagcgggggtggccttggagcgaagtgaagccaacatcaagcacgagcgattgattgacaccaaatccattgtgtccaccctggggacccagggaagggcacaagccaaaggaatgagccctgtggggttgaacccttcaagggcaaaaactgcccttttaaaattttaatcctcaaaaaccatcagcaacttgaaagcccttgcccccaagcccttcctctgtggacccattcaggaccctcccagtgggggtggccgttccccaggcgcgtaaccccacccaggtgggcaaagcagaaaaccctgcggggaagcggagacgcccttttatcctcctggatgcccacagacctgagcagcattgggctggctgtccgctgcctgactggatggcagcacaaggacaatatgagcagagggaggagaagaagggggtgctcaggctgcgggccacagtccagcagcgccagaagcactcatttctgaaccaccaggactatgacgttcctgctgcgcattacagaaagcttttaactgtgatcaggcactctgctcagatacattgagtggcgatttttagttttgttttgaaaaaataaacagattaacctgcaaaaaaaaaaaaaaaaaa

SEQ ID NO: 19819 - DNA, 551 bp, Homo sapiens
  SIMILAR (388)..(80): 951254mologous to Homo sapiens 21-AUG-1997 Human GSTH DNA,accession number X02170_cd1,Smith-Waterman Score=526.
  misc_feature (1)...(551): n = a,t,c or g
nnnnnnnnnnnnnnnnnnnnnnnnnnnnnnnnnngaaggaaaatatcagacatagctttattgctgactcctgcccccttcagagcccatagtcacaggcctcaggggttttctgtaagtagagctctaggaaaccttgccagtctttctcactagtaagcagggctgagactgtgggatcttccttcatggctgccatccacagtttcagttttggggtgtggtctacacactcatttaacttcattgcttccagccgttcaaaccagggccagatgaggtaatcaatcatagagatagaattgccaccaaagaaggtcgtcttcttattagtcagaacctcctctagcttggtaaattctttacgaaattcttctggcaagctttctcataggggtcatccggcaacagcttcttccctgggtatgcttcatccaggtactcacaggtggtggcagactcgtagatcagctgaccctgactgttttccagaactgcaccagaccaaagggattttttcttaaagaccactcaggcntatttttcaggtg

SEQ ID NO: 19820 - DNA, 1629 bp, Homo sapiens
  SIMILAR (337)..(678): 841254mologous to Homo sapiens Human diarylsulfonylurea binding protein DBP-31,accession number Y79241,Smith-Waterman Score =486.
atgagatatggtagcagtcttaactgctacctgatctctcgatcagacttaggtgtcagactgatgggtgaagccagctgggcttctggatcgggcattgaacctggggtggacgccttcgtcctcttactttcgggaacaccctactctgtctatggagtagctgttttttcaccactttactttcttaataaacttgcttttgttttgcacggtggactcgctctgaattctttcttatgcgagatccaagaaccctctcttgggtctggatcaggacccctttcccgtaacatctatgcaggaggaataacatgtgttccatcttattttacaggaagcgcgcccccggggccggtcccggagggctcgatccgcatctacagcatgaggttctgcccgtttgctgagaggacgcgtctagtcctgaaggccaagggaatcaggcatgaagtcatcaatatcaacctgaaaaataagcctgagtggttctttaagaaaaatccctttggtctggtgccagttctggaaaacaggcagggtcagctgatctacgagtctgccatcacctgtgagtacctggatgaagcataccccagggaaaaagctgttgccgggatgaccccctatgaagaaaactttgccaaaaagatgatctttaaaatttgtttttctaagggtttgttgcctaaagaaaatttcaacctcctaattttgaaaaaacctgtttttttaaaaccaaaaaaaaggcttttacacctgagaccttctctggaatgttgttgcccttggatgatcaagggagcctccatgtccagagacatcgccaagtttacaccactaccctcacccagggcagccagtgaccggctgatggagcccaaggggaaggggtcattagaagcagaactgaagaaacttcaaaactctattcaagaaagcacacaggcctttgatgaacatttgaaaagactttttgaaaggagagtgaaggcagagatggttaccaaccaggaggaactgaaaataagtaaccttgcattttctttattgttggatgaagaattaagctctagagaaaaattcctgaacaactaccttacaaggaaacagcacgagaaaagccagacttcagaagctgttcggaaatctagagaagacctggatgtgtgcaaggagcactatgacaacttactggcagaagacaaagttatggatcgcagctttaaaaaggaattttctgaaattcctggtcatcaagtggatatactctacaaactttttaaacgccgaccaaggatttccaaacagaaaacgcactcagaaacaaccagcgttgtccctttcggagaactaccaggatctggcaagttgaataaggatgcctttgcccagttaatgaaagctatggatgagttggacaatattagtaacatgccagaaggcttggaccctttggtctggaatcatttctgcatgacaagacgagcaaaagtggaaaatgaacagaaagtaaagcagaaagcagctgacttattggaaatggcaactttcctccagaagagagttgaggaggaagagaaggtgcaacaggagattgagagagtgttccatgaactcatcctgtaa

SEQ ID NO: 19821 - DNA, 1221 bp, Homo sapiens
  SIMILAR (427)..(927): 931254mologous to Escherichia coli, LBB84, plasmid pXT107, IS10L/R-1, Peptide PlasmidTransposonInsertionMutant, 402 aa transposase,accession number S67119,Smith-Waterman Score=822.
atgaacccattaggtgattacagcattgaacctggggtggacgccttcgtcctcttactttcgggaacaccctactctgtctatggagtagctgttttttcaccactttactttcttaataaacttgcttttgttttgcacggtggactcgctctgaattctttcttatgcgagatccaagaaccctctcttgggtctggatcaggacccctttcccgtaacatctatgcaggaggaataacatgtgttccatcttattttacaggaagcgcgcccccggggccggtcccggaggctacgatccgcatctacagcatgaggttctgcccgtttgctgagaggacgcgtctagtcctgaaggccaagggaatcagacaacaagatgtgcgaactcgatattttacacgactctctttaccaattctgccccgaattacacttaaaacgactcaacagcttaacgttggcttgcacgcattacttgactgtaaaactctcactcttaccgaacttggccgtaacctgccaaccaaagcgagaacaaaacataacatcaaacgaatcgaccgattgttaggtaatcgtcacctccacaaagagcgactcgctgtataccgttggcatgctagctttatctgttcgggcaatacgatgcccattgtacttgttgactggtctgatattcgtgagcaaaaacgacttatggtattgcgagcttcagtcgcactacacggtcgttctgttactctttatgagaaagcgttcccgctttcagagcaatgttcaaagaaagctcatgaccaatttctagccgaccttgcgagcattctaccgagtaacaccacaccgctcattgtcagtgatgctggctttaaagtgccatggtataaatccgttgagaagctgggttggtactggttaagtcgagcctacgccatagcccgaacgagcagctcagagcgttttgatatcatgctgctaatcgccctgatgcttcaactaacatgttggcttgcgggcgttcatgctcagaaacaaggttgggacaagcacttccaggctaacacagtcagaaatcgaaacgtactctcaacagttcgcttaggcatggaagttttgcggcattctggctacacaataacaagggaagacttactcgtggctgcaaccctactagctcaaaatttattcacacatggttacgctttggggaaattatga

SEQ ID NO: 19822 - DNA, 1075 bp, Homo sapiens
  SIMILAR (866)..(291): 421254mologous to Sus scrofa glutathione S-transferase omega,accession number AF188838,Smith-Waterman Score=209.
aaaataaaagcatgctattattcatattagtgaaggaaaaatatcagacatagctttattgctgactccttgccccctttcagagcccatagtcacaggcctcagggctggttctgtaagtagagctctagggaaaccttgcccagtctttctcactagtaagcagggctgaagactgtgggatcttcctttcatggctggccatccaacaggtttcaagtttgggagtgtggtctaacaaactcattttaaacttcaattgcttcccagcccggttcaaaacccaggccccagatgagggtaatcaatcattagagataggaattgccaccaaaggaagggtcgtcttccttattaagtcaagaaccctcctcctaagcttggtaaaaatctttaacgaaaattctctcttttagggccaggcataggtcttctttatttttgggctttctaataaaggcttccctaccaggggatggcaaccttaggaaaaacaactcctaaggatcatcccttttttcttggcaagctttctcataagggggtcatcccgcaacagcttctttccccggggtatgcttcatcccaggtacttcacaaggtgatggcagactccgtagatcagctgacccctgactgttttcgcagaactggcaccagaccaaaagggatttttctaaaggaaccactcaggcttatttttcagggttgatattgatgacttcatgcctgattcccttggccttcaggactagacgcgtcctctcagcaaaacggggcagaacctcatgctgtagatgcggatcgaagccctccgggaccggccccgggggcgcgcttcctcgaagcaccacccgctccgtcccaaggcttcacgacttcagagcctgtggcccgacctcatggctcactcaccggtccagagcgttctctccaaaggctcctgttcagctcagtgtgtttcagtttcctcacctttacagggacagttgcagacaagatctgaggccaattctccaagtggcttttattggctttacaagtcaagtttgattcccagcaacgtcccctgcac

SEQ ID NO: 19823 - DNA, 564 bp, Homo sapiens
  SIMILAR (288)..(473): 401254mologous to Gibbon ape leukemia virus pol polyprotein,accession number U60065,Smith-Waterman Score=118.
  misc_feature (1)...(564): n = a,t,c or g
aggagcnnnnnnaaatgaaattganggtcgtgaaacggccgagctgaccctgacacccattaggctcagcaaattaccaaggctgtactgctgcaaagcttcacagacagcctccattacttcaatcaagcccaaatttcatcctcatctgttacctatctcggcataattctcataaaaacacacgtgctctccctgccaatcgtgtctgactgatctctcaaaccccagcaccttctacaaaacaacaactcctttccttcctaggcatggttagcgtggtcagaattcttacacaagagccaggaccacaccctgtagcctttctgtgcaaacaatttgaccttactgttttagcctagccctcatgtctgcgtgcagcggctgccactgctttaatacttttagaggccctaaaaatcacaaactatgctcaactcactctctacagttctcataacttccaaaatctattttcttcctcatacctaacgcatatactttctgctccccagctccttcagctgtactcactctttgttgagtctgccacaatcaccattg

SEQ ID NO: 19824 - DNA, 451 bp, Homo sapiens
  SIMILAR (122)..(442): 701254mologous to Human endogenous retrovirus tripartite fusion transcript PLA2L,accession number Z14310,Smith-Waterman Score=306.
  misc_feature (1)...(451): n = a,t,c or g
tttcgcactggcgaanncggcacgagnnnnnnnnnnnnnnnnnnnnnnnnnnnnnnnnnnnnnnnnnnnnnnnnnnnnnnnnnnnnnnnnnnnnnnnnnnnnnnnnnnnnnnnnnnnnnnntttggtgccgtcactcggatcgggggacctcccttgggaaatcaatccccgtcctcctgttctttgctccatgagaaagatccacctacgacctcaggtcctcagacagaccagcccaagaaacatctcaccaatttcaaatccggtgcagctaccaggggaactgccaggacttcaaagcccacaaccaaaagccagaaaacactaccaagtacaagccccggacactggacccagagcacaccctgggcatctgctctgagatcctctccctggacagagacagctgctccttcagaaacagaggagaccctgaacacaggcaggcct

SEQ ID NO: 19825 - DNA, 481 bp, Homo sapiens; identical to SEQ ID NO: 18543
  SIMILAR (1)..(66): 771254mologous to Homo sapiens Human secreted protein, SEQ ID NO: 7340,accession number G03259,Smith-Waterman Score=92.

SEQ ID NO: 19826 - DNA, 496 bp, Homo sapiens
  SIMILAR (187)..(2): 881254mologous to Homo sapiens pol protein,accession number AF108841,Smith-Waterman Score=296.
  misc_feature (1)...(496): n = a,t,c or g
tttccgatgggcacagctttattctggaacggtgaacccagtgggnaggatcctgcaggcggacggcagttggggtactatagatgactaagtagggtccagtccatcgaggttgtagagtttgaggggtcaggttcttaataagaactgatcgtccagctagggtgtcttcatatagttgggaatccgatttgaaattcatgagatgttccttgggctggttggtctgaggactgaggtcgtaggtggatctcctcacggagtggncnnaaggacaggggacccgtctcctgaaggagtcctcctgtcccgggtcttcagcaccaaatgtcacacgcgtccatgtgaagagactaccaaacaggctttgtgtgagcaacaacgctgtttatttcaccagtttgatagcatttgagctgaagacatctcttcctttttctgcaaaatatctcagtagctaatatgttgctcttcatcactcaataagcagcaaaac

SEQ ID NO: 19827 - DNA, 561 bp, Homo sapiens
  SIMILAR (356)..(261): 781254mologous to Homo sapiens HHLA3 protein,accession number AF126163,Smith-Waterman Score=134.
  misc_feature (1)...(561): n = a,t,c or g
agagagtcagcgaagggagataagggtggggccgttttataggatttgggtaggtaaagganaattacagtcaaagagggtttgttctctggcaggcaggagtgggggttgcaaggtgctcagtgggggtgatttttgagccaggatgagccaggaaaaggactttcacaaggtaatgtcatcacttaaagcaaggaccggccatttacacttcttttgtggtggaaggtcatcagttaaggtggggcagagcatattcacttcttttgtgattcttcagttacttcaggccatctgggcatatacgtgcaagtcacaggggatgcgatggcttggcttgggctcagaggcctgacattcctgccgtcttatattaataagaaaaataaaacaaaatagtgttgaagtgttggggtggcaaaaatttttggggggtgatatggagagagaatgggcgatgtttctcagggctgcttcgagcgggattaggggcggcgtgggaaccttccactgtgagagttacccgaagctcggcatccgtgatggtctagggggctcacg

SEQ ID NO: 19828 - DNA, 1677 bp, Homo sapiens
  SIMILAR (1009)..(1551): 291254mologous to Baboon endogenous virus strain M7 gag-pol precursor polyprotein,accession number D10032,Smith-Waterman Score= 213.
atggccccacccctatctccctttgctgactctcttttcggactcagcccacctgcacccagagacaaaggagacacgttttatccgtggacccaaaactccggtgcccgtcacggactgggaaggcagccttcccttggtgtttcatcattgcagggacgcctctctgatcattcacccacgtttcagaggtgtcagaccacgcagggacgcctgccttggtccttcacccttagtggcaagtcttgcttttctgaggaaggggcaatcccaaccccaagtgtcgctgagtctttccagtcttccttttctacagacccatctgacctttcccctcctccccagcctgctcatcgccaggccgagctaagtcccaattcttcctcagcctccactcctccaccctataatcctcctaccacctcccctcctcacacccggtccggcttacagtttagttccgcaactagctcttccccacctgcccaacaatttcctcttagagaggtggctggagctgaaggcatagtcaacgcacatgtacctttttctctatcagacctctctcagatcagtcagcatttaggctctttctcatcagaccccactaaatatatacaggaattccgatatctaactctgtcctacaacttaacctggagtgacctaaatgtcatcctgacttctaccctctccccagatgaacgggaaagagtttttcctgtatcccaatctcacgctgataaccgtcggcttcatgagccagacctccaggaaggcattagagcagttccccgagaggatcccccagtggaactaccaggcaaattccccaggaaaaaacttcaaaaattagaatctggccctcaaaccccacaacaggaattaatcaaccttgccttcaacgtgtacaataatagagaggaagcagccagacggcaatgcatttctgagttacaattacttgcctccactcagcagaagactgacaccgcccaatcgcctcagaagccaacagaaccatcacagatgctctggataactctcacagtggaggtggctgccgctgctttaatacttttagaggccctcaaaatcacaaactatactcaactcactctctacagttctcataacttccaaaatctattttcttactcatacctgacgcatatgctttctgcttcccggctccttcagctgtattcactctttgttgagtctcccacaattaccattgttcctggcccggacttcaatccggcctcccacattattccggataccacacctgaccctcatgactgcatctctctgatccacctgatgttcaccccatttccccacatttccttcttccctgtttctcaccctgatcacacttggtttattgatggcagttccaccaggcctaatcgccactcaccagcaaaggcaggctatgctatagtatcttccacatctatcattgaggctaccactctgcccccctccactacctctcagcaagccgaactagttgccttaactcaagctctcactcttgcaaaggactacgcgtcaatatctatactgattctaaatatgcctttcatattctgcaccaccatgcggtcatatgggctgaaagaggttttctcactacacaagggtcctccatcattaatgcctctttaa

SEQ ID NO: 19829 - DNA, 3504 bp, Homo sapiens; identical to SEQ ID NO: 5596
  SIMILAR (1789)..(3501): 921254mologous to HERV-H/env62 envelope protein,accession number AJ289709,Smith-Waterman Score=2697.

SEQ ID NO: 19830 - DNA, 1710 bp, Homo sapiens; identical to SEQ ID NO: 6722
  SIMILAR (393)..(34): 741254mologous to Homo sapiens putative p150,accession number U93572,Smith-Waterman Score=432.

SEQ ID NO: 19831 - DNA, 1566 bp, Homo sapiens; identical to SEQ ID NO: 3049
  SIMILAR (814)..(1566): 991254mologous to Rattus norvegicus potassium channel,accession number AF091247,Smith-Waterman Score=1297.

SEQ ID NO: 19832 - DNA, 798 bp, Homo sapiens
  SIMILAR (430)..(795): 531254mologous to Sus scrofa polyprotein,accession number U77599,Smith-Waterman Score=358.
atgattcaagagcatgcagacaaacaggtgcagaggctgcagggagtgcttttgggctccatccccacagcagcatcaagggcccgcctgcacccaggtgaaataaacaaccatgttgctcatacagagcctgtttggtggtctcttcacatggacgcgtatgaaatttggtgccgtggctcggatcggaggacatcccttgggagatcaatcccccttcctcctgctctttgctccctgagaaggatccacctacgacctcaggtcctcagatcgaccagcccaagaaacatctcaccgatttcaaatccgggacacctctctgattatacacccacgtttcaagggtgtcagaccatgcagggacgcctgccttggtccttcacccttagcggcaagtctcgcttttctggggaaggggcaactcaacgccaatatcccatcccacagcaagctttgaaaggattaatgcctgctatcactcgcctgctacagcatggccttttaaagcctataaactctccttaccattcccccattttacctgtcctaaaaccagacaagccttacaagttagttcaggatctgcgccttatcaaccaaattgttttgcctatccaccccatggtgccaaacccatatactcttctatcctcaatacctgcctctacaacccattattctgttctagatctcaaacaagctttctttactattcctttgcacccttcatcccagcctctcttcgcattcacttggactgaccctgacacccatcaagctcagcaaattacctag

SEQ ID NO: 19833 - DNA, 2628 bp, Homo sapiens
  SIMILAR (166)..(933): 1001254mologous to Homo sapiens N-methyl-D-aspartate receptor 2A subunit precursor,accession number U90277,Smith-Waterman Score= 1325.
atggaaggccttgccaagaagacaacagaacaaagacaggaaggacgtgagggagtgaaccatggaatatttgcagctgtgacaaccagaaatgtctccagatattggcaaatatcccctggaggagacacaaaatcacccctgatagaaaaccctcggcacacaggcatctacagctgcattcatggagtgcacattgaagaaaagaagaagtctccagacttcaatctgacgggatcccagagcaacatgttaaaactcctccggtcagccaaaaacatttccagcatgtccaacatgaactcctcaagaatggactcacccaaaagagctgctgacttcatccaaagaggttccctcatcatggacatggtttcagataaggggaatttgatgtactcagacaacaggtcctttcaggggaaagagagcatttttggagacaacatgaacgaactccaaacatttgtggccaaccggcagaaggataacctcaataactatgtattccagggacaacatcctcttactctcaatgagtccaaccctaacacggtggaggtggccgtgagcacagaatccaaagcgaactctagaccccggcagctgtggaagaaatccgtggattccatacgccaggattcactatcccagaatccagtctcccagagggatgaggcaacagcagagaataggacccactccctaaagagccctaggtatcttccagaagagatggcccactctgacatttcagaaacgtcaaatcgggccacgtgccacagggaacctgacaacagtaagaaccacaaaaccaaggacaactttaaaaggtcagtggcctccaaataccccaaggactgtagtgaggtcgagcgcacctacctgaaaaccaaatcaagctcccctagagacaagatctacactatagatgtgcgaagcctggctggccgatggggaacccttattgacatcatgaagaccaaaagctttaggagacaaggtaacccaaccaccggggagcagggttaccaaaagggacgtggcccagaaaaaaaggccctttctttccacaagaaaagccttagggttagcccgccagcattccttcgaaaaaaccatggggaaaaaaactatgggggcgcgacccttatcaaggccgtctcggggcgcataagctttagagcagcgggaccggtttttgggggggtcccaaccccaagtgttgctgagtctttccagtcttccttttctacagacccatctgacctttcccctcctccccagcctgctcatcgccaggccgagctaagtcccaattcttcctcagcctccactcctccaccctataatcctcctaccacctcccctcctcacacccggtccggcttacagtttagttccgcaactagctcttccccacctgcccaacaatttcctcttagagagatgaacggaaaagagtttttcctgtatcccaatctcacgctgataaccgtcggcttcatgagccagacctccaggaaggcattagagcagttccccgagaggatcccccaatggaactaccaggcaaattccccagttgaagggcttaaaaaagcagcttacaaagctgttaattatgacaaacttaaaaaaactacccaaggtaaagatgaaaacccagcccagttcatggcccgcttagcagcaaccattagatgctataccgccctagacccagaggggccagaaggccgccttattcttagtatgcattttatcacccaatccactcctgacattaggaaaaaacttcaaaaattagaatctggccctcaaaccccacaacaggaattaatcaaccttgccttcaaggtgtacaataatagagaggaagcagccagacggcaatgcatttctgagttacaattacttgcctccactgtgagacaaaccccagccacatctccagcacacgagaacttccaaacgcctgaaccgcagcagccaggcgttcctccagaacctcctcccccaggagattgctacaagtgccagaaatctagccaccaggccaaggaatgcccgcagcccgggattccttctaagccacgtcccatctatcttctcggcttagcagcagaagacttgacaccgccaatcgcctcagaagccaacaggaccatcacagatgctctggataactctcacagtggaggatgtgtcttggaaatgaactataatgaaggacgaccgaagatagctgtcattcaccgcctgggatggcaacgagtgtttgtaagggtccgaggggcatctcccaataaccaagcgttggtcatccctgtgggagtggaggaaagggttatcggaggtggggtcttgcaagagaaacttggtccggtgcctacgaactgctattcgatggggggggaagctggggtcattcactgcaaggggcatcaaaaggcatcagatcccattgctctaggcaacgcttatgctgataaggtggctagacaagcagctagctctccaacttctgtccctcacggccagtttttctccttcacattggtcactcccacctactcccctgctgaaacttccacctatcaatctcttcccacacaaggcaaatag

SEQ ID NO: 19834 - DNA, 585 bp, Homo sapiens
  SIMILAR (72)..(128): 841254mologous to Escherichia coli insA,accession number M28607,Smith-Waterman Score=85.
atggcaactgcagttcacttacccgcttctcaacccggtacgcaccagaaaatcattgatatggccatgaaggcgttggatgccgggcaacagcccgcattatgggcgttggcctcaacagattttacgtcacttaaaaaactcaggccgcagtcggtaacctcgcgcaacagccgggcagtgacgtcatcgtctgaacgaaagggagggacgcctgattattcacccacgtttcaaaggtgtcagaccaccaggagcttgtacacgtgccggaaatctggccaccaagccaaggaatgcccgcagcccggattcctcctaagccgtgtcccatctgtgcgggaccccactgaaaatcgactgttcaactcacctggcagccactcccagagcccctggaactctggccaaggttctctgactgactccttcccagatcttctcggcttatcggctgagactgacactgcccgatcgcctcggaagccccgtagaccatcacggacccgagcttcagtttctcaattcatccaaaaccatatccaggccatcaccatcattctatatgacaaatgtttcttctaa

SEQ ID NO: 19835 - DNA, 462 bp, Homo sapiens
  SIMILAR (22)..(279): 721254mologous to Homo sapiens reverse transcriptase homolog= pol {retroviral element},accession number S61070,Smith-Waterman Score=306.
attattgatggcagttccgccaggcctaatcgccactcagcagcaaaggcaggctatgctacagtatcttccacatctgtcattgaggctgaaagaggtttcctcactacgcaagggtcctccatcattaatgcctctttaataaaagctctgctcaaggctactttacttccaaaggaagctggagtcattcactgcaaaggccatcaaaaggcgtcagatcccattgctctagacaacgcttatgctgataaggtggctagacaagcagtattttacattgtgtggaatcatgtaccaaaaataacaggacttatggaggaaatggggctggatgcagacctttcaaaacaacctaaacttacacaactggtggaaggagaaggtccttctcagaaagttcctatgttcttaaatatgattcatcgaagggtgaaagaactaagagtagcagcagaatag

SEQ ID NO: 19836 - DNA, 825 bp, Homo sapiens
  SIMILAR (508)..(627): 871254mologous to Homo sapiens Human secreted protein, SEQ ID NO: 5576,accession number G01495,Smith-Waterman Score=181.
atggtctatggggcttccgaggagatcaggcagtgtcagtcttcagccggtaagccaagaaggagtcagtcagagagccttgggccagagttccaggggctctgggagtggctgccaggaaagcgggacttgccgctaagggtgaaggagaaggggttgaggggtacttgcccctgccccaggaaagcgggacttgctgctaagggtgaaggagaaggggttgaggggttcttgcccctgccccaggaaagcagagaagggaacaggaggacaggagactggtctcctaagggaggtcccccgatccgagtcacggcaccaaatttcatgcgtgtctgtgtgaagagaccaccaaacaggctttgtgtgagcaacatggctgtttatttcacctgggtgcagaaaaagaaatcatctttggcattttcttcagttgtcacatcagatcttaaaagcaagaagagaagactttcagggaagagcctggagaccagctcggcgtccctgatggtctacggggcttccgaggcgaccgggcagcgtcagtcttcagccgctaagccgagaaggagtcagtcagagagtcttgggccagagttccaggggctccgggagtggctgccagaatccaagcctcaatcattatttaaggagccagagaggagcattaagaaaacatttcaaagatctttgaaggcttctgaggaccgatcagagattgaccttcagcatcacccagacagaggaactcttgctgccagtgtagtcttggtaactgaatcattacagaaaacatactccataacagatggagatgtttcctaa

SEQ ID NO: 19837 - DNA, 1795 bp, Homo sapiens
  SIMILAR (595)..(1788): 351254mologous to Baboon endogenous virus strain M7 gag-pol precursor polyprotein,accession number D10032,Smith-Waterman Score= 597.
catgggcttctaaaacctataaactctccttacaattcccccattttacctgtccaaaaaccggataagtcttacagattagttcaggatctgcgtcttatcaaccaaattgttttgcctatccaccctgtggtgcccaacccgtacactcttttgtcctcaataccttcctccacaactcactattccatgcttgatcttaaagatgcttttttcactattcccctgcacccctcgtcccagcctctctttgctttcacctggactgaccctgacacccatcagtcccagcagcttacctgggctgtgctgccgcagggtttcagggacagccctcattacttcagccaagctctttctcatgatctactttccttccacccctccgcttctcaccttattcaatatattgatgaccttcttctttgtagcccctcctttgaatcttctcaacaagacacacttctgctccttcagtgtttattctccaaaggatatcgggtatccccctccaaagctcaaatttcttctccatccgttacctacctcggcataattcttcataagaacacacatgctctccctgccgatcgctggccatcatgtctccgtgcagccgctgctgctgccctaatacttgtagaggccctcaaaatcacaaactatgctcaactcactctctacagctctcataatttccaaaatctattttcttcctcacacctgacacatatactttctgctccccggctccttctgctatactcactctttgttgagtctcccacaattaccattgttcctggcctggacttaaatgcggcctcccacattattccggataccacacctgaccctcatgactgcatctctctgatccacctgacattcacatttccccaaatttccttcttccctgtttctcaccctgatcacacttggtttattgatggcagttccaccaggcctaatcaccactcaccagcaaaggcaggctatgctatagtatcttccacatctatcattgaggctaccgctctgcctccctccactacctctcagcaagccgaactagttaccttaactcaagccctcactcttgcaaaaggactacgcatcaatatctatactgattctaaatatgcctttcatattctgcagcaccatgcagtcatatgggctgaaagaggtttcctcactacacaagggtcctccatcattaatgcctctttaataaaaactctgctcaagaccactttacttccaaaagaagctggggtcattcactgcaaggggcatcaaaaggcatcagatcccattgctctaggcaatgcttatgctgataaagtggctagacaagcagctagctctccaacttctgtccctcacagccagtttttctccttcgcttcagtcactcccacctactcccccacggaaacttccacctatcaatctcttcccacacaaggcaaatggttcttagaccaaggaaaatatcttcttccagcctcacaggcccattctattctgtcatcatttcataacctcttccatgtaggttacaagccgctagaccgtctcttagaacctctcatttcctttccatcatggaaatctatcctcaaggagatcacttctcagtgttccatctgctattctactacccctcagggattgttcaggccccctcccttccctacacatcaagctcggggatttgcccctgcccaggactggcaaattgactttactcacatgcctcgagtcagaaaactaaaatatcttagtctgg

SEQ ID NO: 19838 - DNA, 1796 bp, Homo sapiens
  SIMILAR (360)..(1019): 861254mologous to Homo sapiens reverse transcriptase homolog= pol {retroviral element},accession number S61070,Smith-Waterman Score=952.
gctggccatcatgtctccgtgcagccgctgctgctgccctaatacttgtagaggccctcaaaatcacaaactatgctcaactcactctctacagctctcataatttccaaaatctattttcttcctcacacctgacacatatactttctgctccccggctccttctgctatactcactctttgttgagtctcccacaattaccattgttcctggcctggacttaaatgcggcctcccacattattccggataccacacctgaccctcatgactgcatctctctgatccacctgacattcacatttccccaaatttccttcttccctgtttctcaccctgatcacacttggtttattgatggcagttccaccaggcctaatcaccactcaccagcaaaggcaggctatgctatagtatcttccacatctatcattgaggctaccgctctgcctccctccactacctctcagcaagccgaactagttaccttaactcaagccctcactcttgcaaaaggactacgcatcaatatctatactgattctaaatatgcctttcatattctgcagcaccatgcagtcatatgggctgaaagaggtttcctcactacacaagggtcctccatcattaatgcctctttaataaaaactctgctcaagaccactttacttccaaaagaagctggggtcattcactgcaaggggcatcaaaaggcatcagatcccattgctctaggcaatgcttatgctgataaagtggctagacaagcagctagctctccaacttctgtccctcacagccagtttttctccttcgcttcagtcactcccacctactcccccacggaaacttccacctatcaatctcttcccacacaaggcaaatggttcttagaccaaggaaaatatcttcttccagcctcacaggcccattctattctgtcatcatttcataacctcttccatgtaggttacaagccgctagaccgtctcttagaacctctcatttcctttccatcatggaaatctatcctcaaggagatcacttctcagtgttccatctgctattctactacccctcagggattgttcaggccccctcccttccctacacatcaagctcggggatttgcccctgcccaggactggcaaattgactttactcacatgcctcgagtcagaaaactaaaatatcttagtctggacataattcctcggtttggccttcccacctctatacagtctgataacggaccagcctttactagccaaatcacccaagcagtttctcaggctcttggtattcagtggaaacttcatatcccttaccatcctcaatcttcaggaaaggtagaacggactaatggtcttttaaagccacacctcaccaagctcagcctccaacttaaaaaagattggacagtacttttacctcttgctcttctcagaatcagagcctgtcctcgagatgctacagggtacagtccatttgaacttttatatggacgcactttcttgcttggccccagcctcatcccagacaccagccctctaggtgactatcttccagtcctccagcaggctagacaggaaattcaccaggcttctaatcttctcttacctactccagatcgccagccatatgaagacaacctagctggacgatcagttgttgttaagaatctgacccctcaaactctacaacctcgatggacgggaccctacttagtcatctatagtccccgactgccgtccgcctgcaggatcctccccactgggttcaccattccagaataa

SEQ ID NO: 19839 - DNA, 629 bp, Homo sapiens; identical to SEQ ID NO: 12909
  SIMILAR (114)..(611): 781254mologous to Homo sapiens reverse transcriptase homolog= pol {retroviral element},accession number S61070,Smith-Waterman Score=633.

SEQ ID NO: 19840 - DNA, 512 bp, Homo sapiens
  SIMILAR (221)..(490): 901254mologous to Homo sapiens pol protein,accession number AF108841,Smith-Waterman Score=430.
tccgataacggatgagcctttactagttaaattacccaagcagtttctcaggctcttggtattcagtggaaccttcaaatcccttaccatcctcaatcttcaagaaagaattagagcctgtcctcgagatgctacagggtacagtccatttgaacttttatacggacgcactttcttactcagccccaaccttgtcccagacaccagccctctaggtgactatcctccagtcctccagcaggctagacaggaaattcgccaggctgctaatcttctcttgcctactccagattctcaaccatatgaacacaccctagctggacaatcagttcttgttaagaatctgacccctcaaactctacaacctcgatggactggaccctacttagtcatctatagtaccccaactgccgtccacctgcaggatcctccccactgggttcaccgttccagagtaaagctgtgtccatcagtcagccagcctaatccccctcttcctcctggagtcacaa

SEQ ID NO: 19841 - DNA, 619 bp, Homo sapiens
  SIMILAR (614)..(75): 361254mologous to Baboon endogenous virus strain M7 polyprotein,accession number D10032,Smith-Waterman Score=241.
cctccactgtgagagttatccagagcatctgtgatggtcctgttggcttctgaggcgattggcggtgtcaagtcttctgctgctaagccgagaagatagatgggacgtggcttagaaggaatcccgggctgcgggcattccttggcctggtggctagatttctggcacttgtagcaatctcctgggggaggaggttctggaggaacgcctggctgctgcggttcaggcgtttggaagttctcgtgtgctggagatgtggctggggtttgtctcacagtggaggcaagtaattgtaactcagaaatgcattgccgtctggctgcttcctctctattattgtacaccttgaaggcaaggttgattaattcctgttgtggggtttgagggccagattctaatttttgaagttttttcctaatgtcaggagtggattgggtgataaaatgcatactaagaataaggcggccttctggcccctctgggtctagggcggtatagcatctaatggttgctgctaagcgggccatgaactgggctgggttttcatctttaccttgggtagtttttttaagtttgtcataattaacagctttgtaagctgcttttttaagcccttcaa

SEQ ID NO: 19842 - DNA, 1755 bp, Homo sapiens; identical to SEQ ID NO: 5597
  SIMILAR (1)..(1752): 991254mologous to HERV-H/env62 envelope protein,accession number AJ289709,Smith-Waterman Score=3072.

SEQ ID NO: 19843 - DNA, 579 bp, Homo sapiens
  SIMILAR (558)..(283): 921254mologous to Homo sapiens lectin-like receptor F1,accession number AF175206,Smith-Waterman Score=432.
tcaatttgcaaataggaccgaagagctccctgttcccctcatgacaccaacacgacaaaaaagagttattccactaattcccttgcttgttggtttaggactttctgcctccactattgctctcggtactggaataggaggcatttcaacctctgtcacgaccttccatagcctctctagtgtcttctctgctagcatcacagacatatcacaaactttatcagtcctccaggcccaagttgactctttagctgcagttatcctccaaaaccaccgaggccttgacttactcactgctgtctggtctgcagatctcgaagcacaaaggtccttattacttatatttcttcttgtgccattattcacttttagatctccagtgtcctcatactgagtggcatttgaacaacttcctttttggcattttagcaatactccctgagaaaccaacaggatcaaggagatcaaagtcaaagtgagaataccattcacggttccagatattcccagtaagattttataccagtgcaacgtcactgaataatcctccaccttcaagtaggctccggtgtctgtcat

SEQ ID NO: 19844 - DNA, 1158 bp, Homo sapiens; identical to SEQ ID NO: 6709
  SIMILAR (931)..(1155): 771254mologous to Homo sapiens reverse transcriptase homolog= pol {retroviral element},accession number S61070,Smith-Waterman Score=283.

SEQ ID NO: 19845 - DNA, 1287 bp, Homo sapiens; identical to SEQ ID NO: 445
  SIMILAR (769)..(1263): 421254mologous to Murine leukemia virus gag-pol polyprotein,accession number U13766,Smith-Waterman Score=280.

SEQ ID NO: 19846 - DNA, 1296 bp, Homo sapiens; identical to SEQ ID NO: 5602
  SIMILAR (941)..(735): 881254mologous to Homo sapiens putative envelope protein,accession number U88902,Smith-Waterman Score=294.

SEQ ID NO: 19847 - DNA, 976 bp, Homo sapiens
  SIMILAR (175)..(831): 851254mologous to HERV-H/env62 envelope protein,accession number AJ289709,Smith-Waterman Score=943.
atggatgaggagaaaagggaacacttaaatgctcttggtcgaagggcactgggtgaaggtccaatgtatcagtgcacacgggggagtggggcggggaattatctcaccacctacgtacgggagcccgaacaaaaggctctggccattttatggacccaggggtggggatggggccctgtaaataacagtgaaaggttgctcgtagatactcaacgttttctcatacaccatgaaaatcgaacctcctcctctgtgcagttacctcatcagtccccattacaacctctgatggctgtggccctagctggatccctaggagtctgggtacaagacacccctttcagcactccttctcatctttttactttgcatctccagttttgcctcgcacaaggtgtcttcttcctctgtgtatcctctacctacatgtgtctacctgctaattggacaggcacatgcacactagttttccttactcccaaaattcaatttgcaaataggaccgaagagctccctgttcccctcatgacaccgacacgacaaaaaagagttattccactaattcccttgcttgtcagtttaagactttctgccttcactattgctctcggtactggaatagcaggcatttcaacctctgtcacgaccttccgtagcctctctaatgacttctctgctagcatcacagacgtatcacaaactttatcagtcctccaggcccaagttgactctttagctgcagttgtcctccaaaaccgccgaggccttgacttactcactgctcccccaactatctttttatctggatgttcatgtgtaccctttattaatatcataaactggtaaacattgagtgtttctccaagttctctgagcctctctatcaaattaatcaagtgtgatgaggggtcgagggaaccctcaatctgtagctggttggtcagcagttccagaggcccagacttgacactggcat

SEQ ID NO: 19848 - DNA, 1187 bp, Homo sapiens
  SIMILAR (984)..(1127): 811254mologous to Homo sapiens pol protein,accession number AF108843,Smith-Waterman Score=204.
atggcatcatctgctcagcttctggggagctctcaggaaacttacaatcatagcaaaaggcaaagagggggtgagatgtctcacatggctggagctaggaggaagagagagagaggagagatgctacacacttttaaacaaccagatctcatgaggtggtcttcagtatgtcggaagaacaaagagaaggttggaaattccaggaaaagaagaaatgttagatattgtttctccagaaagttcaatggcactagtaaagttttcgagagctggcaagtggtggtggtgggtgaaataaacagccatgttgctcacacaaagcctgttcggtggtctcttcacacagacgcgcatgaaatttggtgccgtgactcagatcggcggacctcccttgggagatcaatcccctgtcctcctgttctttgctccatgagaaagatccacctacaagctcaggtcctcagaccgaccagcccaaggaacatctcaccaattttaaatcggagaaaaaggagacacgttttatccgtggacccaaaactccggcaccggtcatggactagggaaggcagccttcccttggtgtttaacctttgcagggatgcctctctgattattcacccaggtttcagaggtgtcagaccacgcagggacacctgccttggtccttcacccttagcagcaagtcccacttttctgggggaaggggcaagagcttgctacaagtgccagaaatctggccaccaggccaaggaatgcctgcagcccaggattcctcctaagctgtgtcccatctgtgcgggaccccgctggaaatcggactgtccaactcacctggcagccactcccaaagcccctggaactctggccaaaggctctctgactgactccttccccagatcttcctcagcttagcagctgaagactgatgctgcctgatcgccttggaagccccctggaccattacggatgctgagctttggataactcttacagtagaggattcccaactatatgaagacaccctagctggacgatcagttcttattaagaacctgacccctcaaactctacaacctcgatggactggaccctacttagtcatctatagtaccccaactgccgtcctgcctgcaggatcctccccactgggttcaccgttccagaataaagctgtgcccatcgga

SEQ ID NO: 19849 - DNA, 1241 bp, Homo sapiens
  SIMILAR (726)..(286): 341254mologous to walleye epidermal hyperplasia virus type 2 pol polyprotein,accession number AF014793,Smith-Waterman Score=189.
aagtgtctacctagaccaagaggtattttagtttcctgactcggggcatgttgagtaacgctgatttgccagtcctaggcggtggcaaatccctgagcttgatgtgtagggaagggagggggcctgaataatccctgaggagtagtagaatagcagatggaacactgagaagttatttccttgaggatacatttccacgatggaaaggaaatgagaggttttaagaggcgggctagtgacttgtactatagcatagcctgcctttgctggtgtgtggcgattaggcctggtggaactgccattaataaatcaagcgtgatcagggtgaggagcaggaaagaaggaaatatgcggaaatggggtgaatgtcaggtggatcagagagatacagtcatgagggtcaggtgtggtatccagaataatgtgggaggccggactgaagtctgggccaggaacaatgggtaattgtgggagactcaacaaagagtgagtacagctgaaggagccaggggaacagaaaagtatatgcgtcaggtgggaggaagaaaatagattttggaaattatgagagctgtagagagtgagttgagcatagtttgtgattttaagggcctctaaaactattagggcggcagcagctgctgcacggagacatgatggccagcctaaaacagtaaggtcaagttgtttggacaaaaaggctacaggacgcgatctcggtccttgtgtaagaaagaagagagtaaaaagaggccgcttaccggatttgaaattggtgagatgtttcttgggctggtcggtctgcaggttagcaccacctgcctggctgacctggctcacaggtgcgcggttgccaggtaacgcttggtatctcagggtgccttcagaagcccagcagttggcttggggaggtgtggcacggcctggggcgatggtgggggcagggcagatggagtcactatcagggcagctggcagcaccactactcctcacctctgtagcaagtggaaacaagccggctcgccctgctgacaagtcactctgttaatctcacctccttttcctgtagtttgaattggcttcactcagtcacctgccactcacctcctgctgtgtggcccggttcctgtcagaccacagactggtactggtcctcttcactgatgatatgattttatacctagaaaatcctgaaggctctgccaaaaggctccttgagctgataaatggcttcagtgaag

SEQ ID NO: 19850 - DNA, 1778 bp, Homo sapiens
  SIMILAR (760)..(101): 861254mologous to Homo sapiens reverse transcriptase homolog= pol {retroviral element},accession number S61070,Smith-Waterman Score=946.
cttgatgtgtagggaagggaggaggcctgaacaatccatgaggggtagtagaatagcagatggaacactgagcagtgatctccttgaggatagatttctatgatggaaaggaaatgagaggttctaagagacgggctagcggcttgtaacctacatggaagaggttatgaaatgacgacagaatagaatgggcctgtgaggctggaaggatatgttttccttggtctaagaaccatttgccttgtgtgagaagagactgataggtggaagtttcagcaggggagtaggtgggagtgaccgatgtgaaggagaaaaactggccgtgagggacagaagttggagagctagctgcttgtctagccaccttatcagcacaagcgttgcctagagcaatgggatctgatgccttttgatgccccttacagtgaatgaccccagcttcctttggaagtaaagcggccttgagtagagttattattaaagaggcattcatgatggaggacccttgtgtagtgagaaaacctctttcagcccatatgaccgcatggtggtgcagaatatgaaaggcatatttagaatcagtatagatattgacgcgtagtccttttgcaagagtgagggcttgagttaaggcaactagtttggcttgctgagaggtagtggaggggggcagagtggtagcctcaatgatagatgtggaagatactatagcatagcctgcctttgctggtgagtggcaattaggcctggtggaactgccatcaataaaccaagtgtgatcagggtgagaaacagggaagaaggaaatgtggggaaatggggtgaacgtcaggtggatcagagagatgcaatcatgagggtcaggtgtggtatccagaataatgtgggaggcctccagaaaagtgggaaaggggtcggggcacagagatacgaggtcggggcatagaaataagggattggggcacagagatataagaggttggggcacagaaataagggatcggggcacagagatatatggggttagggtacttgcccctccccgagcaaagaacaggaggacaggggattgatctcccaagggaggtcccctgatctgagtcacagcaccaaatttcactcgcatccgtgtgaagagaccaccaaacaggctttgtgtgagccataaagctgtttatttcacctgggtgcaggtgggctgagtccgaaaagagagtcagcgaagggagataggggtggggccgttttataggatttgggtagataaaggaaaaaggggggttgttctctttctcagcaagtaacttgtggaaacaagttacttcctccttcctttgttctcctctgcctttgtctcttttgaaaagttctaagttgctagccaatcgggacaaatacagaatgtgtggtcctgttccagccaatggaaaccggacacagcagtagagtaaacatgtcaggttataaatgaccctgtctcctttgttcggtgtactctcgtggcaaaactgctggcgagtgtaccctttctgcctgttgtttggtggccccctttcagtgatggatccagaaggcagcccaagtggctgcctaattctcttggactgggggctgactctgttactctgtctactggtggggtattccaacccaatgtgcgtggacttaattgcaatggaaaaatagtcatggggagatgtcccttggagttcgttcccattcccgctacttcccccatcagcaggaagaagccagagcgatcgacggccttttcccat

SEQ ID NO: 19851 - DNA, 1962 bp, Homo sapiens
  SIMILAR (3)..(500): 991254mologous to Homo sapiens neutral protease large subunit,accession number M27826,Smith-Waterman Score=871.
agcccaagaaacatctcaccaatttcaaatctgatctattcggcttagcgactgaagattgacgctgcccgatcgcctcggaagtcccctggaccatcacagaagccgagcttcgggtaactctcacagtggagggtaagtccatcccctgtttaatcgatacgggggctacccactccacgttgccttcttttcaagggcctgtttcccttgcccccataactgttgtgggtattgacggccaagcttcaaaacccctgaaaactcccccactctggtgccaacttggacaacactcttttatgcactcttttttagttatccccacctgcccacttcccttattaggccgaaatattttaaccaaattatctgcttccctgactattcctggagtacagctacatctcattgctgcccttcttcccaatccaaagcctcctttgtgtcctctaacatccccacaatatcagcccttaccacaagacctcccttcagcttaatctctcccactctaggttcccacgccgcccctaatcccacttgaagcagccctgagaaacatcgcccattctctctccataccaccccccaaaaattttcgccgctccaacacttcaacactattttgttttatttgtcttattaatatcagaaggcaggaatgtcaggcctctgagcccaggccaggccatcgcatcccctgtgacttgcacgtatacatccagatggcctgaagtaactgaagatccacaaaaggaagtaaaaacagccttaactggatgacattccaccattgtgatttgtttcctggccccaccctaactggattcaatgtactttgtaatcttcccccacccttaaggaaggttctttgtaattctccccacccttgagaatgtactttgtgagatccacccctgcccaccagagaacaaccccctttgattgtaattttttattaccttcccaaatcctataaaacagccccacccctatcttccttcactgactctcttttcggactcagcccacctgcacccaggtgaaataaacagccatgttgctcacacaaagcctgtttggtggtctcttcacacagatgtgcatgaaatttggtgccgtgactcggatcgggggacctcccttgggagatcaatcccctgtcctcctgttctttgctccatgagaaagatccacctacaacctcaggtcctcagactgaccggcccaaggaacatctcatcaattttaaatcggcagctgaagactgacgctgcccaatcgcctcggaagcctacaggatcatcacagacgctctgggtaactctcacagtggaggcatgctttaaaaggattaaagtctgttatcactcgcctgttatagcatggccttttaaagcctataaactctccttacaattcccccattgtacctgtcctaaaaccagacaagacttacaggaaggtggagtcattcactgcaaagaccatcaaaaggtgtcagatcccattgctgtaggcaaggcttatgctgataaggtggctagacaagcagctagctttccaacttctgtccctcacggccagtttttctccttcatatcagtcactcccatctactcccctgctgaaacttccacctatcaatctcttcccacacaaggcaaatgtttcttagaccaaggaaaatatctccttccagcctcacaggcccattctattctgtcgtcatttcataacctcgtccatgtaggttacaagccactagcccatctcttagaaactctcatttcctttccatcctggaaatctatcctcaaagaaatcacttctcagtgttctatttgctattctactaccgctcggggattgttcaggcttccttcctttcttacacatcaagctcgaggatttgcccctgcccaggactggcaaattgactttactcacatgccctga

SEQ ID NO: 19852 - DNA, 2501 bp, Homo sapiens
  SIMILAR (1944)..(2489): 521254mologous to Murine leukemia virus reverse transcriptase,accession number M87550,Smith-Waterman Score=436.
atggaggacagggtggggccgagtgaggagaggagccagcagaagttatccataacacctgccaggctggcgggtggtgacagtcttaaccctgctggaaggacaggtgacctcttagtggagacatcccctttgctggcagctgtcttcccagcccacgacaacagcctctgcaacaagccttactggttagttcaggatctgcgccttatcaaccaaattgttttgcctatccaccccatgatgttactaggggagatatcagtcaccaaggccttggctggctccctgataaaagcccttgcagtattccacactgcagaatccccaggctatgctctcctggattcttactacctgctccagaaagggagtgtttgcatctccatcctccaagaagaggaagcattttcttggccggggaaaggagagtgtcgagataagtcctgggcctctctgggcctaatacccgcatttccccagggaggacagtggaaacaggccctggggcttctggaccacagctgcctctgctttggggaattaggcaccaggttggcagccccagcatccttcagcaccttcccaataacaaaccgagagcgggagagaaaaactgacaagctgattccaaaattcatgtggaaatgcaagggacccagaataaccaaaacaatcttggaaaagaatgaagttggagaatttacacttcttgatttcaaaacttaccacaaatttgcagtaatcaaaactatgtggtactggcataaggacagatacattgatcaacagaatgacattgaaagtccagaaataaattcatatgtttatggtcaactgatttttgacaaagactcagcccgcctgcacccaggtgaaataaacagtcttgttgctcacacaaagcctgtttggtggtctcttcatatggacgcgcatgaaatttggtgccgtgactcggatcgggggtcctcccttgggagaatcaatcccctgtcctcctgttctttgctccgtgagaaagatccacctacgacctcaggtcctcagaccgaccagcccaacgaacatctcaccaatttcaaatccgggagagacaaaggagacacgttttatccgtggacccaaaactccggcgccggtcacggactgggaaggcagccttcccttggtgtttaatcattgcagggacggcctctctgatcattcagccacatttcaagggtgtcagaccatgcagggatgcctgccttggtccttcacccttagcggcaagtcccgcttttctggggaaaaggcaacacgctttaaaaagattaaagcctgttatcactcacctgctacagcatggccttttaaagcctaaaaactctccttacaattcccccattttacctgtcctaaaaccagacaagccttacaagtttgttcaggatctgtgccttatcaaccaaattgttttgcctatccaccccatgctgtactcactctttgttgagtctcccacaattaccattgtttctggcccggacttcaatccggcctcccacattattccggataccacacctgaccctcatgactgcatctctctgatccacctgatgctctccccatttccccacatttccttcttccccatttctcaccctgatcacacttggtttattgatggcagttccaccaggcctaatcgccactcaccagcaaaggcaggctatgctataatatcttccacatctatcgttgaggctaccactctgcctccctccactacctctcagcaagccaaactagttgccttaactcaagccctcactcttgcaaaaggactacgcgtcaatatcttactgattctaaatatgcctttcatattcggcaccaccatgcagtcatatgggctgaaagagggattgttcaggtctcctccctttcctacacatcaagctaggggatttgcccctgcccaggactggcaaattgactttactcacatgcctcgagtcagaaaactaaaatatctcttagtctgggtagacgctttcactggatgggtagaggccttccccacagggtctgagaaggccactgcggtcatttcttcccttctgtcagacataatccctcggtttggccttcccgcctctacacagtctgataacggaccggcctttactagccaaatcacccaagcagtttctcaggctcttggtattcagtggaaccttcatatcatttaccgtcctcaatcttcaggaaaggtagaacggactaatggtcttttaaagacacacctcaccaagctcagcctccaacttaaaaaggattggacagtacttttaactcttgctcttctcagaatcagagcctgtcctcgagatgctacagggtacagtccatttgaactcttatatggacacactttcttgcttggccccaacctcatcccagacaccagccctctaggcaactatcttccagtcctccaacaggctagatag

SEQ ID NO: 19853 - DNA, 5773 bp, Homo sapiens
  SIMILAR (3257)..(5116): 941254mologous to Homo sapiens putative p150,accession number U93572,Smith-Waterman Score=3044.
atgctggcagcccttgcagcccttgcttgctctcagcgcctcttcggccttggcgcccactctggccgagcccttcagcctgccactgcactgtgggagcccctttctgggctggccaaggccgaagctggctccctcagcttgcggggaggtgtggagggagaggcgcagacaggaacggggctgcatatggcgcttgtgggccagcatgagttctgggtgggcgtgggcttggtggaccccaccctcagagcagccggccagctccaccagccctgggcagtggctgaagctaaagtcatagtcaaggttaatgctcctctttctttatctgacctctcccaaaatcagttagcatttaggctctttttcatcgaatataaaaacccagcccagttcatggtttgtttggcagcaaccctgacacgatttacagccctagaccctgaaagatcctctacctacatgtgtctacctgctaattggacaggcacatgcacactagttttccttactcccaaaattcaaattgcaaataggaccgaagagctccctgttcccctcatgacaccgacacgacaaaaaagagttattccactaattcccttgcttgtcggtttaggactttctgcctccactattgctctcagtactggaatagcaggcatttcgacttctgtcacgaccttccgtagcctttctaatgacttctctgctagcatcacagacatatcacaaactttatcagtcctccaggcccaagttgactctttagctgcagttgtcctccaaaaccgccgagaccttgacttactgctttccaatcttctcttccacggctttcctgcaatattttccactagaggcacaccttgtttttccattgttgtttcttgtactgtagttagtctccactcctgtgatctcccctggttgatgagatgtcttggaagagccttaatgacaactgagttccttttggaagatctatcccacttcctgggcgtggggggtggtatgccagaggctggcccgcagcagccagcccaagaagaggccagggcctcttgatccatttgtcggggtaccccagaaggagccaagggggcagccaggggacccaggcaggggttgcccaagggcacagcaacttgcaggcctttggcaagggccaaaaaatggtgagtggaaagccagggggcccctggaaaagaacccataagggggccgtttagctgggagtcctgcatttgccgtttgtgtttcatccggcgattttgaaaccaggtttttatctggacctctgagagctgcatctccctggccagccaattccgctccagagggcccaggtactggtggtgccggaagacgccctccaaggcacggacctgctccgtggtgaaggtcaacccagccacagtcctctccggcgcatgcagatttgacgagctagcctccttggtactgacagcctgagggggctcccgggtgccgaacgtctggcccgggccagggaggctcccgggggagacgtcggcaggcctgggggtgtgggtcgaccctgagcagctgctcaggcagagccagtccacggagccaaagctggagggctgcaatatccactgttctgcagcctccactgctgatacccaggcacacagggcctggagtggacctccagcaaacaccaacaaacctgcagctgagggtcctgactgttagaaggaaaactaacaaacagaaaggacatccacaccaaaaccccatctgtacgtcaccatcatcaaagaccaaaggatcaaattcacacataacaatattaaccttaaatgtaaatgggctaaatgctccaattaaaagacacagactggcaaattggataaagagtcaagacccatcagtgtgctgtattcaggagacccatctcacgtgcagagacacacacaggatcaaaataaagggatggagggagatctaccaagcaaatggaaaacaaaaaaaggcaggggttgcaatcctagtctctgataaaacggactttaaaccaacaaagatcaaaagagacaaagaaggccattacatgatggtaaagggatcaattcaacaagaagagctaactaccctaaatatatatgcacccaatacaggagcacccagattcataaagcaagtccttagagacctacaaagagacttagactcccacacattaataatgggagactttaacaccccactgtcaacattagacagatcaacgagacagaaagttaacaaggatatccaggatttgaactcagctctgcaccaagtggacctaatagacatctacagaactctccaccccaaatcaacagaatatacattcttctcagcactacaccacatttattccaaaattgaccacatagttggaagtaaagcactcctcagcaaatataaaacaacagaaattataacaaactgtctctcagaccacagtgcaatcaaactcgaactcaggattaagaaactcactcaaaaccgctcaactacatggaaactgaacaacctgctcctgaatgactactgggtacataacaaaatgaaggcagaaataaatacattatttgaaaccaacgagaacaaagacacaacataccagaatctctgggacacattcaaagcagtgtgtagagggaaattcatagcactaaatgcccacaagagaaagcaggaaagatctaaaattgacaccctaacatcacaattaaaagaactagagaagcaagaacaaacacattcaaaagctagcagaaggcaagaaataactaagatcagagcaaaactgaaggaaatagagacacaaaaaatccttcaaaaaatcaatgaatccaggagctggttttttgaaaagatcaacaaaattgatagaccactagcaagaccaataaagaagaaaagagagaagaatcaaatagatgcaataaaaaatgataaaggggatatcaccactgatcccacagaaatacaaactaccatcagagaatactataaacacctctatgcaaataaactagaaaatctagaagaaatggataaattcctcaacacatacaccctcccaagactaaaccaggaagaagttgaatctctgaataaaccaataacaggctctgaaattgaggcaataattaatagcttaccaatcaaaaaaagtccaggaccagatggattcatagccaaattccaccagaggtacaaggaggagctggaggccagcatcatcctgataccaaagcctggcagagacacaaccaaaaaagagaattttagaccaatacccctgatgaatattgatgcaaaaatcctcaataaaatactggcaaaccgaatccagcagcacatcaagaagcttatccaccatgatcaagtgggcttcatccctgggatgcaaggctcgttcaacatatgcaaatcaataaacgtaatccaggatataaacagaacgaatgacaaaaaccatatgattatctcaatagatgcagaaaaggcctttgacaaaattcaacaacccttcattctaaaaactctcaataaattaggtattgatgggacgtatctcaaaataataagagctatctatgacaaacccacagccaatatcatactgaatgggcaaaaactggaagcattccctttgaaaactggcacaagacaggggtgccctctctcaccactcctattcaacatagtgttggaagttctggccagggcaatcaggcaggagaaggaaataaagggcattcaattaggacaagaggaagtcaaattgtccctgtttgcagatgacatgattgtatatcgagaaaaccccatcgtctcaacccaaaatctccataagctgataagcaacttcagcaaagtctcaggatacaaaatcaatgtgcaaaaatcacaagcatttttatacaccaataacagacaaacagagagccaaatcatgagtgaactcccattcacaattgcttcaaagagaataaaatacctaggaatccaacttacaagggatgtgaaggatctcttcaaggagaactacaaaccactgctcaaggaaataaaagaggatacaaacaaatggaagaacattccatgctcatgggtaggaagaatcaatatcgtgaaaatggccatactgcccaaggtaatttatagatttaatgccatccccatcaagctaccaatgactttcttcacagaattggaaaaaactactttaaagttcatatggaaccaaaaaagagcccgcattgccaagtcaatcctaagccaaaggaacaaagctggaggcatcacactacctgacttcaaactatactacaaggctacagtaaccaaaacagcatggtactggtaccaaaacagagatatagaccaatggaacagaacggagccctcagaaataatgccacatatctacaaccatctgatctttgacaaacctgacaaaaacaagaaatggggaaatgattccctatttaataaatggtgctgggaaaactggctagccatatgtaggagaaagctgaaactggatcccttccttacaccttatacaaaaattaattcaagatggattaaagacttaaatgttagacctaaaaccataaaaaccctagaagaaaacctaggcaataccattcaggacataggcatgggcaaggacttcatgtctacaacaccaaaagcaatggcaacaaaagccaaaattgacaaatgggatctaattaaactaaagagcttctgcacagcaaaagaaactaccatcacagtgaacaggcaacctacagaatgggagaaaatttttacaatctacccatctgacaaagggctaatatccagaatctacaaagaactcaaacaaatttacaagaaaagaacaaacaaccccatcaacaagtgggtgaaggatatgaacagacacttctcaaaagaagacatttatacagccaaaaggcacatgaaaaaatgctcatcatcactggccatcagagaaatgcaaatcaaaaccacattgagataccatctcataccagttagaatggcgatcattaaaaagtcaggaaacaacagaccaagctccaatgtcttctctgtgaaactttctgagatccaatccttggctctcatagagactaggtgcttaatgaatgctgatgaacagggtgtgccactgattcaagaaatgctggaatcttgggcaagtatttgcaaagttcccaagtatccaaatgccgaagcagtgcggccagaagagcaaacaccccacctgcacccaggtgaaataaacagccatgttgctcacacaaagcttgtttggtggtctcttcacacggacacgcatgaaatttggtgccgtgactcggatcgggggacctcccttgggagatcaatcccctgtcctcctgctctttgctccgtgagaaagatccacctacgacctcaggtcctcagaccgaccagcccaagaaacatctcaccaatttcaaatccgcacacaagaacttccaaacgcctgaaccgcagcggccaggcgttcctccagaacctccttccccaggagcttgctacaagtgccagaaatctgaccaccaggccaaggaatgcctgcagcccaggattcctcctaagccgtgtcccatctgtgcgggaccccactggaaattggactgttcagctcacctggcagccactctcagagcccctggaactctggcccaaggctctctga

SEQ ID NO: 19854 - DNA, 6458 bp, Homo sapiens
  SIMILAR (2714)..(4384): 931254mologous to HERV-H/env62 envelope protein,accession number AJ289709,Smith-Waterman Score=2666.
taagcagagtagttaataaaaagcttttttttttcatgttttaaaaatgtgacgttgtcaggcctctgagcccaagctaagccatcatgtcctctgtaacctgcacgtacacatccagatggccggttcctgccttaactgatgacattccaccacaaaagaagtgaaaatggcctgttcctgccttaactgatgacactatcttgtgaaattccttctcctggctcatcctggctcaaaagctcccctactgagcaccttgtgacctccactcctgtctgccagagaacaacccccctttgactgtaattttcctttacctacccaaatcttataaaacggccccacccctatctcctttcgctgactcttttcagactcagcccgcctgcacccaggtgaaataaacagccttgttgctcacacaaagcctgtttggtggtctcttcacacggacgcgcatgaaatttggtgctgtgactcggatcgggggacctcccttaggagaccaatcccctgtcctcctgctctttgctccgtgacaaagatccacctacgacctcaagtcctcagacccaccagcccaagaaacatctcaccaatttcaaatccggctgctcctcaccaggccgagctaggtcccaatccttcctcagcctctgctcctccaccctataatctttttatcacctcccctcctcacacctggtctggcttaccgtttcgttccgtgactagccctccccctcctgcccagcaatttactcttaaaaaggtggctggagctgaaggcagtcaggatgatcgggaaagagttttttctctagcccaatctcacgctgataaccaccggcttcacgagccagacctccaggaaggcagtagagtagttccccaagaggatccccaatggaactctcaggcaaattccccagatctgcttggcttagcgactgaagatcgacgctgcccgatcgcctcggaagccccttggaccatcacagacgctgagcttcagctccttcagctatgctcactctttgttgagtctcccacaattaccattgttcctggcccggacttcaatccggcctcccacattattccggataccacacctgaccctcatgactgcatctctctgatccacctgacgttcaccccatttccccacatttccttcttccctgtttctcaccctgatcacacttggtttattgatggcagttccaccaggcctaattgccactcaccagcaaaggcaggatatgcaatagtatcttccacatctgttattgacgctaccgctctgcccccctccactacctctgagcaagccgaactagttgccttaactcaggccctcactcttgcaaaaggactatgcatcaatatttatactgactctaaatatgccttccatattctgcaccaccgtgtggtcacatgggctgaaagaggttacctcactacacaagggtcctccatcattaatgcctctttaataaaaactctgctcaaggctgctttacttccaaaggaagctggggtcattgactgtaaggggcatcaaaaggcatcagaacccattgctctaggcaacgcttatgctgataaggtggctagacaagcagctagctctccaacttctgtccctcatggccagtttttctccttcacatcagtcactcccacctactcccccgctgaaacttccacctatcaatctcttcccacacaaggcaaatggttcttagaccaaggaaaatatctccttccagcctcacaggcccattctattctgtcgtcatttcataacctcttccatgcagtttacaagccgctagcccgtctcttagaacctctcatttcctttccatcacggaaatctatcctcaaggagatcacttctcagtgttccatctgctattctactacccctcagggattgttcaggccccctccctttcctacacatcaagctcagggatttgtctctgcccaggactggcaaattgactttactcacatgccccgagtcagaaaactaaaatatctcttagtctgggtagacactttcactggatgggtagaggcctttcccacagggtctgagaaggccactgcagtcatttcttcccttctgtcagacataattcttcagtttggccttcccacctctatacagtctgataacagaccagcctttactagtcaaatcacccaagcagtttctcaggctcttggtattcagtggaaccttcatatctcttaccatcctcaatcttcaggaaaggtagaacagactaatggtcttttaaagacacacctcaccaaggtcagcctccaacttaaaaaggattggacagtacttttacctcttgcccttctcagaattagagcctgtcctcgagatgctacacggtacagtccatttgaacttttatatggatgcactttcttgcttggccccaacctcatcccagacaccagccctctagacgatcatcttccagtcctccaacaggctagacaggaaatttgccaggctgctaatcttctcttgcctactccagatccccagccatatgaagacaccctagctggacgatcagttcttgttaagaatctgaaccctcaaactctacaacctcgatggaccagaccctacttagtcatctgtagtaccctgactgctgtctgcctgcaggatcttccacactgggttcaccattccagaataaagctgtgtccatcaggcagccagcctaatccctcctcttcctcctggaagtcgcaagtactctcccccacttcccttaaactcactcatatttctgaagaacatgcctacacagctgtccccgccttacagacagactgggcaacatctcccatctccctacacctccgaacttcctttaacagccctcacctttaccctcctgaagaactcatttactttctagacaggtccagcaagacttccccagacatttcacatcagcaagctgccgccctccttcgcacttatttaaaaaacctttctccttatatcaactctactccccccatatttggacctctcacaacacaaactactattcctgtggccgctcctttgtgtatctcttggcaaagacccactggaattcccctaggtaatctttcaccttctcgatgttcctttactcttcatctccgaagtccaactacaaacatcaatgaaacaattggagccttccagctccatattacagacaagccctctatcaatactgacaaacttaaaaacattagcagtaattattgcttaggaagacacttgccctgtatttcactccatccttggctatcttccccttgctcatcagactctcctcccaggccctcttcttgtttacttatacccagccccgaaaataacagtgaaagattgctcgtagatactcgacgttttctcatacaccatgaaaatcgaaccttcccctctacgcagttaccccatcagtccccattacaacctctgacagctgccgccctagctggatccctaggagtctgggtacaagacacccctttcagcactccttctcacctttttactttacatctccagttttgcctcgcacaaggtctcttcttcctctgtggatcctctacctacatgtgcctacctgccaattggacaggcacatgtacactagtcttccttacccccaaaattcaatttgcaaatgggaccgaagagctccctgttcccctcatgacaccgacacaacaaaaaagagttattccactaattcccttgatggtcggtttaggactttctgcctccactgttgctctcggtactggaatagcaggcatttcaacgtctgtcatgaccttccgtagcctgtctaatgacttctctgctagcatcacagacatatcacaaactttatcagtcctccaggcccaagttgactctttagctgcagttgtcctccaaggacaactccgaggccttgacttactcactgctgaaaaaggaggactctgtatattcttaaatgaagagtgttgtttttacctaaatcaatctggcctagtgtatgacaacataaaaaaactcaaggatagagcccaaaaacttgccaaccaagcaagtaattatgctgaatccccttgggcactctctaattggatgtcctgggtcctcccaattgttagtcctttaatacccatttttctccttcttttatttggaccttgtatcttccgtttagtttctcaattcatccaaaaccgtatccaggccatcaccaatcattctatacgacaaatgtttcttctaacatccccacaatatcaccccttaccacaagacctcccttcagcttaatctctcccactctaggttcccacgctgcccctaatcccacttgaagcagccctgagaaacatcgcccattctctctctccataccaccccccaaaaattttcgccgccccaacacttcaacactattttgttttatttttcttattaatagaagaaggcaggaaatgtcaggcctctgagccccaagccaagccatcgcatcccctgtgacttgcacgtatatatacgcccagatgggcctgaagtaactgaagaattcacaaaagaagtgaatatgctctgccccaccttaactgatgaccttccaccacaaaagaagtgtaaatggccggtccttgctttaagtgatgacattaccttgtgaaagtccttttcctggctcatcctggctcaaaaatcacccccactgagcaccttgcgaaccccactcctgcccactgagcaccttgcgacccccactcctacccgccagagaacaaaccccctttgactgtaattttcctttactgacccaaatcctataaaacggccccacccttatcttcccttcgctgactctctttttggactcagcccgcctgcacccaggtgaaataaacagccatgttgctcacacaaagcctgtttggtggtctcttcacacggacgcgcatgaaatttagttgtatccataaggcatatggaggagactaattcctcttccaaagacatgtaccagagtcctggagaggctgagggctggaggtggaagaaaggctctgacaggggtcagaatctgttcaggaaacatagcaaatgcctgatacttttaattagagaaaggtttgaatctccacattcatatatttgcagtccagtgacctttcagtttttttatgcccaaagtgtcaagcatgttaatgttaccattgactgcctccctgaaggtgcagctaccaggggaactgccaggacttcaaagcccacaaccaaaagccagaaaacactaccaagtacaagccccggacactggacccagagcacaccctgggcatctgctctgagatcctctccctggacagagacagctgctccttcagaaacagaggagaccctgaacacaggcaggcctcctgagcttccagccagggccacagccacatggttcagtgcctcccacactctcccagccttggctaccaggagggtggccagaactcagtggttgacagctgacagacagacgtgggcttccatatcgtccgtgccctgggctcagaccatcagtgagaaaaaacctggagggtctctctgggaaactcgttcttccccaccgactactgcagggaccgaggaagccatgaacactacaagccttttggcgcctgctgctgagataatggccacacctggcagcccatcccaggccagccctacctcgggagcattcacccatggcacacagactccgagtccaaccaaggcaacagcccccagatatccacaaacaggtgatctctctgcagagtggccattcactgctggtgaagagccagtcctggtcccaagaccccatcaagtttcaaggtgtcctcagccactcttcaaggtgggagctatggcagctgctcctctcaccctggctattcagaggctcaacccatgcctgatggagctgtgccaattcttccagcaatgcctctgcatgagccagaggagtcccaggacagaggacatgagatactgtcttgaatactattcctggtttctgaagaatgcaacatatatctgtcagagggtgaaaagggtgtcccactcgcacaccttaaagcaaaagtgccttgagaatatctgcaagtctgtgtgaggccttgaaaataacactagggcataacaattacttcaggggatacgccatccaccctggctcttgtcccaagtgggctacatttgaagaattcacccaggctccagctagatcatcagttaatttaaagtggttattcttggaagtagcattttttttccctctcctgtgaatctgtgcaaaacattgaaggtagaagttttcttgttaaaaaaaaaggaattc

SEQ ID NO: 19855 - DNA, 666 bp, Homo sapiens; identical to SEQ ID NO: 2304
  SIMILAR (1)..(660): 951254mologous to Homo sapiens selenoprotein N,accession number AF166125,Smith-Waterman Score=1100.

SEQ ID NO: 19856 - DNA, 3061 bp, Homo sapiens
  SIMILAR (2707)..(1349): 761254mologous to Homo sapiens selenoprotein N,accession number AF166125,Smith-Waterman Score=1634.
aaccggccgccctttttttttttttttttttttttttaagccttctctaattttatttaccagggcatgttggggacaggggagggaagtgttagaggagtgacagggcagcccggggccctctcccaccctgagcctcgaggcctggtgggggacatgaactgcagaggcatcagataaggcctcagaaagcccaggccatcattttcccatgggaccaggctggcttcaatgtggaactggcccctcccagaagcagcaggagaagggctcgcatgggctgccccccgtcacctgtgcctgacaggaatgggggggaaggcagagaagagagcatcagacggccctccctccccattaaggggcaatgggggatggggaacacttccctccccaggaacacagggaaccctggctgaagctgggctgggctccatgccccccatcttggtctggaaggttcagaagggaattgagaacactcttggtttggaaaggcccttccctttcccacttttggggaaaacaggccaggggagagagggtgagggtgcccatgcccaaaaaaacaccccccaaatcccagatgccagactttggaacccaacatgtgggtttgaatctcaacctctaccctgagtgacccctgggcaagtcacttcacttcccttgagacttcaagtttcatcaagatgggaacaattgagcatcctgcctcacagggctttgtcgtgaggattaagtgagaaggtgcgtgtaatattaagcgatgaactggatgatacaaaattaagaacaaggctgggcactgattgctcacgcctgtaatcccagcactttgggaggctgaggcaggtggatcacctgaggtcagaagttccagatcagcctgaccaattatgttaaaccccatcttctacttaaaattccaaaaattagcccagcccatggtggcatgcacctgtaatccccagctactcgggaggctgaggcaagagaattgcttgaaccctgggaggtggaggttgcagtgagcccaagatcgagccatagcacttccagcctgggtgacagagcaagactccgtctcaaaacaaaacaaaacaaaacaaaattgagaacaagtctggctggggaaggctcagtggacacgcccaaggcaagtggggtaactcggcacataaaaggcccaggagtggctgcagagatgtctgccttcattcttcctctgccaggctgagtgagccccgggtgggagtgggcggcatctgcagtcttaaatgggctgaggaccactctggctctgaggcgtggggtctgtttaataagatcccgtccaggcactctagggctggaggatggggcaagcccacggacggagtccctccatacaggaactgcatgtaggtggccgtggacgggtcttcagaggtggatgagaagctgaagagaattgctctcgatttcctcgggcttcacggaggtgatgatccaagaagtagttggcattgatgtgatggaccacggtgccattgggcaggcagatcatcatctccacggggaagctgtacttctccaggtgcaggccagccagcttctggtgggacgagttctcctgtttgttttgcagttcctccagctccttcaccagggaccaggtgctgatgaagctctcgttgagcagggtgaggatgggcgaactttccaggacagtctcccggagagtccgccctgaacctcagcaggactggtcatccagggccccccacagcaggattgagtgcaccagcttgttctcagccttggctcggtcgaaggcctcagtgaacggcaagtaggagcccttcttgaaggggtacatggccacctccaggcgccgggcagcctcctcccagctcagctcctgctgccacttgatctcctcaaacacaaactgcaggggctcccctgaaggcaggtggctgtcgatcatgctgccatcctcatccaggatcacggagggcacagaggggcccgtggcctccagctccatctggatgggagcctcctgtgcgctcacctggggtatgtagccgatgtccacctccatgttggtgctttcactggcgccgtaaagccactccatgtccacattcagagacctgtggttgggcacgaagagccggaagtcgcggacgtgggtggcgtctttggagaggatgatgtggccggtgaactgagcaggggagaaccaaaaggggaagtcgggcggctcactgagctggaactcggcatggatccggaacatcacagtgtagtagaagtcgctgatggcagtcaggcaggccacagctccttgaggggcaaagcgggtcttcacaaagggccgagggtggaacatgctcaggagccggtggatgatgacctccttgcccttgggcggcggtggatagaagcggttgttggacagtctagccagtgaacatgctcagctcactggggatgatccacccagggctcacccagctcctggcctggcgggggaaggaagggctggaaagtggcgggtggccaaacactgcacttggtgagggcggcggctgtccagtttcggaggccggacagggcgaggcgggagacccctatggaatgccatctttgctcttggtcatggtctccgggagcagaaagctttgaatcgggcttctatggtgagcgtctcctcgctaagggtcaggggggcaactcctcctcctcgtagctggccgcgggagttgaccctgttagcttctcagcaatgggtttgaactcctcagggctgatgtacatatccccgtcagtgtccaaggaggaaaagagaaaaaggccatctgttcccaagggtcttcagcgccagttcctgccgcgcggccgcctgggcctcggcgtggcgggcgcagacccggacggcggcggcagcggcggcggccagcagggctccgagcagcgccagggaacgggcgcggcggcgcggtggcgcgggaggctgcgcggcggggccggggctgggcggcccgcgttggcccggccgggcccggcccat

SEQ ID NO: 19857 - DNA, 320 bp, Homo sapiens
  SIMILAR (125)..(319): 871254mologous to Homo sapiens putative p150,accession number U93565,Smith-Waterman Score=308.
cagttagaatggtgataattaaaaagtcagaaaataacagatgctggagaaaatgtggagaaataggaatgcttttaaactgttggtaggagtgtaaattagttcaaccagtgtggaagacagtgacccagcaatcccattactgggtatatacccaaaagattacatatcattctacggtaaagacacatgcacacatatgtttattgtggcactattcacaatagcaaagactgggaaccaacccaaatgcccatcaatgatagactggataaagaaaatgtggcacatatacaccatggaatactatgcagccataa

SEQ ID NO: 19858 - DNA, 1563 bp, Homo sapiens
  SIMILAR (499)..(1449): 791254mologous to Cloning vector pSacBII SacB,accession number U09128,Smith-Waterman Score=1251.
atgcccatcaatgatagactggataaagaaaatgtggcacatatacaccatgggatactatgcagccataacgccatagcgttgctgaccccgcggcttgactctagaggatcccccaaaaagaacaaacaaaatttccaagacatatgggattatgtaaaaagaccaaatttacgattgattggagcacctgaaagagatggggagaatggaaccaagttggagaacatgcttcaggatatcatccaggagcacttcctcaacctagcaagacaggccaacattcaaattcaggaaatccagagaactccagtaatatactccacgagaagatcaaccccaagacacataatcgtcagattctccaagagtgccttgggggcatacccccggctcggtctagagatacccctgacaccagtctgggcacagtccgacgtctacggagagaaagagagagaggaacaagaaaaggagaaggaaggccagaggatccccgacgccaacgatccgatcctgaaagatcagacgcaagaatggtccggttctgcaacctttacatctgacggaaaaatccgtttattctacactgactattccggtaaacattacggcaaacaaagcctgacaacagcgcaggtaaatgtgtcaaaatctgatgacacactcaaaatcaacggagtggaagatcacaaaacgatttttgacggagacggaaaaacatatcagaacgttcagcagtttatcgatgaaggcaattatacatccggcgacaaccatacgctgagagaccctcactacgttgaagacaaaggccataaataccttgtattcgaagccaacacgggaacagaaaacggataccaaggcgaagaatctttatttaacaaagcgtactacggcggcggcacgaacttcttccgtaaagaaagccagaagcttcagcagagcgctaaaaaacgcgatgctgagttagcgaacggcgccctcggtatcatagagttaaataatgattacacattgaaaaaagtaatgaagccgctgatcacttcaaacacggtaactgatgaaatcgagcgcgcgaatgtttttcaaatgaacggcaaatggtacttgttcactgattcacgcggtttcaaaatgacgatcgatggtattaactcacacgatattttacatgcgtgggttatgtatcaaactcttttaacgggccttacaagccggctggacaaaacggggctgtgctgcaaattgggtcttgatcccaacgatgtgacaattactttactctcactttcgcgtgccgcaagcccaagggaacaatgtggtttttccaagcttcttgacaaacagaggcttagcttgcatgcctgcaggtcgactctagaggatccccgacagctcctcactgggcattgcttgtgtggtttgagagggtccatgaccagtccccgtgttacacagttgtccctcggtgtctgtggaagattgattccaggaccctcaagtagataccaaaatcctgggatgctcaatcctccatctggccccctgtgtccttag

SEQ ID NO: 19859 - DNA, 633 bp, Homo sapiens
  SIMILAR (519)..(418): 521254mologous to Homo sapiens Amino acid sequence of a human secreted protein,accession number Y30709,Smith-Waterman Score=96.
atgagccttggtgtgtgccaagactgttgtattagtgaagccccagtcacagtatcagtggaagctgatccacatattgagggaaggttcttccgttttaagaattacgccagcaaaacaccctcccttaaattgcaaaggcagagccgcccttttcaagaaacatcccatcccacaggcattgaaaaaaggtcacctccgaatcttcagaaagcaactcaaccccacataatgtctgcaaaagaatacgccttcagtaggaagatgtatggaaagacaggaagaaagaagggagaagtaaaggtgagggagagaaaaggcaagggagcaggtagatctgacactatttacaatagcaaagacttggaaccaacccaaatgcccatcagtgatagattggataaagaaaatatggacatatacaccatgggatactatgcagccataaaaaaggatgagtttgtgtcctttgcaggaacaatggatgaagctgtaaaccaagggtattcttctagagctcgcacgcgccactggagtatgaaaaaaatactcctgcagctagctcggtgtctgcccaagtggccactcagttttgtgcttgaatcccagggccttggtggtgtaggcagctga

SEQ ID NO: 19860 - DNA, 776 bp, Homo sapiens
  SIMILAR (153)..(506): 851254mologous to Homo sapiens putative p150,accession number U93572,Smith-Waterman Score=570.
caaaaccacaatgagatactatctcacaccagttagaatggcaatcattaaaaagtcagaaaacaacagatgctggagaggatgtggagaaacaagaatgcttttacactgttggtttgagtgtaaactagttcaactattgtggaagacagtggtgattcctcaaggatgtagaactaaaaataccatttgacccagcgatcccattactgggtgtatacccaaaggattataaatcatgctactataaagacacatgcacacgtatgtttattgcggcactattcacaatagcaaagacttggaaccaacccaaatgtccatcagtgatagactggattaagaaaatgtggcatatatacaccatggaatactatgcagccataaaaaaggatgagttcgtgtcctttgcagggacatggatgaagctggaaaccatcattctcagcaaactatcgcaaggacaaaaaaccaaacaccgcatgttctcactcataagtgggagttgaacaatgagaacacatggacacagggaggggaacatcacacaccggtgcctgttgggaggttgggggcaaggggagggatagcattaggagaaatacctaatgcatgtgggacttaaaacctagatgatgggtcaataggtgcagcaaaccaccttggaacatgtatacctatgtaacaaacctgcaggttctgcacatgtaacccagaacttaaactataattaaaaaaacttttaaaataaataaataaaagtgcattccaaaaaa

SEQ ID NO: 19861 - DNA, 2448 bp, Homo sapiens; identical to SEQ ID NO: 7826
  SIMILAR (1933)..(311): 1001254mologous to Homo sapiens UDP-Galactose ceramide galactosyl transferase,accession number U30930,Smith-Waterman Score =2867.

SEQ ID NO: 19862 - DNA, 1947 bp, Homo sapiens; identical to SEQ ID NO: 5623
  SIMILAR (1)..(1833): 961254mologous to Homo sapiens unknown,accession number AF148856,Smith-Waterman Score=3109.

SEQ ID NO: 19863 - DNA, 2142 bp, Homo sapiens; identical to SEQ ID NO: 4221
  SIMILAR (799)..(1992): 901254mologous to Homo sapiens putative p150,accession number U93563,Smith-Waterman Score=1908.

SEQ ID NO: 19864 - DNA, 5130 bp, Homo sapiens; identical to SEQ ID NO: 2332
  SIMILAR (2614)..(4473): 941254mologous to Homo sapiens putative p150,accession number U93572,Smith-Waterman Score=3044.

SEQ ID NO: 19865 - DNA, 3819 bp, Homo sapiens; identical to SEQ ID NO: 3971
  SIMILAR (1084)..(2460): 931254mologous to Homo sapiens putative p150,accession number U93564,Smith-Waterman Score=2255.

SEQ ID NO: 19866 - DNA, 1698 bp, Homo sapiens; identical to SEQ ID NO: 3745
  SIMILAR (712)..(1686): 911254mologous to Homo sapiens ORF2 contains a reverse transcriptase domain,accession number M80344,Smith-Waterman Score= 1540.

SEQ ID NO: 19867 - DNA, 3450 bp, Homo sapiens; identical to SEQ ID NO: 13940
  SIMILAR (382)..(1734): 941254mologous to Homo sapiens unknown,accession number AF148856,Smith-Waterman Score=2207.

SEQ ID NO: 19868 - DNA, 2265 bp, Homo sapiens; identical to SEQ ID NO: 2285
  SIMILAR (946)..(2256): 951254mologous to Homo sapiens putative p150,accession number U93574,Smith-Waterman Score=2181.

SEQ ID NO: 19869 - DNA, 2529 bp, Homo sapiens
  SIMILAR (796)..(2523): 751254mologous to Homo sapiens putative p150,accession number U93563,Smith-Waterman Score=2211.
atgttctttgaaaccaatgagaacgaagatacatcataccagaatctcagggacacatttaaagtagtctttagatggaaaattatagctctaaatgcccacaagagaaagcaggaaagatctaaaattgataccctaacatcaaaattgaaagaactagagaagcaacagcaaacaaattcaaaagctagcagaagacatgaaataactaacatcagagcagaactgaaggagatagagacacaaaaaacccttcaaaaaatcaatgaatccgtgaactggttttttgaaaaaatcatcaaaatagatagactgctagccagactaataaagaagaaaagagagaagaatcaaatagattcaataaaaaatgatatagaggatatcaccactgatcctgtagaaacacaaactaccgtcagagaatattttaaacacctctacgcaaataaactagaaaatctagaagaaatggataaattcctggacacatacatcctcccaagtctaagccaggaagaagtagaacccctgaacagaccaataacaggttctgaaattgaggcaataattaatagcttaccaaccaaaaaaagtccaggaccagacagattcacagccaaattctaccagagaataaccaatacagagaagtgcttaaaggagctgatggagctgaaagccaaagctcgagaactacgtgaagaatgcagaagcctcaggagtcgatgcgatcaactggaagaaagggtttcagtgatggaagatgaaatgaatgaaatgaatgacggggagaatggaaccaagttggaaaacactctgcaggatattatccaggagaacttccccaaacgagcaaggcaggccaacattcagattcaggaaatacagagaatgccacaaagatactcctcgagaagagcaactccaagacatataattgtcagattcaccaaagttgaaatgaaggaaaaaatgttaagggcagccagagagaaagaaatacaaactaccatcagagaatactacaaacacctctacgcaaataaactagaaaatcgagaagaaatggataaattcctcgacacatacactctcccaagactaaacgaggaagaagtcgaatctctgaatacaccaataacaggctcagaaattgtagcaataatcaatagcttaccaaccaaaaagagtccaggaccagatggattcacagccgaattgtaccagagacaaacagagagccaaatcatgagtgagctcccattcacaattgcttcaaagagaataaaatacgtaggaatccgacttataagggacgtgaaggacctcttcaaggagaactacaaaccattgctcagtgaaataaaagaggatacaaacaagtggaagaacattccatgctcatgggtgggaagaatcaatatcgtgaaaatggccatactgcctaaggtaatttatagattcaatgccatccccatcaagctaccaatgcctttcttcacagaattggaaaaaactactttaaatttcatatggaaccaaaaaagagcccacatcgccaactcaatcctaagccaaaagaacaaagctggaggcatcacgctacctgacttcaaactatactacaaggctacagtaaccaaaacagcatggtactggtaccaaaacagagagatagatgaatggaacacaacagagccctcagaaataatgccacatatctacaactatctgatctttgacaaacctgagaaaaacaagcaatgggaaaaggattccctatttaataagtggtgctgggaaaactggctagccatatgtagaaagctgaaactggatcccttccttacaccttatacaaaaattaattcaagatggattaaagacttaaacgttagacctaaaaccataaaaaccctagaagaaaacctaggcaataccattcaggacataggcataggcgacgacttcatgtctaaaacaccaaaagcaatggcaacaaaagccaaaattgacagatgggatctaattaaactaaagagcttctgcacagcaaaagaaactaccatcagagtgaacaggcaacctacaaaatgggagaaaattttcgcaacctactcttctgacaaagggctaatatccagaatctacaatgaactcaaacaaatttacaagaaaaaaacaaacaaccccatcaaaaagtggacaaagaatatgaacagacacttctcaaaagaagacatttatgcagccaaaagacacatgaaaaaatgctcatcatcactggccatcagagaaatgcaaatcaaaaccacaatgacataccatctcacaccagttagaatggcaatcattaaaaagtcaggatacaacaggtgctggagaggatgtggagaaataggaacacttttacactgttggtgggactgtaaactagttcaaccattgtggaagtcagtgtggcgattcctcagggatctagaactagaaataccatttgacccagcaatcccattactggtataa

SEQ ID NO: 19870 - DNA, 3726 bp, Homo sapiens; identical to SEQ ID NO: 10240
  SIMILAR (892)..(2715): 971254mologous to Homo sapiens putative p150,accession number U93563,Smith-Waterman Score=3159.

SEQ ID NO: 19871 - DNA, 1026 bp, Homo sapiens
  SIMILAR (1)..(630): 901254mologous to Homo sapiens unknown,accession number AF149422,Smith-Waterman Score=986.
atgggagactttaacaccccactgtcaacattagacagatcaacgagacagaaagtcaacaaggatacccaggaattgaactcagctctgcaccaagcggacctagcagacatctacagaactctccaccccaaatcaacagaatatacatttttttcagcaccacaccacacctattccaaaactgaccacatactgggaagtaaagctctcctcagcaaatgtaaaagaacagaaattataacaaactatctctcagaccacagtgcaatcaaactagaactcaggattaagaatctcactcaaaaccgctcaactacatggaaactgaacaacctgctcctgaatgactactgggtacataacgaaatgaaggcagaaataaagatgttctttgaaaccaacgagaacaaagacacaacataccagaatctctgggacacattcaaagcagtgtgtagagggaaatttatagcactaaatgcccacaagagacagcaggaaagatccaaaattgacaccctaaaatcacaattaaaagaactagaaaagcaagagcaaacacattcaaaagctagcagaaggatcaacaaaattgatagaccgctagcaagactaataaagaaaaaaagagagaagaatcaaatagacacaataaaaaatgataaaggggatatcaccaccgatcccacagaaatacaaactaccatcagagaatactacaaacacctctatgcaaataaactagaaaatctagaagaaatggataaattcctggacacgtacactctcccaagactaaaccaggaagaagttgaatctctgaatagaccaataacaggagctgaaattgtggcaataatcaatagcttaccaaccaaaaagagtccaggaccagatggattcacagccaaattctaccagaggtacaaggaggaactggtaccattccttctgaaactattccaatcaatagaaaaagagggaatcctccctaactcattttatgaggccagcatcatctga

SEQ ID NO: 19872 - DNA, 1596 bp, Homo sapiens; identical to SEQ ID NO: 14737
  SIMILAR (31)..(1593): 941254mologous to Homo sapiens putative p150,accession number U93574,Smith-Waterman Score=2608.

SEQ ID NO: 19873 - DNA, 3171 bp, Homo sapiens; identical to SEQ ID NO: 7867
  SIMILAR (442)..(1884): 911254mologous to Homo sapiens putative p150,accession number U93569,Smith-Waterman Score=2277.

SEQ ID NO: 19874 - DNA, 2952 bp, Homo sapiens; identical to SEQ ID NO: 9112
  SIMILAR (904)..(2883): 841254mologous to Homo sapiens putative p150,accession number U93572,Smith-Waterman Score=2834.

SEQ ID NO: 19875 - DNA, 1800 bp, Homo sapiens; identical to SEQ ID NO: 10207
  SIMILAR (424)..(1797): 931254mologous to Homo sapiens putative p150,accession number U93563,Smith-Waterman Score=2235.

SEQ ID NO: 19876 - DNA, 2367 bp, Homo sapiens; identical to SEQ ID NO: 14244
  SIMILAR (1153)..(2319): 961254mologous to Homo sapiens putative p150,accession number U93568,Smith-Waterman Score=1910.

SEQ ID NO: 19877 - DNA, 2913 bp, Homo sapiens; identical to SEQ ID NO: 6966
  SIMILAR (34)..(1548): 521254mologous to Mus musculus reverse transcriptase,accession number U15647,Smith-Waterman Score=1275.

SEQ ID NO: 19878 - DNA, 4729 bp, Homo sapiens; identical to SEQ ID NO: 7861
  SIMILAR (1093)..(2538): 941254mologous to Homo sapiens putative p150,accession number U93564,Smith-Waterman Score=2460.

SEQ ID NO: 19879 - DNA, 1569 bp, Homo sapiens; identical to SEQ ID NO: 10063
  SIMILAR (145)..(1566): 941254mologous to Homo sapiens putative p150,accession number U93572,Smith-Waterman Score=2430.

SEQ ID NO: 19880 - DNA, 2796 bp, Homo sapiens; identical to SEQ ID NO: 6723
  SIMILAR (283)..(1662): 581254mologous to Mus musculus endonuclease/reverse transcriptase,accession number AF016099,Smith-Waterman Score=1421.

SEQ ID NO: 19881 - DNA, 2494 bp, Homo sapiens; identical to SEQ ID NO: 17173
  SIMILAR (3)..(1400): 981254mologous to Homo sapiens putative p150,accession number U93563,Smith-Waterman Score=2374.

SEQ ID NO: 19882 - DNA, 2907 bp, Homo sapiens; identical to SEQ ID NO: 6251
  SIMILAR (1)..(1632): 941254mologous to Homo sapiens putative p150,accession number U93563,Smith-Waterman Score=2643.

SEQ ID NO: 19883 - DNA, 3213 bp, Homo sapiens; identical to SEQ ID NO: 2322
  SIMILAR (1)..(1821): 851254mologous to Homo sapiens putative p150,accession number U93563,Smith-Waterman Score=2589.

SEQ ID NO: 19884 - DNA, 2055 bp, Homo sapiens; identical to SEQ ID NO: 6261
  SIMILAR (1)..(1473): 871254mologous to Homo sapiens putative p150,accession number U93563,Smith-Waterman Score=2207.

SEQ ID NO: 19885 - DNA, 2314 bp, Homo sapiens
  SIMILAR (1)..(2100): 961254mologous to Homo sapiens putative p150,accession number U93565,Smith-Waterman Score=3508.
atggataaattcctcgacacatacactctcccaagactaaaccaggaagaagttgaatctctgaacagatcaataacaggatcagaaattgtggcaatactcaatagtttaccaaccaaaaagagtccaggaccagatggattcacagctgaattctaccagaggtacaaggaggaactggtaccattccttctgaaactattccaatcaatagaaaaagagggaatcctccctaactctttttatgaggccagcatcatcctgataccaaagccgggcagagacacaagcaaaaaagagaattttagaccaatacccttgatgaatattgatgcaaaaatcctcaataaaatactggcaaaacgaatccagcagcacatcaaaaagcttatccaccatgatcaagtgggcttcatccctgggatgcaaggctggttcaatatacgcaaatcaataaatgtaatccagcatacaaacagagccaaagacaaaaaccacatgattatctcaatagatgcagaaaaagcctttgacaaaattcaacaactcttcatgctaaaaactcttaataaattaggtattgatgggatgtatctcaaaataagaagagctatctatgacaaacccacagccaatatcatactgaatgggcaaaaactggaagcattccctttgaaaactggcacaagacagggatgccctctctcaccactcctattcaacatagtgttggaagttctggccagggcaattaggcaggagaaggaaataaagggtattcaattaggaaaagaggaagtcaaattgtccctgtttgcagatgacatgattgtatatctagaaaaccccattgtctcagcccaaaatctccttaagctgataagcaacttcagcaaagtctcaggatacaaaatcaatgtacaaaaatcacaagcattcttatacaccaacaacagacaaacagagagccaaatcatgagtgaactcccattcacacttgcttcaaagagaataaaatacctaggaatccaacttacaagggatgtgaaggacctcttcaaggagaactacaaaccactgctcaacgaaataaaagaggatacaaacaaatggaagaacattccatgctcatgggtaggaagaatcaatatcgtgaaaatggccatactgcccaaggtaatttacagattgaatgccatccccatcaagctaccaatgcctttcttcacagaattggaaaaaactactttaaagttcatatggaaccaaaaaagagcccgcgttgccaagtcaatcctaagccaaaagaacaaagctggaggcatcacactacctgacttcaaactatactacaaggctatagtaaccaaaacagcatggtactggtaccaaaacagagatatagatcaatggaacagaacagagccctcagaaataacgccgcatatcaacaactatctgatctttgacaaacctgacaaaaacaagcaatggggaaaggattctctatttaataaatggtgctgggaaaacgggctagccatatgtagaaagctgaaactggatcccttccttacaccttatacaaaaattaattcaagatggattaaagacttaaacgttagacctaaaaccagaaaaaccctagaagaaaacctaggcattaccattcaggacataggcatgggcaaggacttcatgtctaaaacaccaaaagcaatggcaacaaaagacaaaatagacaaatgggatctaattaaactaaagagcttctgcacagcaaaagaaactaccatcagagtgaacaggcaacctacaaaatgggagaaaattttcgcaacctactcatctgacaaagggctaatatccagaatctacaatgaactcaaacagatttacaagaaaaaaacaaacaaccccatcaaaaagtgggcgaaggacatgaacagacacttctcaaaagaagacatttatgcagccaaaaaacacatgaaaaaatgctcatcatcactggccatcagagaaatgcaaatcaaaaccacaatgagataccatctcacaccagttagaatggcaatcattaaaaagtcaggaaacaacagcactattcacagtagcaaagacatggattcaacccaaatgtgcatcaatgatacactgtatgaagaaagtgtagaacatatacaccatgaaatacaatccagccataaaaaaggagttcacatcctttgcagcaatatggatggagctgaaagccactttcctaagcaaactaatgcaagaacagaaagccaaatactgcatgttctcactt

SEQ ID NO: 19886 - DNA, 2685 bp, Homo sapiens; identical to SEQ ID NO: 7862
  SIMILAR (1009)..(2544): 921254mologous to Homo sapiens putative p150,accession number U93572,Smith-Waterman Score=2525.

SEQ ID NO: 19887 - DNA, 2505 bp, Homo sapiens; identical to SEQ ID NO: 3499
  SIMILAR (1129)..(2499): 921254mologous to Homo sapiens putative p150,accession number U93572,Smith-Waterman Score=2170.

SEQ ID NO: 19888 - DNA, 2115 bp, Homo sapiens
  SIMILAR (220)..(1809): 931254mologous to Homo sapiens putative p150,accession number U93563,Smith-Waterman Score=2631.
atggtggaagatgaaggaaaagcaagcagtttcttcacaagaaagcgggtgagaaagagtgagtacggaactgccaaacactttaaaagccatcagatctcacttgactggggaaagatctgtttccagctgcctccagttgtttgcagaattcatctccttgtggttgtaggatggaagtccccattttcatgctggctttttggtgctgaggagtgttcccagctcctgaaggccacactgttggaagttctggcctgggcaattaggcaggagaaggaaataaagggtattcaattaggaaaagaggaagtccaattgtccctgtttgcagatgacatgattgtgtatctagaaaaccccattgtctcagcccaaaatctccttaagctgataagcaatttcagcaaagtctcaggatacaaaatcaatgtacaaaaatcacaagcattcttatacaccaataacagacaaacagagagccaaatcatgagtgaactcccactcacaattgcttcaaagagaataaaatacctaggaatccaacttacaagggatgtgaaggacctcttcaaggagaactacaaaccactgctcaacgaaataaaagatgatacaaagaaatgcatgaacattccatgctcatgggtaggaagaatcaatattgtgaaaatggccatactgcccaaggtaatttatacactcaatgccatccccatcaagctaccaatgactttcttcacagaattggaaaaaactactttaaagttcatatggaaccaaaaaagagcctgcattgccaagtcaatcataagccaaaagaaaaaagctggagacatcacgctacctgacttcaaactatactacaaggctacagtaaccagaacagcatggtactgctaccaaaacagagatataggtcaatggaacagaacagagccctcagaaataacgccgcatatctacaactatctgatctttgacaaacctgagaaaaacaagcaatggggaaaggattccctatttaataaatggtgctgggaaaactggctagccatatgtagaaagctgaaactggatcccttctttacaccttatacaaaaattaattcaaaatggattaaggacttaaatgttagacctaaaaccataaaaaccctacaagaaaacctaggcattaccattcaggacataggcatgggcaaggacttcatgtctaaaacaccaaaagcaatggcaacaaaagccaaaattgacaaatgggatctaattaaactaaagagcttctgcacagcaaaagaaactaccatcagagtgaacaggcaacccacaaaatgggagaaaattttcgcaagctactcatctgacaaagggctaatatccagaatctacaatgaactcaaacaaatttacaagaaaaaatcaaacaacccaatcaaaaagtgggcaaaggacatgaacagacacttctcaaaagagtacatttatgcagccaaaaaacacatgaaaaaatgctcatcatcactggccatcagagaaatgcaaatcaaaaccacaatgagataccatctcaccccagttagaatggcaatcattaaaaagtcaggaaacagcaaatgctggagaggatgtggagaaataggaacacttttacactgttggtgggactgtaaactagttcaacccttgtggaagtcactgtggcgattcctcaggcatctagaactagaaataccatttgacccagccatcccattactgggtatatacccaaaggactgtaaatcatgctgctataaagacacatgtgcactgggctccgtccagtccaaacttcccggtggctttgtttacactgtgagaggcaaacagcctactcaaggctcagtaatggtggatgcccctccccccaccaagctcgagcatctcaggtccacttcagactgccgtgctggcagcgagaatttcaagtcagtgggtcttagcttgctgggctcggtgtgggggagtaaacggttctgtcttgctggtgttccaggtgccactggagtacaaaataaaactcctgcagctatctcagtgtctgcccaaacggctgcccagttttctgcttga

SEQ ID NO: 19889 - DNA, 2382 bp, Homo sapiens
  SIMILAR (100)..(2169): 981254mologous to Homo sapiens putative p150,accession number U93572,Smith-Waterman Score=3549.
atggccttgtccacaaagagggaatggccctgcattgagttggatcctcacatccagcacacactgcatttcatcaatggcaatgccaaagtcatattcagactaaaccaggaagaagttgaatctctgaatagaccaataacaggctctgaaattgtggcaataatcaatagtttaccaaccaaaaagagtccaggaccagatggattcacagccgaattctaccagaggtacaaggaggagctggtaccattccttctgaaactattccaatcaatagaaaaagagggaatcctccctaactcattttatgaggccagcatcattctgataccaaagccgggcagagacacaaccaaaaaagagaattttagaccaatatccttgatgaacattgatgcaaaaatcctcaataaaatactggcaaaccgaatccagcagcacatcaaaaagcttatccaccatgatcaagtgggcttcatccctgggatgcaaggctggttcaatatacgcaaatcaataaatgtaatccagcatataaacagagccaaagacaaaaaccacatgattatctcaatagatgcagaaaaagcctttgacaaaattcaacaacccttcatgctaaaaactctcgataaattaggtattgatgggacgtatttcaaaataataagagctatctatgacaaacccaaagccaatatcatactgaatgggcaaaaactggaagcattccctttgaaaactgccacaagacagggatgccctctctcaccgctcctattcaacatagtgttggaagttctggccagggcaattaggcaggagaaggaaataaagggtattcaattaggaaaagaggaagtcaaattgtccctgtttgcagacgacatgattgtttatctagaaaaccccattgtctcagcccaaaatctccttaagctgataagcaacttcagcaaagtctcaggatacaaaatcaatgtgcaaaaatcacaagcattcttatacaccaacaacagacaaacagagagccaaatcatgagtgaactcccattcacaattgcttcaaagagaataaaatacctaggaatccaacttacaagggatgtgaaggacctcttcaaggagaactacaaaccactgctcaaggaaataaaagaggacacaaacaaatggaagaacattccatgctcatgggtaggaagaatcaatatcgtgaaaatggccgtactgcccaaggtaatttacagattcgatgccatccccatcaagctaccaatgactttcttcacagaattggaaaaaactactttaaagttcatatggaaccaaaaaagagcccgcatcgccaagtcaatcctaagccaaaagaacaaagctggaggcatcacactacctgacttcaaactatactacaaggctacagtaaccaaaacagcatggtactggtaccaaaacagagatatagatcaatggaacagaacagagccctcagaaataatgccgcatatctacaactatctgatctttgacaaacctgagaaaaacaagcaatggggaaaggattccctatttaataaatggtgctgggaaaactggctagccatatgtagaaagctgaaactggatcccttccttacaccttatacaaaaatcaattcaagatggattaaagatttaaacgttagacctaaaaccataaaaaccctagaagaaaacctaggcattaccattcaggacataggcgtgggcaaggacttcatgtccaaaacaccaaaagtaatggcaacaaaagccaaaattgacaaatgggatctaattaaactcaagagcttctgcacagcaaaagaaactaccatcagagtgaacaggcaacctacaacatgggagaaaattttcgcaacctactcatctgacaaagggctaatatccagaatctacaatgaactcaaacaaatttacaagaaaaaaacaaacaaccccatcaaaaagtgggcgaaggacatgaacagacacttctcaaaagaagacatttatgcagccaaaaaacacatgaagaaatgctcatcatcactggccatcagagaaatgcaaatcaaaaccactatgagatatcatctcacaccagttagaatggcaatcattcaaaagtcaggaaacaacagggacaacacaaaggaagcactgctgtgtaacaacttggtggctgaagtcttggaggccaaacaggctcagaagcttcaaggcaaagcagccgtcctcagcctctcaaaaatctatgcgatcacagagacaaatgctgagacacccaacaggaagatgaaaattaaactgaagagacccatgaccaaattgcacccaagcatccaaatgttggtg

SEQ ID NO: 19890 - DNA, 2745 bp, Homo sapiens; identical to SEQ ID NO: 14522
  SIMILAR (43)..(2433): 831254mologous to Homo sapiens putative p150,accession number U93563,Smith-Waterman Score=3353.

SEQ ID NO: 19891 - DNA, 2253 bp, Homo sapiens; identical to SEQ ID NO: 9126
  SIMILAR (172)..(1989): 941254mologous to Homo sapiens putative p150,accession number U93572,Smith-Waterman Score=3008.

SEQ ID NO: 19892 - DNA, 2985 bp, Homo sapiens; identical to SEQ ID NO: 7459
  SIMILAR (187)..(2682): 981254mologous to Homo sapiens putative p150,accession number U93572,Smith-Waterman Score=4352.

SEQ ID NO: 19893 - DNA, 4794 bp, Homo sapiens; identical to SEQ ID NO: 3980
  SIMILAR (1435)..(2874): 971254mologous to Homo sapiens putative p150,accession number U93563,Smith-Waterman Score=2534.

SEQ ID NO: 19894 - DNA, 2499 bp, Homo sapiens
  SIMILAR (166)..(2283): 971254mologous to Homo sapiens putative p150,accession number U93563,Smith-Waterman Score=3579.
atgttgaatattggcccccactctcttctggcttgtagggtttctgccgagagatccactgttagtctgatggtcttccctttgagggtaacccgacctttctctctggctgcccttaacattttttccttcatttcaactttggtgaatctgacaattatgtgtctagaaaatctagaagaaatggatacattcctcgacacatacactcttccaagactaaaccaggaggaagttgaatctctgaatagaccaataacaggacctgaaattgtggcaataatcaatagtttaccaaccaaaaagagtccaggaccagatggattcacagccgaattctaccagaggtacaaggaggaactggtaccattccttctgaaactattccaatcaatagaaaaagacggaatcctccctaactcattttataaggccagcatcattctgataccaaagccgggcagagacacaaccaaaaaagagaattttagaccaatatccttgatgaacattgatgcaaaaatcctcaataaaatactggcaaaccgaatccagcagcacatcaaaaagcttatccaccatgatcaagtgggcttcatccctgggatgcaaggctggttcaatatacgcaaatcaataaatgtaatccagcatataaacagagccaaagacaaaaaccacgtgattatcccaatagatgcagaaaaagcctttgacaaaattcaacaacccttcatgctaaaaactctcaataaattaggtattgatgggatgtatttcaaaataataagagctatctatgacaaacccacagccaatatcatactgaatgggcaaaaactggaagcattccctttgaaaactggcacaagacagggatgccctctctcaccgctcctattcaacatagtgttggaagttctggccagggcaattaggcaggagaaggaaataaagggtattcaattaggaaaagaggaagtcaaattgtccctgtttgcagacgacatgattgtatatctagaaaaccccattgtctcagcccaaaatcttcttaagctgataagcaacttcagcaaagtctcaggatacaaaatcaatgtacaaaaatcacaagcattcttatacaccaacaacagacaaacagagagccaaatcatgagtgaactcccattcacaattgcttcaaagagtataaaatacctaggaatccaacttacaagggatgtgaaggacctcttcaaggagaactacaaaccactgctcaaggaaataaaagaggacacaaacaaatggaagaacattccatgctcatgggtaggaagaatcaatatcgtgaaaatggccatattgcccaaggtaatttacagattcaatgccatccccatcaagctaccaatgactttcttcacagaattggaaaaaactactttaaagttcatatggaaccaaaaaagagcccgcatcgccaagtcaatcctaagccaaaagaacaaagctggaggcatcacactacctgacttcaaactatactacagggctacagtaaccaaaacagcatggtactggtaccaaaacagagatatagatcaatggaacagaacagagccctcagaaataacgccgcatacctacaactatctgatctttgacaaacctgagaaaaacaagcaatggggaaaggattccctatttaataaatggtgctgggaaagctggctagccatatgtagaaagctgaaactggatcccttccttacaccttatagaaaaatcaattcaagatggattaaagctttaaacgttagacctaaaaccataaaaaccctagaagaaaacctaggcattaccattcaggacataggcatgggcaaggacttcatgtccaaaacaccaaaagcaatggcaacaaaagccaaaattgacaaatgggatctaattaaactaaagagcttctgcacagcaaaagaaactaccatcagagtgaacaggcaacctaaaaaatgggagaaaattttcacaacctactcatctgacaaagggctaatatccagaatctacaatgaactcaaacaaatttacaagaaaaaaacaaacaaccccatcaaaaagtgggcgaaggacatgaacagacacttctcaaaagaagacatttatgcagccaaaaaacacatgaaaaaatgctcatcatcactggccaccagagaaatgcaaatcaaaaccacaatgagataccatctcacaccagttagaatggcaatcattaaaaagtcaggaaacaacagccagagaggcttttatgattctataaaaagccccacaaaggaatcctatgcagccataaaaaggaacgagatcatgtcctttgcaggctatggatggagctggacgctgttatccttagcaactaacacaggaacggaaaaccaaacactgcatattttcacttataagtgggagctgaacaatgagagcacatggatacatgaagggatgggg

SEQ ID NO: 19895 - DNA, 3259 bp, Homo sapiens
  SIMILAR (1039)..(2868): 941254mologous to Homo sapiens unknown,accession number AF149422,Smith-Waterman Score=3001.
atgtgggatgttcaagaagggcagaggccattatgcagtgcagggcaggggatagtgggagaacgaggagacgagatcagagaggaagcagctgtgcagtcaggcgatgaaggactgtggtccatggtgaggagtgtgggtctgaagccattggatggcacaccacaccacacctattccaaaattgaccacatagttggaagtaaaacactcctcagcaaatataaaagaacagaaattataacagactgtctctcagaccacagtgcaatcaaactagaactcaggattaagaaactcactcaaaaccgctcaactacatggaaactgaacaacctgctcctgaataactactgggtacataacgaaatgaaggcagaaataaagatgttctttgaaaccaacgagaacaaagacacaaaaaaccagaatctctgggacacattcaaagcagtgtgtagagggaaatttatagcactaaatgcccacaagagaaagcaggaaagatctaaaattgacaccctaacatcacaatcaaaagaagtagagaagcaagagcatacacactcaaaagctagcagaaggcaagaaataactaagatcagagcacaactgaaggaaatagagacacaaaaaacccttcaaaaaatcaatgaatccaggagctggttttttgaacagatcaacaaaattgatagactgctagcaagactaataaagaagaaaagagagaagaatcaaatagacacaataaaaaatgacaaaggggatatcaccaccgatcccacagaaatacaaactaccatcagagaatactataaacacctctacgcaaataaactagaaaatctagaagaaatggataaattcctcgacacatacactctcccaagactaaaccaggaagaagttgaatctctgaatagaccaataacgggctctgaaattgaggcaataattaatagcttaccaaccaaaaaaagtccaggaccagatggattcatagccgaattctaccaaaggtacaaggaggagctgcctggcagagacacaacgaaaaaagagaattttagaccaatatccttgatgaacattgatgcaaaaatcctcagtaaaatactggcaaaccgaatccagcaacacatcaaaaagcttatccaccatgatcaagtgggcttcatccatgggatgcaaggctggttcaacatacgaaaatcaataaatgtaatccagcatataaacagaaccaaagacaaaaaccacatgattatctcaatagatgcagaaaaggcctttgaaaaaattcaacaacccttcatgctaaaaattctcaataaattaggtatcgatgggacatatctcaaaataataagagctatctatgacaaacccacagccaatatcatactgaatggacaaaaactggaagcattccctttgaaaactggcacaagacagggatgccctctctcaccactcctattcaacatagtgtgggaagttctgaccagggcagtcaggcaggagaagggaataaagggcattcaattaggaatagaggaagtcaagttgtccctgtttgcagatgacatgattgtgtatctagaaaaccccatcatctcagcccaaaatctccttaagctgataagcaacttcagcaaagtctcaagatacaaaatcaatgtgcaaaaatcacaagcattcttatacaccaataacagacaaacagagagccaaatcatgagtgaactcccattcacaattgcttcaaagagaataaaatacctaggaatccaacttacaagggatgtgaaggagctcttcaaggagaactacaaaccactgctcaatgaaataaaagaggatacaaacaaatggaagaacattccatgctcatgggtaggaagaatcaatatcgtgaaaatggccatacttcccaaggtaatttatagattcaatgccatccccatcaagctaccaatgacttccttcacagaattggaaaaaactactttaaacttcttatggaaccataaaagagcccacactgccaagtcaatcctaagccaaaagaacaaaactggaggcatcatgctacctgacttcaaactatactacaaggctagagtaaccaaaacagcatggtactggtaccaaaacagagatgtagaccaatggaacagaacagagccctcagaaataatgctgcatatctacaactatctgatctttgacaaacctgagaaaaacaagcaatggggaaaggattccctatttaataaatggtgctgggaaaactggctagccatatgtagaaagctgaaactggatcccttccttacaccttatacaaaaattaattcaagatggattaaagacttaaatgttagacctaaaaccataaaaaccctagaagaaaacctaggcaataccattcaggacataggcatgggcaaggacttcatgtctaaaacaccaaaagcaatggcaacaaaaaccaaaattgacaaatgggatctaattcaactaaagagcttcttctgcacagcaaaagaaactaccatcagagtgaacaggcaacctacagaatgggagaaaatttttgcaacctactcatctgacaaagggctaatatctagaatctacaatgaactcaaacaaatttacaagaaaaaaacaaacaaccccatcaaaaagtggacaaacgatatgaacagacacttctcaaaagaagacatttatgcagccaaaaaacacatgaaaaaatgctcatcattaccggccatcagagaaatgcaaatcaaaaccacaatgagataccatctcacaccagttagaatcgcgatcattaaaaagtcaggaaacaacagcaaagtggatgatatccatgctatctgtagccttcttaaagactttcttcgaaacttcaaagaacctcttctgacctttcgcctaaacaaagcctttatggaagcagcagaaatcacagatgaagacaacagcatatctgccatgtaccaggctgttggtgaactgccccaggccaacagggacacattggttttcctcatgattcacttgcagagagtggctcagagtccatatactaaaatgaatgttgccaatctggctgaagtctttggctctacaatagtggcccatgctgtgcccaatccagaaccagtgacgatgttacaggacatcaagtgtcaacccaaggtggtcgagcgcctgccttccttgcccctggagtactgga

SEQ ID NO: 19896 - DNA, 3657 bp, Homo sapiens; identical to SEQ ID NO: 6045
  SIMILAR (163)..(1932): 951254mologous to Homo sapiens putative p150,accession number U93563,Smith-Waterman Score=2945.

SEQ ID NO: 19897 - DNA, 2394 bp, Homo sapiens
  SIMILAR (289)..(1869): 951254mologous to Homo sapiens putative p150,accession number U93564,Smith-Waterman Score=2634.
atggacacaataaaaaatgataaaggggatatcaccaccgatcccacagaaatacaaactaccatcagagaatactataaacacctctatgcaaataaactagaaaatctagaagaaatggataaattcctcgacacatatacccttccaagactaaaccaggaagaagttgaatctctgaatagaccagtaagaggctctgaaattgaggcaataattaatagcttaccaactgaaaaaagtccaggaccagatggattcacagccaaattctaccagagatgcagaaaagcctttgacaaaattcaacaacctttcatgctaaaaactctcaataaattaggtattgatgggacgtatttcaaaatgataagagctatctatgacaaacccacagccaatatcatactgaatgggcaaaaactggaagcattccccttgaaaactggcacaagacagggatgccctctctcaccactcctattcaacatagtgttggaagttctggccagggcaattaggcaggagaaggaaataaaaggtattcaattaggaaaagaggaagtcaaattgtccctgtttgcagacgacatgattgtatatctagaaaaccccatcgtctcagcccaaaatctccttaagctgataagcaacttcagcaaagtctcaggatacaaaatcaatgtacaaaaatcacaagcattcttatacaccaataacagacaaacagagagccaaatcatgagtgaactcccattcacaattgcttcaaagagaataaaatacctaggaatccaacttacaagggatgtgaaggacctcttcaaggagaactacaaaccactgctcaaggaaataaaagaggatacaaacaaatggaagaacattccatgctcatgggtaggaagaatcaatatcgtgaaaatggccatactgcccaaggtaatttacagattcaatgccatccccatcaagctaccaatgactttcttcccagaattggaaaaaactactttaaagttcatatggaaccaaaaaagagccctcatcgccaagtcaatcctgagccaaaagaacaaagccagaagcatcacgctacctgacttcgaactatactacaaggctacagtaaccaaaacagcctggtactggtaccaaaacagagatatagaccaatggaacagaacagagccctcagaaataatgccgcatatctacaactatctgatctttgacaaacctcacaaaaacaagcaatggggaaaggattccctatttaataaatggtgctgggaaaaatggctaaccatatgtagaaagctgaaactggatcccttccttacaccttatacaaaaattaattcaagatggattaaagacttacatgttagagctaaaaccataaaaaccctagaagaaaaactaggcaataccattcaggacataggcatgggcaaggacttcatgtctaaaccaccaaaagcaacggcagcaaaagccaaaattgacaaatgggatctaattaaactaaagaacttctgcacagcaaaagaaactaccatcagagtgaacaggcaacctacaaaatgggagaaaattttcacaacctactcatctgacaaagggctaatatccagaatctacaatgaactccagcaaatttacaagaaaaaaacaaacaaccccatcaaaaagtgggcgaaggacatgaacagacacttctcaaaagaagacatttatgcagccaaaaaacacatgaaaaaatgctcaccatcactggccatcagagaaatgcaaatcaaaaccacaatgagataccatctcacaccagttagaatggcaatcattaaaaagtcaggaaacaacaggagacatttggcagtgtctggagacatttctggctgtcacaacctagggaggaaagttgcaggtattgagtgggtcgagggtggtgatgctgctaaacatcctgcaaggcacaggataatagcccgcaacaaagaactgtcccaaaatgccaatcatgccaagcttgagaagccctgtatgaggtggtggcaagagttacagggaaaacaatccgagaaaggtcaaagggagtcccaggggcaaggtggagggggtgaggagttgttcagggaagagctcaccaggaagatgacatctgaacaaaaacctgcaaaaggagcagcggggagctgctgtagatatctgcaggaagagcatcataggacaggaaatgacaaatgtgaaggccctgagggaggaacatgttgggcaagttccgggaaagcaggagaccaatgtggcaggggcagagtgagcaaaaggaggaggagcagaaatgaaaatcttacggggcccagatgtgtcgagcgtcagcttgtgctctga

SEQ ID NO: 19898 - DNA, 1158 bp, Homo sapiens
  SIMILAR (1)..(1158): 1001254mologous to Homo sapiens protein phosphatase methylesterase-1,accession number AF157028,Smith-Waterman Score= 2017.
atgtcggccctcgaaaagagcatgcacctcggccgccttccctctcgcccacctctacccggcagcgggggcagtcagagcggagccaagatgcgaatgggccctggaagaaagcgggacttttcccctgttccttggagtcagtattttgagtccatggaagatgtagaagtagagaatgaaactggcaaggatacttttcgagtctacaagagtggttcagagggtccagtcctgctccttctgcatggaggaggtcattctgccctttcttgggctgtgttcacggcagcgattattagtagagttcagtgtaggattgtagctttggatctgcgaagtcatggtgaaacaaaggtcaagaatcctgaagatctgtctgcagaaacaatggcaaaagacgttggcaatgtggttgaagccatgtatggggaccttcctcctccaattatgctgattggacatagcatgggtggtgctattgcagtccacacagcatcatccaacctggtaccaagcctcttgggtctgtgcatgattgatgttgtagaaggtacagctatggatgcacttaatagcatgcagaatttcttacggggtcgtcctaaaaccttcaagtctctggagaatgctattgaatggagtgtgaagagtggccagattcgaaatctggagtctgcccgtgtctcaatggttggccaagtcaaacagtgtgaaggaattacaagtccagaaggctcaaaatctatagtggaaggaatcatagaggaagaagaagaagatgaggaaggaagtgagtctataagcaagaggaaaaaggaagatgacatggagaccaagaaagaccatccatacacctggagaattgaactggcaaaaacagaaaaatactgggacggctggttccgaggcttatccaatctctttcttagttgtcccattcctaaattgctgctcttggctggtgttgatagattggataaagatctgaccattggccagatgcaagggaagttccagatgcaggtcctaccccagtgtggccatgcagtccatgaggatgcccctgacaaggtagctgaagctgttgccactttcctgatccggcacaggtttgcagaacccatcggtggattccagtgtgtgtttcctggctgt

SEQ ID NO: 19899 - DNA, 2860 bp, Homo sapiens
  SIMILAR (520)..(2691): 941254mologous to Homo sapiens putative p150,accession number U93572,Smith-Waterman Score=3547.
atggctgacatgctaacatgggaatcctgtcttgaggagtcactccaagaggagtcaccattggtcactcactgtggccccagctgctgcatctctggacagtcgcctccaagctcagctcgtccatcctcagtgtccagtgcaatctctgtgttgatgctgcctcagaacaggaagctgcctcctgcctggacgtctcctggaatcttccccacagatctggtggtttactccatgtcacttcctcatgcccttgccagatataactgtgatgtatgtaaaagcatgctgcctccaagattgtatgctcctgaggaaaaagctcgtacctctccactttgtggaacctggtactcaccttcactaccactttgtggagcctggtgcaagaagaatgagaagaagagggaaagagagagagagagaaagagacagagagaggatatactttctggtgcctcttcgtataaggacactattcatattcaattaagacccccaccttatgacgtccttcaacaaatacaaactaccatcagagaatacttcaaacacctctatgcaaataaactagaaaatctagaagaaatggataaactcctcgacacatacaccctcccaagactaaaccaggaagaagttgaatctctgaatagactaataacaggctctgaaattgtggcaataatcaacagcttaccaaccaaaaagagtccaagaccagatggattcacagctgaattctaccagaggtacaaggaggaactggtaccattccttctgaaactattccaatcaatagaaaaagggggactcctccctaactcattttatgaggccagcatcatcctgatgccaaagctgggcagagacacaaccaaaaaagagaattttagaccgatatccctgatgaacattgatgcaaaaatcctcaataaaatactggcaaaccaaatccagcagcacatcaaaaagcttatccagcatgatcaagtgggcttcatccctgggatgcaaggctggttcaatatttgcaaatcaataaatgtaatccagcatataaacagaaccaaagacaaaaaccacatgactatctcaatagatgcaggaaaagcctttgacaaaattcaacaactcttcatgctaaaaactctcaataaattaggtattgatgggacgtatctcaaaataataagagctatctatgacaaacccacagccaatatcattctgaatggggaaaaactggaagcattccctttgaaaactggcacaagacagggatgccctctctcaccactcctattcaacatagtgttggaagttctggccagggcaattaggcaggagaaggaaataaagggtattcgattacgaaaagaggaagtcaaattgtccctgtttgcagatgacatgattgtatatctagaaaaccccatcatctcagcccaaaatctccttaagctgataagcaacttcagcaaaatctcaggatacaaaatcaatgtacaaaaatcacaagcattcttatacaccaacaacagacaaacagagagccaaatcatgagtgaactcctattcacaattgcttcaaagagaataaaatacctaagaatccaacttactaaggacgtgaaggacctcttcaagaagaactacaaaccactgctcaatgaaataaaagaggatacaaagaaatggaagaacattccatgctcatgggtaggaagaatcaatatcgtgaaaatggccatacggcccaaggtaatttatagattcaatgccatccccatcaagctaccaatgactttcttcacagaattggaaaaaactactttcaagttcatatggaaccaaaaaagagcccgcatcgccaagtcaatcctaagccaaaagaacaaagctggaggcatcacactacctgacttcaaactatactacaaggctacagtaaccaaaacagcatggtactggtaccaaaacaaagatatagatcaatggaacagaacagagccctcagaaataatgccgcatatctacaactatctgatctttgacaaacctgacaaaaacaagcaatggggaaaggattccctatttaataaatggggctgggaaaactggctagccatatgtagaaagctgaaactggatcccttccttacaccttatacaaaaattaattcaagatggattaaagatttaaacgttagacctaaaaccataaaaaccctagaaaaaaacctaggcattaccattcaggacataggcatgggcaaggacttcatgtctaaaacaccaaaagcaatggcaacaaaagccaaaattgacaaatgggatctaattaaactaaagagcttctgcacagcaaaagaaactaccatcagagtgaacaggcaacctacaaaatgggagaaaatttttgcaacctactcatctgacaaagggctaatatccagaatctacaatgaactcaaacaaatttacaagaaaaaaacaaacaaccccatcaaaaagtgggtgaaggacatgaacagacacttctcaaaagaagacatttgtgcagccaaaaaacacatgaaaaaatgctcatcatcactggccatcagagaaatgcaaatcaaaaccacaatgagatatcatctcacaccagttagaatggcaatcattaaaaagtcaggaaacaacagacgcacagcaactttaagtttgctgccagctatacgtcatgaaagggaagcttttcatcaaagggaagaagaaaaggaagggggaagaatcctacttttacaaaacagagtaattctttgctcctgctccctttgcccacatctctcacctgcgtccaaaccaaaacaca

SEQ ID NO: 19900 - DNA, 2956 bp, Homo sapiens; identical to SEQ ID NO: 10076
  SIMILAR (1159)..(2838): 941254mologous to Homo sapiens putative p150,accession number U93564,Smith-Waterman Score=2767.

SEQ ID NO: 19901 - DNA, 3359 bp, Homo sapiens
  SIMILAR (136)..(1584): 931254mologous to Homo sapiens putative p150,accession number U93569,Smith-Waterman Score=2322.
atgaataattcaatcaaggaaaaagtgaaactcagtttaactaaatgggaaatgcaaacaaaacctaacaataatactgttgatcttaaagatgcccaagaggtcaatctcacaagcacggattacagaaagcaacatgtcatgctgcctaccgaaatcaattcagacgactctcttttaaaaattggggttattagactggcaaattggataaagagtcaagacccatcagtgtgctgtaatcaggaaacccatctcacgtgcagagacacacataggctcaaaataaaaggatggaggaagatctaccaagcaaatggaaaacaaaaaaaggcaggggttgcaatcctagtctccgataaaacagacttcaaaccaacaaagatcaaaagagacaaagaaggccattacataatggtaaagggatcaattcaacaagaagagctaactatcctaaatacatatgcacccaatacaggagcacccagattcataaagcaagtcctgagtgacctacaaagagacttagactcctacacattaataatgggagactttaacaccccactgtcaacattagacagatcaacgagacagaaagtcaacaaggatacccaggaattgaactcagctctgcaccaagtggacctaatagacatctacagaactctccaccccaagtcaacagaatatacatttttttcagcaccacaccacacctattccaaaattgaccacatacttggaagtaaagctctcctcagcaaatgtaaaagaacagaaattataacaaactatctctcagaccacagtgcaatcaaactagaactcaggattaagaatctcattcaaaaacgctcaactacatggaaactgaacaaactgctcctgaacgactactgggtacataacgaactgaaggcagaaataaagatgttctttgaaaccaacgagaacaaagacacaacataccagaatctctgggacgcattcaaagcagtgtgtagagggaaatttatagcactaaacgcccacaagagaaagcaggaaagatccaaaattgacaccctaacattacaattaaaagcactagaaaagcaagagcaaacacattcaaaagctagcagaaggcaagaaataactaaaatcagagcagaactgaaggaaatagagacacaaaaaacccttcaaaaaattaatgaatccaggagctggttttttgaaaggatcaacaaaattgataaaccgctagcaagactaataaagaaaaaaagagagaagaatcaaatagacacaataaaaaatgatagaggggatatcaccaccgatcccacagaaatacagactaccatcagagaatactacaaacacctctatgcaaataaactagaaaatctagaagaaatggataaattcctcgacacatacactctcccaagactaaaccaggaagaagttgaatctctgaatagaccaataacaggatctgaaattgtggcaataatcaatagcttaccaacgaaaaagagtccaggaccagatggattcacagccgaattctaccagaggtacaagcaggaactgcatataaacagaaccaaagacaaaaaccacatgattatctcaatagatgcagaaaaggcctttgacaaaattcaacaacgcttcatgctaaaaactctcaataaattaggtattgatggggcgtatttcaaaataataagacctatctatgacaaacccacagccaatatcatactgaatgggcaaaaactggaagcattccctttgaaaactggcacaagacagggatgccctctctcaccactcctattcaacatagtgctggaagttctggccaaggcaattaggcaggagaaggaaataaagggtattcaattaggaaaagaggaagtcaaattgtccctgtttgcagacgacatgattgtatatctagaaaaccccattgtctcagcccaaaatctccttaagctgataagcaacttcagcaaagtctcaggatacaaaatcaatgtacaaaactcacaggcattcttatacaccaataacagacaaacagagagccaaatcatgagtgaactaccattcacagttgcttcaaagagaataaaatacctaggaatccaacttacaagggatgtgaaggacctcttcaaggagaactacaaaccactgctcaatgaaataaaagaggatacaaacaaatggaagaacgttccatgctcatgggtaggaagaatcaatatcgtgaaaatggccatactgcccaaggtaatttatagattcaatgccatccccatcaagctaccaatgactttcttcacagaattgggaaaaactactttaaagttcatatggaaccgaaaaagagcccacatcgccaagtcaatcctaagacaaaagaacaaagctggaggcatcacgctacctgacttcaaactatactacaaggctacagtaaccaaaacagcatggtactggtaccaaaacacagatatagatcaatggaacagaacagagccctcagaaataacgctgcatatctacaactatctgatctttgacaaacctgagaaaaacaagcaatggggaaaaggattccctatttaataaatggtgctgggaaaactggctagccatatgtagaaagctgaaactggatcccttccttacaccttatacaaaaatcaattcaagatggattaaagatttaaactttagacctaaaaccataaaaaccctagaagaaaacctaggcattaccattcaggacataggcatgggcaaggacttcatatccaaaacaccaaaagcaatggcaacaaaagccaaaattgacaaatgggatctaattaaactaaagagcttctgcacagcaaaagaaactaccatcagagtgaacaggcaacctacaacatgggagaaaattttcacaacctactcatctgacaaagggctaatatccagaatctacaatgaactcaaacaaatttacaagaaaaaaacaaacaaccccatcaaaaagtgggtgaaggacatgaacagacacttctcaaaagaagacatttatgcagccaaaaaacacatgattaaatgctccgcatcactggccatcagagaaatgcaaatcaaaaccactatgagatatcatctcacaccagttagaatggcaatcattaaaaagtcaggaaacaacagtgttcttaagagagaaggtcaaagaatagatatttctactgtttcatttccaatctgtttgtccgttgtccattcactgaagaacaggtactctctctacaacatcactgaagctgctcttgccaacgtccccagagaag

SEQ ID NO: 19902 - DNA, 3131 bp, Homo sapiens; identical to SEQ ID NO: 10112
  SIMILAR (297)..(2120): 971254mologous to Homo sapiens putative p150,accession number U93563,Smith-Waterman Score=3159.

SEQ ID NO: 19903 - DNA, 2419 bp, Homo sapiens
  SIMILAR (170)..(2203): 931254mologous to Homo sapiens putative p150,accession number U93563,Smith-Waterman Score=3325.
ccaggccatgaccttagagggaagatggcagcaatcccagagaagttctacaaaacagagagatgggacttcttttcccatggtagagcccacaaagactgaagagcccttcatgagctccctgccccctcatcctaaccaggccgcagagtggcaaagtggaagacctagaccaaaaacaggagctgaaattgtggcaataaccaatagcttaccaaccaaaaagagtccaggaccagatggattcacagcagaattctaccagaggtacaaggaggaactggtaccattccttctgaaactattccaatcagtagaaaaagagggaatcctccctaactcattttatgaggccagcatcatcctgctaccaaagccaggcagagacaaaaccaaaaaagagaattttagaccaatatccttgatgaacattgatgcaaaaatcctcaataaaatactggcaaaccgaattcagcagcacatcaaaaagcttatccaccatgatcaagtgggcttcgtccctgggatgcaaggctggttcaatatacgcaaatcaataaatgcaatccagcatataaacagaaccaaagacaaaaaccacatgattatctcaatagatgcagaaaaggcctttgacaaaattcaacaacccttcatgctaaaaactctcaataaattaggtattgatgggaagtatctcaaaataataagagctttctatgacaaacccacagccaatatcatactgaatgggcaaaaactggaagcattccctttgaaaactggcacaagacagggatgccctctctcaccactcctattcaacatagtgttggaagttctggacagggcaattaggcaggagaaggaaataaagggtattcaattaggaaaagaggaagtcaaattgtccctgtttgcagatgacatgattgtatatctagaaaaccccattgtctcagcccaaaatctccttaagctgataagcaacttcagcaaagtctcaggatacaaaatcaatgtacaaaaatcacaagcattcttacacaccaataacagacaaacagagagccaaatcatgagtgaactcccattcacaattgcttcaaagagaataaaatacctaggaatccaaattacaagggacgtgaaggacctcttcaaggagaactacaaaccactgctcaaggaaataaaagaggatacaaacaaatggaagaacattccatgctcatgggtaggaagaatcaatattgtgaaaatagccatactgcccaagataatttacagattaaatgccatccccatcaagctactaatgactttcttcacagaattggaaaaaactactttaaagttcatatggaaccaaaaaagagcccgcatcgccaagtcaatcctaagccaaaagaacaaagctggaggcatcacgctacctgacttcaaactatactacaagcctacagtaaccaaaacagcatggtactggcaccaaaacagagctatagagcaatggaacagaacagagccctcagaaataacgacacatatctacaactatctgacctttgacaaacctgagaaaaacaagcaatggggaaaggattccctatttaataaatggtgctgggaaaactggctagccatatgtagaaagctgaaactggatcccttccttacaccttatacaaaaatcagttcaaaatggattaaagacttaaacgttagacctaaaaccataaaaacccaagaagaaaacctaggcattaccattcaggacataggcatgggcaaggacttcatgtctaaaacacaaaaagcaatggcaacaaaagccaaaattgacaaaggggatctaattaaactaaagagcttctgcacagcaaaagaaactagcagcagtgtgaacaggcaacctacaaaatgggagaaaatttttgcaacctactcatctgacaaagggctaatatccagaatctacaatgaactcaaacaaattcacaagaaaaaaacaaacaaccccatcaaaaagtgggcaaaggatatgaacagacacttctcaaaagaagacatttatgcagccaaaaaacacatgaaaaactgttcaccatcactggccatcagagaaatgcaaatcaaaaccacaatgagataccatctcacaccacttagaatggcaatcattaaaaagtcaggaaacaacagttcactgaacaatgtgatgaaaggaaatgatgaactgggggattctgtctcccggtttcagaagcagacactgagcctcaaatctgctaagattgccctgtgtgagagtcttatctcctgtagagaaagagctaaaattgtggaaaaacagacacaagctcttatcatgagagtggctgacctgaaacaaaaggtgcatgcacagccttgccag

SEQ ID NO: 19904 - DNA, 3509 bp, Homo sapiens
  SIMILAR (1461)..(3320): 941254mologous to Homo sapiens putative p150,accession number U93572,Smith-Waterman Score=3044.
gatcaaattcacacataacaatattaaccttaaatgtaaatgggctaaatgctccaattaaaagacacagactggcaaattggataaagaggtcaagacccattcagtgtcctgtattcaggaaacccatctcacgtgcagagacacacataggctcaaaataaagggatggaggaaaatctaccaagcaaatggaaaacaaaaaaaaagcacggcttgcaatcctagtctctgataaaacagactttaaaccaacaaagatcaaaagagacaaagaaggccattacataatggtaaagggatgaattcaataagaagagctaactatcctaaatatatatgcacccaatacaggagcacccagattcataaagcaggtccttagagacctacaaagagacttagactcccacccaataataatgggagacttcaacaccccactgtcaacattagacagatcaatgagacagaaagttaacaaggatatccaggacttgaactcagctctgcaccaagcagacctaacagacatctacagaactctccaccccaagtcaacagaatatacattcttctcaccaccacatcacacttattccaaaactgaccacatagttggaagtaaagcactcgtcagcaaatgtaaaagaacagaaattataacaaactgtctctcagaccacagtgcaatcaaactagaactcaggattaagaaactcactcaaaaccgctcaactacatggaaactgaacaacctgctcctgaatgactactgggtacataacaaaatgaaggcagaaataaatacattatttgaaaccaacgagaacaaagacacaacataccagaatctctgggacacattcaaagcagtgtgtagagggaaattcatagcactaaatgcccacaagagaaagcaggaaagatctaaaattgacaccctaacatcacaattaaaagaactagagaagcaagaacaaacacattcaaaagctagcagaaggcaagaaataactaagatcagagcaaaactgaaggaaatagagacacaaaaaatccttcaaaaaatcaatgaatccaggagctggttttttgaaaagatcaacaaaattgatagaccactagcaagaccaataaagaagaaaagagagaagaatcaaatagatgcaataaaaaatgataaaggggatatcaccactgatcccacagaaatacaaactaccatcagagaatactataaacacctctatgcaaataaactagaaaatctagaagaaatggataaattcctcaacacatacaccctcccaagactaaaccaggaagaagttgaatctctgaataaaccaataacaggctctgaaattgaggcaataattaatagcttaccaatcaaaaaaagtccaggaccagatggattcatagccaaattccaccagaggtacaaggaggagctggaggccagcatcatcctgataccaaagcctggcagagacacaaccaaaaaagagaattttagaccaatacccctgatgaatattgatgcaaaaatcctcaataaaatactggcaaaccgaatccagcagcacatcaagaagcttatccaccatgatcaagtgggcttcatccctgggatgcaaggctcgttcaacatatgcaaatcaataaacgtaatccaggatataaacagaacgaatgacaaaaaccatatgattatctcaatagatgcagaaaaggcctttgacaaaattcaacaacccttcattctaaaaactctcaataaattaggtattgatgggacgtatctcaaaataataagagctatctatgacaaacccacagccaatatcatactgaatgggcaaaaactggaagcattccctttgaaaactggcacaagacaggggtgccctctctcaccactcctattcaacatagtgttggaagttctggccagggcaatcaggcaggagaaggaaataaagggcattcaattaggacaagaggaagtcaaattgtccctgtttgcagatgacatgattgtatatcgagaaaaccccatcgtctcaacccaaaatctccataagctgataagcaacttcagcaaagtctcaggatacaaaatcaatgtgcaaaaatcacaagcatttttatacaccaataacagacaaacagagagccaaatcatgagtgaactcccattcacaattgcttcaaagagaataaaatacctaggaatccaacttacaagggatgtgaaggatctcttcaaggagaactacaaaccactgctcaaggaaataaaagaggatacaaacaaatggaagaacattccatgctcatgggtaggaagaatcaatatcgtgaaaatggccatactgcccaaggtaatttatagatttaatgccatccccatcaagctaccaatgactttcttcacagaattggaaaaaactactttaaagttcatatggaaccaaaaaagagcccgcattgccaagtcaatcctaagccaaaggaacaaagctggaggcatcacactacctgacttcaaactatactacaaggctacagtaaccaaaacagcatggtactggtaccaaaacagagatatagaccaatggaacagaacggagccctcagaaataatgccacatatctacaaccatctgatctttgacaaacctgacaaaaacaagaaatggggaaatgattccctatttaataaatggtgctgggaaaactggctagccatatgtaggagaaagctgaaactggatcccttccttacaccttatacaaaaattaattcaagatggattaaagacttaaatgttagacctaaaaccataaaaaccctagaagaaaacctaggcaataccattcaggacataggcatgggcaaggacttcatgtctacaacaccaaaagcaatggcaacaaaagccaaaattgacaaatgggatctaattaaactaaagagcttctgcacagcaaaagaaactaccatcacagtgaacaggcaacctacagaatgggagaaaatttttacaatctacccatctgacaaagggctaatatccagaatctacaaagaactcaaacaaatttacaagaaaagaacaaacaaccccatcaacaagtgggtgaaggatatgaacagacacttctcaaaagaagacatttatacagccaaaaggcacatgaaaaaatgctcatcatcactggccatcagagaaatgcaaatcaaaaccacattgagataccatctcataccagttagaatggcgatcattaaaaagtcaggaaacaacaggaatatccagactgtgctcctactcaggatcccattccagggcctggttccttcccccagcgggcagacacatccagtaggcgaccagccagcagcgcatgtagacagcatcgacgccgataccaggctcagaggacagaaccatattccagaggagctggggagaggcgttgtctccaatccagttgag

SEQ ID NO: 19905 - DNA, 2413 bp, Homo sapiens
  SIMILAR (1137)..(2330): 901254mologous to Homo sapiens putative p150,accession number U93572,Smith-Waterman Score=1904.
atgggagactttaacaccccactgtcaacattagacagatcaatgagacagaaagttaacaaggatatccaggaattgaactcagctgtgcaccaagtggacctaatagacatctacagaactctccaccccaaatcaacagaatatacattcttcttagcaccacatcgtacttattccaaaattgaccacatagttggaagtaaagcactcctcagcaaatgtaaaagaacagaaattataagaaattgtctctcagaccacagtgcaatcaaactagaactcaggattaacaaactcactcaaaactgctcaactacatggaaactgaacaacatgctcctgaatgactactgggtacataatgagatgaaggcagaaataaagatgttctttgaaaccaatgagaacaaagacacaacatacaagaatctctgggacacatttaaagccagtgtatagagggaaatttatagcactaaatgcccacaagagaaagcaggaaagtatctaaaattgacaccctaacatcacaattgaaagaactagagaagcaagagcgggcaaattcaaaagctagcagaaggcaagaaataactaagatcagagcagaactgaaggagatcgagacacaaaaaacccttcaaaaaactaatgaatccaggagctggttttttgaaaggatcaacaaaattgataggccattagcaagactaataaagaagaaaagagagaagaatcaaatacagtcaataaaaaatgataaaggggatatcactaccaatgccacagaaatacaaactaccatcagagaatactataaacacctctatgcaattaaactagaaaatctagaagaaatggataaattcccatacacaaacaccctcccaagattaaatgaggaagaaattgaatccctgaatagaacaataacaggatctgaaattgaggcaataattaagagcctaccaaccaaaaaaagtccaggaccagatggattcacagccaaattctaccagaggtacaaagaggagctggtaccattccttctgaaactattccaatcaatagaaaaagagggaatcctccctaattcattttatgaggccagcatcatcctaataccaaagcctgtgttggaagttctagccagggcaatcaggcaggagaaagaaataaagggtattcatttaggaaaagaggaagtcaaattgtccctgtttgcagatgatatgattgtacatttagaaaatcccattttctcagcccaaaatctccttaagctgataagcaacttcagcaaagtctcaggatacaaaatcaatgtgcaaaaatcacaagcattcctatacaccaccaacaaacaaacagagagccaaatcatgagtgaactcccattcacaattgcttcaaagagaataaaatacctaggaatccaacttacaagggatgtgaaggacctcttcaaggagaactacaaaccactgctcaatgaaataaaaaaggacacaaacaaatggaagaacattccatgctcatggataggaagaatcaatatcgtgaaaatggccatactgcccaaggtaatttacagattcaatgccatccccatcaagctaccaatgactttcttcacagaattggaaaaaactactttaaagttcatatggaaccaaaaaagagcccacattgccaagacactcctaagcaaaaagaataaagctggaggcatcatgctacctgacttcaaactatactacaaggctacagtaaccaaaacagcatggtgttggtaccaaaacagagatatagaccaatggaacagaacagagccctcagaaataataccacacatctacaacaatctgatctttgacaaacctgacaaaaagaagaaatggggaaaggattcccaatttaataaatggtgctgggaaaactggctagccatatgtagaaagctgaaacgggatcccttccttacaccttatacaaaaattaattcaagatggattagcaacttaaatgttagacctaaaaccataaaaatcctagaagaaaacctaggcaataccattcaggacataggcataggcaaggacttcatgtctaaaacactaaaagcaatggcaacaaaagccaaaattgacaaatgggatctaattaaactaaagagcttctgcacagcaaaagaaactaccatcagagtgaacaggcaacctacagaatgggaaaaaatttttgcaatctactcatctgacaaaggcctaatatccagaatctacaatgaactccaacaaattcacacaaaaaaacaaacaaccccatcaaatgtgggcgaaggatgtgaacagacacttctcaaaaggagacatttatgcagccaacagacacatgagaaaatgctcat

SEQ ID NO: 19906 - DNA, 5316 bp, Homo sapiens
  SIMILAR (3083)..(5146): 851254mologous to Homo sapiens putative p150,accession number U93569,Smith-Waterman Score=3034.
atggtaaagggatcaattcatcaagaagagctaactatcctaaatatatatgcacccaatacaggagcacccagattcataaagcaagtcctgagtgacctacaaagagacttagacttccacacattaataatgggagactttaacaccccactgtcaacaatggacagatcaacgagacagaaagtcaacaaggatatccaggaattgaactcagctctgcaccaagcggacctaatagacatctacagaactctccaccccaaatcaacagaatatacattttattcagcaccacaccacacctattccaaaattgaccacatacttggaagtaaagctctccccagcaaatgtaaaagaacagacattataacaaactatctctcagaccacagtgcaatcaaactagaactcaggattaagaatctcactcaaaaccactcaactacatggaaactgaacaacctgctcctgaatgactactgggtacataacgaaatgaaggcagaaataaagatgttctttgaaaccaacgagaacaaagacacaacatacgagaatctctgggacgcattcaaagcagtgtgtagagggaaatttatagcactaaatgcccacaagagaaagcaggaaagatccaaaattgacaccctaacatcacaattaaaagaactagaaaagcaagagcaaacacattcaaaagctagcagaaggcaagaaataactaaaatcagagcagaacagatcaacaaaattgatagaccgctagcaagaataataaagaaaaaaagagagaagaatcaaatagacacaataaaaaatgataaaggggatgtcaccactgatcccacaggaatacaaactaccatcagagaattctacaaaaacctctatgcaaataaactagaaaatctagaagaaatggataaattccttgacacatacactctcccaagactaaaccaggaagaagttgaatctctgaatagaccaataacaggatctgaaattgtggcaataatcaatagcttaccaaccaaaaagagtccaggaccagatgaattcacagccgaattctgccagaggtacaaggcggaactgcatataaacagagccaaagaaaaaaaccacacgattatctcaatagatgcagaaaaggcctttgacaaaattcaacaacctttcatgctaaaaactctcaataaattaggtattgatgggacacatttcaaaataataagagctatctatgacaaacccacagccaatatcatactgaatgggcaaaaactggaagcattccctttgaaaaccggcacaagacagggatgccctctctcaccactcctattcaacatagtgttggaagttctggccagggcaattaggcaggagaaggaaataaagggtattcaattaggaaaagaggaagtcaaattgtccctgtttgcagatgacatgattgtatatctaggcaaccccactgtctcagcccaaaatctccttaagctgataagcaacttcagcaaagtctcaggatacaaaatcaatgtgcaaaaatcacaagcattcctacacaccaacaacagacaaacagagagccaaatcatgagtgaactcccattcacaattgcttcaaagagaataaaatacctaggaatccaacttacaagggatgtgaaggacctcttcaaggagaactataaaccgctgctcaaggaaataaaagaggatacaaacaaatggaagaacattccatgctcatgggtaggaagaatcaatatcgtgaaaattggccataatgcccaaggtaatttacagattcaatgccatccccatcaagctaccaatgcctttcttcacagaattggaaaaaactactttaaagttcatatggaaccaaaaaagagcccgcatcgccaagtcaatcctaagccaaaagaacaaagctggaggcatcacaccacctgacttcaaactatactacaaggctacagtaaccaaaacagcatggtgctggtaccaaaacagagatatagaccaatggaacagaacagagccctcagaaataacgccgcatatctacaactatctgatctttgacaaacctgagaaagacaagcaatggggaaaggattccctatttaataaacggtgctgggaaaactggctagccatatgtagaaagctgaaactggatccgttccttacaccttatacaaaaatcaattcaagatggattaaagacttaaaggttagacctaaaaccataaaaaccctacaagaaaacctaggctttaccattcaggacataggcatgggcaaggacttcatgtctaaaacaccaacagcaatgggaacaaaagacaaaattgacaaatgggatctaattaaactaaagagcttctgcacagcaaaagaaactaccatcagagtgaacaggcaacctacaaaatgggagaaaattttcacaacctactcatctgacaatgggctaatatccagaatctacaatgaactcaaacaaatttacaagaaaaaaacaaacaaccccatcaaacagtgggcaaaggacatgaacagacacttctcaatagaagacatttatgcagccaaaaaacacatgaaaaaatgttcatcgtcactggccatcagagaaatgcaaatcaaaaccacaatgagataccatctcacaccagttagaatggcaatcattaaaaagtcaggaaacaacagaaatcatcttgacttcaagcacattagaattctcggtatttgttatctggctagaagatttatcagccatgactacatctggtttcaagaaacagaaaacctgaaaaactatcgcctaaacaagcagcaggttttccttatcgttagtctacttgccctgaaagtagtacagatatgtaaatacctgagaggacctgcttatggcactgttagtagaccacagttgctgaaaatttccatttacagaataaacagcatagagaagaccttaaatgacctgatggagctgaaaaccatggtacgagaaatacgtgacgcatgcacaagcttcagtagccaattcaatcaagtggaagaaaggaaccaaagacaaattgtctcagtagatgaagaaaaagcctttgataaaattcaacagcgcttcatgctaaaaacgctcaataaattaggtattgatgggacgtatctcaaaataataagagctatctatgacaaacccacagccagtatcatactgaatgggcaaaaactggaagcattccctttgaaaactggcacaagacagggatgccctctctcaccactcctattcaacatagtgttggaagttctggccagggcaatcaggcaggagaaggaaataaagagcattcagttaggaaaagaggaagtcaaattgtccctgtttgcagatgacatgattgtatatctagaaaaccccactgtctcagcccaaaatctccttaagctgatgagcaacttcagcaaagtctcaggatacaaaatcaatgtgcaaaaatcacaagcattcttatacaccaataacagacaaacagagagccaaatcatgagtggactcccattcacaatcacttcaaagagaataacatacctaggaatccaacttacaagggatgtgaaggacctcttcaaggagaactacaaaccactgctcaaggaaataaaagaggatacaaacaaatggaagaacattccatgctcatgggtaggaagaatcaatatcgtgaaaatggccatactgcccaaggtaatttatagattcaacaccatccccatcaagctaccaatgactttcctcacagaattggaaaaaactactttaaagttcatatggaaccaaaaaagagcccacattgccaagtcaatcttaagccaaaagaacaaagctggaggcatcatgctacctgacttcaaactatactacaaggctacagtaaccaaaacagcatggtactggtaccaaaacagagatatagaccaatggaacagaacagagccctcagaaataatgccacatatatctacaactatctaatctttgacaaacctgagaaaaacaagcaatggggaaaggataccctatttaataaatggtgctgggaaaactggctagccatatgtagaaagctgaaactggatcccttccttacaccttatacaaaaattaattcaagatggattaaagacttaaatgttagacctaaaaccataaaaaaccctagaagaaaacctaggcaataccattcaggacataggcatgggcaaggacttcatgtctaaaacaccagaagcaatggcaacaaaagacaaaattgacaaatgggatctaattcaactaaagagcttctgcacagcaaaagaaaccaccatcagagtgaacaggcaacctacagaatgggaggaaatttttgcaacctactcatctgacaaagggctaatatccagaatctacaatgaactcaaacaaatttacaagaaaaaaacaaacaaccccatcaaaaagtgggcaaaggatatgaacagacacttctcagaagaagacatttatgcagccaaaaaacacatgaaaaaatgctcatcatcactggccatcagagaaatgcaaatcaaaaccacaatgagataccatctcacaccagttagaatggtgatcattaaaaagtcaggaaacaataggtgctggagaggatgtggagaaataggaacacttttacactgttggtgggactgtaaactagttcaaccattgtggaagtcggtgtggcaattcctcagggatctagaactagaaataccatttgacccagccatcccattactgggtatatacccagaggattataaaccatgctgctataaagacacatgcacacgtatgtttattgcggcactattcacaatagcaaagacttggaaccaacccaaatgtccaacaatgatagacgggattaagaaaatgtggcacatatacaccatggaatactatgcagccataaaaaaggatgagttcatgtcctttgtagggacatggatgaagctggaaaccatcattctcagcaaactatcgcaaggacagaaaaccaaacaccgcatgttctcactcatagtcaggaccctcagctgcaggtctgttggagtttactcgaagtccactccagaccctgtttgcctgagtatcagcagcagtggctgcagaacagcagatattagtgtatcacaaatgctactgcctgattgttcctctggaagttttgtctcagaggagtacccgaaggt

SEQ ID NO: 19907 - DNA, 2715 bp, Homo sapiens
  SIMILAR (1681)..(2712): 941254mologous to Homo sapiens putative p150,accession number U93574,Smith-Waterman Score=1699.
atggaggaagatctaccaagcaaatggaaaacaaaaaaaggcaggggttgcaatcctagtctctgataaaacagactttaaaccaacaaagatcaaaagagacaaagaaggccattacataatggtaaagggatcaattcaacaagaagagctaactatcctaaatatatatgcacccaatacaggagcacccacattcatacagcaagtcctgagtgatctacaaagagacttagactcccacacattaataataggagactttaacaccccactgtcaacatcagacagatcaacgagacagaaagtcaacaaggatacccaggaattgaactcagctctgcaccaagcagacctaatagacatctacagaaccctccaccccaaatcaacagaatatacatttttttcagcaccacaccacacctattccaaaattgaccacatacttggaagtaaagcactcctcagcaaatgtaaaagaacagaaattataacaaactatctctcagaccacagtgcaatcaaactagaactcatgattaagaatctcactcaaaaccactcaaccatatggaaactgaacaacctgctcctgaatgactactgggtacataaggaaatgaaggcagaaataaagatgttctttgaaaccaacgagaacaaagacacaacataccagaatctctgggacacattcaaagcagtgtgtagagggaaatttatagcactaaatgcccacaagagaaagcaggaaagatccaaaattgacaccctaacatcacaattaaaagaactagaaaagcaagagcaaacactttcaaaagctagcagaaggcaagaaataactaaaatcagagcagaactgaaggaaatagagacacaaaaaacccttcaaaaaattaacgaatccaggagcaggttttttgaaaggatcaacaaaattgatagatagatcactagcaagagtaataaagaagaaaggagagaagaatcaaatagacacaataaaaaatgataaaggggatatcaccaccgatcccacagaaatacaaactaccatcagagaatcctataaacacctctatgcaaataaactagaaaatctagaagaaatggataaattcctcgacacatacaccctcccaagactaaaccaggaagaagttgaatctctgaatagaccaataacaggctctgaaattgtggcaatagtcaatagcttaccaaccaaaaagagtccaggaccagatggattcacagccgaattctaccagaggtacaaggaggaactagtacccttccttctgaaactcttgcaatcaatagaaaaagagggaatcctccctcactcattttatgaggccagcatcatcctgataccaaagcctggcagagacacaacaaaaaaaagagaattttagaccaatatctttgatgaacatcgatgcaaaaatcctcaataaaatactggcaaaccaaatccagcagcacatcaaaaagcttatccaccatgatcaagtgggcttcatccctgggatgcaaggctggttcaatacatgcaaatcaataaatgtaatccagcatataaacagaaccaaagacaaaaaccacatgattatctcaatagatgcagaaaaggcctttgacaaaattcaacaacccttcatgctaaaaactctcaataaattagtgttggaagttctggccagggcaattaggcaggagaaggaaataaagggtattcaattaggaaaagaggaagtcaaattgtccctgtttgcagatgacatgattgtagatctagaaaaccccattgtctcagcccaaaatctccttaagctgataagcaacttcagcaaagtctcaggatacaaaatcaatgtacaaaaatcacaagcattcttatacaacaataacagacagacagagagccaaatcatgagtgaactcgcattcacaattgcttcaaagagaataaaatacctaggaatccaacttacaagggacgtgaaggacctcttcaacgagaactacaaaccactgctcaatgaaatacaagaggatacaaacaaatggaagaacattccatgctcatgggtaggaagaatcaatatcgtgaaaatggccatactgcccaaggtaatttatagattcaatgccatccccatcaagctaccaatgactttcttcacagaattggaaaaaactactttaaagttcatatggaaacaaaaaagagcccgcatggccaagtcaatcctaagccaaaagaacaaagctggaggcatcacgctacctgacttcaaactatactacaaggctacagtaaccaaaacagcatggtactggtaccaaaacagagatatagatcaatggaacagaacagagccctcagaaataatgctgcatatctacaactatctgatctttgacaaacctgagaaaaccaagcaatggggaaaggattccctatttaataaatggtgctgggaaaactggctagccatatggagaaagctgaaactggatcctttccttacaccttatacaaaaattaattcaagatggattaaagacttaaacgttagacctaaaaccataaaaaccctagaagaaaacctaggcattagcattcaggacataggcatgggcaaggacttcatgtctaaaacaccaaaagcaatggcaagaaaagccaaaattgacaaatga

SEQ ID NO: 19908 - DNA, 4555 bp, Homo sapiens
  SIMILAR (1147)..(4314): 651254mologous to Homo sapiens putative p150,accession number U93563,Smith-Waterman Score=3204.
atggtggcctccagatcctctagagtcggtgtcttctatggaggtcaaaacagcgtggatggcgtctccaggcgatctgacggttcactaaacgagctctgcttatatagacctcccaccggggcgtacttggcatatgatacacttgatgtactgccaagtgggcagtttaccgtaaatactccacccattgacgtcaatggaaagtccctattggcgttactatgggaacatacgtcattattgacgtcaatgggcgggggtcgttgggcgatgcagccacttggccagctgggtcagctcgaacacctcggagaccggcgcgatcaggtcctcgaccgaagtggacgctcccgacgactcgatgctgctcagcacctgcgacatcgacctgaccgccgcccgcagggcatggttggggtgcttaccaaccaaaaagagcccaggaccagatggattcacagcagaattctaccagaggtgcaaggaggaactggtaccgttccttctgaaactattccaatcgatagaaaagagggaatccttcctaacttatttgatgaggccagcatcatcctgataccaaagcggggcagagacaccaccaaaaaagagaattttagaccaatatccttgatgaacattgatgcaaaaatcctcaataaaatactggcaaaccgaaaccagcagcacatcaaaaagcttatccaccatgatcaagtgggtttcatccctgggatgcaaggctggttcaatatatgcaaatcaataaatgtaatccagcatataaacagaaccaaagacaaaaaccacatgattatctcaatagatgcagaaaaggcctttgacaaaattcaacaacccttcatgctaaaaactcttaataaattaggtattgatgggacgtatctcaaaataataagagctatctatgacaaacccacagccaatatcatactgaatgggcaaaaactggaagcattccctttgaaaactggcacaagacagggatgccctctctcaccactcctattcaacatagtgttggaagttctggccagggcaatcaggcaggagaaggaaataaagggtattcaattaggaaaagaagaagtcaaattgtccctgtttgcagatgacatgattgtatatctagaaaaccccatcgtctcagcccaaaatctccttaagctaataagcaacttcagcaaagtctcagcatacaaaatcaatgtacaaaaatcacaagcattcttatacaccaataacagacaaacagagagccaaatcatgagtgtattcccattcacaattgcttcaaagagaataaaatacttaggaatccaacttgcaaggaatgcgaaggacctcttcaaggagaactacaaaccactgctcaatgaaataaaagaggatacaaagaaatggaagaacattccatgctcatgggtaggaagaatcaatatcgtgaaaatggccatactgcccaaggtaatttacagattcaatgccatccccatcaagctaccaatgactttcttcacagaattggaaaaaactactttaaagttcatatggaaccaaaaaagagcccgcatcgccaagtcaatcctaagccaaaagaacaaagctggaggcatcacgctacctgacttcaaactacactacaagattacagtaaccaaaacagcatggtactggtaccaaaacagagatatagatcaatggaacagaacagagccctcagaaataacgccgcatatctacaactatctgatctttgacaaacctgagaaaaacaagcaatggggaaaggattccctatttaataaatggtgctgggaaaactggctagccatatgtagaaagctgaaactggatcccttccttacaccttatacaaaaattcatccaagatggattaaagacttaaacgttagacctaaaaccataaaaaccctagaagaaaacctaggcaataccattcaggacataggcatgggcaaggacttcatgtctaaaacaccaaaagcaatggcagcaaaagccaaaattgacaaatgggatctaattcaactaaagagcttctgcacagcaaaagaaactaccatcagagtgaacaggcaacctacaaaatgggagaaaattttcgcaacctactcatctgacaaagggctaatatccagaatctacaaagaactcaaacaaatttacaagaaaaaaaaaacaaacaatcccatcaaaaagtgggcgaaggatatgaacagacacttctcaaaagaagacacttatgcagccaaaaaacacatgaaaaaatgctcagcatcactggccatcagagaaatgcaaatcaaaaccacataccatgctggaccagatggatttacagccgaattctaccagaggtacaaggaggaactggtaccattccttctgaaactattccaatcaatagaaaaagagggaatcctccctaactcattttatgaggccagcatcatcctgataccaaagcctggtagagacacaaccaaaaaagagaattttagaccaatatccttgatgaacattgatgcaaaaatcctcaataaaatactggcaaaacgaatccagcagcacatcaaaaagcttatccaccatgatcaagtgggtttcatccctgggatgcaaggctggttcaatatatgcaaatcaataaacgtaatccagcatataaacagaaccaaagacaaaaaccacatgattatctcaatagatgcagaaaaggcctttgacaaaattcaacaactcttcatgctaaaaactctcaataaattaggtattgatgggacgtatctcaaaataataagagctatctatgacaaacccacagccaatatcatactgaatgggcaaaaactggaagcattccctttgaaaactggcacaagacagggatgccctctctcaccactcctattcaacatagtgtgggaagttctggccagggcaatgaggcaggagaaggaaataaagggtattcaattaggaaaagaggaagtcaaattgtccctgtttgcagacgacatgattgtgtatctagaaaaccccattgtctcagcccaaaatctccttaagctgataagcaacttcagcaaagtctcaggatacaaaatcaatgtacaaaaatcacaagcattcttatacaccaataacagacaaacagagagccaaatcatgagtgaactcccattcacaactgcttcaaagagaataaaatacctaggaatccaacttacaagggatgagaaggacctcttcaaggagaactacaaaccactgctcaatgaaataaaagaggatacaaagaaatggaagaacattccatgctcatgggtaggaagaatcaatatcgtgaaaatggccatactgcccaaggtaatttatagattcaatgccatccccatcaagctaccaatgactttcttcacagaactggaaaaaactaccttaaagttcatatggtaccaaaaaagagcccgcatcaccaagtcaatcctaagccaaaggaacaaagctggagacatcacgctacctgacttcaaactatactacaaggctacagtaaacaaaacagcatggtactggcaccaaaacagacatatagatcaatggaacagaacaaagccctcagaaataacgctgcatatctacaactatctgttctttgacaaccctgacaaaaacaagaaatggggaaaggattccctatttaataaatggtgctgggaaaactggctagccatatgtagaaagctgaaactggatcccttccttacaccttatacaaaaattaattcaagatggattaaagacttaaacattagacctaaaaccataaaaaccctagaagaaaacctaggcattaccattcaggacataggcatgggcaagtacttcatgactaaaacaccaaaagcaatggcaacaaaagccaaaattgacaaatgggatctaattaaactaaagagcttctgcacaggcaaagaaactaccatcagagtgaacaggcaacctacaaaatgggagaaaattttcgcaacctactcatctgacaaagggctaatatccagaatctacaatgaactcaaacaaatttacaagaaaaaaacaaacaaccccatcaaaaagtgggcgaaggacatgaacagacacttctcaaaagaagacatttatgcagccaaaaaacacatgaaaaaatgctcaccatcactggccatcagagaaatgcaaatcaaaaccacaatgagataccatctcacaccaacccacttattgtcattggaattgaagaatgtctcagaggaaaagaaaaacttgaaacattatactattggaattcagacacggaccaccaggtctgatggctggggtggccgtaatggaagtcagaccacaaaaaggagcaacccagcttctgagagaacatttcagctaaagcataagttgatagatgtcacaatccaagttcttttagatttccacgcaggaacttcagagttggtgacaagaattg

SEQ ID NO: 19909 - DNA, 4354 bp, Homo sapiens
  SIMILAR (2509)..(4206): 921254mologous to Homo sapiens putative p150,accession number U93564,Smith-Waterman Score=2770.
atgggagactttaacaccccactgtcaacattagacagatcaatgagacagaaagtcaacaaggatacccaggaattgaactcagctctgcaccaagcaaacctaatagacatctacagaactctccaccccaaatcaacagaatatacatttttttcagcaccacaccacacctattccaaaattgaccacatacttggaagtaaagctctcctcagcaaatgtaaaagaacagagattataacaaactatctctcagaccacactgcaatcaaactagaactcaggattaagaatctcactcaaaaccgctcaactacatggaaactgaacaacctgctcctgaatgactactggatacataacgcaatgaaggcagaaataaagatgttctttgaaaccaacgagaacaaagacacaacataccagaatctctgggacacattcaaagcagtgtgtagagggaaatttatagcactaaatgcccacaagagaaagcaggaaagatccaaaattgacaccctaacatcacaattaaaagaactagaaaagcaagagcaaacacattcaaaagatagaagaaggcaagaaataactaaaatcagagcagaactgaaggaaatagagacacaaaaaacccttcaaaaaattaatgaatccaggagctggttttttgaaaggatcaacaaaattgatagaccgctagcaagactaataaagaaaaaaagagagaagaatcaaatagacacaataaaaaatgataaaggggatatcaccaccgatcccacagaaatacaaactaccatcaggagaatactacaaacacctctacgcaaataaactagaaaatctagaagaaatggataaattcctcgacacatacactctcccaagactaaaccaggaagaagttgaatctctgaatagaccaaataacagggatctgcaattgtggcaataatcaatagtttaccaaccaaaaagagtccaggaccagatggattcacagccgaattccaccagaggtacaaggaggaactggtaccattccttctgaaactattccaatcaatagaaaaagaaggaatcctccctaactcattttatgaggccagcatcattctgataccaaagccgggcagagacacaaccaaaaaagagaattttagaccaatatccttgatgaacattgatgcaaaattcctcaataaaatactggcaaaacgaatccagcagcacatcaaaaagcttatccaccatgatcaagtgggcttcatccctgggatgcaaggctggttcaatatacgcaaatcaataaatgtaatccagcatataaacagagccaaagacaaaaaccacatgattatctcaatagatgcagaaaaagcctttgacaaaattcaacaacccttcatgctaaaaactctcaataaattagaattggaagaaactactgtaaagttcatatggaaccaaaaaagagcccacatcgccaagtcaatcctaagccaaaagaacaaagctggaggcatcacactacgtgacttcaaactatactacaaggctacagtaaccaaaacagcatggtactggtaccaaaacagagatatagatcaatggaacagaacagagccctcagaaataacgctgcatatctacaactatctgatctttgacaaacctgagaaaaacaagcaatggggaacggattccctatttaataaatggtgctgggaaaactggctagccatatgtagaaagctgaaactggatcccttccttacaccttatacaaaaatcaattcaagatggattaaagacttaaacgttagacctaaaaccataaaaaccctagaagaaaacctaggcattaccattcaggacataggcatgggcaaggacttcatgtctaaaacaccaaaagcaatggcaacaaaagccaaaattgacaaatgggatctaattaaactaaagagcttctgcacagcaaaagaaactaccatcagagtgaacaggcaacctacaaaatgggagaaaattttcacaacctactcatctgacaaagggctaatatccagaatctacaatgaactcaaacaaatttacaagaaaaaaacaaacaaccccatcaaaaagtgggcaaaggacatgaacagacacttctcagaagaagacatttatgcagccaaaaaacacatgaaaaaatgctcatcatcactggccatcagagaaatgcaaatcaaaaccacaatgagataccatctcacaccagttagaatggcaatcattaaaaagtcaggaaacaacagatgggacacaacagtcatgggctgtctcagctgcccaaagcctgaggcagaccacatgagagctgtggcttcttcttggattcagagagaagtaatggaaggcctgtctgatgttgcttcttttgcaactaaacttaaaaacactctcatccagtaccatagcattgaagaagataagtggcgagttgctaagaaaacgcatgtaaacagaaccaacgacaaaaaccatgtgattatctcaatagatgcagaaaaggcctctggcaaaattcaacaacccttcatgctaaaaactctcaataaactaggtattgataggacgtatctcaaaataataagagctatatatgacaaacccacagacaatatcatactgaatgggcaaaaactggaagcattccctttgaaacctggcacaagacagggatgccctctctcaccactcctattcaacatagtgttggaagttctggccagggtaatcaggcaggagaaggaaataaagggtgttcaattaggaaaagaggaagtcaaattgtccctgtttgcagatgacatgattgtatatctagaaaaccccatcgtctcaccccaaaatctccttaaactgataggcaacttcagcaaggtctcaggatacaaaatcaatgtgcaaaaatcacaagcattcttatacaccaataagagacaaacagagagccaaatcatgagtgaactcccattcacaattgcttcaaagagaataaaatacctaggaatccaacttacaagggatgtgaaggacctcttcaaggagaactacaaaccactgctcaaggaaataaaagaggatacaaacaaatggaagaacattccatgctcatgggtaggaagaatcaatatcatgaaaatggccatactgcccaaggtaatttatagattcaatgccatccccatcaagctaccaatgactttcttcacagaattggataaaactactttaaagttcatatggaaccaaaagagagcccacaattccaagtcaatcctaagccaaaagaacaaagctggaggcatcacactacctgacttcaaactatactacaaggctacagtaaccaaaacagtatggtactggtaccaaaacagagatatagatcaatggaacagaacagagccctcagaaataatgctgcttatctacaactatctgatctttgacaaacctgacaaaaacaagaaatggggaaaggattccctatttaataaatggtgctgggaaaactggctagccatatgtagaaagctgaaactggatcccttccttacatcttatgcaaaaatcaattcaagatggattaaagacttaaatgttcgacctaaaaccataaaaaccctagaagaaaacctaggcaataccattcaggacataggcatgggcaaggacttcatgtctaaaacacgaaaagcaatggcaacaaaagccaaaattgacaaatggaatctcattaaactaaagagcttcttcacagcaaaagaaactaccatcagagtgaacaggcaacctacagaatgggagaacatttttgcaatctactcatctgacaaagggctaatatccagaatctacaatgaactcaagcaaatttacaagaaaaaaacaaacaaccccatcaaaaagtgggagaaggatatgaacagacacttctcaaaagaagacatttatgcagccaaaagacacatgaaaaaatgcccatcatcactgaccatcagagaaatgcaaatcaaaaccacaatgagataccatctcacaccagttagaatggcgatcattaaaaagtcaggaaacaacaggtgctggagaggatgtggagaaacaggaacactttcacactgttggtgggactgtaaactaatcaaccattgtggaatttttgagagattaaggaccgaagactggtggggactcataaatgatacaagtaaagtattagccacaacagaagaaaaaggggtgcccaaacgcataatcttgaaatttgatgtctgtgctgtcattaatagca

SEQ ID NO: 19910 - DNA, 3298 bp, Homo sapiens
  SIMILAR (1)..(1155): 981254mologous to Homo sapiens putative p150,accession number U93563,Smith-Waterman Score=1958.
atggtgaagggatcaattcaacaagaggagctaactatcctaaatatttatgcacccaatacaggagcacccagattcataaagcaagtcctgagtgacctacaaagagacttagactcccacacattaataatgggagactttaacaccccactgtcaacattagacagatcaacgagacagaaagtcaacaaggatacccaggaattgaactcagctctgcaccaagcagacctaatagacatcaacagaactctccaccccaaatcaacagagtatacatttttttcagcaccacaccacacctattccaaaattgaccacatagttggaagtaaagctctcctcagcaaatgtaaaagaacagaaattataacaaactatctctcagaccacagtgcaatcaaactagaactcaggattaagaatctcactcaaagccgctcaactccatggaaactgaacaacctgctcctgaatgactactgggtacataacgaaatgaaggcagaaataaagatgttctttgaaaccaacaagaacaaagacaccacataccagaatctctgggacgcattcaaagcagtgtgtagagggaaatttatagcactaaatgcctacaagagaaagcaggaaagatccaaaattgacaccctaacatcacaattaaaagaactagaaaagcaagagcaaacacattcaaaagctagcagaaggcaagaaataacgaaaatcagagcagaactgaaggaaatagagacacaaaaaacccttcaaaaaatcaatgaatccaggagctggttttttgaaaggatcaacaaaattgatagaccgctagcaagactaataaagaaaaaaagagagaagaatcaaatagacacaataaaaaatgataaaggggatatcaccaccgatcccacagaaatacaaactaccatcagagaatactacaaacacctctacgcaaataaactagaaaatctagaagaaatggatacattcctcgacacatacactctcccaagactaaaccaggaagaagttgaatctctgaatagaccaataacaggctctgaaattgtggcaataatcaatagtttaccaaccaaaaagagtccaggaccagatggattcacagccgaattctaccagagagctatctatgacaaacccacagccaatatcatactgaatgggcaaaaactggaagcattccctttgaaaactggcacaagacagggatgccctctctcaccgctcctattcaacatagtgttggaagttctggccagggcaatcaggcaggagaaggaaataaagggtattcaattaggaaaagaggaagtcaaattgtccctgtttgcagatgacatgattgtttatctagaaaaccccatcgtctcagcccaaaatctccttaagctgataagcaacttcagcaaagtctcaggatacaaaatcaatgtacaaaaatcacaagcattcttatacaccaaaaacagacaaacagagagccaactcatgagtgaactcccattcacaattgcttcaaagagaataaaatacctaggaatccaacttacaagggatgtgaaggacctcttcaaggagaactacaaaccactgctcaacgaaataaaagaggacacaaacaaatggaagaacattccatgctcatgggtaggaagaatcaatatcgtgaaaatggccatactgcccaaggtaatttacagattcaatgccatccccttcaagctaccaatgactttcttcacagaattggaaaaaactactttaaagttcatatggaaccaaaaaagagcccgcatcgccaagtcaatcctaagccaaaagaacaaagctggaggcatcacactacctgacttcaaactatactacaaggctacagtaaccaaaacagcatcggtactggtaccaaaacagagatatagatcaatggaacagaacagagccctcagaaataatgccgcatatctacactattctgatcctttggacaaacctgagaaaaacaagcatgggggaaaggcatccctaatttataaaatggctgctggggaaaactggctagcccatatgtaggaagctgaaactggatcccttccttacacattatacaaaaattaattcaagttggattaaagacttaaacgttagacctaaacccataaaaaccctagaagaaaacctaggcattaccattcaggacataggcatgggcaaggatttcatgtctaaaacaccaaaagcaatggcaacaaaagccaacattgacaaatgggatctaattaaactaaagagcttctgcacagcaaaagaaactaccatcagagtgaaaaggcaacttacaaaatgggagaaaattttcgcaacctactcatctgacaaagggctaatatccagaatctacaatgaactcaaacagatttacaagaaaaaaacaaacaaccccatcaaaaagtgggcaaaggatatgaacagacacttctcaaaagaagacatttatgcagccaaaagacacatgaaaaaatgctcatcatcactggccatcagagaaatgcaaatcaaaaccacaatgagataccatctcacaccagttagaatggcaatcattaaaaagtcaggaaacaacaggagagacagaacagctgaggaaacagcagaacggtggaaaatttttgaaagtgttttgagcccacccaacctgaggagagcattcaaagaaaaacaggaagaagaagtcggcttcagaaggtgggttataacaaactcctccaagctaaaacagcatgttttaacccaatgcaaggaagctaagaaccttgaaaaaaggttagaggaatttctaactagaataaccagtttagagaagaacataaatgacctaatggacctgaaaaacacagcacgagaacttcttgacgcctacacaagtatcaatagccaaattaatcaagcggaagaaaggttatcagagactgaagatcaacttaatcaaataaagcatgaggacaagattagagggaaaaaaatgaaaaggaacaaacaaagcctccaagaaatatgggactatgtgaaaaggccaaatctacgtctgattggtgtagctgaaagtgacagggagaatggagccaagttagaaaacactcttcagtatattatccaggagaacttccccaacctagcaagacaggccaacactcaaattcaggaaacacagagaccaccacaaagatactccttgagaaaagcaaccccaagacacataatcatctga

SEQ ID NO: 19911 - DNA, 3162 bp, Homo sapiens
  SIMILAR (1299)..(2501): 951254mologous to Homo sapiens putative p150,accession number U93574,Smith-Waterman Score=2007.
atgggagactttaacaccccactgtcaacattagacagatcatcgagacagaaagttaacaaggatacccaggaattgaactcaactctgcaccatgcggacctaatagacatctacagaactctccacccgaaatcaactgaatatacatttttttcagcaccacaccacacctattccaaaattgaccacgtagttggaagtaaagctctcctcagcaaatgtaaaagaacagaaattataacaaactgtctctcagaccacagtgctatcaaaccagaactcaggattaagaaactcactcaaaaccgctcaactacatggaaactgaataacctgctcctgaatgactactgggtgcataacaaaatgaaggcagaaataaagatgttctttgaaaccaacgagaacaaagacacaacataccagaatctctgggacacattcaaagcagtgagtagagggaaatttatagcactaaatgcccacaagagaaagcagaaaagatgcaaaattgacaccctagcatcacaattaaaagaagtagaaaagcaagagcaaacacattcaaaagctagcagaaggcaagaaataactaaaataagagcagaactgaaggaaatagagacacaaaaaacccttcaaaacaatcagtgaatcctggagctggttttttgaaaagatcaacaaaatcgatagaccacaagcaagactaataaagaagaaaagagagaagaatcaaatagacacaataaaaaatgataaaggggatatcaccaccgatcccacagaaatacaaattaccatcagagaatactacaaacacctctatgcaaataaactagaaaatctagaagagatggataaattcctcgacacatacaccctcccaagactaaaccaggaagaagttgaatctgtgaatagaccaataacaggctctgaaattgaggcaataaccaatagcttaccaaccaaaaaaaagtccaggaccagatggattcacagccaaattctaccagaggtacaaggaggagctggtaccattccttctgaaactattccaatcaatagaaaaagagggaatcctccttgactcattttatgaggccagcatcatcctgataccaaagcctggcagagacacaacaaaaaaaagagaattttagaccaatatccctgatgaacatcgatgtaaaaatcctcaataaaatactggcagaccaaatccagcagcacatcaaaaagcttatatacaccatgatcaagtgggcttcatccctgggatgcaaggctggttcaacatattgttggaagttctggccagggcaatcaggcaggagaaggaaataaagggtattcaattaggaaaagagaaagtcaaattgtccctgtttgcagatgacatgattgtgtatctagaaaaccccatcgtctcagccccaaatctcctcaagctgataagcaagttcagcaaagtctcaggatacaaaatcaatgtacaaaaatcacaagcattcttatacaccaataacagacaaacagagagccaaatcatgagtgaactcccattcacaactgcttcaaagagaataaaatacctaggaatccaacttacaagggatgtgaaggacctcttcaaggagaactacaaaccactgctcaatgaaattaaagaggatacaaagaaatggaagaacattccatgctcatgggtaggaagaatcaatatcgtgaaaatggccatactgcccaaggtaatttatagattcaatgccatccccatcaagctaccaatgactttcttcacagaattggaaaaaactactttaaagttcatatggaaccaaaaaagagcccgccttgccaagtcaatcctaagccaaaagaacaaagctggaggcatcacgctacctgacttcaaactatactacaaggctacagtaaccaaaacagcatggtaccggtaccaaaacagagatatagaccaatggaacagaacagagccctcagaattaatgccacatatctacaactatctgatctttgacaaacctgagaaaaacaagcaatggggaaaggattccctatttaagaactggtgctgggaaaactggctagccatatgtagaaagctgaaactggatcccttccttacaccttatacaaaaattaattcaagatggattaaagacttaaatgtgagacctaaaaccataaaaaccctagaagaaaacctaggcattaccattcaggacataggcatcggcaaggacttcatgtctaaaacaccaaaagcaatggcagcaaaagccaaaattgacaaatgggatctaattaaactaaagagcttctgcacagcaaaagaaactaccatcagagtgaacaggcaacctacaaaatgggagaaaagttttgcaatctactcatctgacaaagggctaatatccagaatctacaatgaacacaaacaaatttacaagaaaaaaacaaacaacccccatcaagaagtgggcgaaggatatgaacagatgcttctcaaaagaagacatttatgcagccaacagacacatgaaaaaatgctcatcatcactggccatcagagaaatgcaaatcaaaaccactatgagataccatctcacagcagttagaatggcaatcattaaaacatcaggaaacaacaggtgctggagaggatgtggagaaataggaacacttttacactgttggtgggactgtaaactagttcatccattgtggaagtcagtgtggcgattcctcagggatctagaactagaaataccatttgacccagccatcctattactgggtatatacccaaaggattataaatcatgctgctataaagacacatgcacacatgagaaagcagagatccagaaaagtaaaggaatcagagattatggagaaataggtactagaactgaggatatggactcccagttcagacctctttccgttgttcgggcacaaattatcccctttgaatttccctgggaaggaatacctctgggtggacccttcccccggcattcctgcagctaccctgtgggcctagcccttttgtaccacagtagctcagcagctggaccagtgagaggacacctctccctgcagtggaattccaggatgactagttga

SEQ ID NO: 19912 - DNA, 3769 bp, Homo sapiens
  SIMILAR (1601)..(3439): 961254mologous to Homo sapiens unknown,accession number AF148856,Smith-Waterman Score=3166.
acacagactggcaaattggataaagagtcaagacccatcagtgtgctgtattcaggaagcctatctcacatgcagagacacacataggctcaaaataaaaggatggaggaagatctaccaagcaaatggaaaacaaaaaaaggcaggggttgcaatcctagtctctgataaaacagactttaaaccaacaaagatcaaaagagacaaagaaggcctttacataatggtaaagggatcaattccacgagaagagctaactatcctaaatatatatgcacccaatccagaagcacccagattcacaaagcaagtcctgagtgacctacaaagagacgtagactcccacacaataatactgggagactttaacaccccactgtcagcattagacagatcaatgagacagaaagttaacaaggatacccaggaattgaactcagctctgcaccaagcggacctaatagacatctacagaactctccacccaaaatcaacagaatatacatttttttcagcaccacaccacacctattccaaaattgaccacagagttggaagtaaagctcttctcagcaaatgtaaaagatcagaaattataacaaactgtctctcagaccacagtgcaatcaaactagaactcaggattaagaaactcactcaaaactgctcaactacatggaaactgaacaacctgctcctgaatgactactgggtacataacgaaatgaaggcagaaataaagatgttctttgaaaccaatgagaacaaagacacaacataccataatctctgggacacattcaaagcagtgtgtagagggaaatttatagcactaaatgcccacaagagaaagcaggaaagatccaaaattgacaccctaacatcacaattaaaagaactagaaaagcaagagcaaacacattcaaaagctagcagaaggcaagaaataactaaaatcagagcagaactgaaggaaatagagacacaaaaaacccttcaaaaaattaatgaatccaggagctggttttttaaaaagatcaacaaaattgatagaccgctagcaagactcataaagaagaaaagagagaagaatcaattagactcaataaaaaatgataaaggggatatcaccacctatcccacagaaatacaaactacaatcagagaatactacaaacacctctacacaaataaactagaaaatctagaaaaaatggataaattcctcgacacatacaccctcccaagactaaaccaggaagaagttgaatctctgaatagaccaataacaggatctgaaattgtggcactaatcaatagcttaccaaccaaaaagagtccaggaccagatggattcacagccgaattctaccagaggtacaaggaggaactgcatcattctgataccaaagccgggcagagacacaacaaaaaaaagagaattttagaccaatatccttgatgaacattgatgcaaaaatcctcaataaaatactggcaaaccgaatccagcagcacatcaaaaagcttatccaccatgatcaagtgggcttcatccctgggatgcaaggctggttgaatatatgcaaatcaataaattgtaatccagcatataaacagagccaaagacaaaaaccacatgattatctcaatagatgcagaaaaagcctttgacaaaattcaacaacgcttcaggctaaaaactctcaataaattaggtattgatgggacgtatttcaaaataataagagctatctatgacaaacccacagccaatatcatactgaatgggcaaaaactgaaagcattccctttgaaaactggcacaagacagggatgccctctctcaccactcctattcaacatagtgttggaagctctggccagggcaattaggcaggagaaggaaataaagggtattcaattaggaaaagaggaagtcaaattgtccctgtttgcagacgacatgattgtatgtctagaaaaccccattgtctcagcccaaaatctccttaagctgataagcaacttcagcaaagtctcaggatacaaaatcaatgtacaaaaatcacaagcattcttatacaccaacaacagacaaacagagagccaaatcatgagtgaactcccattcacaattgcttcaaagagaataaaatacctaggaatccaacttacaagggatgtgaacgacctcttcaaggagaactacaaaccactgctcaaggaaataaaagaggatacaaacaaatggaaaaacattccatgctcatgggtaggaagaatcaatatcatgaaaatggccataatgcccaaggtaatttacagattcaatgccatccccataaagctaccaatgactttcttcacagaattggaaaaaactactttaaagttcatatggaaccaaaaaagagcccgcatcaccaagtcaatcctaagccaaaagaacaaagctggaggcatcacactacctgacttcaaactatactacaaggctacagtaaccaaaacagcatggtactggtaccaaaacagagatatagatcaatggaacagaacagagccctcagaaataacaccgcatatctacaactatctgatctttgacaaacctgagaaaaacaagcaatggggaaaggattccctatttaataaatggtgctgggaaaactggctagccatatggagaaagctgaaactggatcccttccttacaccttatgcaaaaatcaattcaagatggattaaagatttaaatgttagacctaaaaccataaaaaccctagaagaaaacctaggcaataccattcaggacataggcatgggcaaggacttcatgtccaaaacaccaaaagcaatggcaacaaaagacaaaattgacaaatgggatctaattaaactaaagagcttctgcacagcaaaagaaactaccatcagagtgaacaggcaacctacaaaatgggagaaaattttcgcaacctactcatctgacaaagggctaatatccagaatctacaatgaactcaaacaaatttacaagaaaaaaacaaacaaccccatcaaaaagtgggcgaaggacatgaacagacacttctcaaaagaagacatttatgcagccaaaaaacacatgaaaaaatgctcatcatcactggccatcagagaaatgcaaatcaaaaccacaatgagataccatctcacaccagttagaatggcaatcattaaaaagacaggaaacaacaggtgctggagaggatgtggagaaataggaacacttttacactgttggtgggactgtaaactagttcaaccattgtggaagtcagtgtggcgattcctcagggatctagaactagaaataccatttgacccagccatcccattactgggtatatacccgaatgactataaatcatgctgctataaagacacatgcacacctgggcaccctagaaagcagcccaccctgggttctataccccagaagtcacaggatcattgcgctgaagtgctaaaggacatcctgtttctagcagggactggaggagcccaggctcttctggccagtttctccttatctcaggatgttgaattcccagcaccttctgcagttattcttgagaactacaagcaaaagactgaaatgagcaccacctactggcagagcctaacagggccagccggcaaacaagaaaactgttcacagtcccagccccaagatcccaagtatacagtatggatgtgggggtttagatccaagaaacaatag

SEQ ID NO: 19913 - DNA, 15879 bp, Homo sapiens
  SIMILAR (13666)..(15678): 941254mologous to Homo sapiens putative p150,accession number U93569,Smith-Waterman Score=3249.
atgggagactttaacaccccactgtcaacattagacagatcaatgagacagaaagtcaaaaaggatacccaggaattgaactcagctctgcaccaagcagacctaatagacatctacagaactctccaccccaaatcaacagaatatacatttttttcagcaccacaccacacctattccaaaattgaccacatacttggaagtaaagctctcctcagcaaatgtaaaagaacagaaattataacaaactatctctcagacggcagtgcaatcaaactagaactcaggattaagaatctcactcaaaaccgctcaactacatggaaactgaacaacctgctcctgaatgactactgggtacctaacgaaatgaaggcagaaataaagatgttctttgaaaccaacgagaacaaagacacaacataccagaatctctgggacgcattcaaagcagtgtgtagagggaaatttatagcactaaatgcccacaagagaaagcaggaaagatccaaaattgacaccctaacatcacaattaaaagaactagaaaagcaagagcaaacacattcaaaagctagcagaaggcaagaaataactaaaatcagagcagaactgaaggaaatagagacacaaaaaacccttcaaaaaattaatgaatccaggagctggttttttgaaaggatcaacaaaatagatagaccgctagcaagactaataaagaaaaaaagagagaagaatcaaatagatacaataaaaaatgataaaggggatatcaccaccaatcccacagaaatacaaactaccatcagagaatactacaaacacctctacgcaaataaactagaaaatctagaagaaatggataaattccttgacacatacactctcccaagactaaaccaggaagaagttgaatctctgaatagaccaataacaggatctgaaattgtggcaataatcaatagcttaccaaccaaaaagagtccaggaccagatggattcacagccgaattctaccagaggtacaaggaggaactggtaccattccttctgaaactattccaatcaatagaaaaagagggaatcctcctgttggaagttctggccagggcaattaggcaggagaaggaaataaagggtattcaattaggaaaagaggaagtcaaattttccctgtttgcagacgacatgattgtatatctagaaaaccccattgtctcagcccaaaatctccttaagctgataagcaacttcagcaaagtctcaggatacaaaatcaatgtacaaaaatcacaagcattcttatacaccaacaacagacaaacagagagccaaatcatgagtgaactcccattcacaattgcttcaaagagaataaaatacctaggaatccaacttacaagggatgtgaaggacctcttcaaggagaactacaaaccactgctcaaggaaataaaagaggatacaaacaaatgcaagaacattccatgctcatgggtaggaagaatcaatatcgtgaaaatggccatactgcccaaggtaatttacagattcaatgccatccccatcaagctaccaatgcctttcttcacagaattggaaaaaactactttaaagttcatatggaaccaaaaaagagcccgcatcgccaagtcaatcctgagccaaaagaacaaagctggaggcatcacgctacctgacttcaaaccatactacaaggctacagtaaccaaaacagcatggtactggtaccaaaagagagatatagatcagtggaacagaacagagccctcagaaataacgccgcatatctacaactatctgatctttgacaaacctgagaaaaacaagcaatggggaaaggattccctatttaataaatggtgctgggaaaactggctggccatatgtagaaagctgaaactggatcccttccttacaccttatacaaaaatcaattcaagatggattaaagacttaaacgttagacctaaaaccataaaaaccctagaagaaaacctaggcaataccattcaggacataggcatgggcaaggacttcatgtctaaaacaccaaaagcaatggcaacaaaagacaaaattgacaaatgggatctaattaaacttaagagcttctgtacagcaaaagaaactaccatcagagtgaacaggcaacctacaaaatgggagaaaattttcacaacctactcatctgacaaagggctaatatccagaatctacaatgaactcaaacaaatttacaagaaaaaaacaaacaaccccatcaaaaagtgggcgaaggacatgaacagacacttctcaaaagaagacatttatgcagccaaaaaacacatgaaaaaatgctcatcatcactggccatcagagaaatgcaaatcaaaaccacaatgagataccatctcacaccagttagaatggcgatcattaaaaagtcaggaaacaacagagacgttggcaatgtggttgaagccatgtatggggaccttcctcctccaattatgctgattggacatagcatgggtggtgctattgcagtccacacagcatcatccaacctggtaccaagcctcttgggtctgtgcatgattgatgttgtagaaggtacagctatggatgcacttaatagcatgcagaatttcttacggggtcgtcctaaaaccttcaagtctctggagaatgctattgaatggagaaatatcaaagatctatcttgggcagatagcatcaagaatgtagctgctgccagcttggcttgtatctcaggtgccctgcctgcttccgcagtaacaacaagcccagataataagaggatggccaggaatgtcttgaaatatgaaaggctcttggcagagagccccaaccacgtggtagctgaggctgtcatccagaggcccaatataccccacctgcagaccagagacacctacgaggggctatgtcagaccctgggttcccagcccactctctaccagatccctagcctctactgttcctatgagaccaattccaacgcctacctgctgctccagcccatccggaaggaggtcatccacctggagccctacattgctctctaccatgacttcgtcagtgactcagaggctcagaaaattagagaacttgcagaaccatgggaacagagctcctcaccagcaacggaacaaagctggatggagaatgactttgatgagttgagagaagaaggcttcagaagatcggtaataacaaacttctccgagctaaaggaggatgttcaaacaaatggcaaagaagttaaaaactttgaaataaaaattatacgtatgtataactagaataaccaatgcagagaagtacttaaaggagctgatggagctgaaagccaaggctcaagaactatgtgaagaatgcagaagcctcaggagccgacacgatcaactggaagaaagggtatcagtgatggaagatcaaatgaatgaaatgaagcaagaagagaagtttagagaaaaaagaagaaaaagaaacgaacaaagcctccaagaaatatgggactatgtgaaaagaccaaatctacgtctgattggtgtacctgaaagtgatggggagaatggaaccaagttggaaaacactctgcaggatattatccagaagaatttccccaatctagcaaggcaggccaacatttacattcaggaaatacaggaaatacagagaacaccacaaagatactcaccgagaagagcaactccaagacacataattgtcagattcaccaaggttgatatgaaggaaaaaatgttaagggcagtcagagagaaaggctttaaaccaacaaagatcagaagagacaaagaaggccattacataatggtaaagggatcaattcaacaagaagagctaactatcctaaatatatatgcacccaataccggaggacccagattcataaagcaagtcctgagtgacctacaaagagacttagactcccacacaataataatgggagactttaacaccccactgtcaacattagacagatctatgaggcagaaaattaacaaggatatccaggaattgaactcagctctgcaccaagtggacctaatagacatctacagaactctccagcccaaatcaacagaatatacattttttttcagcaccacaccacacctattcccaaaattggaccaccatagttggaagtaaagctctcctcagcaaatgtaaaagaacagaaattataaccaaactatctctcagacccacagtgccaatcaaactgaaactcaggattaagaatctcactcaaaaccactcaactacatggaaactgaacaacctgctcctgaatgactactgggtacataacgaaatgaaggcagaaataaagaaagatgttctttgaaacccaacgagaacaaagacaccaacataccagaatttttgggacgcattcaaagcagtgtgtagagggaaattcatagcaaaaaaatgcccacaaaagaaagcaaggaaggtcccaaaattgacaccctaacatcacaattaaaagaactagaaaagcaaagagcaaacacattcaaaagctagcagaaggcaagaaataactaagatcagagcagaactgaaggaaatagagacacaaaaaaacctccttcaacccttcaaaaaaatcaatgaattccaggagctggtttttttgaaaggatcaacaaaattgatagaccgctagcaagactaataaagaaaaaaagagagaagaaatcaaatagacggcaataaaaaatgataaaggggatatcaccaccaccgatcccacagaaatacaaactaccatcagagaatactacaaacacctctacgccaaataaacttgaaaatctagaaggaatggataaattcctcgacacatacactctcccaagactaaaccaggaagaagttgaatctctgaatagaccaataacaggagctgaaattgtggcaataatcaatagcttaccaaccaaaaaagagtcccaggaccagatggattccacagccgaatttctaccagaggtacaaggaggagcttgtacccattccttctgaaactattccaattaatagaaaaagagggaatcctccctaactcattttatgagggccagcatcattctgataccaaagccaggcagagacacaacaacaacaaaaaaagaattttagaccaatatccctgatgaacatcgatgcaaaaatcctcaataaaatactagcaaaccgaatccagcagcacatccaaaagcttatccaccatgatcaagagggcttcatccctgggatgcaaggctggttcaacatacacaaatcaataaacgtaatccagcatataaacagaaccaaagacaaaaaccacatgattatctcaatagatgcagaaaaagcctttgacaaaattcaacaacccttcatgctaaaaactctcaataaattaggtattgatgggacgtatttcaaaataataagagctatctatgacaaacccacagccaatatcatactgaatgggcaaaaactggaagcattccctttgaaaactggcacaagacagggatgccctctttcaccacatactaccattaacatagtattctgccccatagtgttctggccagggcaatcaggcaagagaaggaaataaagggtattcaattaggaaaagaggaagtcaaattgtccctgtttgcagacgacatgattgtttatctagaaaaccccattgtctcagcccaaaatctctttaagctgataagcaacttcagcaaagtctcaggatacaaaatcaatgtacaaaaatcacaagcattcttatacaccaacaacagacaaacagagagccaaatcatgagtgaactcccattcacaattgcttcaaagagaataaaatacctaggaatccaacttacaagggatgtgaaggaactcttcaaggagaactacaaaccactgctcaaggaaataaaagaggacacaaacaaatggaagaacattccatgctcatgggtaggaggaagaatcaatctcgtgaaaatggccatactgcccaaggtaatttacagattcaatgccatccccccttcaaggttacccaatgactttcttcacagaattggaaaaaaactaccttttaaaggtcattatggaaccaaaaaaggagcccgcatcgccaaggcaatcctaagccaaaagaacaaagctggaggcatcacactacctgacttcaaactatactacaaggctacagtaaccaaaacagcatggcactggtaccaaaacagcatggtactggtaccaaaacagagatatagatcaatggaacagaacagagcccctcagaaataaggcccacataccctacaactatctgatctttgacaaacctttgcttgagaaaaacaagcaatgggggaaaggattcccctatttaataaatggtgctgggaaaactggctagccatatgtagaaagctgaaactggatcccttccttacaccttatacaaaaatcaattcaagatggattaaagatttaaacgttagacctaaaaccataaaaaccctagaagaaaacctaggcatttaccattcaggacataggcatgggcaaggacttcatgtctaataaaacaccaaaagcaatggcaaccaaaagacaaaattgacaaatgggatctaattaaactaaagagcttctgcacagcaaaagagaaactaccatcagagtgaacaggcaacctacagaatgggagaaaatctttgcaatctactcatttgacaaagggctaatatccagaatctacaaagaactcaaacaaatttacaagaaaaaaaaaaaaacaaccccatcaaaaagtgggcaaaggacatgaacagacacttctcaaaagaagacatttatgcagccgaaaaaacacatgaaaaaaatgctcatcatcactggccatcagagaaatgcaaatcaaaaccactatgagatatcatctcacaccagttagaatggcaatcattaaaaagtcaggaaacaacaggagctggtattttgaaaagatcaacaaaattgatagactgctagcaagactaataaagaaaaaaagagagaagaatcaaatagacgcaataaaaaatgataaaggggatatcaccactgatcccacagaaatacaaactaccaccagagaatactataaacacctctatgcaaataaactagaaaatctagaagaaatggataaattcctcgacacatacaacctcccaagactaaagcaggaagaagttgaatctctgaatagaccaataagaggctctgaaattgtggcaataatcaatagcttaccaaccaaaaaaagtccaggaccagatggattcacagccgaattctaccacaggtacaaagaggagctggtaccattgcttctgaaactattccaatcaatagaaaaagaggtaatcctccctaactcattttatgaggccagcatcatcctgataccaaagcctgacagagacacagcaaaaaaagagaattttagaccaatatccttgatgaacatcgatgcaaaaatcctcaataaaatactggcaaaccgaatccagcagcacatcaaaaagcttatccaccatgatcaagtgggcttcatccctgggatgcaaggctggttcaacatacgcaaatcagtaaatgtaatccagcatataaacagaaccaaagacaaaaaccacatgatcatctcaatagatgcagaaaagtcctttgataaaattcaacaacacttcatgctaaaaactctcaataaattaggtattgatgggtcatatctcaaaataataagagctacctatgacaaacccacagccaatatcatactgaatgggcaaaaactggaagcattccctttgaaaactggcacaagacacggatgccccctctcaccactcctattcaacatagtgttggaagttctggccagagcaatcaggcaggagaaggaaataaagggtattcaattaggaaaagaggaagtcaaattgtccctgttcatagatgacatgattgtatatctagaaaaccccatcatctcagcccaaaatctccttaagctgataagcaacttcagcaaagtctcaggatacaaaatcaatgcgcaaaaatcacaagcattcttatacaccaataacagacaaacagagagccaaatcatgagtgaactcccattcacaattgcttcaaagagaataaaatatctaggaatccaacttacaatggacgtgaaggacttcttcaaggagaactacaaaccaatgctcaatgaaataaaagaggatacaaacaaatggaagaacattccatgctcatgggtaggaagaatcaatatcgtgaaaatggccatactgcccaagatccactccagagtgacagttctgctgcgctcagatactgtgctgcatattgtgaagcttgcagtgaaaattcctacaattgtcctgcttctggaggggagccccagggccttgaggaaacacaggcagaagccagggagtggttccagcaggcctcgagtgagacccagtgctgtgctggcatcaggtctgagtcaatgcagtcatagtggtggtggcaacaggggtgcttatgtcactccaccccaagctttagcagaaaaggcctttgacaaaattcaacaacccttcatgctaaaaactctcaataaattaggtattgatgggacatatctcaaaataataagagctatctatgacaaacccacagccaatatcatactgaatgggcaaaaactggaagcattccctttgaaaactggcacaagacagggatgccctctctcaccactcctattcaacatagccttggaagttctggccagggcaatcaggcaggagaaggaaataaagggtattcaattcggaaaagaggaagtcaaattgtccctgtttgcagatgacatgattgtatatctagaaaaccccattgtctcagcccaaattctccttaagctgataagcaacttcagcaaagtctcaggatacaaaatcaatgtacaaaaaccacaagcattcttacacaccaataacagacaaacagagaaccaaatcatgagtgaactcccattcacgattgcttcaaagagaataaaatacctaggaatccaacttacaagggacgtgaaggacctcttcaaggagaactacaaaccactgctcaaggaaataaaagaggatacaaacaaatggaagaacattccatgctcatgggtaggaagaatcaatatcgtgaaaatggccatactgcccaaggtaatttatagattcaatgccatccccagcaagctaccaatgactttcttcacagaattggaaaaaaatactttaaagttcatatggaaccaaaaaagagcccgcatcgccaagtcaatcctaagccaaaagaacaaagctggaggcatcacgctacctgacttcaaactatactacaaggctacagtaaccaaaacagcatggtactggtaccaaaaacagagatatagatcaatggaacagaataaagccctcagaaataacgccgcatatctacaactatctgatccttgacaaacctgagaaaaacaagcaatggggaaaggattccctatttaataaatggtgctgggaaaactggctagccatatggagaaagttgaaactgggtcccttccttacaccttatacaaaaattaattcaagatggattaaagacttaaacgttagacctaaaaccataaaaaccctagaagaaaacctaggcattaccatgccaggaccataggcatgggcaaggacttcatgtccaaaacaccaaaagcaatggcaacaaaagccaaaattgacaaatgggatctaattcaactaaagagctactgcacagcaaaagaaaataccatcagagtgaacaggcaacctacaaaatgggagaaaattttcgcaacctactcatctgacaaagggctaataaccagaatctacaatgaactcaaacaaatttacaagaaaaaaacaaacaaccccatcaaaaagtgggcgaaggacatgaacagacacttctcaaaagaagacatttatgcagctaaaaaacacgtgaaaaaatgctcatcatcactggccatcagagaaatgcaaatcaaaaccacaatgagataccatctcacaccagttagaatggcaatcattaaaaagtcaggaagcaacagatgctggagaggatgtggagaaataggaacacttttacactgttggtgggactgtaaactagttcaaccattgtggaagtcagtgtggcgattcctcagggatctagaactagaaataccatttgacccagccatcccattactgggtatatacccaaacgactataaatcatgctgctataaagacacatgcacattgagtctaccagaaatccgcaactgcccaacgaaaagtgtcccagtccccttctctgttgatgaaactcagtatcatgttgaagatactagtcctgtaagctggcaagtaaaagttctaggcaagcatatacatcagggaagcagctatgaagatgtttggctgcctcagcgcatgcaaggaaaactaacaaacagaaaggacatccacaccaaaaacccatctgtacatcaccatcatcaaagaccaaaagtagataaaaccacaaagatggggaaaaaacagaacagaaaaactggaaactctaaaaagcagagcgcctctcctcctccaaaggaacgcagttcctcaccagcaatgcaacaaagctggacggagaatgactttgacgagctgagagaagaaggcttcagacgatcaaattactctgagctacgggaggacattcaaaccaaaggcaaagaagttgaaaactttgaaaaaaatttagaagaatgtataactagaataaccaatacagagaagtgcttaaaggagctgatggagctgaaaaccaaggctcgagaactacgtgaagaatgcagaagcctcaggagccgatgcgatcaactggaagaaagggtatcagcgatggaagatgaaatgaatgaaatgaagcgagaagggaagtttagagaaaaaagaatacaaagaaatgaacaaagcctccaagaaatatgggactatgtgaaaagaccaaatctacgtctgattggtgtacctgaaaccttgcatcccagggatgaagcccacttgaagaatctaatagatgcaataaaaaatgataaaggggatatcaccaccgatcccacagaaatacaaactaccatcagagaatactacaaacacctctatgcaaataaactagaaaatctagaagaaacggataaattcctcgacacatacactctcccaagactaaaccaggaagaagttgaatctctgaatagaccaataacaggatctgaaattgtggcaataatcaatagcttaccaaccaaaaagagtccaggaccagatggattcacagctgaattctaccagaggtacaaggaggaactgctgataagcaacttcagcaaagtctcaggatacaaaatcaatgtacaaaaatcacaagcattcttatacaccagcaacagacaaacagagagccaaatcatgagtgaactcccattcacaattgcttcaaagagaataaaatacctaggaatccaacttacaagggatgtgaaggacctcttcaaggagaactacaaaccaccgctcaaggaaataaaagaggatacaaacaaatggaagaacattccatgctcatgggtaggaagaatcaatatcatgaaaatggccatactgcccaaggtaatttacagattcaatgccatccccattaagctaccaatgcctttcttcacagaattggaaaaaactactttaaagttcatatggaaccaaaaaagagcccgcatcgccaagtcaatcctaagccaaaagaacaaagctggaggcatcacactacctgacttcaaactatactacaaggctacagtaaccaaaacagcatggtactggtaccaaaacagagatatagatcaatggaacagaacagagctctcagaaataacgccgcatatctacaactatctgatctttgacaaacctgagaaaaacaagaaatggggaaaggattccctatttaataaatggtgctgggaaaactggctagccatatgtagaaagctgaaactggatcccttccttacaccttatacaaaaatcaattcaagatggattaaagacttaaacgttagacctaaaaccataaaaaccctagaagaaaacctaggcattaccattcaggacataggcatgggcaaggacttcatgtctaaaacaccaaaagcaatggcaacaaaagccaaaattgacaaatgggatctaattaaactaaagagcttctgcacagcaaaagaaactaccatcagagtgaacaggcaacctacaaaatgggagaaaattttcgcaacctactcatctgacaaagggctaatatccagaatctacaatgaactcaaacaaatttacaagaaaaagacaaacaaccccatcaaaaagtgggtgaaggacatcaacagacacttctcaaaagaagacatttatgcagccaaaaaacacatgaaaaaatgctcatcatcactggccatcagagaaatgcaaatcaaaaccacaatgagataccatctcacaccagttagaatggcaatcattaaaaagtcaggaaacaacagaccaaaagtagataaaaccacaaagatggggaaaaaacagagcagagaaactggaaactctaaaaagcagagtgcctctcctcctccaaaggaacgctgttcctcaccagcaacggaacaaagctggatggagaatgactttgatgacttgagagaagaaggcttcagacaatcaaactactctgagctaaaggaggaagttcgaacccatggcaaagaagttaaaaaccttgaaaaaaaattagacgaatggctaactagaataaccaatgcagagaagtccttaaaggacctgatggagctgaaaaccacagcccgagaactacatgatgaatgcacaagcctcaaaagggtatcagtgacggaagatcaaatgaatgaaatgaagcgagaagagaagtttagagaaaaaagaataaaaagaaatgaacaaagcctccaagaaatatgggactatgtgaaaagaccaaatctacacctgattggtgtacctgaaagtgacagggagaatggaaccaagttggaaaacactctgcaggatattatccaagagaacttccccaatctagtaaggcaggccaacattcaaattcaggaaatacagagaacgccacaaagatactcctcgagaagagcaactccaagacacataattgtcagattcaccaaagttgaaatgaaggaaaaaatgttaagggcagccagagagaaaggtcgggttacccacaaagggaagcccatcagactaacagctgatctcttggcagaaactctacaagccagaagagagtgggggccaatattcaacattcttaaagaaaagaattttcaacccagaatttcatatccagccaaactaagcttcatagacagatcaacgagacagaaagttaacaaggatacccaggaattgaactcagctctgcaccaagcggacctaatagacatctacagaactctccaccccaaatcaacagaatatacattcttttcagcaccacaccacacctattccaaaattgaccacatagttggaagtaaagcactcctcagcaaatgtaaaagaacagaaattataacaaactgtctctcagaccacagcgcaatcaaactagaactcaggattaagaaactcactcgaaaccactcaactacatggaaactgaacaacctgcttctgaatgactactgggtacataatgaaatgaaggcagaaataaagatgttctttgaaaccaacgagaacaaagacaaaacataccagaatctctgggacacattcaaaacagtgtgtagagggaaatttatagcactaaatgcccacaagagaaagcaggaaagatctaaaattgacaccctaacatcacaattaaaaggacttgagaagcaagagcaaacacattcaaaagctagcagaaggcaagaaataactaagatcagagcagaactgaaggaaatagagacacaaaaaacccttcaaaaaatcaacgaatccaggagctggttttttgaaaagatcaacaaaattgatagaccgctagcaagactaataaagaataaaagagaggagaatcaaatagacgcaataaaaaatgataaaggggatatcaccactgatcccacagaaatacaaactgccatcagcgaatactataaacacctctacgcaaataaactggaaaatctagaagaaatggataaattcctcgacacctacaccctcccaagactaaaccaggaagaagttgaatctctgaatagaccaataacaggctctgaaattgaggcaataattaatagcttaccaaccaaaaaaagtccaggaccagatggattcatggccgaattctaccagagggacaaggaggagctggtaccattccttctgaaactgttccaatcaatagaaaaagagggaatcctccctaactcattttatgaggccagcatcatgctgataccaaagcctggcagagacacaacaaaaaaagagaattttagaccaatatccctgatgaacatcgatgcaaaaatcctcaataaaatactggcaaaccgaatccagcagcacatcaaaaagcttatccaccatgatcaagtgggcttcatccctgggatgcaaggctggttcaacttacgcaaatcactaaacgtaatccagcatataaacagaaccaatgacaaaaaccacatgattatctcaatagatgcagaaaaggcctttgacaaaattcaacagcccttcatgctaaaaactctcaataaattaggtattgatgggatgtatctcaaaataataagagctatctatgacagacccacagccaatatcatactgaatgggcaaaaactggaagcattccctttgaaaactggcacaagacagggatgccctctctcaccactcctattcaatatagtgttggaagttctggccagggcaatcaggcaggagaaggaaataaagggtattcaattaggaaaagaggaagtcaaattgtccctgtttgcagatgacatgactgtatatttagaaaacgccatcgtctcagccccaaatctccttaagctgataggcaacttcagcaaagtctcaggatacaaaatcaatgtgcaaaaatcacaagcattcttatacactaataacagacaaacagagagccaaatcatgagtgaactcccattcagaattgcttcaaagagaataaaatacctaggaatccaacttacaagggatgtgaaggacctcttcaagcagaactacaaaccactgctcaatgaaataaaagaggatacaaacaaatggaagaacattccatgctcatgggtaggaagaatcaatatcgtgaaaatggccatactgcccaaggggacccagaggccctatgccaaggttagagttcaactgaacagtggagaggaattgcacttcttaggccttttagataccagtacacaggtgactgtgatccccacaaacccttgcatcaagatgaggagaaaacagatcgtgttctctgactttgggctcctactaacctccgttgtcatggcccccactactgaatga

SEQ ID NO: 19914 - DNA, 6334 bp, Homo sapiens
  SIMILAR (2037)..(5009): 521254mologous to Homo sapiens putative p150,accession number U93563,Smith-Waterman Score=1936.
cctccggtctacagctcccagcgtgagcgacgcagaagacgggtgatttctgcatttccatctgaggtaccgggttcatctcactagggagtgccagacagtgggcgcaggccagtgggtgcgcgcaccgtgcggagccgaagcagggcgaggcattgcctcacctgggaagcgcaaggggtcagggagttccctttccgagtcaaagaaaggggtgacggacgcacctggaaaatcgggtcactcccacccgaatattgcgcttttcagaccggcttaaaaaacggcgcaccacgagactatatcccacacctggccttcggagggtcctacgcccacggaatctcgctgattgctagcacagcggtctgagatcaaactgcaaggccgcagcaaggctgggggaggggcgcccgccattgcccaggcttgcttaggtaaacaaagcagccggggaagctcgaactgggtgcagcccaccacagctcaaggaggcctgcctgcctctgtaggctccacctctgggggcagggcacagacaaacaaaaagacagcagtaacctctgcagacttaaatgtccctgtctgacagctttgaagagagcagtggttctcccagcacgcagctggagatctgagaacgggcagactgcctcctcaagtgggtccctgacccctgacccccgagcagcctaactgggagggcaccccccagcagggggcacactgacacctcacacggcagggtattccaacagacctgcagctgagggtcctgtctgttagaaggaaaactaacaaccaggaaaggacatctacaccgaaaacccttctgtacattcaccatcattcaaagacccaaaagtaaataaaacccaccaaagatggggaaaaaaaacagagcgggaaaatctggaaactcttaaaacccagagcgcctctccttcatccaaagggaatccggttccttcacccagctaccagaacccacgcttgattggagattgatttttgacgcgctgagagaagaaggcttcagccgatcaaaattacttctgagcctacggggggacattcatacccaaagggcaacgatgttgaaaactttggaaaaaaattttagcaagaatgtataactaggattacccattaccagggaagtgcttaaaaggagcttgatggagctgaaaacccaggcctcgagaaactacgtgaaagaatgcagaacgcctcaggatgccgatgcgatcaacttggaagaaagggtatcagcaatggaagatgaaatgaatgaaatgaagccgagaaggaaagtttagagaaaaaaagaataaaaagaaatgagcaaagccttgaaggaattatgggactatgtgaaaagaccaaatctatgtctgattggtgtacctgaaagtgacggggagaatggaaccaagttggaaaacactctgcaggatattatccaggagaacttccccaatctagcaaggcaggccaaccgttcagattcaggaaataccagagaacgccacaaagatactcctttgagaagagcaactccaagcacacctaattgtccagattcaccaaactttgaaattgaaggaaaaaacgtttaagggcagcccagagagaaaggtcggggttacccacaaaggggaagcccatcagactaacaacagctgatctctcagcagaaactctacaagtcagaagagagggggaggccaatattcaacattcttaaagaaaagaattttcaacccagaatttcatatccagcccaaactaagcttcataagcgaaggagaaataaaatactttatagacaagcaaatgctgagagatttttgtcatcaccaggcctgcccttaaaagagctcctgaaggaagaagcactaaacatgggaaagggaacaaccagtaccagccacttgcaaaaacattgccaaatttgtaaagaccattgaggctagggaagaaacttgcatcaacttaacgagcaaaataaccagctaacatcataatgacaggattcaaattcacacataacaatattaactttaaatattaaatggactaaatgctcccatttaaagacacgaccagcaattgcaattggattaagagtcaagacccatcagtgtgctgtattcaggaaacccatctcacgtgcagagacacacataggctcaaaataaaaggatggaggaagatctaccaagccaatggaaaacaaaaaaaaaaggcaggggttgcaatccctagtctctgataaaacagactttaacccaacaaagatcaaaagagacaaagaaggccattacataatggtaaagggatcaattcaacaagaagagctaactatcctaaatatatatgcaccccaatacaggagcacccagattcataaagcaagtcctcagtgacctacaaagagacttagactcccacacattaataactgggagacctttaacaccccactgtcaacattagacagatcaaggagacagaaagtcaacaaggatacccaggaattgaactcagctctgcaccaagcggaccttaatagacatctacagaactctccacccccaaatcaacagaatatacatttttttcagcaccgcaccacacctattccaaaattgaccacatagttggaagtaaagctctcctcagcaaatgtaaaagaacaggaattataacaaactatctctcagaccacagtgcaatcaaactagaactcaggattaagaatctcactcaaagccgctcaactaccatggaaactgaacaacctgctcctgaatgactactgggtatataacgaaatgaaggcagaaataaagatgttctttgaaaccaacgagaacataagacacaacataccagaatctctgggatgcattcaaagcagtgtgtagagggaaatttatagcactatatgcccactggagaaagcagggaaagatccaaaattgacacccctaacatcacaattaaaagaactagaaaagcaagagcaaacacattcaaaagctagcagaaggcaagaaataacttaaaatcagagcagaactgaaggaaatagagacaaaaaaaaacacttcaaaaaattaatgaatccaggagctggttttttgaaaggatcaaaaaaactgatagaccgctagcaagactaataaagaaaaaaagagagaagaatcaaatagacacaataaaaaatgataaaggggatatccaccaccgatctcacagaaatacaaactaccatcagggaatactacaaacacctctacgcaaataaactagaaaatctagaagaaatggataaattcctcgacacatacactctcccaagactaaaccaggaagaagttgaatctctgaatagaccgataacaggagctgaaattgtggcaataatcaatagcttaccacaccatgcacagtccaggaccagatggattcactgccgaattctaccagaggtacaaggaggaactggtaccattccttctgagactattccagtcaatagaagggagcgggaatcctccactaactcattttatgaggccagcatcatcctgatcccaaagccgggcagagacacaacaaaaaaaagagaattttagaccaatatccttgatgaacattgatgcaaaaatccgcaataaaatactggcaaaccgaatccagcagcaccatcaaaaagcttatccaccatgatcaagtgagcttcatccctggggatgcaaggctcctttcaatatacacaaatcaataaatgtaatccagcatataaacaagagccaaagacaaaaaccacatggttatcttcaataggatgcaggaaaagggccttttgacaaaaattcaacaacgcttcatgctaaaaacttttaataaatttgctattgatgggacatatatttcaaaataataagagctatccatgacaaacccacagccaatatcatactgaatgggcaaaaactggaagcattccctttgaaaactggcacaagacagggatgccctctctcacctcaccactcctattcaacatagtgttggaagttctggccagggcaatcaggcaggagaaggaaataaagggtattcaattaggaaaagaggaagtcaaattgtccctgttttcagacgacatgattgtttatctagaaaaccccatcgtctcagcccaaaatctccttaagctgataagcaacttcagcaaagtctcaggatacaaaatcaatgtacaaaaatcacaagcattcttatacaccaacaacagacaaacagagagccaaatcatgggtgaactcccattcacaattgcttcaaagagaataaaatacctaggaatccaacttacaagggatgtgaaggacctcttcaaggagaactacaaactactcactgatcaaggaaataagagaggacacaaacaaatggaaaaacattccatgctcatggataggaagaatcagttatcatgaaaatggccatacttgcccaaggtaatttacagattcaatgccatccccatcaagctaccaatgactttcttcacagaattggaaaaaactactttaaagttcatatggaaccaaaaaaggagcctgcattgccaagtcaatcctaagccaaaagaacagagctggaggcatcacgctatctgacttcaaactgtactacaaggctacagtaaccaaaacagcataggtactggtaccaaaacagagatatagaccaatggaacagaacagagccatcagaaataatgccacttatactacaactatctgatctttggacaaacctgacaaaaacaagcaatgggggaaaggattcccttatttaataaatggtgctgggaaaaactggcttagccatatgtagaaagctgaaacttggatcccttccttacaccttatacaaaaattaattcaagatggattaaagacttaaatgttagacctaaaaccattaaaaaccctagaagaaaacctaggcaataccattcaggacataggcatgggcaaggatttcatgtctaaaacaccaaaagccaatggccaacaaaagacaaaaattgacaaatgggatctaatttaaactaaagagcttctgcacatctgcacagcaaaagaaactaccatcagagtaaacaggccaacctacaaaatggaagaaaattttcacaacctactcatctgacaaagggctaatatccagaatctacaatgaactcaaacaaatttacaagaaaaaaaacaaacaaccccatccaaaaagtggacgaaggcacatgaacagacacttctcaaaagaaggacatttatgcagcccaaaaaacacatgaaaaaatgctcaaccatcactggccatcagagtaatgcaaatcaaaaccacaatgagataccatctcacaccagttagaatggcgatcattaaaaagtcagggagcaacaggtcacagcttcaaaatattgttcagagaacttgcagtgaaagcaacataaaaaggagagcagggatagaaaaaggaatccagtgggcaaaagatgccaactgttcccaagagagtccagtgcgaccatcgcaacaggtgggtgcccctctgggacgaagcttccagaggaaggatcaggcagcaatatttgctgttctgcagcctctgctggtgatacccaggcaaacaaggtctggagtggacctccagcacattccagcaggcctgcagcagaggggcctgactgttagaagaaaaactaacaaacagaaaggaatagcatcaacatcaacaaaagccacatccacacagaaaccccatccaaaagtcaccaacatcaaagaccaaagtattggaagttctggccagggcaatcaggcaagagaaacaaagcgtattcaaataggaagccaggaagtcaaattgtctttgcttgaagatgacatgattgtacatttagaaaaccccatcatctcagccaaaaatctccttcagctgataagcaacttcaccaaagtctcaggatacaaaatcaatgtgcaaaaatcacaagcattcccatacaccaataaaacacaaatagagaaccaaatcatgagtgaactcccattcacaattgctacaaagagaataaaatacctaggaatcaaacttacaagggatgtgaaggacctcttcaagaataactacaaaccgctgttcaaggaaataagagaggacacaaataaatggaaaaacattccatggatggataggaagaatcaataccgtgaaaatggccatactgcccaaagtaatttatag

SEQ ID NO: 19915 - DNA, 288 bp, Homo sapiens
  SIMILAR (2)..(106): 1001254mologous to Homo sapiens 12-MAR-1998 Human CBFBOE11 (neuroglia mature factor beta homologue) cDNA,accession number A90298_cd1,Smith-Waterman Score=173.
agaaaagctgaggaaattccgcttccgaaaagagacagacaatgcagccatcataatgaaggtggacaaagaccggcagatggtggtgctggaggaagaatttcaggtgttcgaaatccgcaccactgatgacctcactgaggcctggctccaagaaaagttgtctttctttcgttgatctctgggctggggactgaattcctgatgtctgagtcctcaaggtgactggggacttggaacccctaggacctgaacaaccaagactttaaataaattttaaaatgcaaa

SEQ ID NO: 19916 - DNA, 381 bp, Homo sapiens
  SIMILAR (1)..(189): 981254mologous to Homo sapiens 12-MAR-1998 Human CBFBOE11 (neuroglia mature factor beta homologue) cDNA,accession number A90298_cd1,Smith-Waterman Score=307.
  misc_feature (1)...(381): n = a,t,c or g
ttggtggtgtncgaggtagacccagagctaacagaaaagctgaggaaattccgcttccgaaaagagacagacaatgcagccatcataatgaaggtggacaaagaccggcagatggtngtgctggaggaagaatttcagaacatttccccagaggagctcaaaatggagttgccggagagacagcccaggctgcaacggnanacaacagatgatgtatgcagggagtaaaaacaggctggtgcagacagcagagctcacaaaggtgttcgaaatccgcaccactgatgacctcactgaggcctggctccaagaaaagttgtctttctttcgttgatctctgggctggggantgaattcctgatgttttgagtcctcaaggtt

SEQ ID NO: 19917 - DNA, 961 bp, Homo sapiens
  SIMILAR (166)..(366): 821254mologous to Homo sapiens 12-MAR-1998 Human CBFBOE11 (neuroglia mature factor beta homologue) cDNA,accession number A90298_cd1,Smith-Waterman Score=285.
ctgtggacagaacaatcatgtctgactccctggtggtgtgcgaggtagacccagagctaacagaaaagctgaggaaattccgcttccgaaaagagacagacaatgcagccatcataatgaaggtggacaaagaccggcagatggtggtgctggaggaagaatttcaggttcgtggtttacagctacaagtacgtgcatgacgatggccgagtgtcctaccctttgtgtttcatcttctccagccctgtgggctgcaagccggaacaacagatgatgtatgcagggagtaaaaccaggctggtgcagacagcagagctcacaaaggttcagactgggatgtggctccagagtgttagggagaggtggtgtgggtcctgggtctgagggaagagggactagagtcctcactgtctcagtggtttttgtgtttgtatttttttttttaaagaactgggtctcgctctgtcatccaggctggagtgcagtggcacaacctcggctcactgcaacctccttcttcttggggtccagccaattctccggcttcagcctcccaagtagtgggacgacaggcacacgccaccacacctggctactttttgtatttttagtagagtcagggtttcaccatattggccaggctggtctcgaactcctgaccttaagtgatccacccacctcagcctcccaaagtgctctcttacaggtgagccaccgtgcccagccactgtctcagtgtttgagtagatcataatgccgagacctctctctgcccaggtgttcgaaatccgcaccactgatgacctcactgaggcctggctccaagaaaagttgtctttctttcgttgatctctgggctggggactgaattcctgatgtctgagtcctcaaggtgactggggacttggaacccctaggacctgaacaaccaagactttaaataaattttaaaatgcaaaaa

SEQ ID NO: 19918 - DNA, 753 bp, Homo sapiens
  SIMILAR (161)..(595): 581254mologous to Homo sapiens glia maturation factor homologous protein,accession number AB001993,Smith-Waterman Score= 317.
gaaagggcataaacaggatgtggtgttggatgaaaccttgctcctactgcacagcccgcccccctacagccccggtccccacgcctagaagacagcggaactaagaaaagaagaggcctgtggacagaacaatcatgctcttcctgggtccctccggcagtctgactccctggtggtgtgcgaggtagacccagagctaacagaaaagctgaggaaattccgcttccgaaaagagacagacaatgcagccatcataatgaaggtggacaaagacccggccagatggtggtgctggaggaagaatttccagaacatttccccccagagggagcttcaaaatgggatttccccggagagacaagcccagggttcgtggtttacagcttacaagtacgtgcatgacggatggcccgagtgtcctacccttttgtgtttcatctttcctccacgccctgtgggctgcaagccggaaacaacagatgatgtattgcagggagttaaaaacaggctggtggcagacagcagagctcacaaaaggtgttccgaaatcccgcaccacttgattgacctcactgaggccttggcttccaagaaaagttgtccttcctttcgttgatctctggggctggggactgaattcctgatgtctgagtcctcaaggtgactggggacttggaacccctaggacctgaacaaccaagactttaaataaattttaaaatgcgaaaaactcggaaaaaaaaaaaaaaaaaa

SEQ ID NO: 19919 - DNA, 638 bp, Homo sapiens
  SIMILAR (135)..(638): 701254mologous to Homo sapiens high-affinity copper uptake protein,accession number U83460,Smith-Waterman Score=533.
tggggggtagaagtggaggggccgttcgaagagtcgtgagggggtgacgggttaagattcggagagagaggtgctagtggctggacttgacctggaaagaatcttctgctgactctcaacttttcctggaaaaaatggatcattcccaccatatggggatgagctatatggactccaacagtaccatgcaaccttctcaccatcacccaaccacttcagcctcacactcccatggtggaggagacagcagcatgatgatgatgcctatgaccttctactttggctttaagaatgtggaactactgttttccggtttggtgatcaatacagctggagaaatggctggagcttttgtggcagtgtttttactaagcaatgttctatgaaggactcaagatagcccgagagagcctgctgcgtaagtcacaagtcagcattcgctacaattccatgcctgtcccaaggacaaaatgggaaccatcctttatgggagaacacacaaaactgttggggcaacagattgctgagcttccctcacctcctgcaaacagtgctgcacatcatccaggtgggtcataagctacttcctcatgctcatcttcatgacctacaacgggtacctctgcattgcagtagca

SEQ ID NO: 19920 - DNA, 1961 bp, Homo sapiens
  SIMILAR (668)..(811): 951254mologous to Homo sapiens high-affinity copper uptake protein,accession number U83460,Smith-Waterman Score=232.
atgtcacagaagatggaaaatttaatagggaatgctcatatcagtgcatatgaaatcataaaagaatttcaaaaggagcagcaccaggcaggactgccagggaccacagtgccctgcagctgccaagtatataagtgcagcaagaggccagagcgagtggccagagagggacccagtgaggacctggagcccttgccccagactgtaaggaagtgtggccagggctgcacactccatggagctggtggtagccagggacaagtgggagcccgcccctttggaattggtggggtggaagctctctggttcctggcatctccaagctactgggcaccactcattccccagtgccagctggggaagctacttgtggtgcgcctggtacagctgcaggctcgcagagagctggcacccatgctggcacctggagctgcctgccccatggtagcaacagcgtgtctgactgtgcagtggccagaccccatgctcactcacacacccctcaccattccacacctgacttgcagtctccttggagggaatgtggaactactgttttccagtttggtgatcaatacagctggagaaatggctggagcttttgtggcagtgattatactagcagtgttctatgaaggactcgatagcccaagagagcctgctgtgaccaaatggaaccatccttatgtagacacacaaaactgttgggcagcagatgctgagctttcctcacctcctgcaaacagtgctgcacatcatccaggtggtcataagctacctcctcatgctcatcttcatgacctacaatggatcttcagaacttttattcaggggagaaaggcccaggtagctgctgctgttcagcttaaggctaatctgaccttctataacaggagttcaagtcccagaaatccctggtcctccatcagagggaaccccccagcttggacccacagtacagatcacccatcttgggcctatcacactgagcaattgctgacctgcatctctgtggagtggagcccccaggagacaaacataaaaacaacggtcttaaagatgctcagagaactagaggaagatgtggagaaggtcaggaaaacaacacatgaacaggacgtatcccatgacgctcatccaaatgaaaccatttggctatacaggaagcatagaggcttcttgggagagctcaggaaagtttcagtcatggtggaaggtgaagaggaatcaaacatgtcttatatggctgaagcaggaaaaatgcagcgtgctaggaggcacatgatgttgattcgtacctttgctggtgttgctgactttggccaattgtctaaggtggtgtgggagacgggggcagtaacatgcatgatcaccagtatcactgtcttccatctctatgtcttacctcgcagggagaggcgggcagtaacgtgcatggagctgtcacctcctatgacaacaacaccttctggaatacctcctgaaggacacgcctgaggatgttttacagttaactttttaaaaaatacataagtagaaagagaacactctaaaataaaaataaaaggtatagtataataaacacaataacaaagtcacttattactatcaagcattgtatgctgtacataattgtatgtgctatgcttttatatgactaacagtgcaatagatttgtttacaccaccatcactaagggcatgcaagtaatgtgttgtgctccaacatactacaactatgatgccactaggtaacagaaaatgttcagctccattataatcttatgggaccaccttcctagatgcagtctgtcattgatggaaacgttgttacacagcacatgactatagactaatagccatagatttataatatgggaggatgtactatatatgcattgaaaagagctctggaaggatcccaatacattaccagaggttgcatataggaaaaaaaaaaaa

SEQ ID NO: 19921 - DNA, 576 bp, Homo sapiens
  SIMILAR (305)..(481): 1001254mologous to Homo sapiens HMG-1 protein (AA 1- 215),accession number X12597,Smith-Waterman Score=303.
atcaaagtctctacattctggttttaatagagttaggatgtggtacataattgcacctcaatgaggcataactttgcaaatattagactatgccatttcatgagttatagattgttataatgatcttgtatttttatgttcatttattgaagttctagttatttctggagttgctgtggatctacagatacgtgatattttggtataactagaatcttgatttctttcataaagttctgccatgttctatttctttccttaatgtttttttcttccctactgttttatcctccctttgctttggaaggatattgctgcatatcgagctaaaggaaagcctgatgcagcaaaaaagggagttgtcaaggctgaaaaaagcaagaaaaagaaggaagaggaggaagatgaggaagatgaagaggatgaggaggaggaggaagatgaagaagatgaagatgaagaagaagatgatgatgatgaataagttggttctagcgcagttttttttttcttgtctataaagcatttaacccccctgtacacaactcactccttttaaagaaaaaaattgaaatg

SEQ ID NO: 19922 - DNA, 528 bp, Homo sapiens
  SIMILAR (400)..(528): 1001254mologous to Homo sapiens HMG-1 protein (AA 1- 215),accession number X12597,Smith-Waterman Score=234.
ggcacgagggcagcatgttttctgacctttggtttgggtggtttaaaatggtgttctagattttaaaatcgtttaagtgaccagttagatactcattcagagcagactcgggcggatagatagggaatactgtatgggtatatctttgtgtctagactttttgagatcgccctgaaggactgtttttgttttgttttgtttgcttggcatagccccttcaaggaatttaatctctcggccatattcttgtctgtcttttacggaggttgatgtcgctactgtgttaaataaccagtactttggttttcattcccttactaagtactttaaggtcttatatgtcataattttattgctaacatcaaatatttattttattttttagaaaaataactaaacatgggcaaaggagatcctaagaagccgagaggcaaaatgtcatcatatgcattttttgtgcaaacttgtcgggaggagcataagaagaagcacccagatgcttcagtcaacttctcagagttttctaag

SEQ ID NO: 19923 - DNA, 1569 bp, Homo sapiens
  SIMILAR (206)..(877): 531254mologous to Spalax ehrenbergi high mobility group protein,accession number AF078819,Smith-Waterman Score=428.
gccaataggagccgcgctggctggagagtaatgttacagagcggagagagtgaggaggctgcgtctggctcccgctctcacagccattgcagtacattgagctccatagagacagcgccggggcaaagtgagagccggacgggcacctgggcgactctgtgcctcgctgcaggaaaaataactaaacatggggcaaaggagatatcctaagaaggccgagacgaaaaatgtcatcatattgcatttttttgtgcaaacttgtcggggaggagcataagaagaagcaccccagattgcttcaagtcaaccttctcagagtttttctaaggaagtgcttcagagaggttggaggcccatgtcttgcttaaagaggaaagggaaaattttgaagatatgggcaaaagcgggacaaggcccgtttttggaaagagaattgaaaaccctatatcccctcccaaaaggggaagaccaaaaaaagaagttcaaggatcccaattgcaccccaagagggcctccttcgggccttctttcctcttcttgctctggagtatccgccccaaaaatcaaaaggagaacatccttggcctgttccattggtggatgttgccgaagaaaactgggagacgatgtgggaattaacactgctgcagatggacaagcagcccttatgaaaagaaggcctgcgaagctgaaggaaaaatacgaaaaggatattgcctgcatatcgagcctaaaaggaaagcctgatgcagccaaaaaaagggagttgtcaaggcctgaaaaaagcaagaaaaagaaggaagaggaggaagatgaggaagatgaagaggatgaggaggaggaggaagatgaataagatgaagaagatgaagaagaacatggatggtgatgatgaataagttggtttctagcgccagtttttttttttctcttgtcctataaagcatttaacccccccctgtacacaactcactcccttttaaaggaaaaaaattggaaatgttaaggctgtgtaagatttgtttttttaaactggtaccagtgtctttttttggtatagttaacacactaccgaattgtgtctttaggatagccctgtcctggtggtattttcaataagccactaaccttgcctgggtacagttatggggggttgtaaattggccatgggaaattttaaagcaaggttcttgtttggtggcacagcccaaaatttagtttatatatgggggatggtagttttttccatcttcagttgtctctgatgcagcttatacaaaattattaggtggtctggttaacagaacaccactctgtaattgcaaaaaaaaaaaaaaaagttgcagctgttttgttgacattctgaatgcttctaagtaaatacaattttttttattagtattgttgtccctttcataggtctgaaatttttcttcttgaggggaagctagtcttttgcttttgcccttttgaatcacatgaatattacagtgtttatctttcatatattagctataaaagctttgtcaacacctggcaatctaatggggtatttaagtgagaagttcc

SEQ ID NO: 19924 - DNA, 413 bp, Homo sapiens
  SIMILAR (7)..(294): 891254mologous to Homo sapiens NF45 protein,accession number U10323,Smith-Waterman Score=446.
ggcgccatgaggggtgacagaggccgtggtcgtggtgggcgctttggttccagaggaggcccaggaggagggttcaggccctttgtaccacatatcccatttgacttctatttgtgtgaaatggcctttccccgggtcaagccagcacctgatgaaacttccttcagtgaggccttgctgaagaggaatcaggacctggctcccaattctgctgaacaggcatctatcctttctctggtgacaaaaataaacaatgggaatgagaaactggatggggtctccgggcactttaaaagcgcatattgaaaaatttacacgggggataccctataaaaggggcactgtgtccaggggacacaatgtggctgacctgggggggaaactcaagattttggccacctttggaagctgtt

SEQ ID NO: 19925 - DNA, 1907 bp, Homo sapiens
  SIMILAR (76)..(1371): 471254mologous to Homo sapiens NF45 protein,accession number U10323,Smith-Waterman Score=649.
  misc_feature (1)...(1907): n = a,t,c or g
acgcctcttcagttgtctgctactcagaggaaggggcggttggtgcggcctccattgttcgtgttttaaggcgccatgaggggtgacagaggccgtggtcgtggtgggcgctttggctccagaggaggcccaggaggagggttcaagccctttgtaccacatatcccatctgacttctatttgtgtgaaatggccttttccccgggtcaagccagcacctgatgaaacttccttcagctgaggccttgcctgaagaaggaatcaggaccctggctcccaattctgctgaacaaggcatctatcctttctctgggtgacaaaaattaaacaatgtgacttgataatctgacttgtggctcccagggacattttgaagttgcaaaattggaagaagttccgacaagttggggatcctataaaaaggggaacaatgactacaggacacaatgtggcttgacctgggtggtgatacctcaagaattctggcaacggttggaagctggttgcctgccctggggggaacaaagtcgtggaaagccttaggagcaccaggatccttctgaaagttttaaaccatgcttgaccaacgaaaactggctttgaaatcagttcttctgatgctacagtgaagattctcattacaacaggtgccacccaaatcttcgaaaactggatccagaactccatttggatatcaaagtattgcagagtgccttagcagccatccgacatgcccgctggttcgaggaaaatgcttctcagtccacagttaaagttctcatcagactactgaaggacttgaggattcgttttcctgggctttgagcccctcacaccctgggatccttgacctactagggccattatggctgtgatgaacaaccccaccagacagcctttgggcctgaaacgttggcataacagggcgctggcttggcagatttctgggctggcagggactgtttcctgccagggtttcagtggggtattcaattgacccctgtgagagttggcaactttaggagttacacacagtcatgaccctagaacagcagggacatggtctggctatacagctcaggactttcgtccgaatcctcnccacatggtggctttaggaagatccttggcccaggaggttgatgccagctatcttgcttctgaaatatctaccttgggatggagtgatagtaacacccttcaggaaaaggctttatgagaagcccaccagagaaagaaggaaggagaggaagaagaggagaatacagaagaacccacctcaaggagaggaagaagaaagccatggaaacttcaggagtgaccattccccttccactccttttccctaacccaagggggaagactggagccctaagctgccctgcctactgggctttacatggtgacagacatttcccgtgggatagggaagatagcaggaagaaaagttaaactccatagaagtgtcattccactgggttttgatattggcttaagctgccaagtctcccatttgtgacctatgccatccgatctataatggagggataccgaacgatttcttcctaatattctataatctcccaactccctgaaaaacccctctctcaactaatacttttgctgttgaaatgttgtgaaatgttaagtgtctggaaattttttttttctaagaaaaactattaaagtacttcctagtnnnnnnnnnnnnnnnnnnnnnnnnnngggggggggccctttaaaagaaccccttggggggcccaaatttaacgggggatggaaaggaaaaattttttccctaatggggggcgttttaaaaaccaacttgggaattttggaaaaaaaccttttttttggggggggaaaaaattggaaaaacccccctacaaaaattaaaggctttaggg

SEQ ID NO: 19926 - DNA, 403 bp, Homo sapiens
  SIMILAR (1)..(198): 1001254mologous to Homo sapiens homologous to mouse Rsu-1; putative,accession number L12535,Smith-Waterman Score=334.
aacgattttgaaatcctgccgccagatattgggaagctcacaaagttgcagatactcagccttagggataacgacctgatctcgctgcctaaggaaatcggggagcttacccagcttaaagagctccacattcaggggaaccgcctcaccgttctgcccccagaactaggaaacttggatttaactggccagaagcagcctttacggcagacacatgcaggccaacccagaaccaccgaagaagaataatgacaaatcgaaaaagatcagccggaaacccctggcagccaagaacagataaggaagggattggcatcggctggccttccagcaccttctctctccaacacttcattctctcttgccctgtctctcaaataaacccaatgctgcgtgtgaaaaa

SEQ ID NO: 19927 - DNA, 1065 bp, Homo sapiens
  SIMILAR (19)..(960): 1001254mologous to Escherichia coli K12 putative membrane protein,accession number AE000121,Smith-Waterman Score=1682.
atgttgagacggctctactgggacgacgacgatcatgaccatcatcatcatgacaatgatgattatcatcaccacgatggcggtcatcgtgacggtaatggctggcaacacaacggcgacaacatcaatatcgacgtcaacaatttcaaccgtatcaccggtgagcatcttactgataagaatatggcatggcggcacaatccaaactaccgtaatggtgtgccctatcatgatcaggatatggcaaagcggtttcatcaaaccgatgtcaacggcggaatgagcgccacgcaattacctgccccaacgcgcgacagccagcgtcaggcggcagcaaatcagtttcagcaacgaacacacgccgcaccagtcattacacgagatacccaacgtcaggcagcggcacagcggtttaatgaagctgaacactatgggagctatgacgacttccacgacttcagccgtcgccaaccactgacccagcaacaaaaggacgccgctcgtcagcgttatcagtccgcctcgcctgagcagcgccaggcagttcgcgagagaatgcagactaacccgaagatccagcagcgaagagaggcagcgcgtgagcgcattcagtccgcctcgcctgagcagcgccaggcggttcgcgagaaaatgcagactaacccgcagaaccagcagcgaagagacgcagcgcgtgagcgtattcagtccgcatcaccagagcagcgccaggtgtttaaggaaaaagtacagcagcgcccactgaatcaacagcaacgtgataacgcccgccagcgtgttcaatcggcatcacctgaacaacgtcaggtttttcgggagaaagttcaggagagccgcccacaacgtctaaacgacagtaaccatactgtcaggctgaataacgagcaacggtcagcagtatgcgaacgtctctctgaacgtggagcaagaagactggaaagcctctacggcagacacatgcaggccaacccagaaccaccgaagaagaataatgacaaatcgaaaaagatcagccggaaacccctggcagccaagaacagataa

SEQ ID NO: 19928 - DNA, 2306 bp, Homo sapiens
  SIMILAR (340)..(2025): 951254mologous to Homo sapiens N2,N2-dimethylguanosine tRNA methyltransferase,accession number AF196479,Smith-Waterman Score= 2712.
atgtccccagacattccccaagtgtccccggaggtaggactgtacccagttgcgaatcacagcagtatagttgtgcccacttgtcactccttatcagaggaggacactgaggctcagagaaaccacgaactggacacagtcaaagccctcagagaagacgcacaggtgctgaagatcccaaatcaaagtcccaaggacaccctggtaacagccttgcaattagcccagaaaggaacaaaagctgctgccatccgactgggggccaaagtggggcaaaaacagtctaggcaagcaaagtcaagtccagccctggtggtgccaggcctcctcagcttcccacgagcccggtttttcgagtggcagtctccagggctgccgaatacagcagcgatggagaacggcaccgggccctacggagaagaacgtccacgtgaagtccaggagacgacagtcaccgagggggctgccaaaatcgcctttcccagtgccaacgaggtcttttataacccggtgcaggaattcaatcgggacctgacatgtgctgtgatcaccgagtttgctcgcattcagcttggggccaaaggaatccagatcaaggttccaggagagaaggacacgcaaaaagtggtcgtggacttgtcagagcaagaggaggaaaaggttgaactgaaagagagtgaaaacctggcctcaggagaccaacctcgcacagcggccgtgggggagatctgtgaggaaggcctgcatgtgctggaaggcctggcagcttcaggcctacgttccattcgatttgccctagaggtgcctgggctcagatctgtggttgcaaacgatgcctccacccgggctgtggatctcatacgccggaatgtccagctcaatgacgtggcccacctggtacagccgagccaagcagatgcccggatgctgatgtaccagcaccagagggtgtcggagaggtttgacgtcatcgatctggacccctatggcagcccagccaccttcctggatgcagctgtgcaggctgtgagtgaaggagggttgctgtgtgtgacctgcacagacatggcggtgttggcggggaacagcggggagacgtgctacagcaagtacggggccatggccctcaagagccgggcctgccacgagatggccctgagaatcgtcctgcacagcctggacctccgcgccaactgctaccagcgcttcgtggtgccgctgctcagcatcagcgctgacttctacgtgcgtgtttttgtccgtgtcttcaccggccaggccaaggtcaaggcctcagccagcaagcaggcgctggtgttccagtgtgtgggctgcggggccttccaccttcagcgtctcggcaaagcgtcaggagtccccagcggccgggccaagttctctgcagcctgtggtccccctgtgacccccgagtgtgaacactgtgggcaacgacaccagcttggtggccccatgtgggcagagcccatccatgacctggattttgtgggccgtgtcctggaggctgtgagcgctaaccccggccgcttccacacctcggagcggatccgaggggtcctgagcgtcatcactgaggagctcccggacgtgcctctgtactacaccctggaccagctgagcagcaccatccactgcaacacaccaagcctcctgcagttgcggtcggccctcctccacgctgacttccgggtctcactctcccacgcctgtaagaacgctgtgaagacggatgcccctgcctctgccctctgggacatcatgcgttgctgggagaaggaatgtccggtgaaacgggagcgactatcagagactagcccagcgttccgcatttctcagtgtggagcccaggctgcaggccaacttcacccatccgggaagattgccaaccccagctcccgacagcgaggactcaagcgcttccaggcttaacccggaggcccaactggggtccccggcctcgttcccggcccagggggcaaggcggccgacgaagctatggaggagaggacgcaggctgcttcagaacaagcggaaggagccgccggaagatgttagcccagcgggctgcccggctcaagacatttccttgcaagaggtttaaggagggcacctgtcaacgcggggaccagtgctgctactcccacagccccccgacacccagggtttctgctgatgctgcccctgactgtccagagacctccaaccagaccccccctggacctggggctgccgctgggtcaggcatagactgaacaaataaagagatgtcacgtcaccctctcccaaaa

SEQ ID NO: 19929 - DNA, 2391 bp, Homo sapiens
  SIMILAR (2063)..(2353): 751254mologous to Homo sapiens N2,N2-dimethylguanosine tRNA methyltransferase,accession number AF196479,Smith-Waterman Score= 403.
gtgagaagaaacttaactgtgatttaattttgcatttctttcatgaaaaggttatcatgtataaccaataaaattggataagatgattttgggggagaaaagtaaatgaaaatgtgttataccccaagatcagactgttcttttattctgagtcaataagtaacatgtgatacaaactcaagattttattaaaatcatttgtaagttaaattagcatatctcggtggtgaaggaagacttttaataaagcaaaataatgagttaggtgaatcaacagaaagagtgaaaagtgttaacagtgacatttaaatggttacatgattttaattattcttttgataataaggcaaccttgtgatacctattccaagaaaacccatagccccactagggaaatccgcaggttgaaataagagctttgttcccctgccttttggtaatgttaaaggaaacaaatgggaaatgggttttaaaggaccttataacaatctccccaccctagcaaaaagaatctaaaaggttaaggtgggaagcattaggaaagagagtgaaaagaaaaataaaaaaaggcctcacacgcagcattgggtttattttgagagacaggggcaagagagaatgaagtgttggagagaagaaggtgctggaaggccagcccgatgccaatccctttctttatctgttcttggctgccaggggtttccggctgatctttttcgatttgtcattattcttcttcggtggttctgggttggcctgcatgtgtctgccgtagaggtatttgtatgtctcagaacggatatactcaaaaacatgggacacgccaagctggaactggtctgcaatgggggtcacccaggggattgttctctgctttggaatacctgcttctggcccagttaaaatcccaagtttcctaagttctggggggcagaacggtgaaggcggttcccctgaatgtgggagctctttaagctggggtaagctccccgatttcccttagggcagcgagatccaggtcgttatccctaaggctgaagtatcctgccaactttgtgaacctcccccaatatctggcggccaggattttcaaaaatcgttgtccacttaagaataagaagtgccacgccagggtggtccaggtaagaagaagtttccccaggaagagaattttcgctcaagttgttgtacgtcaagtccagaacctccaaaaacctggccagggaacccgaaagcctcgtggccaaaagtgttccaccctgttccatgcccaaggttccaggtgtttgaagtttcctgaaaggcctaactgaatctgtgtgggcagctcctcgaatttggttattaaaaaagttgaagcacctgccaaattgcttcagttctgcgatgttcggtggcaccattgttagcttgttatggctgaggaccagttgtgtgatatgggataaggtaaagaggccgttgacatccagcatgttggagatgccccggtcactcatgtccacctcgggctggttcttctcccggctctcctccaccaacttcttcagagacttggacatggtcacggaaggtagcccctaagacgatgggcgtgcaaccacaagcttcggcagaacgcacaccagctgagcagcaccatccactgcaacacaccaagcctcctgcagttgcgggtcggccctcctccacgctgactttcggggtctcactctcccacgcctgtaaagaacgctgtgaagacggatgcccctgcctctgccctctggggacatcatgcgttgctgggagaaggaatgtccggtgaaacgggagcgactatcagagactagcccagcgttccgcattctcagtgtggagcccaggctgcaggccaacttcacccatccgggaagatgccaaccccagctcccgacagcgaggactcaagcgcttccaggctaacccggaggccaactggggtccccggcctcgtgcccggccagggtgagtggtggtaaggtgggggtggggctcagccagggaaagaagggttaaagggcagatggggtcccacctactccctccccttcgcacaggggcaaggcggccgacgaagctatggaggagagacgcaggctgcttcagaacaagcggaaggagccccccggaagatgtggcccagcgggctgcccggctcaagacatttccttgcaagaggtttaaggagggcacctgtcaacgcggggaccagtgctgctactcccacagccccccgacacccagggtttctgctgatgctgcccctgactgtccagagacctccaaccagaccccccctggacctggggctgccgctgggccaggcatagactgaaccaataaagagatgtcacgtcaccttcaaaaaaa

SEQ ID NO: 19930 - DNA, 1152 bp, Homo sapiens
  SIMILAR (514)..(789): 391254mologous to Homo sapiens apoptotic-related protein PCAR,accession number AF174394,Smith-Waterman Score=109.
atgggcccctcgagcatccatcacagttcccaacacgcaaccgctccacaaatcctgcccaaggtgagggctggtcccaggtcctccggctgccgcatcagcgagtgcaggagggaggagaagcctccaaaggggcgacgtgggctcaaggatgcaactcggccaggagtgaactggggcccagatggaggtgtccagtctggtgctggagcccagccctggtccctgacccccttacctccagggtccgtatctcctgctggccgagcgcagcgccgctctatgcgggctgcagcagcccaggagcggagccctgggcgccggcgtctaggcaaggaacccctgattcgggagagctggaccaggagcgccccttggcgctgccttagtcaggacgccggtagagctggcagccaagtctgcggatccagccctcagacccgcggcgccgcagcggaaaaagtcgcggtgacgggggctaaaagctgcagcggcagggggaaaaaagccgcggcggcgagggcaaaaagccgcggcggtggggggagaaagacgcaaaaagctgcggcggcaaaaagccgcggctgcgagggcaaagatccccaaaaagccgcggcagcaggggctaaattccgcgaggccgggggcagaaagccgcggtggcgggggcagaaagcaacggaggcgggggcaaaaagtcgaggcggcggaggcataaagccgcaaaaacccgcagcagcgggggcaaaaatccatggcggcaaaaagccgcgtcggcgggggcaaagtagtggaaatggggtagaaggccagaacagcttggcattcctggagtgtgatgtggaaggaaaagtgcagaggaagacaaacaaagatgaaataacacatggtggccgttatgtagagagagccacaggacttgtgaataaaatccacaggcaaggacgtggcgattcgttttgcaatattggagggaatgccaaaccctatgtttgctgtggaaaagagtatggtagttcctcaaaacatcaaaatggtattgccttacgattcagcagccccacatctcaagacagcaaaagaattgaaagcagagtcttgaaaaaatatttgcacatccatgtttgcagcagcattattggcaatagctaa

SEQ ID NO: 19931 - DNA, 683 bp, Homo sapiens
  SIMILAR (431)..(348): 391254mologous to Homo sapiens Human secreted protein, SEQ ID NO: 4253,accession number G00172,Smith-Waterman Score=64.
attgcaccgcgctgcaggaattcggcacgagagcgcacagactttgaagcaggaaaagacagtctctagagcaacatggaaaggatccagtatttgttttcaggcaaaagcaagcctccaaaagccccttggttcttctctgtgtgtctcgccccttctgccttgtacaccagactgccggcaagcaagcggggaggtggcgaacagctgggatcctccagtgaaaagtttgctcagcgcgagagatgtcaagaggctgggattgtcgcctatcgggaggtggggagctctctcactcacacttcctgggaaatgaaggagaactaataggcagcccgcattttgcagccagccagcctggggtgggtattccttgaagtgaagcgctcataaatcccttctggggccagagccggtttcacaagctgcaggatttgggtggcctgcctgctctttgggagcgggcttgggaagctgaagaaattgaatcaggacctcaggccctttacagactcccttctacacttggttgctgattaagaacattatgtggcatttaaaatggcacaattatcttccgttggccgttcctagctaaaagtagactcctatcagcccgtgactgacgacaagaaggctcttcgtccctgtttttgaaataaacatgggtaaaatctgaaaaa

SEQ ID NO: 19932 - DNA, 1005 bp, Homo sapiens
  SIMILAR (357)..(626): 391254mologous to Lycopersicon esculentum extensin (class I),accession number X55681,Smith-Waterman Score=104.
ctagttttctccaggtgtgtgggcagccctggggctgcgttcttccatcaagaaaacacaagggggcggtagtggcacttgggcttgacggtggtgggacttaaaattgagtcccaatgtcactcggttaataagtgacaacacgagaatatgaaccaaggaggactggttgtttccagagccccgtgttctttcaactaaatgtctctgccaggctgccacactggacatcagaaaataaaaaccattcaaagatacagggcagaaccaattcatctgtggaattcttctcccgataggcgacaatcccagcctcttgacatctctcgcgctgagcaaacttttcactggaggatcccagctgttcgccacctccccgcttgcttgccggcagttttgtggactctccccagagtctttcttgcatgagatccaagaaccctctgttggggtctggatcaggacccctttccccaacttatattctttaagcaacaacccctcattttctccttcctcagcccctgataacaacttctccttcttctccttctcctccttctcctcctcttcctcctcctcctccttctttctcctcttcctattcttcttcttctttttttgagacagggttccactctgctgcccatgctttgggtcagcaataagaaagccgtccccctcagtcagcacaaaagctcgcccccagggagaaacaggaagatccttagctcttcttttccttccccagcgcccatcatcctccctccacagatcagacaccctgtacagggactgtgtacacagaatatgaggccagtttccaggagctttattggcttcataaggcaagtttgattccttaaaggaaagcacaccattccagtcaaagccttgataaaaataaccagtttttccaattgtggccttctggtggctgttgatgaccctggcaagtccctcaatttgtagctgcctgactccagtctctgcttctgctgtcat

SEQ ID NO: 19933 - DNA, 340 bp, Homo sapiens
  SIMILAR (308)..(66): 371254mologous to Gallus gallus homeodomain protein,accession number AF071875,Smith-Waterman Score=90.
aaaataaagttatttaatagtctccatttaattggtttatttgctgttaataaattggcaacacaaggaagggccccatgtccaggctcaggcaggagcggctgcctcaggcagaggcagggcaggcacagctgccccgtgccccaagggatggagggaaagggggaaggcagcattctctggtacccaccacccctgcccagggctcagaagcctttgcctgggtccaaaggccagggacaagggaggcttggctcacagatggggggcgggggtcacccatatcttcctccccactctgggactgactgacagccaagaaaccggcaggagctcacac

SEQ ID NO: 19934 - DNA, 1485 bp, Homo sapiens
  SIMILAR (508)..(1482): 991254mologous to Homo sapiens dJ756N5.2 (A novel protein (DKFZp727M231) similar to Trp4-associated protein TAP1 (ABCB2)),accession number AL132825,Smith-Waterman Score=1653.
atggcccagccgaatggccatgctacaagtctgttcagagcaggggcttctgaggagaatggcctgcctcacacgtcagccagaacccagctgccccagtcaatgaagattatgcatgagatcatgtacaaactggaagtgctctatgtcctctgcgtgctgctgatggggcgtcagcgaaaccaggttcacagaatgattgcagagttcaagctgatccctggacttaataatttgtttgacaaactgatttggaggaagcattcagcatctgcccttgtcctccatggtcacaaccagaactgtgactgtagcccgccaccccaggaactgagtatggaagtcgttggccccttactacctttggaatcaatggatttctcaacctactgcccctctaaagcaagagtggacagcgtggctattcccaggggccggcaggaacttcagacaggcaaagccgactgcttactgagcagctggaggattcttccctccacaaggaggaacaagtacttgttactcaacaaccaggagctgaatgaactcagtgccatctctctcaaggccaacatccctgaggtggaagctgtcctcaacaccgacaggagtttggtgtgtgatgggaagaggggcttattaactcgtctgctgcaggtcatgaagaaggagccagcagagtcgtctttcaggttttggcaagctcgggctgtggagagtttcctccgagggaccacctcctatgcagaccagatgttcctgctgaagcgaggcctcttggagcacatcctttactgcattgtggacagcgagtgtaagtcaagggatgtgctccagagttactttgacctcctgggggagctgatgaagttcaacgttgatgcattcaagagattcaataaatatatcaacaccgatgcaaaggtattcctgaagcagatcaacagctccctggtggactccaacatgctggtgcgctgtgtcactctgtccctggaccgatttgaaaaccaggtggatatgaaagttgccgaggtactgtctgaatgccgcctgctcgcctacatatcccaggtgcccacgcagatgtccttcctcttccgcctcatcaacatcatccacgtgcagacgctgacccaggagaacgtcagctgcctcaacaccagcctggtgatcctgatgctggcccgacggaaagagcggctgcccctgtacctgcggctgctgcagcggatggagcacagcaagaagtaccccggcttcctgctcaacaacttccacaacctgctgcgcttctggcagcagcactacctgcacaaggacaaggacagcacctgcctagagaacagctcctgcatcagcttctcatactggaaggagacagtgtccatcctgttgaacccggaccggcagtcaccctctgctctcgttagctacattgaggagccctacatggacatagacagggacttcactgaggagtga

SEQ ID NO: 19935 - DNA, 2456 bp, Homo sapiens
  SIMILAR (1620)..(2453): 821254mologous to Homo sapiens p40,accession number U93569,Smith-Waterman Score=1169.
gtgctgacaaggctgcctacctgatgggggtcagcagtggggacctcctcaaaggccttttgcacccccgggtgcgtgtagggaacgagtacgtgaccaagggccagagtgtggagcaggtggtgtttgctgtgggggctctggccaaggccacctatgaccggctgttcaggtggctggtgtctcggatcaaccagaccctggacacaaagctgccccggcagttcttcatcggggttctggacatcgctgggtttgagatctttgagttcaacagcttcgaacagctgtgcatcaacttcaccaatgagaaattgcagcagttcttcaaccagcacatgtttgtgctggagcaggaggagtacaagcgggagggcatcgactgggtcttcatcgacttcggccttgacctgcagccttgcatcgacctcatcgagaaggaggagcgactcaagccttcgcgaaagaaaataaccaaaaagcatacaaagaaacgtacggcgtctctcatattacacgccatgatatgctgcagatccctaaacagcagcaaaacgaaaaataccaagtgcctcaattcgatcaatcaacgattaaaaatttggagtctgcaaaaggacttgatgtgtgggacagctggccgctgcaaaacgctgcacggaaccagtcagctgaatacaacggctatccacgttgtgttagctcttgcgggaagcccgaaagacgctgatgacacatcaatctacatgttttatcaaaagcacatcctttactgcattgtggacagcgagtgtaagtcaagggatgtgctccagagttactttgacctcctgggggagctgatgaagttcaacgttgatgcattcaagagattcaataaatatatcaacaccgatgcaaaggtattcctgaagcagatcaacagctccctggtggactccaacatgctggtgcgctgtgtcactctgtccctggaccgatttgaaaaccaggtggatatgaaagcggcccttctcagcattcctggctttgttgagcggctttgcaaactggcgactcgaaaggtgtcagagtcaacgggcacagccagcttccttcaggagttggaagagtggtacacatggctagacaatgctttggtgctagatgccctgatgcgagtggccaatgaggagtcagagcacaatcaagtgttctggtttgagcaacatggtttggtgtcgggcgcagagaaagccccaggaactacgattgatcaggctcccagaatctatagatggagtgacctgacgaggacacaggcgcagtggcagagcgcgatgacttggtcgatgtccgcgttcactgagacttttttgacggagagggacaaacaatccaagtggagtggaattcctcagctgctcctcaagctgcacaccaccagccacctccacagtgactttgttgagtgtcaaaacatcctcaagcctctgctggtgatacccagacaaacagggtctggagtggacctccagcaaactctgacagacctgcagctgagggtcctgactgttagaaggaaaactaacaaacagaaaggacatccacaccaaaaccccatctgtatgtcaccatcatcaaagaccaaagaagctaaaaaccttgacaaaagattagacgaatggctaactagaataaacagcatagaaaagaccttaaatgacctgatggagctgaacaccatggctcgaaaactacgtgacgcatgcacaagcttcagtagccaattcgatcaagtggaagaaagggtatcagtgattgaagatcaaatgaatgaaatgaagcgagaagagaagtttagagaaaaaagaataaaaagaaacaaacaaagcctccaagaaatatgggactgtgtgaaaagaccaaatctacgtctgattggtgtacctgaaagtgacggggagaatggaaccaagttggaaaacactcttcaggatattatccaggagaacttccccaatctagcaaggcaggtcaacattcaaattcaggaaatacagagaacgccacaaagatactcctcgaggagaggaactccaagacacataattgtcagattcaccaaagttgaaattaaggaaaaaatattaagggcagccagagagaaaggtcgggttacccacaaagggaagcccatcagactaacagcggttctcttggcagaaactctacaagccagaagagagtgggggccaatattcaacattcttaaagaaaagaattttcaacccagagtttcatatccagccaaactaagcttcataagtgaaggagaagtaaaatcctttacagacaagcaaatgctgagagattttgtcaccaccaggcctgccttacaagagctcctgaaggaagcgctaaacatggaaaggaacaaccgataccaactactgcaaaaacatgccaaattgtaa

SEQ ID NO: 19936 - DNA, 1442 bp, Homo sapiens
  SIMILAR (465)..(1439): 991254mologous to Homo sapiens dJ756N5.2 (A novel protein (DKFZp727M231) similar to Trp4-associated protein TAP1 (ABCB2)),accession number AL132825,Smith-Waterman Score=1653.
gggcttctgaggagaatggcctgcctcacacgtcagccagaacccagctgccccagtcaatgaagattatgcatgagatcatgtacaaactggaagtgctctatgtcctctgcgtgctgctgatggggcgtcagcgaaaccaggttcacagaatgattgcagagttcaagctgatccctggacttaataatttgtttgacaaactgatttggaggaagcattcagcatctgcccttgtcctccatggtcacaaccagaactgtgactgtagcccgccaccccaggaactgagtatggaagtcgttggccccttactacctttggaatcaatggatttctcaacctactgcccctctaaagcaagagtggacagcgtggctattcccaggggccggcaggaacttcagacaggcaaagccgactgcttactgagcagctggaggattcttccctccacaaggaggaacaagtacttgttactcaacaaccaggagctgaatgaactcagtgccatctctctcaaggccaacatccctgaggtggaagctgtcctcaacaccgacaggagtttggtgtgtgatgggaagaggggcttattaactcgtctgctgcaggtcatgaagaaggagccagcagagtcgtctttcaggttttggcaagctcgggctgtggagagtttcctccgagggaccacctcctatgcagaccagatgttcctgctgaagcgaggcctcttggagcacatcctttactgcattgtggacagcgagtgtaagtcaagggatgtgctccagagttactttgacctcctgggggagctgatgaagttcaacgttgatgcattcaagagattcaataaatatatcaacaccgatgcaaaggtattcctgaagcagatcaacagctccctggtggactccaacatgctggtgcgctgtgtcactctgtccctggaccgatttgaaaaccaggtggatatgaaagttgccgaggtactgtctgaatgccgcctgctcgcctacatatcccaggtgcccacgcagatgtccttcctcttccgcctcatcaacatcatccacgtgcagacgctgacccaggagaacgtcagctgcctcaacaccagcctggtgatcctgatgctggcccgacggaaagagcggctgcccctgtacctgcggctgctgcagcggatggagcacagcaagaagtaccccggcttcctgctcaacaacttccacaacctgctgcgcttctggcagcagcactacctgcacaaggacaaggacagcacctgcctagagaacagctcctgcatcagcttctcatactggaaggagacagtgtccatcctgttgaacccggaccggcagtcaccctctgctctcgttagctacattgaggagccctacatggacatagacagggacttcactgaggagtga

SEQ ID NO: 19937 - DNA, 3138 bp, Homo sapiens
  SIMILAR (295)..(1038): 931254mologous to Homo sapiens dJ756N5.2 (A novel protein (DKFZp727M231) similar to Trp4-associated protein TAP1 (ABCB2)),accession number AL132825,Smith-Waterman Score=1144.
atggcagaaggcaaaggagaagcaggcaccttcttcacagggcagcaggacagattactatttgtctttttcattataaccatcgtagtagggctgttcagatgttctgttttttcttcttcttcgtcttcttcgtctttgtcttcttcgtcttcgtcttcttcatcttcatctttgtcttcgtcttttcttcatcttttcttcatcttcatcttcgtcttctttgtcttcatcttcttcgtcttcatctttgtcttcgtcttcgccttcttcttcatcttctttgtcttcgtcgtcttcttcgtcttcttcttcttcgtccttcttgtagaaattcttatgaggcctacgatctctatccggggacagaaactgaaaataagtgatgaaatgtccaaggactgcttgagtatcctgtataatacctgtgtctgtacagagggagttacaaagcgtttggcagaaaagaatgactttgtgatcttcctgtttacattgatgacaagtaagaagacattcttacaaacagcaaccctcattgaagatattttgggtgttaaaaaggaaatgatccgactagatgaagtccccaatctgagttccttagtatccaatttcgatcagcagcagctcgctaatttctgccggattctggctgtcaccatttcagagatggatacagggaatgatgacaagcacacgcttcttgccaaaaatgctcaacagaagaagagcttgagtttggggccttctgcagctgaaatcaatcaagcggcccttctcagcattcctggctttgttgagcggctttgcaaactggcgactcgaaaggtgtcagagtcaacgggcacagccagcttccttcaggagttggaagagtggtacacatggctagacaatgctttggtgctagatgccctgatgcgagtggccaatgaggagtcagagcacaatcaagcctccattgtgttccctcctccaggggcttctgaggagaatgggcctggctcacacgtcagccagaaccccagctgccccagtcaatgaagattatgcatgagatcatgtacaaactggaagtgctctatgtcctctgcgtgctgctgatggggcgtcagcgaaaccaggttcacagaatgattgcagagttcaagctgattccctggaacttaataatttgtttgacaaactgatttggaggaagcattcagcatctgcccttgtcctccatggacacaaccattatctgtgactgtagcccggacatcaccttgagagatacagtttttgaggcttcttcagagcttcagtgaccaccacgagaacaagtacttgttactcaacaaccaggagctgaatgaactcagtgccatctctctcaaggccaacatccctgaggtggaagctgtcctcaacaccgacaggagtttggtgtgtgatgggaagaggggcttattaactcgtctgctgcaggtcatgaagaaggagccagcagagtcgtctttcaggttttggcaagctcgggctgtggaagagtttccctcccgagggaccacctcctatgcagaccagatgttcctgctgaagcgacggcctcttggagcacatcctttactgcattgtggacagcgacgtgtaagtcaagggatgtgctccagagttactttgaccttcctgggggagctgattgaagttcaacgttgatgcattcaagagattcaataaatatatcaacaccgatgcaaagttccaggtattcctgaaagcagattcaacagctccctggtggactccaacatgctggtgcgctgtgtcactctgtccctggaccgatttgaaaaccaggtggatatgaaagttgccgaggtactgtctgaatgccgcctgctcgcctacatatcccagggtgcccacgcagatgtccttcctcttccgcctcatcaacatcatccacgtgcagacgctgacccaggagaacgtcagctgcctcaacacccagcctggtgatcctgatgctgggcccgacggaaagagcggttgcccctgtaacttgcggctgcttgcagcggattggagcacagcaagaagtaccctggattgctgcgtcaacaacttccacaacctgctttgcttctggcagcagcactacctgcacaaggacaaggacagcccctgcctatagaacaacctcctgcatgagcttctcatactggaatggagacagtgtccatcctgttgaacccggaccggcagtcaccctctgctctcgttagctacattgaggagccctacatggacatagacagggacttcactgaggagtgaccttgggccaggcctcgggagtgctgctgggccagtgtgggtgagcgtgggtacgatgccacacgccctgccctgttcccgttcctccctgctgctctcttgcctgccccaggtctttggggtacaggcttgggtggggaggggaagtccttaggaagcccttgggtccccctgggtcttgagggccctaaggtcattggagagcctcagtccccataatgaaggacagggtaccatgcccacctttcccttcagaaccctgggggcccagggccacccaagaaggtaaagaggacatttagcatttagttctgttgttgagttccttgccggtttttttgggttgttcagtcagttcccagagtgggggaggaagatatggggtgaccccccaccccccaatctgtgaaagcaaaagcctccccttgtccccctggccctttggaacccccaggcaaaaagcttcctgaacccctgggcaaggggtggtgggtacccagagaatgctgccttcccccaagccttgcccctctgccctcattttcctgtagctcctctggttctgtttgctcattggctgctgtgttcatccaagggggttctcccagaagtgaggggcctttccctccgatcccttggggcacggggcagctgtgcctgccctgcctctgcctgaggcagccgctcctgcctgagcctggacatggggcccttccttgtgttgccaatttattaacagcaaataaaccaattaaatggagactattaaataactttattttaaaaatgaaaaaaaaaaaaaaaaaacctagt

SEQ ID NO: 19938 - DNA, 4226 bp, Homo sapiens
  SIMILAR (1369)..(2031): 861254mologous to Homo sapiens moesin B,accession number M69066,Smith-Waterman Score=891.
  misc_feature (1)...(4226): n = a,t,c or g
gaccggcccggaattcacgggtcgacgatttcgtgcggaagccgggccacataaaggagcgggcggcgcgacaggggcggcatctttcctgggtggggtttgtgaagtcgtggcccgttagcaggaagcctaacagtcgccccgacgcatagtgagggacccaatctgagtccccggccagccgaatccaagccgtgtgtactgcgtgctcagcactgcccgacagtcctagctaaacttcgccaactccgctgcctttgccagccaccatgcccaaaacgatcagtgtgcgtgtgaccaccatggatgcagagcttggagtttgccatccagcccaacaccaccgggaagcagctatttgaccaggtggtgaaaactatttggttggaggggaagtttgggttctttggtctgcagaaccaggacactatagggtttctccaccctggctgaaactcaataggaaggttgactagcccaggaatgtgcggaaggaaaagccccctgctctttaaagttccgtgccaagttctaccctcgaggatgtgtccgaggaattgattcaggacatcactcagcgcctgttcctttctgcaagtgaaagagggcattctcaatgatgatatttactgccccgcctgagaccgctgtgctgctggcctcgtatgctgtccagtctaagtatggcgacttcaataaggaagtgcataagtctggctacctggccggagacaagttgctcccgcagagagtcctggaacagcacaaactcaacagggacccagtgggaggagcggatccaggtttggccatgaggaacaccgtggcatgctccaggggaggatgctgtcctggaaatatctgaaagattgctccaagatctggagatgtatggtgtgaactacttcagcatccaagaacaagaaaggctcagagctgtggctgggggtggatgccctgggtctcaacatctatgagcagaatgacagactaactcccaagataggcttcccctggaagtgaaatcaggaacatctctttcaatgataagaaattttgtcatcaagcccattgacaaaaaagccccggacttcgtcttctatgctccccggctgcggattaacaagcggatcttggccttgtgcatggggaaccatgaactatacatgcgccgtcgcaagcctgataccattgaggtgcagcagatgaaggcacaggcccgggaggagaagcaccagaagcagatggagcgtgctatgctggaaaatgagaggaagaagcgtgaaatggcagagaaggagaaagagaagattgaacgggagaaggaggagctgatggagaggctgaagcagatcgaggaacagactaagaaggctcagcaagaacttggaagaacagacccctagggctcctggaactttgagccaggaacggaagcgtgcccagagcgaggctgaaaagctggccaaggagcgtcaagaagctgaagaggccaaggaggccttgctgcaggcctcccgggaccagaaaaagactcaggaacagctggccttggaaatggcagagctgacagctcgaatctcccagctggagatggcccgacagaagaaggagagtgaggctgtggagtggcagcagaaggcccagatggtacaggaagacttggagaagacccgtgctgagctgaagactgccatgagtacacctcatgtggcagagcctgctgagaatgagcaggatgagcaggatgagaatggggcagaggctagtggctgacctacgggcctaatcatatggccaaggaccgcagtgaggaggaacgtaccactgagggcagagaagaatgagcgtgtgcagaagcacctgaaggccctcacttcggagctggccaatgccagagatgagtccaagaagactgccaatgacatgatccatgctgagaacatgcgactgggccgagacaaatacaagaccctgcgccagatccggcagggcaacaccaagcagcgcattgacgaatttgagtctatgtaatgggcacccagcctctagggacccctcctccctttttccttgtccccacactcctacacctaactcacctaactcatactgtgctggagccactaactagagcagccctggagtcatgccaagcatttaatgtagccatgggaccaaacctagccccttagcccccacccacttccctgggcaaatgaatggctcactatggtgccaatggaacctcctttctcttctctgttccattgaatctgtatggctagaatatcctacttctccagcctagaggtactttccacttgattttgcaaatgcccttacacttactgatgtcctatgggagtcaagtgtggagtaggttggaagctagctcccctcctctcccctaccactgtcttcttcagggtcctgagatttacacggttggagtgttatgcggtctagggaatgagacaggacctaggatatcttctccagggatgtcaactgacctaaaatttgccctcccatcccgtttagagttatttaggctttgtaacgattgggggaataaaaagatgttcagtcatttttgtttctacctcccagatcggatctgttgcaaactcagcctcaataagccttgtcgttgactttagggactcaatttctccccagggtggatgggggaaatggtgccttcaagaccttcaccaaacatactagaagggcattggccattctgattgtggcaaggctgattagaagatcctgccccgattccttgtaggagtatgggccggtcttaaagtgagctctatgggcagatcttaccccttactttatgattccagatcctgcagtcacttcgtggggatcttgcccctccctgcttcaatacccaaatcctcttccagctattaacagtaggggattgagttacccaaaaggttcagccagccccatcaggactcttgtgaaaagagaggatatgttcacacctagcgtcagtattttccctgctaggggtgtttaggtctcttcccctctcagagctacttgggccatagctcctgctccacagccattccagcctatggcatctacagcttgatgccagtaggctctaactagggagtgagtgcaaaaagctgagtattggtgagagaagcctgtgccctgatccaagttttactcaaccctctcaggtgaccaaaatccccttctcatcactcccctccaaagagggtgactggggccctgcctctgttttggacaaacctctaacccaggtcttgacaccagctgtttnttgtcccttgggagctgtaaaaccagaggagctggctgggggattctgggcctagtccctttccacacccccaccccttgctctcaacccaaggagcatccacctccctcctctgtctcatgggtgctccttcttctttctacaagtattaatgtactctactgatatctaaaatattgatttctgccttcccttggtaatggcaccattaggaagatatttagtcttgggggcaggatgattttggcctcattactttaccacccccacacctggaaaggcatatactataattcaaaaatgacatttttgccaaaatttattaatataagaagctttcagtatttagtgaatgcccatctgtcaactataaggtccatacaaatccatttcttaaaagtacttgtttatttgtttatatttattactggtttggtctttcttcccccaggggttccaagtcccttccaaagggggccatcctgtccccaacccatgcaagtgcccccctagccttagagccctcccctcaaatccccccctgggccacccacccccccactctgtggcctggacctttgagggagtctttgtgtggcattggctgtggaattaagctccacttgggtgatatgtccgtatattgggcttaaattgaaacccggggattgtgggggcaatctatttaataggctgccttaaaagtcagtaaacttaccccttaagggaaggcctgggggaaaaaggttaagatttttgtatttcaggggtttttttgtgtacttttttggggtttttttaaaaaattggttttttggaggggttttatgctcaaatccatgtttctattttcagtgcccaataaaatttaggaagacttcaaaaaaaaaaaaaaaaaagggcggccgct

SEQ ID NO: 19939 - DNA, 3049 bp, Homo sapiens
  SIMILAR (366)..(992): 841254mologous to Homo sapiens Human placenta-derived coagulation inhibitor protein,accession number R03726,Smith- Waterman Score=834.
gccacgtgtccggctcggagcccacggctgtcctcccggtccgcgccgctgcggttgctgctgggctaacgggctccgatccagcgagcgctgcgtcctcgagtccctgcgcccgtgcgtccagtctgcgacccgaggcctccgctgcggctgcgattctgctgcgaacctggacaccatggccaaaccaccacagggtgccggggaccggggctccatccatgacttcccaggctttgaccccaaccaggatgccgaggctctgtacactgccatgaagggctttggcagtgacaaggaggccatactggacataatcacctcacggagcaacaggcaaaggcaggagggctgccacagctacaaagtccctctacggcaaaggacctcattgctgatttaaaagtatgaattgacgggcaagttttgaacggttgattgtgcgcctgatgaggccacctgcctattgtgatgccaaagaaattaaaagatgccatctcgggccattggcactgatgagaagttgcctcattgagatcttggcttcccggaccaatgagcagatgcaccagctggtgaagagaatcacaaagatgcctacggagcgggacctggaggctgacatcatcggcgacacctctggccacttccagaagatgcttgtggtcctgcttcagggaaccagggaggaggatgacgtagtgagcgaggacctggtacaacaggatgtccaggacctatacgaggcaggggaactgaaatggggaacagatgaagcccagttcatttacatcttgggaaatcgcagcaagcagcatcttcggttggtgttcgatgagtatctgaagaccacagggaagccgattgaagccagcatccgaggggagctgtctggggactttgagaagctaatgctggccgtagtgaagtgtatccggagcaccccggaatattttgctgaaaggctcttcaaggctatgaagggcctgggggactcgggacaacaccctgatccgcatcatggtctcccgtagtgagttggacatgctcgacattcgggagatctttcggaccaagtattgaggaagtccctctacagcatggattcaagaatgacacctctgggcgagttacaagaagactctgctgaagctgtctgggggagatgatgatgcggctgaccagttcttcccgaaggcagcgcaggtggcctatcagatgtgggaacttagtgcagtagcccgagtagagctgaagggaactgttgcgcccagccaatgactttcaaccctgaacgcagatgccaaagcgctgcggtaaagccatgaagggactcgggactgacgaagatacaatcatcgatatcatcacgcaccgcagcaatgtccagcggcagcagatccggcagaccttcaagtctcactttggccgggacttaatgactgacctgaagtctgagatctctggagacctggcaaggctgattctggggctcatgatgccaccggcccattacgatgccaagcagttgaagaaggccatggagggagccggcacagatgaaaaggctcttattgaaaatcctggccactcggaccaatgctgaaatccgggccatcaatgaggcctataagggaggactatcacaagtccttggaggatgctctgagctcagacacatctggccacttcaggaggatcctcatttctctggccacggggcatcgtgaggagggaggagaaaacctggaccaggcacgggaagatgcccaggtggctgctgagatcttggaaatagcagacacacccagtggagacaaaacttccttggagacacgtttcatgacgatcctgtgtacccggaagctatccgcacgtccggagagtcatccaggagttcatcagattgaccaactatgacgtggagcacaccatcaagaaggatgatgttctggagatatcagggatgcattttgtggccattgttcaaaagtgcaaagaccaagcctctcttctttcccgacaaacctttacaaatccatgaaggggtgctggcacagatgagaagactctgaccaggatcatgggtatcccgcaggggagattgacctgctcaacatccggagggggattccaatgagaaatttgacaagtctctccaccaagccatttgagggtgaacaactaccggagacttcttgaaaggccttgcgggctctctgtggtgggtgaggactagggcccacagctttggcggcgcacttctgcccaagaaaatggttatcagcaccaggccgccaatggccaagcctgattgttccagctccagagacttaaggaaggggcagggggtggggggaggggttggggttgggctctatttctttcagtggagcttaggaaacgctcccacttcccacggggccatcgagggcccagcacgagctgagcggctgaaaaaccgtagccatagatcctgtccacctccactccccctctgaccctcaggctttcccagcttcctccccttgctacagcctctgcccctggtttgggctatgtcagatccaataaacatcctgaacctctgtctgtaaaatgagtagtgtctgtactttgaatgagggggttggtggcaggggccagttgaatgtgctgggcggggtggtgggaaggatagtaaatgtgctggggcaaactgacaaatcttcccatccatttcaccacccatctccatccagggccgcgctagagtactgggaccagggaatttgggatgcctggggtttcaaatcttgcatcttgccatggcactttgttttcttgaccttagggccagccccttttccttccctgagtctctattttcttatctacaatgagacagttggacaaaaaaatcttggcttcccttctaacattaacttcctaaagtatgcctccgatctcattccccttgacactttttattttctaaggaagaaaataaaaagagatacacaaacacataaacacaaaagaaaaaaaagggggggccgtttttaaaaag

SEQ ID NO: 19940 - DNA, 435 bp, Homo sapiens
  SIMILAR (21)..(362): 901254mologous to Homo sapiens FGF receptor activating protein 1,accession number AF159615,Smith-Waterman Score=552.
tgcattaccgcgcccggaattcccgcgtcgacgatttcgtcgaaaatgctttcattgtgttcattgcctcatccctcgggcacatgctcctcacctgcattctctggcggttgaccaagaagcacacagatcgcaagtcctacagctggaaacagcggctcttcatcatcaacttcatctccttcttctcggcgctggctgtctactttcggcacaacatgtattgtgaggccggagtgtacaccatctttgccatcctggagtacactgttgtcttaaccaacatggcgttccacatgacggcctggtgggacttcaggaacaaggagctgctcataacctctcagcctgaggaaaagcgaatctgaacccctcaatcctgcctgggaggacgcaccccacttgccataatctagataccccgatgccactccg

SEQ ID NO: 19941 - DNA, 939 bp, Homo sapiens
  SIMILAR (46)..(621): 791254mologous to Homo sapiens FGF receptor activating protein 1,accession number AF159621,Smith-Waterman Score=756.
atgatgaaatgtgaggagcagaaggaggaggaggaagagactgtcaggatgttctctgcggcctcccagcctttggaccccgatgggaccttgttccggcttcgcttcacagccatggtctggtgggccatcacttttcctgtgttcggcttcttcttctgcatcatctggtccctggtgttccactttgagtacacggtggccactgactgtggggtgagtgccagctccccagcccctgggtcagggccaggtgcccaattacctgccctcggtgagctcagccatcggcggggagggtgccccagcgctacgtgtggcgtttctgcatcggcctgcactcggcgcctcgcttcttggtggcccttcgcctactggaaccactacctcagctgcacctccccgtgttcctgctatcgcccgctctgccgcctcaacttcggcctcaatgtcgtggagaacctcgcgttgctagtgctcacttatgtctcctcctccgaggacttcaccatccacgaaaatgctttcattgtgttcattgcctcatccctcgggcacatgctcctcacctgcattctctggcggttgaccaagaagcacacagtaagtcaggaggtacggtctatccctagcgggggctccaaggcagcccagaagaaaatcaaggacatctgtcctcaggattcgggtaatggtgaggatcgcaagtcctacagctggaaacagcggctcttcatcatcaacttcatctccttcttctcggcgctggctgtctactttcggcacaacatgtattgtgaggctggagtgtacaccatctttgccatcctggagtacactgttgtcttaaccaacatggcgttccacatgacggcctggtgggacttcgggaacaaggagctgctcataacctctcagcctgaggaaaagcgattctga

SEQ ID NO: 19942 - DNA, 2652 bp, Homo sapiens
  SIMILAR (338)..(592): 961254mologous to Homo sapiens FGF receptor activating protein 1,accession number AF159615,Smith-Waterman Score=447.
aaaattaaaaaatgcagatcctcaggttccaagccttctgcattttcaaacaattcccccagtgagttgtatgggtaattaaagtttgtgaagcactgctctaggccctggagtctaagagagcctcttcccatctttggctttcctgtccccatctaaacccttgttcagtcatcccccatcctttcacctctcaaacaagcaagacaccagtccctgcagctgtgtattatcttctcctttttccttaaggactgaagcttcaataggagttccaggcattaagatggatggtggaaatgcacaagaacatggtcatttccttagactaccccaggtgcccaattacctgccctcggtgagctcagccatcgcgagagaggtgccccagcgctacgtgtggcgtttctgcatcggcctgcactcggcgcctcgcttcttggtggccttcgcctactggaaccactacctcagctgcacctccccgtgttcctgctatcgcccgctctgccgcctcaacttcggcctcaatgtcgtggagaacctcgcgttgctagtgctcacttatgtctcctcctccgaggacttcagtgggtgcctggatgagggaggagtggggaagtgttccctgaggggacgggcctgcccctaccacattcggaccttcctacttcgtggtgtgggcactccctgcaatgtggctcccaatcctctttccctccagccatccacgaaaatgctttcattgtgttcattgcctcatccctcgggcacatgctcctcacctgcattctctggcggttgaccaagaagcacacagtaagtcaggaggtacggtctatccctagcgggggctccaaggcagcccagaagaaaatcaaggacatctgtcctcaggattcgggtaatggtgaggtgggaactgagttctaatgggaaccctggcagaggggtgctggggttggggctggggcttgggaacaaactgagggtggttggtcagaatctaggactatagcactgtgtttgggtagtgtgggagactggagaatagaagagatggaggctgcaaatggggatagaatgaggagtcgcatctaggcggcagtgagttaggaacagtgtcagaggactggtctgtcataattccagcgccccacccatgtacatgggtttcttttcccccacagtatttggaggtggggttggtgggtgactccatgtaactttcatactccatccccctgaagtggaagcggcaggaataccactgctcctcggcccatcactcccccagaggcagggacgtgaacacatagtcgtcattcttgctgcccctgcctgtgctcccttccatgaccgctagtgggagccaagggagataaggcccagcccttaggagttagggctgagaggggagcccacgctctcatacccagcaagctgcagagtgatcagacagcccattccctaggatcgcaagtcctacagctggaaacagcggctcttcatcatcaacttcatctccttcttctcggcgctggctgtctactttcggcacaacatgtattgtgaggctggagtgtacaccatctttgccatcctgggagtacactgttgtcttaaccaacatggcgttccacatgacggcctgggtggggacttcggggaacaaggagcttgcttcataacctctcagccttgaggaaaaagcgatttttgaaacctttcagtcctgcttggggaggacgcagcccactgcccagaaacaagaaacacgataccattctggccttccccaccccacatcctctcttggccttactgaagatgggggaagggtaagaaggaagggtgtaggccaaggctcaccccagtgctgctggcttctcctctccacccctcatatgggcgtggggtcctcaaacatcacctttacctgagaggccccaagaagctgagctggcagagagctccaccatttggtgctaaaaaaaaaaaaacgtcctgaggttcatgaccaccatccagtttctgggcctttacacagtcacctttcactgagggtcagggagcccctgagcaagtggctgctccctgacaaccacaagccatttctctgcacgggggtcattcactaggactaatgtatttcatgatctactgtgcacatccaggcctgtggcccaaagacccctgctaaagttgctcaggtgttctagtcctgacttcacctttttgatttggtgtgtgccctagggtatgtacccttccccatctgagcctcggtgtgtccatgtgtctggtgggggatgggtggactgtatgaatttcccaaggactcctacccagtcagtggttctgatgtcatcgggtggaggtggtgttctaaaccctaaagggatgacctgctcccagaaacagcacccagcacagcatgtattttcttctcttctgaaagttctggcttgtagacccctcccttcctttgcaaaggtatgggatagaggggtcagatgcagatctctactgtaaaatgggctccctggtatctcctgtcttccctactgctccaaaccctaaattttggttgtacattttatttgaaaggaaaataaattttttttttgggccaaaaaaaaaaaaaaaaaa

SEQ ID NO: 19943 - DNA, 206 bp, Homo sapiens
  SIMILAR (3)..(122): 921254mologous to Homo sapiens Human APLP2,accession number R47499,Smith-Waterman Score=172.
cagaaaaggcggcccagatgaaatcccaggtgatgacacatctccacgtgattgaagaaaggaggaaccaaagcctctctctgctctacaaagtaccttatgtagcccaagaaattcaagaggaaattggatctggagtgggagagcaggatgggggactgatcggtgccgaagagaaagtgattaacagtaagaataaagtggat

SEQ ID NO: 19944 - DNA, 454 bp, Homo sapiens
  SIMILAR (11)..(301): 951254mologous to Homo sapiens binding protein,accession number L23113,Smith-Waterman Score=473.
atgattttccaatgccgagagagttggaggcctcgaggaagagcgggaatccgtgggcccactgcggcaggacttcagtatgagtagcagtgctctcattggcgtgctggtcatcgcagtggccattgccacggtcatcgtcatcagcctggtgatgctgaggaagaggcagtatggcaccatcagccacgggatcgtggaggttgatccaatgctcaccccagaagagcgtcacgtgaacaagatgcagaaccatggctatgagaaccccacctacaaatacctggagcagatgcagatttaggtggcagggagcgcggcagccctggcggagggatgcagatgtgcaggctcctcctctctggactttctccaaaggcactgaccctcggcctctactttgtcccctcacctccaccccctcctgtcaccggccttgtgacattcactcaga

SEQ ID NO: 19945 - DNA, 2111 bp, Homo sapiens
  SIMILAR (1)..(1938): 841254mologous to Homo sapiens binding protein,accession number L19597,Smith-Waterman Score=2683.
atggcggccaccgggaccgcggccgccgcagccacgggcaggctcctgcttctgctgctggtggggctcacggcgcctgccttggcgctggccggctacatcgaggctcttgcagccaatgccggaacaggatttgctgttgctgagcctcaaatcgcaatgttttgtgggaagttaaatatgcatgtgaacattcagactgggaaatgggaacctgatccaacaggcaccaagagctgctttgaaacaaaagaagaagttcttcagtactgtcaggagatgtatccagagctacagatcacaaatgtgatggaggcaaaccagcgggttagtattgacaactggtgccggagggacaaaaagcaatgcaagagtcgctttgttacacctttcaagtgtctcgtgggtgaatttgtaagtgatgtcctgctagttccagaaaagtgccagtttttccacaaagagcggatggaggtgtgtgagaatcaccagcactggcacacggtagtcaaagaggcatgtctgactcagggaatgaccttatatagctacggcatgctgctcccatgtggggtagaccagttccatggcactgaatatgtgtgctgccctcagacaaagattattggatctgtgtcaaaagaagaggaagaggaagatgaagaggaagaggaagaggaagatgaagaggaagactatgatgtttataaaagtgaatttcctactgaagcagatctggaagacttcacagaagcagctgtggatgaggatgatgaggatgaggaagaaggggaggaagtggtggaggaccgagattactactatgacaccttcaaaggagatgactacaatgaggagaatcctactgaacccggcagcgacggcaccatgtcagacaaggaaattactcatgatgtcaaagttcctccaactcctctgccaaccaatgatgttgatgtgtatttcgagacctctgcagatgataatgagcatgctcgcttccagaaggctaaggagcagctggagattcggcaccgcaaccgaatggacagggtaaagaaggaatgggaagaggcagagcttcaagctaagaacctccccaaagcagagaggcagactctgattcagcacttccaagccatggttaaagctttagagaaggaagcagccagtgagaagcagcagctggtggagacccacctggcccgagtggaagctatgctgaatgaccgccgtcggatggctctggagaactacctggctgccttgcagtctgacccgccacggcctcatcgcattctccaggccttacggcgttatgtccgtgctgagaacaaagatcgcttacataccatccgtcattaccagcatgtgttggctgttgacccagaaaaggcggccccagatgaaattcccaggtgatgacacatctcccacgtgattgaagaaaggaggaaccaaagcctctctctgctctacaaagtaccttatgtagccccaagaaaattcaagaggaaattgatgacgtccttcaggagcagcgtgcagatatggaccagttcactgcctcaatctcagaggacccctgtggacgtccgggttatgctctgatgagagtgaggagatcccaccggttccaccccttccaccccttcccagcccctacctgagaacgaaggatcttgggagttgggagagcagggtgggggggactgatcggtgccgaagagaaagtgattaacagtaaagaataaagtggatgaaaaacatggtccattgaacgagactcttggatgttaaggaaatgattttcaatgccgagagagttggaggccctcgaggaagagcgggaatccgtgggcccactgcgggaggacttcagtctgaagtagcagtgctctcattggcctgctggtcatcgcagtggccattgccacgggtcatcgtcatcagcctggtgatgctgaggaagaggcagtatggcaccatcaagccacgggatcgtggaagggttgatccaatgctcaccccagaagagcgtcacctgaacaagatgcagaaccatggctatgagaaccccacctacaaatacctggagcagatgcagattt

SEQ ID NO: 19946 - DNA, 4069 bp, Homo sapiens
  SIMILAR (1021)..(1995): 631254mologous to Homo sapiens CDEI binding protein,accession number Z22572,Smith-Waterman Score=907.
  misc_feature (1)...(4069): n = a,t,c or g
cggtcgcgtgtgctaagcgaaggagtctgagatatttgagacttaggagccccgcactagagccaacccgcagaagggaaatggtccaccggtaacgcggccaccgcaacagcgggagtgctcctgcttnctgctgcttgtggggcttaaacggcgcctgccttggcgctgcgccggctacatcgaggctcttgcagccaatgccggaacaggatttgctgttgctgaaccctcaaatccnccaatgttttgtgggaagttaaatatgccatgtgaaacattccagactgggaaatcgggaaccctgatcccaaccaggcacccaagagctgcttttgaaaccaaaaggaagaagtttcttccagttacttttcaggagatgtatcccagagcttacagatcacaaaatgtgatggaggcaaaaccagccgggttacgtattgacaacttggtgcccggagggacaaaaagcaatggcaagagtcgcttttgttacaccttttcaagttgtctcgtgggttgaattttgtaaagtgatgtccctgctaagtttccagaaaaagtgcccagttttttccacaaaagagcggatggaggtgtgtgaggaatcaccaagcactggcaacacggtaagtcaaaaaaaggccatgtcctgacctccagggaaatgacccttaataatagctaacggcatgcctgcctccccatgtgggggtagaaccagtttccatggcactgaattatgtgtgctgaccttcagcacagagattattgggatcttgtgtcaaaaggaagaggaggaggaagaagaaggagaaagaggaagaggaagatgaaaagggagacttatgctgtatataaaggaaatttcctactgtaagcagatctggaagactccacagaagcatgctgtggatgaggatgatgaggatgagagagaaggggaggatgtggtggaggaccgagaatactactatgacaccttcaaaggagatgactacaatgaggaaaatcctaattgaccccggcagcgccgccaccatgtcagaccaaggaaattactcatgatgatcaaagctgtctgctcccaggaggcgagtgacggggccctgccgggccgtgatgcctctttggtacttctacctctccaagggaaagtgcgtgcgctttatatatggtggctgcggcggcaacaggaacaatttttagtctgaggattattgtatggctgtgtgtaaagcgatgattcctccaactcctctgtctaccaatgatgatgatgtgtttttttagacctctaaagatgataatgagcatgctcgcttccacaaagctaaggagcatgtggtgattcggccccgcaaccgtatggacaggcttaagtaagaatggtaatatgcacaacttccagcttaaataacctccccaaagcagagaggcaaaactctgattcagcacttcccaagcccatggttaaagctttagagaaggaagcagcccagtgagaagcagcagctggtggagaccccaccctggcccgagtggaagctatgctgaatgacctgttgtcttatggctctggagaactaccctggctgccttgcagtctgaccccgccacggcctcatcggnattctccaggccttacggcgttatgtccgtgctgagaacaaagatcgcttacataccatccgtcattaccagcatgtgttggctgttgacccagaaaaggcggcccagatggaaatcccaggtgatggacacatcttccacgtgattgaagaaaggaggaaccaaagcctctctctgctctacaaagtaccttatgtagcccaagaaattcaagaggaaattgatgagctccttcaggagcagcgtgcagatatggaccaagttcactgcctcaatctcagagcacccctgtggacgtcccgggtgagcttctgagggaaggggggagatcccaccgttccaccccttccaccccttcccagccctacctgagaacgaagacactcagccggtgtttgtaccacccaatgaaaaaaggatctggagtgggagagcaggatgggggactgatcgttgccgaagagaaaagtgattaacagtaagaaataaagtggatgaaacattggtcaattgacgagactctggatgttaaggaaatgattttcaatgcgaagagagttggaggcctcgaggaagagcggggaatccgtgggccccactgcgggaggtcttcagtctagatagcagtgctctcattgacctgctggtcataacagtggccattgccacgggtcatccgtcatcagcctgggtgatgctgaggaagagcaagtatggcaccaatcagccacgggatcgtggatggttgatccaattgctcaccccaagaagagcgtcacctgaaccaagatgcagaaccagtggctatgagaaccccacctacaaaatacctggagcaagatgcaagatttaggtggcaggtagcgcggcacgccttggcggaagggatgcaggtgggccgaaagattccccacgattcccaatcgactgccaaacgagcagccgctgccaggggctgcgtcctggacatcctgacctcctggacttgtaggactatataaagtactactgtagaacttgcaatttccattcttttaaatgggtgaaaaaatggtatattacccatttatgattatttaaaccttaaatgaaaaaaaatgatcctattgcggataatgtgaggtagttttctttttttaaattaatcagaaacccccactttccatttgtattgtctggacacatgctcctcaatatataaataaatgggaaattgtcgattttccaataataggacttattatggcagggctgtccgttccgggttatgtttgtgtaaagtccaactctttcaggccttcattccactgtcctgggcttttatttttaaaggaaaaaaagggcagtattcccttttttaaatgagctttcaggaaagttgctgagaaaatgggggtggaaatagggaaactgtaaatggcccacctgaaagcaacgtgaggagacccctcgcaaaaaatgaatgtgaaaaggacccagtttccttgaaagtcccaagtgtttcccacggcctgggataccctgtgtgtcttcccattaaaaagtccctgtcaacccaaggaacgtttaaaaggcaattttaattcccaagcgtcttctaggaggagcttagttgtattacaggatgaggggtgtcccgctgcttgcttttcccttcgggattcccagtggtttccacagagatctagcctgtaagcttattatttggacattcttcactggtctgtttgtttaccctacccgtagcctttttacccgttcactttcccctttccaactatggtcccagatgttgcagggctcctcctctctgggacttttctccaaaagggaactgaaccctcgggcctctactttgtccccctcacctccacccccctcctgttcaccgggccttgtggacattccactccaggggaaggcccacacccaagcgaggcggccgcggctggcccccagggaggagaccacgggggaggtttggtttggtgtgaaagggaaaagtaggtcccagggcttgtcccctgaaaactggaggtcttgtggaccacttgtggaaaagctttggaacaatttgtgtttttcggtcacagggagcctttggaaatgcctggtacaagttggatgtcggatgcctcactgcttcctgctttttctttctttttattttaaaaaatctgaaggttctgggtaacctgtgggtgtatttttaattttcctgtagactgtttttgttttgtgttttttcctttttcctcccctttgacccttattcatgtctctaccccactatggcacaggattaaactttcacctacaaactccattaatatgattctgtgggaggaatggtacacaggtttaaaccacaatcaataaaatacttttaacttccaaaaaaaaaaaaaaaaaacctcgtggccgaattcttgggcca

SEQ ID NO: 19947 - DNA, 1137 bp, Homo sapiens
  SIMILAR (867)..(920): 501254mologous to Chionodraco hamatus metallothionein isoform MT-I,accession number Y12580,Smith-Waterman Score=51.
ctgacccgtctgtgactctgtgtccttggggacctcctattctaaacacaagagcgtggcctgctgtcaccgtcaccatcctggcatctgcagaagagccaccaagcgctgcctcctgagaattttgcgtggccctctgtctctggctcctttcatagagtgtgatgtcctcaaggtccatccacactgtggccggcatcagagccttgttccttttcatggctgagtcctgctccatggtggcgtttgtatgtgcgaggcctggggtagcaaacttttctgcagagatccagatggcaaatgttttagcctttgcaggctggacagtctctgcctgccattgtagcgggaaagccaccacaagcaatatgtcaacaagtgggtgtggccgtgtgccaataaaacagctgtgtttaatcaatgctgggcagccctgcagcttggtgacatcagtgggccactggctactgggtgttttttccatcctgccctgttccctgctggcaccaggggaaaaaggcccatacaggagtctgttccaggtcaccagatcctgctttctggcgaccatgctcaggctgtagctgggggaactctcttcccgccctcctgggacctctcgagcctcttgagtctgctcccagtgccgttcaccgggtggtgaggatgtggtctcgcaacagacgccttctttgcaggctgctaccctggaactgtttttaaatgtgggtgatgctgccccccagggggcactgggcgatgtttggggacgtgtggttatcacaactgggatgctccatctgatcttctgatctccctcaaagagctgcgtctcaggtcgcaggtgaactttctggatggtgtggtctgcgtgcgtgtgtgcgtctggctgcctgccaggagggaaccgctgttgctgccctgtgtcgctgtcgcctgaacgtattgctgtcctggggggactgctccctagaaagcctccgtgccgtgtcgttggtgagcgccggtctgtgctgacactgcaggctacttcccagtgcccacgatgacagctctgcctctgaagtgagaagcggagacgccactgggaggggcggggggcggagggcacggggttcaagtgccaggctgagccta

SEQ ID NO: 19948 - DNA, 1175 bp, Homo sapiens
  SIMILAR (24)..(584): 921254mologous to Homo sapiens CrkRS,accession number AF227198,Smith-Waterman Score=927.
cctagtccgtgtggtggaattccatgcagaatatattggcagttctcttgagtcagctgatgaaaacccaagagccagcaggcagtctggaggaaaacaacagtgacaagaacagtgggccacaggggccccgaagaactcccacaatgccacaggaggaggcagcagagaagaggccccctgagccccccggacctccaccgccgccacctccaccccctctggttgaaggcgatctttccagcgccccccaggagttgaacccagccgtgacagccgccttgctgcaacttttatcccagcctgaagcagagcctcctggccacctgccacatgagcaccaggccttgagaccaatggagtactccacccgaccccgtccaaacaggacttatggaaacactgatgggcctgaaacagggttcagtgccattgacactgatgaacgaaactctggtccagccttgacagaatccttggtccagaccctggtgaagaacaggaccttctcaggctctctgagccaccttggggagtccagcagttaccagggcacaggtgcctctctcatccctgcaatccagacagcacatgcagcagctcaaaaagcaaaccagtttacatctgatgccaccatttggcattttacagccccttataagatgcagagatgtattcttggggaactattcacaaagaagcctatttttcaagccaatctggaactggctcagctagaactgatcagccgactttgtggtagcccttgtccagctgtgtggcctgatgttatcaaactgccctacttcaacaccatgaaaccgaagaagcaatatcgaaggcgtctacgagaagaattctctttcattccttctgcagcacttgatttattggaccacatgctgacactagatcctagtaagcggtgcacagctgaacagaccctacagagcgacttccttaaagatgtcgaactcagcaaaatggctcctccagaaagagttgtgctggggaccatgccccatcccgctgatacagatcctgaatggaataatcaggaatggcacagtgcaggtgtcaatatcaaagaaataaggttcctaattcccaatcagggccacatccataagatcatcatcttcctccccaatcataaagtctgggctgagccttga

SEQ ID NO: 19949 - DNA, 4029 bp, Homo sapiens
  SIMILAR (4022)..(2343): 931254mologous to Homo sapiens CrkRS,accession number AF227198,Smith-Waterman Score=2673.
  misc_feature (1)...(4029): n = a,t,c or g
actgagttcagctcccagactggaattaagtggaagcctgacaggtgagatactggaatgacgactgcgtgaactggatctcttctttttactatgagaagatgaatgtcttgaatatgcaggacttctacttctggacttcatggatttcctactggggagtggactccgactcagagaccgcttgctcaggaaagggctgctggaccgccttcgaccatagggactgggcgatcgcccgctgtaagagccacttctttcgtagctggacgaccgtctcctgctttagggactgacagatctctgtcgccttctgtaggggcttggtgaccgggtgcacttcctgtgggggatccctggatcttcggtttgggctgtccactgttttgtaacttttgggtgtttccctttttcgatgacttttactccggtctttgtgcccagacttcagctcccgttctttcctggtcttctccttgtggagcttggatgacctggattccttgctgctgcttttggcttcctgcgcctttccatagtcatcagtctcctcattcgaacgngncctgtgctggtggtgacggtgtttgtgcaggcggtcgctccggtttgatccccgacgttcgtcgttctcccttcggtctagtttgaaggccttgtcatcggtgtaggtgtcggaatcagagctgatatcatcatactccaccaaaggtttgataactgtgcccagggatgctgcttcgggggtcaccaaccccatgtctttggagtgtttggacttatgccgcttgtgcttcgataccaagcggtgacgctctctgctgttagaggtgccgcctcccgatgacggctgcaaagttccagaagctcctccactcccgtccttcttgcccccatgtctctctgaattgggctttccctttcccctgaccagatgcaggacaggctgcttgatcctgaaaatgtctggggagctagatgatgagcttcggccaggtgattggagcagaggaacacagaatccaggaacagccagtcctttggggctgtactccctagaccctgctgcctcctcctgtggcattgtgggagttcttcggggcccctgtggcccactgttcttgtcactgttgttttcctccagactgcctgctggctcttgggttttcatcagctgactcaagagaactgccaatatattctgcatgtcagctggtgtgcttgaagcttcaagggtcgtctgttctgctgaaggcaggatcactggggcagagggtgcttccttcaaagactcctctggggccatggtctctgagtcctgctgctgggaagtagcttccgtcagggcactgatggattggttcagggcttccagctgctgctgcatctctgggttggagtggatgttaagcagctgtgccatttgagggatgctcaggtcggtttggctctgcagcaggtttaataacactgccaattcactttgattcagctgttgtgtgatgtcagcaaggcctattgcatccccagccccagactccaccttgccaggagcaggctgaggtggtgctgggctgctgttcttcacaggctcagtacttgtccctgaggtagtttcttttcgagaagttttggatggaggtggctcttcgactacaacaccactttgtcgctgacgtcgccgtttcttactccacaactcatggcaatcctgccagtgggggaggtctggaggagccattttgctgagttcgacatctttaaggaagtcgctctgtagggtctgttcagctgtgcaccgcttactaggatctagtgtcagcatgtggtccaataaatcaagtgctgcagaaggaatgaaagagaattcttctcgtagacgccttcgatattgcttcttcggtttcatggtgttgaagtagggcagtttgataacatcaggccacacagctggacaagggctaccacaaagtcggctgatcagttctagctgagccagttccagattggcttgaaaaataggcttctttgtgaatagttccccaagaatacatccacagctccaaacatctatggctggtgtgtaacgttcctatcctagcagtagttctggaggtcggtaccacaaagtaatgactttgtttgtgtaagggcgactctcttcagagttatagagccgagcaagtccaaaatctgctagtttgatttgcccactgttattcagcaaaatgttagaacacttaatatcccgatgcaggaaattctttttgtgacagtattccaatccttccattagttgtttcatgaacgacttgatatggtcctcagaaaagtgcactaaaaccagattctagcagtcccattaagtcatggtccatatactcaaatacaaggtaaaaggcacctttgtccttcttgaaatccagtgcatcttgtttatctgtgacaatttccttcatgttaacaacacttcggtggattaactgacgaaggattttgatttcacgaatggctgtgattgggaagccctctttctcattgtctagtctcaccttcttcagagccactagttctcctgtgtctttgtccttggctttatatacttggccataggttccttctccaataatcccaataatgtcaaacttgtccacacagcgtttcccccagtcgctttctgtttgtcttctttctccataacgaggacaacaaatttttggtctctttttatatggttgctgaggtggtgtgattgcctttggttctggagagtctgggggagacagatctccaccagggagctctggagggagaggaaggtctgtgagtaagtgacgtgtcctctgttccttctctttcttcacaggttttgaaggaagagtttcttttggactatccatgtcatcatctccaggtaataagggtgggaggggcaaaggaggcaacgttgaagttttcaggtgtggaatagcagctgttacagatacttgagtcttcacagaaacctgtacagggggctgagaatttgcctgagaggacacagcagatgtctttgagtgagtagaagggggcaaagttgaagtactggaagcaggaacctgactaaatgctggctgagaaggaggcagaggtggttgctgtggaagagctggtattggaggcaaaggtggcaaagggggtgtctgaggtggaggggtagtagttggtagagggggtgggggagaagcaattgtgggaagaggtggaggggtctccttttctgatgtttctgtctcctttggagtaacaatctcctctttcagtgctatgggtttagagtctcttgttccctgtgctttcaaatctttaacaagatgcttctcggagttctcatccaactttactttccctgtatctgaagaattttttacctctgtgtttagatgtgttacattcaccagttcagtatctggggcagatttttccaattttacacttctgggtaactttttagactccaaacctgaatccttagcctctactgaactgttctcttttctaggcaaaaatacaggtgaacccttggactcctttccatccatctttgctgcagcagcagcagctgctctttccttctttttcctactgagttcagctcccagactggaattaagtggaagcctgacaggtgagatactggaatgacgactgcgtgaactggatctcttctttttactatgagaagatgaatgtcttgaatatgcaggacttctacttctggacttcatggatttcctactggggagtggactccgactcagagaccgcttgctcaggaaagggctgctggaccgccttcgaccatagggactgggcgatcgcccgctgtaagagccacttctttcgtagctggactcctttccatccatctttgctgcagcagcagcagctgctctttccttctttttcctactgagttcagctcccagactggaattaagtggaagcctgacaggtgagatactggaatgacgactgcgtgaactggat

SEQ ID NO: 19950 - DNA, 1452 bp, Homo sapiens
  SIMILAR (111)..(239): 511254mologous to Homo sapiens Human secreted protein, SEQ ID NO: 7888,accession number G03807,Smith-Waterman Score=83.
  misc_feature (1)...(1452): n = a,t,c or g
aagggcgaactgatggccaaggcgagactacgaatcccagcaagcagtacgcgacgcgaggacgcaggaggaggagcccggagctgcagccaccggggagccagacagggtctctgtcacccaggctggagtgtagtggcgcaatctcagctggctggagcctttgacctccttgggctcaagctatcctcccacctcaagcctctcaagtagctgggactacaggcagcaaacgacctgcatctcgagtatgccatggggaagcgatacttctgtgactactgcgaccgctccttccaggacaacctccacaaccgcaagaagcacctgaacgggctgcagcacctcaaggccaagaaggtctggtacgacatgttccgagatgcagctgccatcttgctggatgagcagaacaagcggccctgcaggaagtttctacttgacaggccagcgcgactttggctccaacttgcagattttccccacatgtcagagcgaagacctgaaggagctgaagcatccaggtggaggaaggaagaggcgagccaagggagtggttacttagatgctcctgagcttccccgagggccatcttggaggacttggcttggaagaaagaagagccaagcggcttgagcttcagccccaagttagccagggctgaaacccattcagaaccactgttctttccagtaaccccgtngggttggccaaccaagttcaggaagcttgcctcccaattcttgcgggcaccccccacctggggggttggccctcttgcagcccagagtcccagtggggctgagcccctttgcccccgacttgaccccccacgtggtcacttttctcatcagtcacaataggaagccaagcccggttcctgctacgccccatggaggctccgagaccatctgccccagcctcactgaggctcaggacacggccacaccaagtgcagccctcgtcctgggtctgcaccgggcagctctcccctcactctcctccacctgcccccctgcttcttaagaagatgggggagaaaacttccaaatgtttaccaaagaaagtctgtcgccacagtggtctggctgtgtttccctccactgggtgctctgagctctgttctccagcccctagcagaggtcgggcaaggagggaatcagatgagattttccccaggtgacccacgctcactcccttctcccttgggaccagcagaggttcagcacggccaggcagagggtgtgccagggtggctgtgcccgttgcctggtaagaagtggctctaggcccaaggagcccaagggctccatctgccatccccgccctggaagaatccacagcccccatgtctgcccatgctgagctgctgcccaagtatttgggatggctcacctggggcatgggagcggcctcgtgccaagctaggcgtactcatggtcataacggtac

SEQ ID NO: 19951 - DNA, 459 bp, Homo sapiens
  SIMILAR (56)..(364): 371254mologous to Santalum album proline rich protein,accession number AF020261,Smith-Waterman Score=131.
gcagttgaatgcggagctcaggagccgtggttggggccaacaggatggtccaggccctccctcccctggcaaaagcccaagtccctgcagaaccagcccctccccagacagcctgggcctcccagaggacccttgcttgggccccagaaatgaagggcggcgagcagtgtctgtgcatgaggaccagctccaggcccctgctgaacggcccctgaggctgcagcgctcccccgtcctcaaacgcaggccaaaactcgaggcacctccatccccaagcctaggatctggccttggaaccgagcctctgcccccacagcccacagagccctccagccctgagcggagcccaccctccccagccacagaccaaacgaggcggcggccccaatccctgatcctctcctctcctgccgcatgagattattttattaaaaaactcaaaggaaaaaaaaaaaaaaa

SEQ ID NO: 19952 - DNA, 1137 bp, Homo sapiens
  SIMILAR (664)..(1107): 321254mologous to Santalum album proline rich protein,accession number AF020261,Smith-Waterman Score=144.
gccaccaccgcccgccgccggggggccccaggtacccccagccttgccgcagaagggaatgggctcagtgcccgcgtggacgagggcgtggaggaattcttctccaaaaggctgatccagcaggatcgcctctgggcccccgaggaggacccggccactgaggggggcgccactcctgtcccccgtacactgcgaaagaagctgggcaccctctttgccttcaagaagcctcgttcaacgcggggtccacggactgatctagagaccagccctggggcagctccccgaacccgaaaaactacatttggcgacctactgcggccgccaacccgtcccagccgtggtgaggagcttggtggggctgagggggacaccagcagccctgaccctgccggcaggagccgacctcgctacacaagagatagcaaggcctactcgatgatactgctgcctgccgaggaggaggcaacgctgggtgccagacccgacaagcggcggcccctggagcggggagaaacagaactggctccatcctttgaacagcgggtacaagtaatgctgcagaggataggcgtcagccgaggcagcgggggtgccgaaggcaagaggaagcaaagcaaagatggcgagatcaagaaagctggctcagatggtgacattatggacagttccacggaggcccctcccatctcgatcaagtcccgcacccactctgtgtctgctgacccttcctgcagacctggcccagggagccaggggcctgagtctgccacctggaagacactggggcagcagttgaatgcggagctcaggagccgtggttggggccaacaggatggtccaggccctccctcccctggtcaaagcccaagtccctgcagaaccagcccctccccagacagcctgggcctcccagaggacccttgcttgggccccagaaatgaagaacggcccctgaggctgcagcgctcccccgtcctcaaacgcaggccaaaactcgaggcacctccatccccaagcctaggatctggccttggaaccgagcctctgcccccacagcccacagagccctccagccctgagcggagcccaccctccccagccacagaccaaagaggcggcggccccaatccctga

SEQ ID NO: 19953 - DNA, 408 bp, Homo sapiens
  SIMILAR (3)..(203): 981254mologous to Rattus norvegicus aspartyl-tRNA synthetase,accession number J04487,Smith-Waterman Score=345.
  misc_feature (1)...(408): n = a,t,c or g
atcctcaactgctaacagagagagctttacatcatttaattgatttggagaaaattaaggcttacattgattccttccgctttggagcccctcctcatgctggtggaggcattggattggaacgagttactatgctgtttctgggattgcataatgttcgtcagacctccatgttccctcgtgatcccaaacgactcactccttaaattcacacttnnnnnnnnnnnnnnnnnnnnnnnnnnnnnnnnnnnnnnnnnnnnnnnnnnnnnnnnntaaatagaaaggccccnnnnnnnnnnnnnnnaccttgtaatggcgaggctgttctttaggtccttaaaattgtgcctaaaataatttggcgggggcctaaaaattcggggcttttttgggaaaactcataatacg

SEQ ID NO: 19954 - DNA, 350 bp, Homo sapiens
  SIMILAR (3)..(164): 901254mologous to Homo sapiens aspartyl-tRNA synthetase,accession number J05032,Smith-Waterman Score=246.
ctaaagagagatatggaatatcttcaatgatacaatcacaagaaaaaccagatcgagttttggttcgggttagagacttgacaatacaaaaagctgatgaagttgtttgggtacgtgcaagagttcatacaagcagagctaaaggtaggattggtttcattattaaagctctttcgctggtcttccctctcctcaacagggagaaattcaaaaagagcggggaagcagcagagtggggaggtagagggaagcccaacagaatgtgcctgaaggagcctggaaagaaagaaaaatctgtcaagcagaatgccagtgaagagcttgctctgtgtgtttggaataccaactaa

SEQ ID NO: 19955 - DNA, 610 bp, Homo sapiens
  SIMILAR (342)..(545): 451254mologous to Homo sapiens testis-specific methyl-CpG binding protein 2,accession number AF120994,Smith-Waterman Score= 90.
ttttgttgtcgttgccactgtatttacacctcacttacacagggactggtaacccatgctgccttggcaagccaactgcactcctctgtcccaacaagcagggcaatggattgcgaagaggcctcctccgtccccaagcagctacgtcgcccaggggaagagagaaggcgggaaagtccaagagaggagaaaccaaggcccgcgcttaggtgggtgttgtagtgacgagtctgcggttacagccgagcggagttgaaagggggaagcctgcgagggagggtggtgtccactgcccagttccgtgtcccgatgcccagcgccagcgccagccgcaagagtcaggagaagccgcgggagatcatggacgcggcggaagtgggtttcctcctttcctgggcctgggaggacagacccctgggccgggctgcgccgagggagggaggagggggagtggggccctacaggtccttgtcggcacgttctccgcagcctcgcgggcgtggggtccgggcccctccagcccttgccccagcagtggggcaagacactctccggaccgagtttcttgcgggggtcacctggagtgggcggttaattactagcccgacca

SEQ ID NO: 19956 - DNA, 1567 bp, Homo sapiens
  SIMILAR (289)..(888): 951254mologous to Homo sapiens Similar to aspartyl-tRNA synthetase,accession number BC000629,Smith-Waterman Score=1008.
gaattcggcacgagcagatggttaaatttgctgccaacatcaacaaagagagcattgtggatgtagaaggtgttgtgagaaaagtgaatcagaaaattggaagctgtacacagcaagacgttgagttacatgttcagaagatttatgtgatcagtttggctgaaccccgtctgcccctgcagctggatgatgctgttcggcctgaggcagaaggagaagagacatcaactagtcaggcagtcttccgtctccagtctggcatctgccatctcttccgagaaactttaattaacaaagggtttgtgggaaatccaaactcctaaaattatttcagctgccagtgaaggaggagccaatgtttttactgtgtcatattttaaaaataatgcatacctggctcagtccccacagctatataagcaaatgtgcatttgtgctgattttgagaaggttttctctattggaccagtattcagagcgggagaactctatacccatagacatctacctgagtttgttggtttggacattgaaatggcttttaattaccattaccacgaagttatggaagaaattgctgacaccatggtacaaatattcaaaggacttcaagaaaggtttcagactgaaattcaaacagtgaataaacagttcccatgtgagccattcaaatttttggagccaactctaagactagaatattgtgaagcattggctatgcttagggaagctggagtcgaaatgggagatgaagacgatctgagcacaccaaatgaaaagctgttgggtcatttggtaaaggaaaagtatgatacagatttttatattcttgataaatatccattggctgtaagacctttctataccatgcctgacccaagaaatcccatttatgtgatcagtttggctgaaccccgtctgcccctgcagctggatgatgctgttcggcctgaggcagaaggagaagaggaaggaagagctactgttaaccaggatacaagattagacaacagagtcattgatcttaggacatcaactagtcaggcagtcttccgtctccagtctggcatctgccatctcttccgagaaactttaattaacaaaggttttgtggaaatccaaactcctaaaattatttcagctgccagtgaaggaggagccaatgtttttactgtgtcatattttaaaaataatgcatacctggctcagtccccacagctatataagcaaatgtgcatttgtgctgattttgagaaggttttctctatatggaccagctaagatttctagtcctatgttgaataacagtggtgaaaatgagcatccttgtcgtgttccagatctaagagaaaaggatttcagtttttcctcattcagtacaatactagctgtgtgtctgtcgtatatggcttttattatgttaagcatcaacaaagagagcattgtggatgtagaaggtgttgtgagaaaagtgaatcagaaaattggaagctgtacacagcaagacgttgagttacatgttcagaaggccctgatgtgtgatgttccccttcctgtgtccaagtga

SEQ ID NO: 19957 - DNA, 2343 bp, Homo sapiens
  SIMILAR (117)..(869): 761254mologous to Homo sapiens Similar to aspartyl-tRNA synthetase,accession number BC000629,Smith-Waterman Score=894.
tgctgagaccccagggtcgggagggcggagactgggagggagggagaagcccctttagcctgccttacggaagcctgcgagggagggtggtgtccactgcccagttccgtgtcccgatgcccagcgccagcgccagccgcaagagtcaggagaagccgcgggagatcatggacgcggcggaagattatgctaaagagagatatggaatatcttcaatgatacaatcacaagaaaaaccagatcgagttttggttcgggttagagacttgacaatacaaaaagctgatgaagttgtttgggtacgtgcaagagttcatacaagcagagctaaagggaaacagtgcttcttaatcctacgtcagcagcagtttaatgtccaggctcttgtggcggtgggagaccatgcaagcaagcagatggttaaatttgctgcaaacatcaacaaagagagcattgtggatgtagaaggtgttgtgagaaaagtgaatcagaaaattggaagctgtacacagcaagacgttgagttacatgttcaagaagatttatgtgatcagtttgggctgaaccccgtctgcccctgcagctggatgatgctgttcggcctgaggcagaaggagaagaggaaggaagagctactgttaaccaggatacaagattagacaacagagtcattgatcttaggacatcaactagtcaggcagtcttccgtctgcacgtctggcatctgccatcccctccgagaaactttaattaacaaaggttttgtggaaatccaaactcctaaaattatttcagctgccagtgaaggaggagccaatgtttttactgtgtcatattttaaaaataatgccatacctggctcagtccccacagctatataagcaaatgtgcatttgtgctgattttgagaaggttttctctattggaccagtattcagagcggaagactctaatacccatagacatctaactgagtttgttggtttggacattgaaatggcttttaattaccattaccacgaagttatggaagaaattgctgacaccatgggtacaaatattcaaaggacttcaagaaagggtttcagactgaatttcaaacagtgaataaacagttcccatgtgaggccatttcaaatttttgggagccaactctaagactagaatattgtgaagcattggctatgcttaggggaaagctggagtccgaaatggggagatgaagacgatctgagcacaccaaatgaaaagcctgttggggtcatttggtaaaggaaaagtatgatacaagatttttatattcttgataaatatcccattgggctgtaaagaccctttccctatacccatgcccttgacccccaagaaatccccaacaggtcccaactcttacgaatatgttccatgagagggagaagaaatatttgtcaggagctcaaaagaatacatggatcctcaactgcctaacagagagagctttacatccatggaatttgatttggagaaaattaaggcttacattgattccttccgctttgggagcccctccccaatgctggtggaggcattgggattggaaccgagttactatgctgtttctgggattgcataatgttccgtcagacctcccatgttccctccgtgatcccaaaccgactcactccttaaattcacactttgccacttaactccagtgtggatgacagagcgagaccctgcctcaaaaaaaaaaaaaaaaaaaaaaaaaaaaaaaaaaaaaaaaaaaaaaaaaaaaaaaaaaaaaagaaagccacacttattcttttcagtaacctgctagtgcacaggctgtactttaggtacttaaaatatgcactagaataaatttgcaaggccctaaaatatcactgttatttttggagtaattcagtataggttcgtttaaaagagatttttataacttcagacatgcatcagtaggaaataacttgagaaattcatatggttatgttacaaattcatattctgttactacagtaaacgttaagagttttaaacagttaagattgtacaatttttcttcttttctatattacaagggccccagtgttaatgtcttagattttcagtatttgaacttatttttttaaattctgtcattgagataagaataattcaggtagcatctgaaattttaatgaatgtataattggcatatcatggaaaattaaccagaaagtatcagttcttaaaagttatgcctagaaattatgtaaagctaaactactggttagaaagtattcagtgtaatattgtattaatttgttaaattctaaacttgaatttcaataaaattttaaagct

SEQ ID NO: 19958 - DNA, 884 bp, Homo sapiens
  SIMILAR (48)..(419): 951254mologous to Homo sapiens dJ434O14.3.3 (novel protein) (isoform 3),accession number AL022398,Smith-Waterman Score=600.
cggacgcgtgggcggacgcgtgggcggacgcgtgttcggacgcgtgggaagccctgcgatttttggaaaatgagcaccatgaactgcaggccaagattgaatgcctgcaaggggacagagacctgtgcagcttgcatacccaggacctacaagatcaactaaaaaggtcagaggcagagaaactcaccctggtgaccagagtacagcagttgcaggggttgcttcaaaatcaatccttacagcttcaagaacaggagaaactcttaacaaagaaagatcaggctttgcccgtgtggagtccaaagtccttccctaacgaagtggagcctgagggtacagggaaggagaaagcctgggatctcagagaccagctgcaaaagaagactttgcagctccaggccaaggaaaaggaggtgagagggtgacctgagatagtgagggctcatttgcgaaatagcagagaaacctgggaggcagtcaaaaagcagggatttcaaagtttaagttgtgagtggataaccacagacattcatttgcctacataaagtgtctgtgcttatgggctgacttgtcagtctattcccttccttatttataccaactcctattcaaggttttattaaatgatcaccttttagaaagtcgaccaaaactcacacacatttaataaaaatattaacttctcaatatgtcgtcccacattgagtatcttaagtcattatatgtctcttaaagagtaaaactcttcctttgtacatactcacaaacatacacatccccagaagtattgatatgcaactagctcctgggaaagaaacttgtactaaggtcacttgtaggtcggttgttctaagggtcttcaatttcgctgcaggcgggtcaat

SEQ ID NO: 19959 - DNA, 859 bp, Homo sapiens
  SIMILAR (325)..(615): 981254mologous to Homo sapiens dJ434O14.3.3 (novel protein) (isoform 3),accession number AL022398,Smith-Waterman Score=507.
tttcgtcggtaccaagaagggacgtgttaatggggcccagacctatggattgaaagcgtgtgctttacccatctgctgtcttgctccatctgagaccagagccaagatctgcccaggactggaatgctttcccgagtggcttgagttggagcctgggactaggagcagccttattgaggtacaattcatgtgcttgtgggtttggatggcacaatctgtgtctgggctaaggaaagcagacttggcaccaacattaaccctgacagatccaggcatctattccaggaactggaagccaagcgcaacaggtgcttggaggtcatcatgatcagcccagaccccaggccctcccctggcttggcccggtgggctgagggctatgaggccaagtgtgagcgcaggcaagagatccgggaaagccgccgctgccgtcccaatgtgaccacttgccgccaggtggggaagacgctgaggatccagcagagagagcagctccagagagctcgactgcagcagttcttcaggaggaggaacctggagctagaggagaagggcaaagcgcagcatccccaggccagggagcaagggccctccaggcggccaggacaggtgactgtcctcaaggaacccttgtcttgtgccagaaggatttcttctcccagagagcaggtgacaggcaccagctctgaagtctttccagcccagcatcctcctccctcaggcatctgcagggatctgtctgaccacctctcctcacaggctgggggccttcctccacaggacactcccatcaagaagccacccaaacaccaccgtggtactcagacaaaggcagaaggaccaacaattaagaacgatg

SEQ ID NO: 19960 - DNA, 592 bp, Homo sapiens
  SIMILAR (567)..(433): 711254mologous to Homo sapiens dJ434O14.1 (Hydroxysteroid (11 -beta) Dehydrogenase 1 (EC 1.1.1.146)),accession number AL022398,Smith-Waterman Score=135.
tttttttttatgaatttataaagtttatgttgacctttattataattaatattgtattaatcatcacatattattatatataagatataaatttaatataactatctggtaattatacctatgtttactaacaattttacaactgctggctgcagcggtcgcatcgacattcattattattacatttccattttgcaaatgttagaggaactccttccatttgtcaggtgtgacccatgacttgcatgtctctggggacactctgggaagatgtcttcataagataatgaagctcagataaacatgagacagaacagtcccaaaaatccctcagcattgcccaagccctcaggggagtttcctacttggtttatgaatctggtcccatattatagctcgttgagtagagaaattccaggatcttcctggcatgggatttctgatcagaaagagtggtccaggagtgagctggtcataatacacttcttcttggcgcagagcctccccccttggatgattctccagggcacattcctcctttggagctgcttgcatatggaccattcccagaaactgccttcatggctggttc

SEQ ID NO: 19961 - DNA, 3008 bp, Homo sapiens
  SIMILAR (2128)..(2934): 521254mologous to Homo sapiens dJ434O14.3.3 (novel protein) (isoform 3),accession number AL022398,Smith-Waterman Score=575.
atcagaaaggaatattcagtgtccagggtcaatgtatcaatcactctctgtgttcttggcctcatagacacaggtaaggtcaatactttgtgtttttttttaattattatactttaagttctagggtacatgtgcagaacatgcatcatcaaagggggagctctgcgccaagaagaagtgtattatgacagctcactctggaccactcttctgatcagaaatccatgcaggaagatcctggaatttctctactcaacgagctataatatggacagattcataaacaagtaggaactccctgagggctgggcatgctgagggattttgggactgttctgtctcatgtttatctgagctcctggcaagagaaggaggaaggtgaagggtacaggatgcacaccagctgactctgacccctgataatgagcacactgggaggccccatccaaaagtttagtcactgggacccaaacaagaggggttactgctgtcctctgggtccttgcctttggcactggactgaccccattcctggagtggaacagtaaagacagtacctctaataactgcatggagccctgggatggaaccatgaatgaaagctgctgccttgtgaagtgtctctttcagaatgcggtacccatgagttacatggtatatttcagttttggggggtaagtcctgcccccactgctcgtaatgtggctgatctccatcaagttcttcacagtgactgcaggcagctcacttgctgttttttaagtgcccttaactcaaatagtcaatatgccagaatggcgtcagggtggcagcgccaccccgtggctgaatgtggtggtgtaccacgcttcacgcaatctccttgcccagtgcgtatcaggttctaccccagggcggccaccacctgcacaccagcgtgcctaccagtgagtcatcgcttagggccctgaactgacctagaggcggggctggactccggcgtccggtaactccgcccctgagaaagacaccacctacttcagaagagcagaaactctttacaacaccaggattgggaagaggtggctaaagaaaaaggaaaatccttacacaaagaactacctgatacacatgaaagcctacactgagaacatctcatctaggtcttaccaccaaaaaggcatttttttccctctcatagaaaccacaaaggtctgaatctgacccagaggactatccttttctaatcatggaaaggaatcttgacttgaaactgtccaagaagctgagccaaacagggaggggacaggaatactttatgtctttattattaaaaggtaacatttattgtgtgctccatgccaggtgcatggcctgcattttgtcatttaatccttataacctacaaaccccaggccctcccctggcttggcccggtgggctgagagctatgaggccaagtgtgagcgcaggcaagagatccgtgaaagccgccgctgccgtcccaatgtgaccacttgccgccaggtggggaagacgctgaggatccaacagagagagcagctccagagagctcgactgcagcagttcttcaggaggaggaacctggagctagaggagaagggcaaagcgcagcatccccaggccagggagcaagggccctccaggcggccaggacaggtgactgtcctcaaggaacccttgtcttgtgccagaaggatttcttctcccagagagcaggtgggccgtgtcaagggacatactgctgtgtgctctgggaccctctctggacaaggagggtgggtgggctcctccctcactccacagggcctgcagagaatcctgagacaactgtcccagctcactggccctaaccctctcacatcccatccattcctctctagagagaacacaatgaatttccatgctctgacattctggaattccatgatttacccccgatcctccaggttaatcttacctcaggcctctgacagctcttggaaggtaagggaatgaaattctttttgaacaaagcttgggcttctatgtgttcccatctcatttttctttccacaggtaagcattctgaaggatacttccatctcaggaatctagaattaaatgagaagaatgtttttgaacctcaaggccaaggagtcactgcagaaagtgctggaggagaaaatgaatgcagagcagcaactacagagcacacaggtatggggatgccacatagacatggggctggggactccaggcagcttggggaacaaggggagccagctgcagaggacccttgggacccagcacagggagctggagagccaactccacgtgcttcagtccaaactgcaggtaccaggcactgggggtggggagggaagacagggtatggggaggagggatggtgatgaaagaagctgttcggccaagattgaatgcctgcaaggggacagagacctgtgcagcttggatacccaggacctacaaggtactcttctccttggaggccttgagtgcatggcagccatggccaagtgagctaagaaaaaagaaactgaagctttccagattctgaaagtccacagggttttcctggggtcctggcccacaaaaggcacccaggtgtggagtccaaagtccttccctaacgaagtggagcctgagggtacagggaaggagaaagactgggatctcagagaccagctgcaaaagaagactttgcagctccaggccaaggaaaaggaggtgagagggtgacctgagatagtgagggctcatttgcgaaatagcagagaaacctgggaggcagtcaaaaactgtcgagaagagctgaaccagagccagcagctgcctcccagagtaagagggtctctccttcccataaagccctggatgatgggacgattccttctttaaccaagttttgcacataaagacaacctgatgatctgaataatttgtgacaactgccttgggtgaaaatcagaagcaagcaactcagcgaaaaactcagaaggtttggg

SEQ ID NO: 19962 - DNA, 1173 bp, Homo sapiens
  SIMILAR (121)..(588): 1001254mologous to Homo sapiens similar to PID:g3877944,accession number AC004983,Smith-Waterman Score=812.
atggctgcagcggcggccggggccgggagcgggccctgggcggcccaggagaagcagttcccgccggcgctgctgagtttcttcatctacaacccgcgcttcgggccgcgcgaaggacaggttgttcggaatcctataattgaaaaacagagtaaagatggaaaaccagttattgaatatcaagaggaggagttgttggacaaggtttatagctcggtgctgcggcagtgctacagcatgtacaagctttttaatggtacatttctgaaagccatggaagacggaggcgtcaagcttctgaaagaaagattagagaaattcttccatcggtatttgcaaacgctacatttgcagtcatgtgacctacttgacatttttggtggaatcagcttcttcccgttggataaaatgacttatttgaaaatccagtcctttattaatagaatggaggaaagcctgaatatagtcaaatacactgcttttctctataacgatcagctcatctggagtggattagaacaagatgacatgagaattttatacaaataccttaccacctccctttttccaaggcacatcgaacctgaggccatgagtgcggctgtgtgctttatgatcgacggtggaccagtgaagttttcgtttgaatactgttgttcagcgtcgcacagtaaaatgaatcttactggtattttttgtcatgacttgccagcctctgtccacccaacgttggatttttgccgaagactggacagcatcgttgggccccagctcacagtgctggcctctgacatctgtgaacagtttaacatcaacaagaggatgtccgggtctgagaaagaaccccagtttaagtttatctacttcaaccacatgaatctcgccgagaagagcacagttcacatgaggaaaacgcccagcgtgtcgctcacttccgtgcacccggatttaatgaagattctcggtgacatcaacagtgactttaccagagtggatgaagatgaggagatcattgtgaaggccatgagtgattactgggttgttggaaagaagtctgatcggcgggagctctatgttattttgaatcaaaaaaatgcaaacctgattgaagtaaatgaagaggtcaagaaactttgtgcaacgcagttcaacaacatcttcttcttggattga

SEQ ID NO: 19963 - DNA, 1920 bp, Homo sapiens
  SIMILAR (81)..(593): 711254mologous to Homo sapiens CGI-43 protein,accession number AF151801,Smith-Waterman Score=597.
gcggaagtgcggtgatctagcaggtttctgttttctctgggctggctgtgggaggctcccgaggtggggacccggtcgggatggctgcagcggcggccggggctgggagcgggccctcggcggcccaggagaagcagttcctgccggcgctgctgagtttcttcatctacaacccgcgcttctggccgcgggaaggagaggaggaaaataagattttattttatcatccaaatgaggtagaaaagaatgagaagattagaaatgtcggattgtgtgaagctattgtacagtttacaaggacatttagcccatcaaaacctgcaaaatctttacatacacagaagaacagacagttcttcaattgaaccagaagaaaatttcttggatggtcatggttgttcggtgtcctataattgaaaaacagagtaaagatggaaaaccagttattgaatatccaagaggaggagttgttggacaaggtttatagctcggtgctgcggcagtgctacagcatgtacaagctttttaatggtacatttcctgaaagccatggaagacggaggcgtcaagcttctgaaagaaagattagagaaattcttccatcggtatttgcaaacgctacatttgcagtcatgtgacctacttgacatttttggtggaatcagcttcttcccgttggataaaatgacttatttgaaaatccagtcctttattaatacgaatggaggaaagcctgaatatagtcaaatacactgcttttctctataacgatcagctcatctggagtggattagaacaagatgacatgagaattttatacaaataccttaccacctcccttttcccaaggcacatccgaacctgagttagcaggaagggattctccaataagagcagaaatgccaggaaatcttcaacactatggaagatttcttaccggacccttgaacctcaatgatccagatgcaaaatgcagaattccccaaaatttttgtaaatacagatgacacttatgaagagctccatttaatccgtttataaggccatgagtgcggctgtgtgctttatgatcgacgcctctatccacccaacgttgggatttttgccgaaggactgggacagcatcgttggggccccagcttcacagtggctgggcctctggacatcttgtggaacagttttaacatcaacaagggggatgttccgggtctgaggaaaggaaccccagtttaagtttattctacttcaaccacatgaatctcgtcgagaagagcacagttcacattgaggaaaacgccccagcgtgtccgctcacttccgtgcacccggatttaaatgaagattcctcggtgaccatccaacagtgacctttaccccagagtggaatgaagatgagggagatcattgttgaagggccttgagtgattactggggttgttggaaaggaagtctgatccggccgggagcctctatgttatttttgaaatccaaaaaaatgccaaaccctgattgaaagtaaaatgaaagaggtccaagaaacctttgtgcaacgccagttccaacaacatccttccttccttggattgacgggatgaccggcctcacctgagagcatatcctaaaaaacactctgcaaacatttggtcacatgcaagttagtggtcatatcgacggactgcattccaggacacagggtaaagcaatacttgctttgaagaatcacatttcgactcggtctgctcatctgaggtttttagatcttaactatttatgtggaattaattaaaggtagttggctatatcgctcaccatctcattcttttgacatctctgtgaatattttactggaaaataagactaataaattgttaaaagtttttaaaaaaaaaaaaaaaaaaaaaaaaaaaaagggcggccgct

SEQ ID NO: 19964 - DNA, 491 bp, Homo sapiens
  SIMILAR (94)..(171): 571254mologous to Homo sapiens precursor polypeptide (AA -19 to 55),accession number X17117,Smith-Waterman Score=56.
atcagtgatgctttttagaattatagactgttagagttcagggttctaaaagatcaccagtccaatctacagcatgaagtttgactctccaacctcttcttgcatgctactaatgatggagcgctcacttccaccacgattccccaccctccaatgaggcagcctaccagtttgtgatggttctgaaatttttcttcatactgaactgaaacttctggaacctcctcatgcttggccacaatcctgtcctccaaggctgtagatgacacgccagcagcttctacccatgacattcctgctaaaggcacacagtaaagctggaattgagtctcctggcctcaaccccaggcctgggttctccctgcatcctgtactgccggcagcctcctctgcagctttcttgctaccaagtttccgttgactcaggaagctgtcatccctcttccagagtgtagtccggataccccaccccagccctatgctccacgaaa

SEQ ID NO: 19965 - DNA, 563 bp, Homo sapiens
  SIMILAR (370)..(534): 341254mologous to Drosophila melanogaster guanine nucleotide- binding protein gamma subunit,accession number AJ250440,Smith- Waterman Score=62.
ttaattaaatctgtgctttaggtgtactctgggctttttccagcaggctaaactgaaagcctatttttttttttttgaaagctgcattttaaggccatcaaatttcttcctaatctgtatcaaattgcctttaggtcctggatcctttgtctttattcctgtgtattgggcttaatttagtgacgtttatgtatttatcggtacaattcaaagggctaggagcattgtggtccacaggagaggccttcgctggctgcactggagagaggttttgggctctgctgggcagggtgtgaagaggagagcacaaagcgggccttcgggctcctgcatacggaaaatacatcaccgtctcctgtcttttcagagcaaaatctggagcggcaggtgttacagacacaatgtagacgactggaggcccggcactacagcctcagcctgacggcagagcagctctcccacagcgtggcggagttgaggagccagaaacagaagatggtctcagaactggagctgctccatgcagaacctgaccacttacgaaagtgccttgccttgcctgc

SEQ ID NO: 19966 - DNA, 598 bp, Homo sapiens
  SIMILAR (19)..(501): 831254mologous to Homo sapiens KIAA0182,accession number D80004,Smith-Waterman Score=655.
atggtgtgtgacttccacgggtactactacgacctcgatgactcttacgacgagagcgatgaggaggaggtcagggcccacctccgttgcgtggccgagcagccgcccctcaaactggacacgtcctctgagaagctagagtttttgcaactttttggcttgaccacccaacagcagaaggaggaattggtggcccagaagcggaggaagcggcggaggatgctgcgagagagaagcccgtcgcccccaacaattcagagcaagcggcagacgccttcaccgagactggcgctgtctacccgctacagccctgatgagatgaacaacagtcccaacttcgaagaaaagaagaagttcctgaccatcttcaacctgacccacatcatcgctgagaagaggaaaggtccactgcttgagatccgtggttacgataccaaccaggccgaaagctggagccgtagcttatcaacgctggcggaagatgcgctggcgaaacgtcccggctttcgttcattccgctgccaggattccagcctgctggcctttgattttgctggcgttcatcatagcgatatggtgacgctgctggcggagtacg

SEQ ID NO: 19967 - DNA, 7434 bp, Homo sapiens
  SIMILAR (398)..(2467): 301254mologous to Homo sapiens Human preproalpha 1 (I) collagen,accession number Y56800,Smith-Waterman Score=219.
  misc_feature (1)...(7434): n = a,t,c or g
ttggacatttttgagcgccgtggcttgaacggtgctttttgttcattcctgggttttaatattattttccttcttcatccctctctggccactatggaattctaatttgaaccatgtttggattgaagccgcctctgtatttcttaccagggtcctcactgagcagcgagtcgtcccccgtgtcctctccggccaccaaccacagctcccccgccagcacacccaagcgcgtgcccatgggccctatcatcgtcccccctgggggccacagcgtgcccagcaccccccccgtggtgaccatcgctccaaccaaaaccgtgaatggtgtctggaggagtgagagccggcaggatgccggtcccaggagcagcagtggaggtcgggaacgcctcattgtggagcccccgctccctcaggagaaggcagggggaccagccatcccctcgcacctgctcagcaccccctaccccttcggcctctcccccagctcagttgtgcaggattcccgcttcccgccactcaacctccagcggcccgtgcaccacgtggtgccccccagtaccgtgaccgaggactacctgagaagcttccggccctaccacaccaccgacgacctccgcatgtcctcactgcctcccctcggcctggacccggccactgctgcagcctactaccaccccagctacctggccccacaccccttcccccacccggccttcaggatggacgactcctactgcctgtctgccctgaggtccccgttctaccccatccccacccccggctccctgcccccactgcacccatcagcgatgcacctgcacctctctggggtccgctaccctcccgagctctcccactcatccctggcagcgctgcactcggagcgcatgtctggcctcagcgcggagaggctgcagatggacgaggagctaaggcgggagagggagcgcgagcgcgagcgcgagcgtgagcgtgaggctgaccgcgagcgggagaaggaacgtgagcgcgaacgcgagaaggagcgcgagcaagagaaggagcgtgagcgtgagaaggagcgcgagcgcgagctggagcgccagcgggagcagcgggcccgggagaaggagctgctggccgccaaggccctggagcccagcttcctgcccgtggccgagctgcatgggctgcgtggccatgccactgaggagcggggcaagccctcggagcagctgaccccaacccgagcagagaagctgaaggatgccagcctgcaggcgcccaagcccgtccaacaccccttgcatccggtgcccaccccacaccacacggtgcccagcctcatctccaaccatggcatcttctctctgcctagcagcagtgctgccacagccctgctgatccagcgcaccaatgaggaggagaagtggctggcgcggcagcggcggctgcggcaggagaaggaggaccggcagtctcaggtgtccgagttccggcagcaggtgctggagcagcacctggatatgggccggcccccggtgccggcggaggcagagcacaggccggagagcaccaccaggccaggaccaaaccgtcacgagccaggtggccgtgaccctccgcagcactttggggggccaccacctctgatttcgcccaagccccagctccatgctgcacccacggccctctggaaccccgtgtccctgatggacaacaccttggagacgcggcgggccgaaagccactctctgcacagccacccggctgcatttgagcccagccgccaggcagccgtgccgctggtgaaggtggagcgggtcttctgcccggagaaagcagaggaggggccacggaagcgtgagcctgcccctctggacaagtaccagccacctccgccgccaccacgagagggagggagcctggagcaccagcccttcctgcccgggcccgggcccttcctggctgagctcgagaagtccacccagaccatcctgggccagcagcgggcctccctcccacaggcggccaccttcggggagctcagcggacccctgaagcctggctcgccctaccggcccccagtgccacgggcccccgaccctgcctacatctatgatgagtttctgcagcagcgccggaggctggtcagcaagctggacctggaggagcgcaggcggcgggaggcccaggagaaagggtactactacgacctcgatgactcttacgacgagagcgatgaggaggaggtcagggcccacctccgttgcgtggccgagcagccgcccctcaaactggacacgtcctctgagaagctagagtttttgcaactttttggcttgaccacccaacagcagaaggaggaattggtggcccagaagcggaggaagcggcggaggatgctgcgagagagaagcccgtcgcccccaacaattcagagcaagcggcagacgccttcaccgagactggcgctgtctacccgctacagccctgatgagatgaacaacagtcccaacttcgaagaaaagaagaagttcctgaccatcttcaacctgacccacatcagcgctgagaagaggaaagacaaagagagacttgttgaaatgctccgtgccattgaagcagaaggcactgtcagcagcagtggccgactccttgacaaactctccgagggacagtcctgccgtctccctgagtgaaccagccacgcagcaagcctctctggatgtggagaagccggttggtgttgctgcttccttgtctgacatcccaaaggccgcggagcctgggggaagctgggaacaggtccggccccagggagctgttcgagagtccagggagctagctcctgccagcggggagaaggcacaggctgagcggggcccctggaggcaaaaagagtctgagcatgcttcactatatccggggcgctgcacccaaggacattcctgtgccgctgtcccacagcaccaatgggaagagcaagccgtgggagccctttgtggcagaagagtttgcacatcagttccacgagtcagtgctgcagtccacccagaaggccctgcagaagcataaagggagcgtggctgtgctgtctgcagagcagaaccacaaggttgacacgtccgtccactacaacattcctgagctgcagtcctccagccgcgcccctccaccccagcacaatgggcagcaggagccccccactgcaaggaagggccccccaacctaggagttggaccttgactcttaggaggaggaagaggaggatgatgaggatggaggggatgaggaggaagtccccaggcgcaagtggcaagggatcgaggccgtttttgaagcttaccaggaacacatagaagagcaaaatctggagcggcaggtgttacagacacaatgtagacgactggaggcccggcactacagcctcagcctgacggcagagcagctctcccacagcgtggcggagttgaggagccagaaacagaagatggtctcagaaagggagcggctccaggcagaactggaccacttacgaaagtgccttgccttgcctgcaatgcactggcctaggggctacctgaagggatatcccaggtgacggtttcccttgcactaggccgaacctatagtatagaaatattatctattttattaccttgaatatttaatatttttcactgggaggtttgaagcttacaaaatgagaatgtgccatgcatgaagcaaaggattccagggctccagaaaaaatgaatgaacttcaccttgacgtcaatgcaattgaattcaccgttgtcatttcaggcgaggcaaccaatgttagggtttgcccacagttttttctttttaaaagggtggtttttcgccccttcctcttcccacattatttctttaatctgaccttgaaggctccattagcaacactaaaacttgatcattaacagccccctgtgcatatgagtgggatcaaaccggttctgttctttcttgtgttgccatgttactatggcttcaagccccagttttgcttttgccacagcgatggggccagtctcattcctccccaaggagtgaaacttgcttcagctgaaaaggttgggtgcattgtcagtaaaaagggcttatttgtttcattttactttcctgcgaaaattttcttcaaaggcaacaagtcctagggaggcacacaaaggcaacccaaagggcttttcccccgggaaaagctctttccttaccctaaagctaaaaccaaattcaccaaactgaaggtagctttttattaactccgtggggagcatgtacagaagctctgtgtaaaacacagcttcacacccaccagattgttactacagtgggttgggttttcatacagacgtaaattttgagagaaaagtcaaagggtgcttaagccttcgccctgtgtatatatattaaaaaaaaaaccaaagttttgtatgttttttattactttaactattgttataaaaagcctgccatttttaatatgtggtttgggggatttttgtttgtttttcctgtttgggggttttgtttgttgccttsgctttttttgggcaaaaaaaaaaaaaaaaaaccttgcttttaggtgtttggtactgctgctggtcaggacattaaaatattgaagggtttttaaaaattaaagaagaagaaaagtaaaagagcttaccactggcgcctatgcgatcacttcatttttagtttgagttgcaccagaagctgccgtagaaagccatgcgctactgcttacctcctccactccccctgcctgcccccagcatctggacaagctaatagcaaatattacccattgctatcaagggaggagggggtagtcttgtagaacccatgtgtgacagtcatgtgcacacatgggcgggggcttttaaaaaccctttcaggaagtcaatgatttctgtgaatgatataattcttaaggtgtctgagagcaggtacagaataggaacttcagaggctttgtttaaaacgcaaagctttgtaaaagccacaaggtctgagctgaacccctcctttttgaacttactgtgacaagcacaggaacggtcagaaactgggctcatcacaccaaggcaaagcaacgggcgagtcttcctccttgtccgtagttactgcctatggaggcagtgtttagatcaagaaggcctctcttgctcccaagggccctcaccagaggccagggctgccagtcactggtctggggggtggaggcctgagctgagggcagggtgcctgacctgtgtgccggctgctcactgctgtgaccagcagccgagcccttggccctagcccttgctgcgcagaacagcttgctggcagctggcatcgtgtcgctttatctgcccccgcacagtttgctttgtacgtctgccaagaatcttccagttattagcaaactcagacgaatgtaccgccagtattatcagcagtcaacaagcaccttcctctccacagaagcagctggaagagaactcgaggggctgtgctgcaggcctcccctcgaaagacactgggaggtcaacatgttccacaggtgttcagagggagtctgctacaaactatcagggcaaaatctcactggatttctccactgaaaacctacttgaggtttctggtctgaaggcttaagagtcccatcttaggcacttccgctctcaggcctcctcctccatcacagatgtctggatgcttttggaaatggccttggctaaagtaaaagggaaaagtagatccgataacttaaaaacgtagctcatcccttaccatccaaggggcactcccttggttggattttctatgacagcacaggggacaggtggcacaccatgagaggtctgcccaggggtnggagcagtgtcactgtgcttagcaatagttggcttctcccctgtcagtggaaaccccacttctgcccggcccttgagcttcttgcccactgtctccccatcccttccacctacttgtggcgatctgagtacttctacttcttgctcaaagaagtaatacggcaatcagaatacaaaccagtaaggcaacacgaataaactaagaaaaaggtaagaactgtctcaaaaacgaaaccacacccacccaagacacagtacccagtcatggtttccccatccaactattagtttcatactttgaaaacttactttcagattattctcaaagaacacagtagcacctaaatctgttttcaattggacttaaaaattgacatgcaatctcttaagtaagttttttgttcagctacttcacactgagtacctcaaatctgctctggagtcgattatggccacctgtgtgtcaggatgcacctagaaagccctcggctcggtccttaggaccaatcttcctacatttacctggggaggggagcttgccatctgttccctcttgcagagggataccttccaatagtaaattatctggttcctcactgaaacaagttatttttgcttcatatagtcagagtcagactgacatgataaaatatcatgttcctaatctgttgtctcaggataagtgaccaaggacggggactttccacattttagtcttacattctaatcttaaagggattaaaggcacttgaattgggactaacattctggatagggttgcaccctttaagagtattcagagagcatcaaaaggagcccacaccttcagcagtgaagggattctaacacaggggaatctggcagtttgtaggcaggaatgggtatttttcctccaagtaggctccattaatacttgcccaaatcttcaaaagtttaagctggaatttttcacacccaggatccctaccccttttcccttgagggccacatgtttttcacacaagtgtaggaaaatgccaggggatccaccacaaggatgagatggggcagcacaaaccggattctgttcctcttttaaagtgtaataattagcccactttggccaatcctcctaaattcctttccaagtaaacccaagcctggttgactttccttacctaccttgccagtaagccctgtcccccccaacttttccccatccccagtgcccttaccccctaaaaaaactccccttaacctcctgccccttgacccctgagggaagaccccatgcctaactggtgttatattttgtatgtacccctgtgccttaattcctataacatgtaaacccccatacgtcaggtggggaggggagggaacacccggtgccctcggtcacttctggggggcagtttaggatgctgtggaaattaaaccttgttcttaagtgtactttgtttgaattaattgtattgtaatatatatatgttgaatgtagtaattaggtatttatgaatatattgctgtaatttctgccaacatccaaaaaataaaattcttcctaaattaaaaaaaaaaa

SEQ ID NO: 19968 - DNA, 1317 bp, Homo sapiens
  SIMILAR (669)..(1049): 401254mologous to Homo sapiens Type III procollagen (prior art),accession number R28916,Smith-Waterman Score=147.
gtggcagcccctcggcttgtcgccggagctgagaaccaagagctcgaaggggccatatgacactcctcccggacccctggacacacacagccctggggactggatgccttggagcatggcaagtccagagcaccctgggagccctggctgcatgggacccataacccagtgcacggcaaggacccagcaggaagcaccagccactggccccgacctcccgcacccaggacctgacaggcacctgcccccacacagtggaataaaatacaaactccagcatgaccacgcgggagcttcagcagtactggcagaaccagaaatgccgctggaagcacgtcaaactgctctttgagatcgctttcagctcgcatcgaggagagaaaagtctctagagtttgtggtgtaccaaatcatcgtcatctcagactgggagctttgacaacaacaaggccgtcctggaacggcgctattccgactctcgcgaagctcccagcaaagcgctgctgaagacgttcagggaggagatcgaagacgtggagtttcccaggaagcacctgactggggaacttcgctgaggagatgatctgtgcagcgtcggcgcgccctgcaggagtacctgggcctgctctacgccactccgctgcgtgcgccgctcccgggagttccctggacttcctcacgcggccggagctgcgcgaggctttcggctgcctgcgggccggccagtacccgcgcgccctggagctgctgctgcgcgtgctgccgctgcaggagaagctcaccgcccactgccctgcggccgccgtcccggccctgtgcgccgtgctgctgtgccaccgcgacctcgaccgccccgccgaggccttcgcggccggagagagggccctgcagcgcctgcaggcccgggagggccatcgctactatgcgcctctgctggacgccatggtccgcctggcctacgcgctgggcaaggacttcgtgactctgcaggagaggctggaggagagccagctccggaggcccacgccccgaggcatcaccctgaaggagctcactgtgcgagaatacctgcactgaagccggcctgggaccccgcagagcggctggagatttggggtcaccatggctcacaagtgggctgttatggggttctttttttttatttttccttttcttttttgttattttgagacagtctttgcttctgtcacccaagactgaagttgcagtggctcaattaatgtctcactgcagcctctaactcctgggcacaagcaatcctccccttcgtgcgaattcttgggctcgagggcaaaa

SEQ ID NO: 19969 - DNA, 672 bp, Homo sapiens
  SIMILAR (248)..(331): 1001254mologous to Rattus norvegicus nucleosome assembly protein,accession number AF062594,Smith-Waterman Score=160.
  misc_feature (1)...(672): n = a,t,c or g
ctgcagtaaacttttccaacgttggctgcagtaactattttcaataaaagctgtctggatgtctcaagttgtgttgggaaatttttcatattagaagctttcaaattaaattgtattatcatcaaagtctgtaatcatgaaaatctgttgatccgtagagtaacttgtattaaattttccctacattatgagccagtttacctactatgtacatacttcatggatgcattttgaaactttaatataggaaggggaagaagaaggagatgaggaaaatgatccagactatgacccaaagaaggatcaaaacccagcagagtgcaagcagcagtgaagcaggatgtatgtggccttgaggataacctgcactgtaatagcctaaacacaactcttatttacttacagccttatgtttttgtattttcttggtagacttaggtaatttttgttttaaaggacaggaaactgatattttaaagaccaatctgttctacctaggcatttttaactagtttttctgccagctatgttgaatgcacaaattctgtcacgcatgtttcattcattgctacataatttggttcttctgggaatatttttatgtagctcttggagtacagctatgaaaattaacaactgttaaaggaaacacnnnnnnnnnncgtaattttt

SEQ ID NO: 19970 - DNA, 1573 bp, Homo sapiens
  SIMILAR (1240)..(1281): 571254mologous to Human herpesvirus 6 glycoprotein gp82/105,accession number AB021506,Smith-Waterman Score=48.
  misc_feature (1)...(1573): n = a,t,c or g
atgtccccctggcatttcaaataggcccaaaatttttagctttttacaaaatttagaaaccttttattagattttcctccatatgcccttacccccccctgaggtagtttggttaaccgttcttcccctttttatttcccagttaacaaaagcccgggttaatgacattctcattcttttagccataaaaatttaaaggaacccttgaaggtggggccttttttttagctttaacccaaaaaaaaagaannnnnnnnnnnnnnnnnnaaaaaaaaacagcatcaagttcttaagattttcttcctcttttttttttttttttacacttgcttattagtatagcatctcgttccaaagctggtaccttttcttcaacaatgtgttaaaaactgagtataacccttaattcaaggtaggcctctacttctataaaaataggagccacacaaagatctaaaaagagtgctgactgcccagatccagaacagaggtacttaacacctttgttttccagtttagttatcaaagcgtggtgtgaacaaaatgcttagtgtcacactggcattacaaataggcccaaaattttgagcttttaacaagattgagaaacattatatgagatttaactcaatatgccttaacacatccatgaggtagttaggtaaacagtactacccattttaattacacagtaaacagaagcacggggaaggtgacatactcatactttaagcaataagaattagaagaaaccatagaagcttggggccttctctctagctctaacccaaagaaaatgaattttatttttttttttttaaaagaaaacagcatcaatcacttaagattttcttcctctttttttttttttttttacacttgacttattagtatagcatctcgttccaaagctgggtacctttcctccaacaatgtggttaaaaactgagtataccccttaattcaaggtaggcctctacttcctacctgaattgggtacaaaattaagacattatcttgtaagaactaaaattgtatttgaaatttttattttagctgcaaaaacaaaaacaaggcaaacaaacaacaaataacttggaaaatagggcttgtcaaatggatgtaaattcatcctttccgggggaaggcagaagggtaggaccctaccacaaagggaaaggatggcttaggttaatgggggggttaaattttaaaaaatacagtttaaatttcggggcttactttctgggaaatcccgtttttatgtcacctgcactgtggtaccagtaactatactgagtcaggttactttacagttaactatgtcccctaaaacccaataatccattaaccctctaataacagttattgggtgtggtcatactggggaattcttaaccatatagttgtcttgccaattttttttttaaacaataaattgtcttagtataagtcactgcatttctgtaacaaagtaatgaaaggcacagctaatccaagcggacttaaccctattcaacaaccagctgaaaaaatactttggttcttcaagcgaaaaaattacaaaaaaaaa

SEQ ID NO: 19971 - DNA, 2016 bp, Homo sapiens
  SIMILAR (381)..(1370): 431254mologous to Mus musculus DN38,accession number X61449,Smith-Waterman Score=495.
  misc_feature (1)...(2016): n = a,t,c or g
cccacgcgtccgcggacgcgtgggctgctcgcggcgccggcgtcctgttcctcccgctgcatgctgccgctgccagccctgagtcacatgcctgcgcagctcctggccgcctggctccccatactagtcgccgatatttggagttcttacaacatggcagacattgacaacaaagaacagtctgaacattgatcaagatttggatgatgttgaagaagtagaagaagaggaaacctggtgaagaaacaaaactcaaagcacggtcagcgtaacttgttcagaatgatgccaaaatcctcagattccttgcagcccgttcaagaaaagacttgatgggtctgggtagaaacaccaacaaggatacattgaaagcctgccttagggtagttaaaagacggagtgaatgctctcaaaaacctgcaagttaaatgtgcacagatagaagccaaattctttgagggaaggttcacgggttctttgaaaggaagtatgctgttcttttatcagcctctatttgattaagcggttttgaaattattaatgcaatttatgaacctacggaaggaaggaatgtgaatgggaaaccagatgaaggaaggatgaggatttcggagggaattggaaagaaaagggccagattgaagatgagaaaaaggatgaaggaaaaagaagaccccaaagggaattccctgaattttggttaactgtttttaaagaatgttgacttgctcagtgatatggttcaggaacacggatgaacctattctgaagcactttgaaagatattaaagtgaagttctcagatgcttggccagcctatgagttttgtcttagaatttcacttttgaacccaatgaaatattttacaaatgaagtgcttgacaaggacatacaggatgaggtccgaaccagaaccagattgattcttgatcccttttcttttgatggaccagaaattatgggttgtacagggtgccagatagattggaaaaaaggaaagaatgtcactttgaaaacctattaaggaggaggcaggaaacacaagggacgtgggaccagttcgtactgtgactaaaaccagtttcccaatgactctttctctaacttttttcccccctcctgagattcctgaggagtgggagatctggatgatgatgctggaagcttattccttgctggcagactttcggaaatttggttcactttttaccgtgagcgtataatcccaagatccagtgttaatattttaccgggagaagcctattgaagatgatgatgatgattatgatgaagaaggtgaagaagcggatgaggaaggggaagaagaaggagatgaggaaaatgatcccagactattgacccaaagaaaggatcaaaacccagcagagtgcaagcagcagttgaagcagggatgtatgtggcctttgagggataacctgcactggtctaccttctgcttccctgggaaaggattgaatttacatcatttgacaagcctattttccaagttatttgttgtttgtttgctttgtttttgtttttgcagctaaaataaaatttttcaaatacaattttagttcttacaagataatgtcttaattttgtaccaattcaggtagaagtagaggcctaccttgaattaagggttatactcagtttttaacacattgttgaagaaaaggtaccagctttggaacgagatgctatactaataagcaagtgtaaaaaaaaaaaaaaaagaggaagaaaatcttaagtgattgatgctgtttttttttnnnnnnnnnnnnntaaaannnnnnnnnnnngggttaaagctaaaaaaaaggccccaccttctagggttttttcaaatttttatggttaaaagaaggagtttgtcatttacccgggcttttgttaactgggaaataaaaaggggaagaactgttaacctaactacctaagggaggggtaagggcatatggagtaaaatctaaaataaggtttctaaatcttgtaaaaagctaaaaattt

SEQ ID NO: 19972 - DNA, 359 bp, Homo sapiens
  SIMILAR (196)..(348): 901254mologous to Xenopus laevis cytosolic thyroid hormone binding protein/pyruvate kinase type M2,accession number U03878,Smith-Waterman Score=252.
  misc_feature (1)...(359): n = a,t,c or g
gataaccttgaggctgaggcagtggctccttgcacagcagctgcacgcgccgtggctccggatctcttcgtctttgcagcgtagcccgagtcggtcagcgccggaggacctcagcagccatgtcgaagccccatagtgaagccgggactgccttcattcagacccagcagctgcacgcagccatggctgacacattcctgggctgaggacgtggacctccgggtgaactttgccatgaatgttggcaaggcccgaggcttcttcaagaagggagatgtggtcattgtgctgaccggatggcgccctggctccggcttcaccaacaccatgcgtgttgttcctgtgccgtgatggacccn

SEQ ID NO: 19973 - DNA, 399 bp, Homo sapiens
  SIMILAR (43)..(159): 1001254mologous to Homo sapiens Human secreted protein, SEQ ID NO: 6383,accession number G02302,Smith-Waterman Score=207.
agcgtatcccgagtcgggcagcgccggaggacctcagcagccatgtcgaagccccatagtgaagccgggactgccttcattcagacccagcagctgcacgcagccatggctgacacattcctggagcacatgtgccgcctggacattgattcaccacccccttcccccagcccatccattaggccagcaacgcttgtagaactcactctgggctgtaacgtggcactggtaggttgggacaccagggaagaagatcaacgcctcactgaaacatggctgtgtttgcagcctgctctagtgggacagcccagagcctggctgcccatcatgtggccccacccaatcaagggaagaaggaggaatgctggactggaggcccctggagccagatggcaagag

SEQ ID NO: 19974 - DNA, 394 bp, Homo sapiens
  SIMILAR (43)..(297): 611254mologous to Homo sapiens pyruvate kinase,accession number M15465,Smith-Waterman Score=232.
attaagtccggatctcttcgtctttgcagcgtatcccgagtcggtcagcgccggaggacctcagcagccatgtcgaagccccatagtgaagccgggactgccttcattcagacccagcagctgcacgcagccatggctgacacattcctggagcacatgtgccgcctggacattgattcaccacccatcacagcccggaacactggcatcatctgtaccattggcccagcttcccgatcagtggagacgttgaaggaggcctgggctgaggacgtggacctccgggtgaactttgccatgaatgttggcaaggcccgaggcttcttcaagaagggagatgtggtcattgtgctgaccggatggcgccctggctccggcttcaccaacaccatgc

SEQ ID NO: 19975 - DNA, 428 bp, Homo sapiens
  SIMILAR (82)..(339): 961254mologous to Homo sapiens M2-type pyruvate kinase,accession number M23725,Smith-Waterman Score=436.
ctgcggaattcggcacgagccggatctcttcgtctttgcagcgtagcccgagtcggtcagcgccggaggacctcagcatccatgtcgaagccccatagtgaagccgggactgccttcattcagacccagcagctgcacgcagacatggctgacacattcctggagcacatgtgccgcctggacattgattcaccacccatcacagcccggaacactggcatcatctgtaccattggcccagcttcccgatcagtggagacgttgaaggagatgattaagtctggaatgaatgtggctcgtctgaacttctctcatggaactcatgagtaccacggaaagctttgcttctgaccccatcctctaccggcccgttgctgtggctctagacactaaaggacctgagatccgaactgggctcatcaagcgca

SEQ ID NO: 19976 - DNA, 830 bp, Homo sapiens
  SIMILAR (146)..(601): 911254mologous to Homo sapiens cytosolic thyroid hormone- binding protein (EC 2.7.1.40),accession number M26252,Smith- Waterman Score=699.
catgcgggacctcaagaatgtgccacaccaccgaagagcttgccttgaccccatcctttacggccgcttgctgtggctctagacactaaagaacctgagatccaaatgggctcatcaagggcagcggcacttcagaggtggagctgaagaagggagccactctcaaattcacgcggaataacgcctactggaaaagtgtgacgagaacatcctgtggctggactacaagaacatctgcaaggtggtggaagtgggcagcaagatctacgtggatgatgggcttatttctctccaggtgaagcagaaaggtgccgacttcctggtgacggaggtggaaaatggtggctccttgggcagcaagaagggtgtgaaccttcctggggctgctgtggacttgcctgctgtgtcggagaaggacatccaggatctgaagtttggggtcgagcaggatgttgatatggtgtttgcgtcattcatccgcaaggcatctgatgtccatgaagttaggaaggtcctgggagagaagggaaagaacatcaagattatcagcaaaatcgagaatcatgagggggttcggaggtttgatgaaatcctggaggccttagggcactgggctgttgttccattgaagccgactcttgccctggcccttacttgcttctctagctctctaggcctctccagtttgcacctgtccccaccctccactcagctgtcctgcagcaaacactccaccctccaccttccattttcccccactactgcagcacctccaggcctgttgctatagagcctacctgtatgtcaataaacaacagctgaagcaaaaa

SEQ ID NO: 19977 - DNA, 424 bp, Homo sapiens
  SIMILAR (3)..(326): 1001254mologous to Homo sapiens M2-type pyruvate kinase,accession number M23725,Smith-Waterman Score=546.
tcctgtggctggactacaagaacatctgcaaggtggtggaagtgggcagcaagatctacgtggatgatgggcttatttctctccaggtgaagcagaaaggtgccgacttcctggtgacggaggtggaaaatggtggctccttgggcagcaagaagggtgtgaaccttcctggggctgctgtggacttgcctgctgtgtcggagaaggacatccaggatctgaagtttggggtcgagcaggatgttgatatggtgtttgcgtcattcatccgcaaggcatctgatgtccatgaagttaggaaggtcctgggagagaagggaaagaacactccaccctccaccttccattttcccccactactgcagcacctccaggcctgttgctatagagcctacctgtatgtcaataaacaacagctgaagca

SEQ ID NO: 19978 - DNA, 401 bp, Homo sapiens
  SIMILAR (37)..(156): 1001254mologous to Homo sapiens Opa-interacting protein OIP3,accession number AF025439,Smith-Waterman Score=200.
catctaccacttgcaattatttgaggaactccgccgctggcgcccattaccagcgaccccacagaagccaccgccgtgggtgccgtggaggcctccttcaagtgctgcagtggggccataatcgtcctcaccaagtctggcaggtctgctcaccagcaagagttagggccttagggcactgggctgttgttccattgaagccgacttctgccctggcccttacttgcttctctagctctctaggcctctccagtttgcacctgtccccaccctccactcagctgtcctgcagcaaacactccaccctccaccttccattttcccccactactgcagcacctccaggcctgttgctatagagcctacctgtatgtcaataaacaacagctgaagcaaaaaaa

SEQ ID NO: 19979 - DNA, 1362 bp, Homo sapiens
  SIMILAR (349)..(1323): 921254mologous to Homo sapiens pyruvate kinase, muscle,accession number BC000481,Smith-Waterman Score=1473.
  misc_feature (1)...(1362): n = a,t,c or g
atggccgtggaccagctgggcacaaccctcaccctgcactggggccagggcaccctggtcaccgtctcctcagcacccaccaaggctccggatgtgttccccatcatatcagggtgcagacacccaaaggataacagccctgtggtcctggcatgcttgataactgggtaccacccatcgtccgtgactgtcacctggtacatggggacacagagccagccccagagaaccttccctgagatacaaagacgggacagctactacatgacaagcagccagctctccacccccctccagcagtggcgccaaggcgagtacaaatgcgtggtccagcacaccgccagcaagaacactaaaggacctgagatccgaactgggctcatcaagggcagcggcactgcagaggtggagctgaagaagggagccactctcaaaatcacgctggataatgcctacatggaaaagtgtgacgagaacatcctgtggctggactacaagaacatctgcaaggtggtggaagtgggcagcaagatctacgtggatgatgggcttatttctctccaggtgaagcagaaaggtgccgacttcctggtgacggaggtggaaaatggtggctccttgggcagcaagaagggtgtgaaccttcctggggctgctgtggacttgcctgctgtgtcggagaaggacatccaggatctgaagtttggggtcgagcaggatgtttgatatggtgtttgcgtcattcatccgcaaggcatctgatgtccatgaagttaagggaaggtcctgggagagaagggaaagaacatcanggaggacagcaaaatcgagaatcatgagggggttcggaggtttgatgaaatcctggaggccagtgatgggatcatggtggctcgtggtgatctaggcattgagattcctgcagagaaggtcttccttgctcagaagatgatgattggacggtgcaaccgagctgggaagcctgtcatctgtgctactcagatgctggatagtangatcaagaagccccgccccactcgggctgaaggcagtgatgtggccaatgcagtcctggatggagccgactgcatcatgctgtctggagaaacagccaaaggggactatcctctggaggctgtgcgcatgcagcacctgattgcccgtgaggcagaggctgccatctaccacttgcaattatttgaggaactccgccgcctggcgcccattaccagcgaccccacagaagccaccgccgtgggtgccgtggaggcctccttcaagtgctgcagtggggccataatcgtcctcaccaagtctggcaggtggccagataccgcccacgtgcccccatcattgctgtga

SEQ ID NO: 19980 - DNA, 2839 bp, Homo sapiens
  SIMILAR (501)..(1814): 401254mologous to Homo sapiens cytosolic thyroid hormone- binding protein (EC 2.7.1.40),accession number M26252,Smith- Waterman Score=433.
  misc_feature (1)...(2839): n = a,t,c or g
cagcgggataaccttgaggctgaggcagtggctccttgcacagcagctgcacgcgccgtggctccggatcttcttcgtctttgcagcgtacgcccgagtcggtcagcgccggaggaccgtcagcagccatgtcttttctcccatagtgaagccgggactgccttcattcagacccagcagctgcacgcagccaatggctgacacatttcctgggagcacatgtgccgccttggacattgattcaccacccatcacagcccggaacactgggcatcatctgtgaccattgggccagggcttcccgatcaagtggagacgttgaaggaagatgattaaagtctgggaatgaaatgtggctccgtcttgaacttctcctcatgggaacttcatggagttaccatgcgggagaccattcaaggaatgtggcgcacagccaacggaaaagcttttgctttcttgaccccattcctcttaccgggcccgttggctgtgggttttaggacattaaagggacctgagattccgaactggggctcatcaaagggcaacggcacttgcagaggttggagcttgaagaaagggagccactctcaaattcacgctgggataacgcctacatgggaaaagtgttgacgagaacatcctgttggttggattacaagaacatttgcaaggtgggtggaagttgggcagcaagatctacgtggatgatgggcttatttctctccaggggaaacagaaaaggtgccgacttccctggtgacggaggtggaaaatggtggctccttgggcattattgaagggtgtgaaccttccctggggctgctgtggactttgcctgcttgtgtcggagaaaggacatccaggatctgaagtttgggggtcgaaccaggatgttgatatggtgttttgcgtcattcatcccgcaaagcatcctgatgttccatgaagttaggaaggtccttgggagagaagggaaaagaccatcaaggattatccagcaaaatccgagaatccatgagggggttccggaggtttgattgaaatccttggaggccagtgatgggatccatgggtggctcgtgggtgattctaggcattgaggattcctgcagagaagggtcttcccttgctcagaagatgattgatttggaccggttcaaccgagcttgggaagccgtgtcatctgtgctactcagatgctggagagcatgatcaagaagccccgccccactcgggcttgaaggcagtgattgtggccaattgcagtcctggattggaagccgacttgcatcatgctgtcttgggagaaacagccaaagggggactatcctctgggaggctgtgccgcatgcagcaccttgattgcccgtgaagcacgatggctgccatcttaccactttgcaattattttgaggaactccgaccgcctggcgcccaattaaccagcgaccccacagaagccaccgccgtggggtgccgtggaagcctccttcaagtgctgcaagtggggccataatccgtcctcaccaagtctggcaaggtctgctcaccaaggttggccagataccgcccacgtgcccccatcattgctgtgacccggaattccccaggaaagctcgtcagggcccacctgctaccggggcatctttcccgggggtttgccaaggacccgattccaggagggcttgggcttaagacattgggacttcgggtgaaactttgccatggaatgtttggcaaggcccgaggcttctttcaagaaaggggagatgtggttcattgtgcttgaccggaatggcgcccctggcttccggctccaccaaacaacatgcgtgttgttccctgttgccgtgatggaccccgagggccctcttcttcaaggccctgttcccacccttttttccccaagcccattccatttaggcccagcaacggcttggtagaacttcactctggggctgtaaacgtggccactggttaggttggggacaacaggggaaggaagatcagacgcctccactgaaaacatgggctgtgttgtgcagccctgctctaagttgggacagccccagagccctggcttgccccatcagtgtggcccccaccccaatccaagggaagaaggaggaattgctggactgggaggcccccttgggaacccagcatggccaaagagggttgaacagctttcccttttcctgttgtgttattttgttccagttcctttaagaaaaaaatgggatgccccagaggactcccccaaccctgggcttggggtcaagaaaacagcccagccaagagttaggggtccttagggatactgggctggggctggttgttccaattgaagccgactctggccttggccctggccccttactttgcttctctaagctctctagggcctctcccagttttgcacctgttccccaccctccaactcagctgttccttgcagcaaacacttccacccttccaccttccattttcccccactactgcagcacctccaggcctgttgctataaaggcctacctgtatgtcaataaacaaccagctgaagcaaaaggcctggaggtcctgcagcaaacactccaccctccaccttccattttcccccactactgcagcacctccaggcctgttgctatagagcctacctgtatgtcaataaacaacagctgatgctttnnnnnnnnnnnnnnnnnnnnnnnnnnnnnnnnnnnnnnnnnnngggannnnntttnnnnnnnnnnnnnnnnnnnnnnnnnnnnnnttgggggggggcccctttnnnnnnnnnnnnttttaacccccgggggggggcggtttttta

SEQ ID NO: 19981 - DNA, 2673 bp, Homo sapiens
  SIMILAR (1515)..(1808): 731254mologous to Homo sapiens HTRM clone 1943040 protein sequence,accession number Y73355,Smith-Waterman Score=388.
  misc_feature (1)...(2673): n = a,t,c or g
gggccggccgccatcgcgcactggggctccgggcggctgggaccggcctggggtagctgtgcagcaggtgggtcggtcccggggatgcaacgcgggggtcagagagcgaccccaacagggtagacggtctgtgggttctggctaccacctgagcccactgggcatgtggtcatccctggcacctctcctttggagccaccttgtccctggctagacagtcacattttcccagtgccgttttggaaagatgttgcctttggagaaggcgtttgcctccccccaggagctccccagccccgccggatctgcccacgccggggtcagcagccggagttccagcaggaagaacccgagaccatccctgagaggacccctgctgaccctggagttctcccgcctgcgtttccgggaatttgtctacccaggaggctgccgggccccaccagaccctggcccggctgcatgagctgtgccgccagtggctgatgcctgaggcgcgctccaaggagcagatgctggaagcttgctggtgctggagcagttcctgggcatcctgcctgataaggtccggccctgggtggtggcacagtaccctgagagctgcagaagcagcctcctggtggagggcctcgctgatgtcctggaagagccaggtccctccactgttgacagggatgctgctgggctcccctgcgggctcatcctcaattcttagcgatggagtgtacgagaggcacatggaccctctgctgctaccaggcgagctcgcgagccccagccaggcccttggagctggggagatcccggcaccttctgagacaccctggctttctccggaccccctgtttctggaacagaggagggtcagagaagcaaagaccgaagaggacggccctgccaacaccgagcaggtgggtgggcacgagcaggtgggtgggaggtctcagccacgactaatgtttcagaagctgaagtcctttccagaggaccctcagcacctgggggagtggggccacctggaccctgccgaggagaacctgaagagctaccggaagctgctcctgtgggaaggcgggaggcggcaggagagcgctgggtgcgcctgcgaggaggccgcccccgcgggggtgctgcctgagctgcctacggaggcgccccctggggacgcccttgccgatcccccgtcgggcaccactgaggaggaggaagagcagcctgggaaggccccggacccgcaggacccccaggacgcggagtccgactctgccaccggatcgcagaggcagtccgtcatccagcagcctgccccggacaggggcacggcgaaactgggaaccaagaggccgcaccccgaggatggggacgggcagagcctcgagggcgtctctagctccggcgacagcgcagggctggaggccgggcagggccctggggctgacgagccgggcttgtcccgcgggaagccctatgcctgcggcgagtgcggggaggccttcgcgtggctctcgcacctgatggagcaccacagcagccatggcggccggaagcgctacgcctgtcagggctgctggaagaccttccacttcagcctggccctagccgagcaccagaagacccacggtgaaggagaaaagctacgcgctggggggcgcccggggcccccaaccgtccacccgcgaagcccaggcgggggctagggcgggcggtcccccagagagcgtggaggggcgaggctccccccgcacccccagaggcgcagaggtgagccgctgtgctgtcccgttccggaggggccgctttgccggccgtgaatcccagacgaggcattgggcctttccacgcccctgggtggcggcttcctgtggtgtttgtggacgtcctctgcctgtgccctgaatccgctcctgaggctaagcgctcccaacgagaagggtccacgggaagcccctcacctctgtaaacacaccctgggccagcgctcgcatccgaggggagccgccggatgtggaagaagactcggctttcctgcagccatttagtgccgccccatgctaggttatttgacattgtgcagtgtagagttgccttaaagtgcgtgattctgccagtgctttcttcaagtcacccttgccccgattccttcctgtttgcgctccccagggttgctcaagttggaaatttgtccagctgttttagcccttttccgtaacttggccgtgaatgtccaacttccacttcctaatcttgcaaaaagccggaagcctgtttccctaagtttaccctcgccgtgtgtttaccctatatgggagtagcctcgccagagattcacagaaaatgctttgcagccttaaggcaggggtttttcagaccgtggggtccccagccccattttaggtaaaatggggaaaatcaatttagcaagtgggtcancagcattacccagcaatgaagcagaataaagtaggccagaatgcatcatgtagtaaaggcaaatacttgttttgtgaaacttttaacccatacatcttaaatgtgagaactggttgcaatgtaagacatttcttgctgggaagcttgtgacgcaaaataagttgaaaacactaaataaagatcttgtcttgtctgagccaaaggagactaaaataattgggctacataaggtgaaaaaaaaaa

SEQ ID NO: 19982 - DNA, 372 bp, Homo sapiens
  SIMILAR (308)..(370): 771254mologous to Homo sapiens Human secreted protein, SEQ ID NO: 7678,accession number G03597,Smith-Waterman Score=70.
ttagagtttatcatttaattcagaatcctgtgtagagtacttgattaaggcaataaggctacatctattccatgggcgccggatgagcgccgccccctgctccacggcgccgagtcccatcgaccacccaagggctgaggagtgcgggcgcacggcgcgggactggcaggcagctccacctgcagcccaggcacgggatccactgggtgaagccagctgggctcctgagtcgcgaaggtctgcagcttcactcctgagccagcgagaccacgaacccaccagaaggaagaaactccgaacatcagaaggaacaaactccagacgcgccaccttaagagctgtaacactcaccacgagggtccgcggcttcat

SEQ ID NO: 19983 - DNA, 519 bp, Homo sapiens
  SIMILAR (199)..(104): 651254mologous to Homo sapiens Human secreted protein encoded by gene 81,accession number Y00337,Smith-Waterman Score=126.
tcatgtattcatttgctcagcacgcattgcctgagcagtcctgtgtgcctgagcatgcattgcctgagcagcacctcctactcccaccagttcctttccatgacatgtggggattatgggagctacaactgaagatgagatttcggtggggacacagccaaaccatatcactgagtccaggtggttaggagaggtgacagcgtgctggcagtcctcacagccctcgctcgctctgggcacctcctctgcctgggctcccactttggtgacacttgaggagcccttcagcccaccgctgcaccgggccagtggctgcggagggtgtactgggtcccccagcagtgccggcccactggcgctgcgctccatttctcgccgggccttagctgccttcccgcggggcagggctcgggacctgcagcccgccatgcctgagcctcccaccccctccatgggctcctgtgcggcccaagcctccccgacgagcgccgccccctgctccacggcgcccagtcccat

SEQ ID NO: 19984 - DNA, 630 bp, Homo sapiens; identical to SEQ ID NO: 6413
  SIMILAR (20)..(535): 331254mologous to Mus musculus neural variant mena+ protein,accession number U72521,Smith-Waterman Score=123.

SEQ ID NO: 19985 - DNA, 444 bp, Homo sapiens; identical to SEQ ID NO: 2752
  SIMILAR (399)..(187): 641254mologous to Homo sapiens hypothetical protein,accession number AL162044,Smith-Waterman Score=229.

SEQ ID NO: 19986 - DNA, 477 bp, Homo sapiens; identical to SEQ ID NO: 3171
  SIMILAR (229)..(405): 491254mologous to Homo sapiens melanoma-associated chondroitin sulfate proteoglycan (MCSP),accession number X96753,Smith-Waterman Score=141.

SEQ ID NO: 19987 - DNA, 3168 bp, Homo sapiens
  SIMILAR (682)..(2958): 911254mologous to Homo sapiens putative p150,accession number U93563,Smith-Waterman Score=3621.
atgggcccgcactcctcagcccttgggtggtcgatgggactgggcgccgtggagcagggtgtggcgttcgtcggggaggctcgggccgcacatgagcccatggagggggtgggaggctcaggcatggcaagctgcaggtcccgagccctgccccgtgggaaggcagctaagacccgaccaaaaacagaagacgcttgggtatttgcaaagcccaatgccattcaagcggtcggggttatgtcttttgcatttatttgccaccataactccttcttagtttacagttctctagaagaacccacagtagctaagtggtcccgccttatccatatgtccatcgtgatttctgtatttatctgtatattctttgctacatgtggatacttgacatttactggcttcacccaaggggacttatttgaaaattactgcagaaatgatgacctggtaacatttggaagattttgttatggtgtcactgtcattttgacataccctatggaatgctttgtgacaagagaggatatggccactactatgaagatgacttttggacaaaggactggttttaggaatcctgaaagtttctgggagactttaccagtcttatttctgcaagtcatgattaccacatattttgtagctaaacaattgctgttcctacacagtaagatcatcatcttggccaggaaaaagagatcaaacatgtgcaagaaggaagaagaagaaggaagaggagaagaaggaggagaaatacaaactaccatcagagaatactacaaacccctctacgcaaataaactagaaaatctagaagaaatggataaattcctcgacatatacactctcccaagactaaaccaggaagaagttgaatctctgaatagaccaataacaggatctgaaattgtggcaataatcaatagcttaccaaccaaaaagagtccaggaccagatggattcacagcagaattctaccagaggtacaaggaggaactggtaccattccttctgaaactattcgaatcaacagaaaaagagggaatcctccctaactcattttatgaggccggcaccatcctgataccaaagccaggcagagacacaaccaaaaaagagaattttagaccaatattcttgatgaatattgatgcaaaactcctcaataaaatactggcaaaccaaatccagcagcacatcaaaaagcttatccaccatgatcaagtgggcttcatccctgggatgcaaggctggttcaatatatgcaaaccaataaatgtaatccagcatataaacagaaccaaagacaaaaaccacatgattatctcaatagatgcagaaaaggcctttgacaaaattcaacaaccctccatgctaaaaactctcaataaattaagtactgatgggacgtatctcaaaataataagagctatctatgacaaacccacagccaatatcatactgaatgggcaaaaactggaagcattccctttgaaaactggcacaagacaaggatgccctctctcaccactcctattcaacatagtgttggaagttctggccagggcaattaggcaggagaaggaaataaagggtattcaattaggaaaagaggaagtcaaattgtccctgtttgcagacgacatgattgtatatctagaaaaccccattgtctcagcccaaaatctccttaagctgataagcaacttcagcaaagtctcaggatacaaaatcaatgtacaaaaatcacaagcattcttatacaccaataacagacaaacagagagccaaatcatgagtgaactcccattcacaattgcttcaaagagaataaaatacctaggaatccaacttacaagggacgtgaaggacctcttcaaggagaactacaaaccactgctcaatgaaataaaagaggatacaaacaaatggaagaacattccatgctcatgggtaggaagaatcaatatcatgaaaatggcaatactgcccaaggtaatttatagattcaatgccatccccatcaagctaccaatgactttcttcacagaattggaaaaaactactttaaaaatcatatggaaccaaaaaagagcctgcatcgccaagtcaatcctaagccaaaagaacaaagctggaggcatcatgctacctgacttcaaactatactacaaggctacagtaaccaaaacagcatggtactggtaccaaaacaaagatatagatcaatggaacagaaccgagccctcagaaataatgccgcatatctacaactatctgatatttgataaaccagagaaaaacaagcaatggggaaaggattccctatttaataaatggtgctgggaaaactggctagccatatgtagaaagctgaaactggatcccttccttacaccttatacaaaaattaattcaagatggattaaagacttaaatgttagacctaaaaccataaaaaccctagaagaaaacctaggcattaccattcaggacataggcatgggcaaggacttcatgtctaaaacaccaaaagcaatggcaacagaagccaaaattgacaaatgggatctaattaaactaaagagcttctgcacagcaaaagaaactaccatcagagtgaacaggcaacctacaaaatgggagaaaactttcgcaacctactcatctgacaaagggctaatatccagaatctacaatgaactcaaacaaatttacaagaaaaaaacaaacaaccccatcaacaagtgggcgaaggatatgaacagacacttctcaaaagaagacatttatgcagccaaaagacacatgaaaaaatgctcatcatcgctggccatcagagaaatgcaaatcaaaaccacaatgagatactatctcacaccagttagaatggcgatcattaaaaagtcaggaaacaacagaccactcactctgggagaaagcaactggctatgtcatgaggaaattgaaaccacctatggagaaaggcccacatggatgggttggccaggaggaccagattctggcaaggtagtacacttgacagagactactaaagaacatgcaacctggggcacagagtggagtggaaccttggcagtagaagtattagggacaactgtgactgtgcatcctctcccagctacagcagtgccttcttatatatga

SEQ ID NO: 19988 - DNA, 2322 bp, Homo sapiens
  SIMILAR (1213)..(2307): 971254mologous to Homo sapiens GCF2 fusion protein,accession number AB026911,Smith-Waterman Score=1820.
atgaagctgcggaccctcgcggtgagcgttacagctcttaaggtggcgcgtctggggtctgccccttctgatgttcagatgtgtttggagtttcttccttctgactcaggagcccaactggcttcacctagtggatcccgcaccggggctgcaggtggagctgcctgccagtccggcgccgtgcgctcgtactcctcagcccttgggtggtcgatgggactgggcgccgtggagcagggggtggtgctcgtcggggatgctcgggcagcacaggagcccatggagtggatgggaggctcaggcatggcgggctgcaggtcccgagccctgcaccgcgggaaggcagctaaggcccggcgagaaatcgagcacagcgccggccgaaaaggacttttcggcagcgcgcggctgattccagcgacagcgatggcgccgaggagtcgcctgctgagcctggggcgccgagggaacttccggtcccgggttctgcggaggaagagccgccctctggaggaggccgcgcgcaggtggcgggactgccccaccgggttcggggccctcgtggccggggccgggtctgggcgagctcccggcgtgccaccaaagcggctccccgcgcggacgaaggctcaggtgtccagggagacgcggggaagcggggaggtgacggcacagggcgggaaggggccgcggggtctctggatccttctctgggggttctataacttgctgccgaccacaagccatgctgagtcttatccagaaagacttatccagaaggtagtgagcgagaaaatagctcgagcacttgcccgctatctgcatctgccttttggactccttgggggaaataaaacaatcgtgtacagttgggaggctcttcgttttcaccatcagttgactccatcagttataactaacacagttatcaaagtttatgaagaacctaaactgtcacaacaaaaatccagaacccttgatgtgtccacagatgaagaggataaaatacatcactcctcagaaagtaaggatgatcagggtttgtcttctgacagttctagctctcttggagaaaaagaactttcatcaacagttaagatcccagatgcagcttttattcaggcagcccgcagaaaacgtgaattggccagggcccaagatgactatatttctttggatgtacaacatacctcctccatctctggtatgaagagagagagcgaagatgaccctgagataagcagaaatgaagaaacaagtgaagaaagtcaggaagatgaaaagcaagatacttgggaacaacagcaaatgaggaaagcagttaaaatcatagaggaaagagacatagatctttcctgtggcaatggatcttcaaaagtgaagaaatttgatacttccatttcatttccgccagtaaatttagaaattataaagaagcaattaaatactagattaacattactacaggaaactcaccgctcacacctgagggagtatgaaaaatacgtacaagatgtcaaaagctcaaagagtaccatccagaacctagagagttcatcaaatcaagctctaaattgtaaattctataaaagcatgaaaatttatgtggaaaatttaattgactgccttaatgaaaagattatcaacatccaagaaatagaatcatccatgcatgcactccttttaaaacaagctatgacctttatgaaacgcaggcaagatgaattaaaacatgaatcaacgtatttacaacagttatcacgcaaagatgagacatccacaagtggaaacttctcagtagatgaaaaaactcagtggattttagaagagattgaatctcgaaggacaaaaagaagacaagcaagggtgctttctgggaattgtaaccatcaggaaggaacatctagtgatgatgaactgccttcagcagagatgattgacttccaaaaaagccaaggtgacattttacagaaacagaagaaagtttttgaagaagtgcaagatgatttttgtaacatccagaatattttgttgaaatttcagcaatggcgagaaaagtttcctgactcctattatgaagctttcattagtttatgcataccaaagcttttaaatcccctaatacgagttcagttgattgattggaatcctcttaagttggaatccacaggtttaaaagagatgccatggttcaaatctgtagaagaatttatggatagcagtgtggaagattcaaagaaggaaagtagttcagataaaaaagtcttgtctgcaatcatcaacaaaacaattattccccgacttacaggtactgcttcgtaa

SEQ ID NO: 19989 - DNA, 1023 bp, Homo sapiens
  SIMILAR (566)..(468): 541254mologous to Nicotiana tabacum Pistil extensin like protein, partial CDS only,accession number Z14014,Smith-Waterman Score=84.
tcagcatactgcctcaagctgtactgtgcttatttctaaagtgtgatgtttcattgatcctctccctggccctccgaggtctgtgttattactccactgtagctgctcacttgctccaggtttaattctgacatcaggggaatagatagctgaagccaaagaaacctctgtttgggtagggtctggtatatcctgttttttctttttgctttcttgcagacactggagttggtgtctcatgagaggaggggaaggacaggaatcacaaatgcctgagtgtccaacagtcccaggagggagctgggttttcatgtcttgtgaaggtagcagttcctcctccttttcttgtttagtcacagactcaggagcccagctggcttcacctagtggatcccgcaccggggctgcaggtggagctgcctgccagtcctgcgccatgcgctcgcattcctcagcccttgggtggtcgatgggactgggcgccgtggagcagggggtggagctcgtcggggaggctcgggccacacaggagcccatggagtgggtgggaggctcaggcatggcagactgcaggtcccgagccctctcagagcccgttctccttttcttcttagctgcacactcagctgccaactcgacagcccctgccttacttgcagccaagggcatcagtacaaatatcaacacagtgacaaaggcaaacgtcttactattgttacgaagagttttgacttcataccttcctaaattggattcagggaccctcaaaaatctgcagatggcccttcgcgaatcgctgcctgaggtactgtcaggcctacgggagctagattcctgcctcatctgagctcccactggctgcttcttactgcaagggggctgagaagcactggctggctggatcgtcagacttccagctgaaaaacccattacgtgtgtggtcaaaatgtcgatgaaggcttgacttgcaccagcgcttctggctcctatccttccaaaggccttatcttcaaatacagtcat

SEQ ID NO: 19990 - DNA, 531 bp, Homo sapiens
  SIMILAR (36)..(194): 441254mologous to Helicoverpa armigera nuclear polyhedrosis virus basic DNA-binding protein BDBP,accession number AF197913,Smith-Waterman Score=88.
atgcgcccgcactcctcagcccttgggtggtcgatgggactgggcgccgtggagcagggggcggcgctcatcggggaggctcgggacgcccaggagcccatggagggggtgggaggctcaggcatggcgggctgcaggtcccgagccctgccccgcgggaaggcagctaaggcccggccagacacagttcaagaattatctggcaacacaaacacctttaagcacaaaggtagggatgaagctgctgtgaggcacattccactccctgatgatgagagagagagggaaaatgaaaagcaagatggaggcaaaatagaaagtcagggagaaaaagaaataaagagagcttccacaaacaaatggcccactctcagccaaacagaccacataccttcagaagagagtgaccctaagaggcagcaagagctggagatgatgtctgagagccatgcacttgaaagccggcagtgtcctggccgtggctggctgagctggtgtcctcaccacagtctccctgcaacatggtcttga

SEQ ID NO: 19991 - DNA, 491 bp, Homo sapiens
  SIMILAR (180)..(28): 471254mologous to Homo sapiens Human secreted protein encoded by gene 20,accession number Y36243,Smith-Waterman Score=106.
tattttttttttttttttttttaatttatataggaaaggtttaattgactcacagttccaatgtgtcacctggggagggctggggaggcctcacaatcatgacaaaggcaaggaggagcaaagccacatcttacatggtggcaggcaaaacaagaatgagagccaagcaagaggagaaaccccttataaaaccctcagatctcgtgagacatattcactaccacgagaacaatatgggggaaaccgcccccatgattcaattctctcccaccaggtccctcccacaacacatgggaattatgggagctaacaattcaagatgagatttgggtggggacacagccaaaccatatcagggccacttggccaaattaagtgaccaagccagggatttgaaccagggtggtttgttttccagttgcccttcataccattgggattgagataggttttttaagggacaaaaaccaagatgagttccttggctctgt

SEQ ID NO: 19992 - DNA, 1203 bp, Homo sapiens
  SIMILAR (574)..(858): 601254mologous to Homo sapiens CGI-26 protein,accession number AF132960,Smith-Waterman Score=269.
atgaagccgtgggccctcaaggtgagtgtcacagctcttaaggtggcgcgtctggagtttgttcctcctgatgttcggatgtgttcagagtttcttccttgtggagtgaagctgcagaccttcgcggtgagtgttacagctcttaaggcggcgcgtctggagtctgttccttctgatattcggatgtgttcggagtttcttccttctggagagaagctgcagaccttcgcggtgagtgttacagctcataaaagcagcgtggacccaaagagtgagcagcagcaagatttattgcaaagaatgaaagaacaaagcttccacactgtggaaggggaccggagcgggtccccgccagactcaggagcccagctggcttcacccagtggatcccgcaccagggctgcaggtggagctgcctgccagtcccgcgccctgcgcccgcactcttcagcccttgggtggtctatgggactgggcgccgtggagcagggggcggtgctcatcagggaggctcgggccgcacatgagcccatggagcgggtgggaggctcaggcatggcgggctgcaggtcccgagccctgccccgcgagaaggcagctaaggcccggcgagaaaccgagggcagcgccgctgtatcaggctggctttctggaatagctcagtggccaaagattgatcacgaagggtttagagctgtgaaaatgccccaggctgcttggctcctgaaagctgttacctttatagatcttactacactttcaggtgatgatacatcttccaacattcaaaggctctgttataaagccaaatacccaatccgggaagatctcttaaaagctttaaatatgcatgataaagtggccgctggatttccagctggacagactcatttgaagacacgattagaagagatcagattggctgtggaagatggagctacagaaatcgacgtggtaattaacagaagcttggtgctgacaggccagtgggaagggcatactccccagttgtttattcagcattaccatgcaacatatgacacagcagactgttccttccttctggtaatgctttgttgttgtggctttggtgcctacattcctgaggtcttcctttctgtttctgattacccctgcgtctcatttgcaagctccttcacctcctctgtcatccctgaagtgtccatgtttctcagaatctga

SEQ ID NO: 19993 - DNA, 1243 bp, Homo sapiens
  SIMILAR (86)..(418): 311254mologous to Caenorhabditis elegans RRM-type RNA binding protein,accession number U24189,Smith-Waterman Score=94.
atgtctactagggtagtgcaaagggaaaatgtaggattggagccccagattccccactggggcattcctagtggagccatgagaagagggccaccatcctccaggccccagagtggtagttccaccaacagcttgcactgtgcatttggaaaagccacagactcaggagcccagctggcttcacccagtggatcctgcacctgggctgcaggtggagctgcctgcaagtccggcgccctgcgcccgaactcctcagcccttgggtggtcgatgggattcggcgccgtggagcagggggtggcgctcctcggggaggctcgggcgcacaggagcccatggagagggtgggaggctcaggcatggcgggctgcaggtcccgagccctgccccgcgggaaggcagctaaggcccggggatacgtgtcttctggccagctctcttcctgcttctgctatcttgctgacgcacgctgctggcacaattggccttgtcccttggactgggcctgagaaaggaggagttattcatcccccaccagcttccaggcccccggaaagactttcagtccccccaacaacacatgggaattatgggaatacaattcaagatgagatttgggtggggacacagaaccaaaccatatcaggtacccagaatgccttcactgaaaatcagtacactccagctcgtcttcagacaatgattaaaaccaccgtgcaggaacaatggcaagcctttagcccgattgggagtggcaatgtgcgcctcactggatcaggagtgcagcagacaccctgctggatccggaggggtagaagtcagctgcgggtctgcgacggcagcaaacagcagtggtggacagcaagcgaaagctcagctcgagccctaacaaacacggaccagaaaagtgtgcagttccaagatttaatagagtgaaaacagagctcccatacaaagggaggtgacccagagagggtagccgttgccagctcgaatgcctgggtttaaatcccggtcattgtccctcccgctgtgctctcagacaatagatgattggctatttctttacctcctgtttttgcctaatgagcgttttagtgagctctctttactacctgattggtcgggtgtgagctaagttgcaagccctgtgtttaaaggtggatgcagtcaccttcccagctaggcttagggattcttagtcagcctaggacatccagctggtcctgtctttcaatatgtt

SEQ ID NO: 19994 - DNA, 1171 bp, Homo sapiens
  SIMILAR (1068)..(634): 681254mologous to Homo sapiens Deleted in Colorectal Carcinomas,accession number R13144,Smith-Waterman Score=455.
tcagagccctcgcttgctctcggcacctcccctgcctgggatcccactttggcggcatttgaggagcccctcagcccccactgcactgtgggagcccctttctgggctggccaaggccggagcccactccctcagcttgaagagagttgtggagggagaggcgcgagcgggaaccgcggctgcgggctgcgcttgcgggccagctggagatacgggtgggcgtgggcttggccggccctgcactcggagcagccggccagccctgccggcgccgggcaatgaggggcttagcacccgggccagcggctgcagagggtgtactgggtcccccagcagtgccagcccacgtgcgctgcgctcgatttctcgctgggcattagctgccttcccgcggggcagggctcgggacctgcagcccgccatgcctgagcctcccacccactccatgggctcctgtgcggcccgagcctccccaaggagcaccaccccctgctccacggcgcccagtcccatcgaccacccaagggctgaggagtgcgagcgcacggcacgggactggcaggcagctccacctgcagccctggtgcgggatccactgggtgaagctagctgggctcctgagtctggtggggagccaacaccttcggggccaggggtcgcgggcagcggcagcactcacacacatgcactcacacacgcatgcacacatgcacacacacgcgccgagccccttcggcttcctcctcctcctcgtcctcttcctccacctctttctccacctcccctgcgcctctgctgccttcgaagcctttttccttgtccactgacagaatcagcagcaaaagcaggcagcaaaaagttccattcggtccaagagatcccgagccccgcggtgtgcgagctgggagttggaaccgtactacacattgatccggagaagtggagggctggaagggaaaatgtggagaccggagggaaacgaactggatcaggcaaagattccacgggaagggggtgggggcagacagactatggcttagggaaaaaagagcggaccgaggaggcttccaggagctgcatttgcctggtctgcgtatcaatgcgcagggatgccctctgtgggcaaagcgtgggaagtcacttttgtcaatggagcctgcgaacatcctga

SEQ ID NO: 19995 - DNA, 4805 bp, Homo sapiens; identical to SEQ ID NO: 9408
  SIMILAR (3)..(1211): 941254mologous to Homo sapiens PEX1,accession number AB008112,Smith-Waterman Score=1934.

SEQ ID NO: 19996 - DNA, 1846 bp, Homo sapiens; identical to SEQ ID NO: 9409
  SIMILAR (44)..(1180): 651254mologous to multiple sclerosis associated retrovirus polyprotein,accession number AF009668,Smith-Waterman Score=1209.

SEQ ID NO: 19997 - DNA, 1218 bp, Homo sapiens; identical to SEQ ID NO: 7521
  SIMILAR (820)..(1215): 871254mologous to Homo sapiens syncytin precursor,accession number AF208161,Smith-Waterman Score=575.

SEQ ID NO: 19998 - DNA, 1341 bp, Homo sapiens; identical to SEQ ID NO: 7523
  SIMILAR (637)..(1338): 921254mologous to Homo sapiens syncytin precursor,accession number AF208161,Smith-Waterman Score=1128.

SEQ ID NO: 19999 - DNA, 5298 bp, Homo sapiens
  SIMILAR (907)..(3306): 731254mologous to Homo sapiens Human PRO335 protein,accession number Y08095,Smith-Waterman Score=2905.
atgaatctaaaccaagaggaaatccctgatttacctgaaaaagaattcaggaggttagttattaagctaatcagggagggactagagaaaggcaaagcccaatgcaaggaaatccaaaaaatgatacaagaagtgaagagagaaatattccaggaaatagagagcctaaagaaaaaaccaccaaaaattcagaaaactctggacatacttttaaaaatgcaaaatgctctggaaagtctcagtgatagaactgaacaagcagaagaaataaattcagagctcgaagacaaggtcttcaaattaacccagtccaacaaagacaaagaaaaaataacaagaaaatatgagcaaagcctccaagaagtctggagttatgttaaaagaccaaacctaagaataatcggtgttcctgaggaagaagagaacactaaaagcttggaaaacatattggggggaataatcgaggaaaacttccccagctttgctagagacctagacatccaaataccagaagcacaaagaacaactggaaaactcattgcaaaaagatctttgcttagacatattgtcttcaggttatccaaagttaagatgaaggaaagaatcttaagagctgtgagacagaagcaccaggctacagtaagccaaaagaacaaagctggaggcatcacgctacctgacttcaaactatactacaaggctacagtaagccaaaagaacaaagctggaggcatcacgctacctgacttcaaactatactacaaggctacagtaagccaaaagaacaaagctggaggcatcacgctacctgacttcaaactatactacaaggctacagtaaccaaaacagcatgggctggaaacaggattgttgaaatactccctgaacatctgaaagagtttcagtcccttgaaactttggaccttagcagcaacaatatttcagagctccaaactgcatttccagccctacagctcaaatatctcgaattgaaccgaaacaagattaaaaatgtagatggactgacattccaaggccttggtgctctgaagtctctgaaaatgcaaagaaatggagtaacgaaacttatggatggagctttttgggggctgagcaacatggaaattttgcagctggaccataacaacctaacagagattaccaaaggctggctttacggcttgctgatgctgcaggaacttcatctcagccaaaatgccatcaacaggatcagccctgatgcctgggagttctgccagaagctcagtgagctggacctaactttcaatcacttatcaaggttagatgattcaagcttccttggcctaagcttactaaatacactgcacattgggaacaacagagtcagctacattgctgattgtgccttccgggggctttccagtttaaagactttgatactccaaggaaatcggatccgttctattactaaaaaagccttcactggtttggatgcattggagcatctgcatttaaatacatcaagccttttgtgcgattgccagctaaaatggctcccacagtgggtggcggaaaacaactttcagagctttgtaaatgccagttgtgcccatcctcagctgctaaaaggaagaagcatttttgctgttagcccagatggctttgtgtgtgatgattttcccaaaccccagatcacggttcagccagaaacacagtcggcaataaaaggttccaatttgagtttcatctgctcagctgccagcagcagtgattccccaatgacttttgcttggaaaaaagacaatgaactactgcatgatgctgaaatggaaaattatgcacacctccgggcccaaggtggcgaggtgatggagtataccaccatccttcggctgcgcgaggtggaatttgccagtgaggggaaatatcagtgtgtcatctccaatcactttggttcatcctactctgtcaaagccaagcttacagtaaatatgcttccctcattcaccaagacccccatggatctcaccatccgagctggggccatggcacgcttggagtgtgctgctgtggggcacccagccccccagatagcctggcagaaggatgggggcacagacttcccagctgcacgggagagacgcatgcatgtgatgcccgaggatgacgtgttctttatcgtggatgtgaagatagaggacattggggtatacagctgcacagctcagaacagtgcaggaagtatttcagcaaatgcaactctgactgtcctagaaacaccatcatttttgcggccactgttggaccgaactgtaaccaagggagaaacagccgtcctacagtgcattgctggaggaagccctccccctaaactgaactggaccaaagatgatagcccattggtggtaaccgagaggcacttttttgcagcaggcaatcagcttctgattattgtggactcagatgtcagtgatgctgggaaatacacatgtgagatgtctaacacccttggcactgagagaggaaacgtgcgcctcagtgtgatccccactccaacctgcgactcccctcagatgacagccccatcgttagacgatgacggatgggccactgtgggtgtcgtgatcatagccgtggtttgctgtgtggtgggcacgtcactcgtgtgggtggtcatcatataccacacaaggcggaggaatgaagattgcagcattaccaacacagatgagaccaacttgccagcagatattcctagttatttgtcatctcagggaacgttagctgacaggcaggatgggtacgtgtcttcagaaagtggaagccaccaccagtttgtcacatcttcaggtgctggatttttcttaccacaacatgacagtagtgggacctgccatattgacaatagcagtgaagctgatgtggaagctgccacagatctgttcctttgtccgtttttgggatccacaggccctatgtatttgaagggaaatgtgtatggctcagatccttttgaaacatatcatacaggtacctttggaaaagctctcaggagacctcacctagatgcctattcaagctttggacagccatcagattgtcagccaagagccttttatttgaaagctcattcttccccagacttggactctggtggttttatgattgccttgtggtaccacgggactcttagtccagaaccagcttttgtattaaaagctagggatgatgtaggtacctgtcatagtcatagagctggccagcattggctcaagtactacctccttcaagcacttgcagaaggaaatgtggtgccggagcccccacacagagttccccctggggcaccacctactggagctgcgagaagagagctactgtcctccaatcctcagaatggtagatccactgacagcttgcgctctgtgcctgcaaaagccgcagacactcaatgccaatctgtgaaagcagccaggagggaggctgtaccctgcaaagtcacagggccggagctgcccaaggccacaggagcctatctcttgcatcagtgtgacctggatatgagacatggagtcaaaacagatcattctggagctttaagaattggaggaaaataccgagcacctgtcggccagttaaaaacgattagtgtggccaccggacttaagactcagctttcctatcaaaaacccttcattaaccctgtaacccgccgatgcattcaatctgtagcggcaactgctttgctaacagaagaaagtagaaaagaaacttttagaggaaacctcattgtgaggaaacctcattgcaagcggactttggagcctctggaaaagggaaaagctgggaaaattgaatgcctaatagggcttgcttccagtgtggtctacaaggacactttaaaaaagattgtccaagtagaaataagccaccccctcgtccatgccccttatgccaagggaatcactggaaggcccactgacccaggggatgaagctgtacctaacccttacactctgctttcccaaataccagagaaagcagagtggtttatactcctggaccttaaggatgcccttttcttcatccctgtacatcctgactctcaattcttgtttgcctttgaagatccttcaaactcaacatctcaactcacctggactgttttacccctagcgttcaggaatggcccccatctatttggccaggcatcaacccaagacttgagccagctctcatacctggacactcttgtcctttggcatgtggatgatttacttttagctgcctgttcagaaaccttgtgccatcaagccacccaagcactcttaaatttcctcactacctgtggttacaaggtttccaaaccaaaggctcaactctgctcacagcaggttaaatacttagggctaaaattacccaaaggcaccagggcccccagtgaggaatgtatccagcctatactggcttatcctcatcccaaaaccctaaagcaactaagagcgttccttggcataacaggtttctgccgaatatggattcccagcatactcactgctaaaggagacttgtggctgtcagataaccatttacttaaatatcaggttctattacttgaagggccagtgctgcaactgcgcacttgtgcaactcttaacccagccacatttcttccagacaatgaagaaaagatagaacataactgtcaacaagtaattgctcaaacctacgccactcgaggggaccttttagaggttcccttgactgatcccgacctcaacttgtatactgatggaagttcctttgtacaaaaaggacttcaaaaagcgggatatgcagtggtcagtgataatggaatacttgaaagtaatcccttcactccaggaactagcactcagctggcagaactggtagccctcacttgggcactagaattcggagaaggaaaaagggtaaatataaatacaggctctaagtatgcttacctagtcctccatgcccatgcatcaatatggagagaaagggaattcctaacttccgagggaacacctatcaaacatcaggaagccattaggagattattattggttgtacagaaacctgaagaggtggcagtcttacactgctggggtcatccgaaaggaaaggaaagggaaatagaagggaactgccaagcggatattgaagccaaaagagcctcaaggcaggaccctccattagaaatgcttatagaaagacacctagtatggggtaatcccctctgggaaaccaacccccagtactcagcagaagaaatagaatggggaacctcatga

SEQ ID NO: 20000 - DNA, 421 bp, Homo sapiens; identical to SEQ ID NO: 8520
  SIMILAR (279)..(419): 851254mologous to multiple sclerosis associated retrovirus polyprotein,accession number AF009668,Smith-Waterman Score=217.

SEQ ID NO: 20001 - DNA, 571 bp, Homo sapiens
  SIMILAR (3)..(407): 841254mologous to multiple sclerosis associated retrovirus polyprotein,accession number AF009668,Smith-Waterman Score=609.
aggaagcagagtggtttacagtcctggaccttatggatgcctttttctgcatccctgtacatcctgactctcaattcttgtttgcctttgaagatccttcgaacccagcatctcaacttacctggactgttttaccccagaggttcaagaatagtccccatctatttggccaggcattagcccaagacttgagccagttctcatacctggacactcttgtccttcggtacatggatgatttacttttagctgcctattcagaaaccttgtgccatcaagccaccgaagctctcttaaatttcctcgccacctgtggctacaaggtttccaaaccaaaggctcagctctgctcacagcaggttaaatacttagggctaaagttatccaaaggcaccagggacctcaccacatttcttccagtcaatgaagaaaagatagaacataactgtcaacaagtaattgctcaaagctacgctgctcgaggggaacttctagaggttcccttggctgatcctgacctcaacttgtatactaatggaagttcctttgtagaaaaagcacttgaaaagtg

SEQ ID NO: 20002 - DNA, 323 bp, Homo sapiens
  SIMILAR (3)..(308): 721254mologous to multiple sclerosis associated retrovirus polyprotein,accession number AF009668,Smith-Waterman Score=373.
gaactagtgctcagctggcagaactaatagccctcactcgggcaccagaattaggagaaggaaaaagggtaaatatatatgcaaactcaatagggagagaaagggaattcctaacttccaagggaacacttgtcaaacatcaggaagccattaagagattattattggctgtacagaaacctaaagaggtggcagtcttacactgctggggtcatcagaaaggaaaagaaagggaaatagaagagaaccgccaagcggatattgaagccagaagagccgcaaggcaggaccctccattagaaatgcttacagaaggaccccta

SEQ ID NO: 20003 - DNA, 809 bp, Homo sapiens
  SIMILAR (186)..(809): 801254mologous to multiple sclerosis associated retrovirus polyprotein,accession number AF009668,Smith-Waterman Score=860.
acttgaagcatattaaaatagacctagataaattctcagataaccctgatggctatattgatgttttacaagggttaggacaatcctttgatctgacatggagagatataatgttactgctagatcagacactaaccccaagtgagagaagtgccgccataactgcagctcgagagtttggcaatctctggtatctcagtcagtctgggcaacagaaggacaatatggacggacaaagaatgcccgtcctgttcaagttaaaggattctgcttcctttccctaccaaaggcggtacccccttagactggaggcccaacaaggactccaaaagattgttaaagacctaaaagcccaaggcttagtaaaaccattcaatagcccctgcaatactccaattttaggagtacagaaacccaacggacagtggaagttagtacaagatctcaggattatcaatgaggccattgtccctctatacccagctgtacctaacccttatactctgctttcccaaataccagaggaagcagagtggtttacagtcctggaccttaaggatgcctttttctgtatccctgtacatcgtgagtctcaattcttgtttgcctttgaagatccttcaaacccaacatctcaactcacctggactgttttaccccaagggttcaggaatagccctcatctatttggccaggcattagcccaagacttgagccagttctcatacctgaatactcttgtccttcggtacctggatgatttacttttagctgcccatttagaaaccttgtgccatcaagccacccaa

SEQ ID NO: 20004 - DNA, 1148 bp, Homo sapiens
  SIMILAR (3)..(689): 361254mologous to Mus dunni endogenous virus pol polyprotein,accession number AF053745,Smith-Waterman Score=311.
caatatggagagaaggggaattcctaatttctgagggaacacctatcaaacatcaggaagccattaggagattattattcgctgtacagcaacctaaagaagtgacagtcttacactgccggggtcatcagaaaggaaaggaaagggaaatagaagggaaccgccaagaggatattgaagccaaaagagccgcaaggcaggaccctccattagaaatgcttataaaaggacccgtagtatggggtaatcccctccgggaaaccaagccccagtactcagaagaagaaatagaatggggaacctcacgaggacatagtttcctcccctcaggatggctagccactgaagaaggaaaaatacttttgctggcagctaaccaatggaaattacttaaaacccttcagcaaacctttcacttaggcattgatagcacccatcagatagccaaatcattatttactggaccaggccttttcaaaactatcaagcagatagtcagggcctgtgaagtgtgccaaagaaataatcccctgccttatcgccaagctccttcaggagaacaaagaacaggcaattacccaagagaagactggcaactagattttatccacatgccaaaatcacagggatttcagtgtctactagtctgggtagatactttcactggttgggcagaggccttcccctccttactaagaatccaaaactctccccaaaaagcaggacttagcccatacagaatgctgtatggacggtccttcctaaccaatgaccttctgcttgaccaagagatggccaacttagttgcagacatcacctccttagccaaatatcaacaagttcttaaaacattacaaggagcctgtccccgagaggagggaaaagaaatattccaccctggtgtcatggtattagtcaagtcccttccctctaattccccatccctagacacatcctggggaggaccctacccagtcattttatctatcccaactgcggttaaagtggctggagtggagtcttggatacatcacactcgaatcaaaccctggatactgccgaaggaacccgaaaatccaggagacaacgctagctatttctttgaacctctagaggatctgtgcctgctcttcaagcaacaaccgtga

SEQ ID NO: 20005 - DNA, 1660 bp, Homo sapiens; identical to SEQ ID NO: 9412
  SIMILAR (2)..(994): 721254mologous to multiple sclerosis associated retrovirus polyprotein,accession number AF009668,Smith-Waterman Score=1188.

SEQ ID NO: 20006 - DNA, 387 bp, Homo sapiens
  SIMILAR (222)..(34): 461254mologous to Fowlpox virus polymerase,accession number AF246698,Smith-Waterman Score=130.
catggggatttatgattttagttactttcctcctggttgttgtttgaagagcaggcgcaaatcctctagaggttcacaggaatagctagcgttgtctcctggattttcaggttcctttggcagtatccaggatttgactcaagtgtgatgtatccaagactccactccagccactttaaccgcagttggggtagataaaatgactgggtagggtccttcccaggatgtatcactttggatgtccgttcgtggttgccaaaatgttaccggggggtccttgctcacagagctcccaagatggtggtgaaccacttccaagatggtagcaggccgcttccaagatggtggcaagcctcgtattctctgacctggagttcttggcctcac

SEQ ID NO: 20007 - DNA, 586 bp, Homo sapiens
  SIMILAR (212)..(436): 761254mologous to Human endogenous retrovirus W polyprotein,accession number AB021921,Smith-Waterman Score=275.
gcgcctggtgctgaacctaagaagagatcaggaggagcaggcagaacaggacaaacaggataaaaaaaaggccatcactttagtcatggccctcaggcaagtggactttggaggctctgtaaaagggaaaagctgggcaaatcgaatgcctaatagggcttacttccagtgcggtctacaaggacactttaaaaaagattgtccaagtagaactcttaacctggacacatttcttccacacaatgaagaaaagatagaacataactgtcaacaagtaattgctcaaacctatgccactcgaggggaccatttagaggttcccttgactgatcccaaccctaacttgtatactgatggaagatcctttgtagaaaaaggacttcaaaaagtgggaattaaagctgtaaaactacaaatcattcttcaaatggagccccagatgcagtccatgactaagatctaccgcggacccctggaccaccctgacagcccatgctccaatgttaacgacatcgaaggcacccctcctgaggaaatctcaactgcacaacccctactacaccccaggccagcaggaagcagttag

SEQ ID NO: 20008 - DNA, 1125 bp, Homo sapiens
  SIMILAR (122)..(403): 911254mologous to multiple sclerosis associated retrovirus protease,accession number AF009666,Smith-Waterman Score=437.
tcactggaaggcccactgccccaggggacaaaagtcctctgagtcagaagccactaaccagatgatccagcagcaggactgagggtgcccggggcaagcgccagccgatgccgtcaccctcacagagccccgggtatgcttgaccattgagggccaggaggttaactgtctcctggacacaggtgcggccttctcagtcttactctcctgtcccggacaactgtcctccagatctgtcactatctgaggggtcctaggacagccagtcactagatacttcccccagccactaagttgtgactggggaactttactcttttcaaatgcttttctaattatgcctgaaagccccactcccttgttagggagaggcattctagcaaaagcaggggccataatacaccatgctgttttggttactgcagccttgtagtacagtttgaaggtagcatgatgcctccagctttgttgtttttgcttacgagtgtcttggctatatgggctcttttttggttccataagaaatttaaagtagtttttcctaattctgcctgtatcactgccaccatggccgcttttttcatgagcccactgaatcttatcttcctccaccaagtgaatgtagagaacttccagtgaggccataggtgcaggctctaggggcctgccaagggctccaaatggcttccctatctgctgcagacacttccaacaccactggattgcaggatcatatggccctggcaaagaagttgcaaggcagcctggatctgtggcagaacctccttttgttctgagtctcagacaaaactggctgtttttccgatcattcactagatgggctctacgtctttcaagtccttgaatgggggcactgatctctgcaatccctttaggaatgtgctctggcttttgttttattgtatccctaggtagacgtaattctacttggcctttgccaccggaatagcccacactccacaggtcagggcaccaatgtggggattctgtcagctgttgagtatatttatgccaatgatgcttttggggttcacgagggaccccattgacatttaggggttcaatggcactgaggttcatcagggccttcccacacgggcccat

SEQ ID NO: 20009 - DNA, 459 bp, Homo sapiens; identical to SEQ ID NO: 7528
  SIMILAR (292)..(384): 801254mologous to multiple sclerosis associated retrovirus polyprotein,accession number AF009668,Smith-Waterman Score=132.

SEQ ID NO: 20010 - DNA, 1039 bp, Homo sapiens
  SIMILAR (705)..(4): 921254mologous to Homo sapiens syncytin precursor,accession number AF208161,Smith-Waterman Score=1128.
ctatgctctgcgttgtattccatctcgaatttctttaactttctcagtgatgattccagattgattaacataataacagcattcttcccctaaaaataaacaggttccccctctttctgcagttagcaagtctaaagctcttcgattttgaagtactactgctgctagggagttaagttgatcttgcaaggtgaccagggagtcggcaacccgttccatgtcaccatttagttcttgagatagtttgtagtagaactgagtagaggttgtgatactgcccatgccagtacctaatctgcctagcattcctgctcggataacaaaaggaagaatgggtactcttttgttgcggggcttaggtacgacataattgtataaatcttgttcagtgtagatggtcatagggtgcactaagaatgagaggaagcacatagattccgaaaagccattcaaacagtgataggctgaggtaccacagacaaaaaatattcctgagggtaggcagactatttgtgtgggaggagttacccatctgatgcactgggagttggttgtgtctatagtattgctaaattttacacgggtgaggtttgaggtatgggttatttccagattggaaacaagaggtcctactaaaatggaagtggtgtttatttctgtgctgaagttgttccattgttcaggtacagggattgaaatatgtggcggttgttgcttgaagagcaggcccagatcctctagaggttcacaggaatagctagcgttgtctcctggatttccgggttcttttggcagtagccagggtttgactcgagtgtgatgtatcctagactccactccagccactttaaccgcggttggggtagataaaatgaccgggtagcgtccttcccaggatgtatctgacatctgcgatagtccctgggttactgttgccttgaaagcagggccattgtcactctgtaagcctcggggaagtccgcatctgggaattatttcatgaactagtgcctttattacctcttgggccttttctgtc

SEQ ID NO: 20011 - DNA, 1743 bp, Homo sapiens
  SIMILAR (238)..(972): 881254mologous to multiple sclerosis associated retrovirus polyprotein,accession number AF009668,Smith-Waterman Score=1138.
atgacatatggtgtgggcaaaggagatatggtagatggaacgaaggaaagaggtgagagaattgagtctgcattgggcacctcacacatcatgagagtggcagagccacagggaagtcaaagctggtgccccgatgaagaactgaggccagtgggctccccagccaccgccgctcagaagctgccaagcacccccggtgctttgggccccacgcacagcactgagtgctgcagtatccccttagaccccaaggcccaacaaggactccaaaagattgttaaggacctaaaagcccaaggcctagtaaaaccgtgcaatagcccctgcaatactccaattttaggagtacagaaacccaacggacagtggaggttagtgcaagatctcaggattatcaatgaggcccttgtccctctatacccagctgtacctaacccttacactctgctttctcaaataccagaggaagcagagtggtttacagtcctgggccttaaggatgactttttctgcatccctgtacatcctgactctcaattcttgtttgcctttgaagaaccttcaaaccccacatctcaactcacctggactgttttaccgaaagggttcagggatagcccccatctatttggccaggtattagcccaaaacttgagccaattctcatacctggacactcttgtccttcggtacgtggatgatttacttttagctgcccgttcagaaaccttgtgccatcaagccacccaagcactcttaaatttcctcactacctgtggctacaaggtttccaaaccaaaggctcagctctgctcacaggaggttacgtacttagggctaaaattatccaaaggcaccagggccctcagtgaggaacgtatccagcctatactggcttatcctcatcccaaaaccctaaagcaactaagagcgttccttggcataacaggtttctgccgaatatggattcccagcatactcactgctaaaggagacttgtggctgtcagataaccatttacttaaatatcaggttctattacttgaagggccagtgctgcaactgcgcacttgtgcaactcttaacccagccacatttcttccagacaatgaagaaaagatagaacataactgtcaacaagtaattgctcaaacctacgccactcgaggggaccttttagaggttcccttgactgatcccgacctcaacttgtatactgatggaagttcctttgtacaaaaaggacttcaaaaagcgggatatgcagtggtcagtgataatggaatacttgaaagtaatcccttcactccaggaactagcactcagctggcagaactggtagccctcacttgggcactagaattcggagaaggaaaaagggtaaatataaatacaggctctaagtatgcttacctagtcctccatgcccatgcatcaatatggagagaaagggaattcctaacttccgagggaacacctatcaaacatcaggaagccattaggagattattattggttgtacagaaacctgaagaggtggcagtcttacactgctggggtcatccgaaaggaaaggaaagggaaatagaagggaactgccaagcggatattgaagccaaaagagcctcaaggcaggaccctccattagaaatgcttatagaaagacacctagtatggggtaatcccctctgggaaaccaacccccagtactcagcagaagaaatagaatggggaacctcatga

SEQ ID NO: 20012 - DNA, 861 bp, Homo sapiens; identical to SEQ ID NO: 4428
  SIMILAR (583)..(855): 861254mologous to multiple sclerosis associated retrovirus polyprotein,accession number AF009668,Smith-Waterman Score=385.

SEQ ID NO: 20013 - DNA, 8294 bp, Homo sapiens
  SIMILAR (1153)..(2754): 891254mologous to Homo sapiens PEX1,accession number AB008112,Smith-Waterman Score=2320.
atgtggggcagcgatcgcctggcgggtgctgggggaggcggggcggcagtgactgtggccttcaccaacgctcgcgactgcttcctccacctgccgcggcgtctcgtggcccagctgcatctgctgcagaatcaagctatagaagtggtctggagtcaccagcctgcattcttgagctgggtggaaggcaggcattttagtgatcaaggtgaaaatgtggctgaaattaacagacaagttggtcaaaaacttggactctcaaatgggggacaggagctgcatgctgtttcccttgaacaacatcttctagatcaaattcgaatagtttttccaaaagccatttttcctgtttgggttgatcaacaaacgtacatatttatccaaattgttgcactaataccagctgcctcttatggaaggctggaaactgacaccaaactccttattcagccaaagacacgccgagccaaagagaatacattttcaaaagctgatgctgaatataaaaaacttcatagttatggaagagaccagaaaggaatgatgaaagaacttcaaaccaagcaacttcagtcaaatactgtgggaatcactgaatctaatgaaaacgagtcagagattccagttgactcatcatcagtagcaagtttatggactatgataggaagcattttttcctttcaatctgagaagaaacaagagacatcttggggtttaactgaaatcaatgcattcaaaaatatgcagtcaaaggttgttcctctagacaatattttcagagtatgcaaatctcaacctcctagtatatataacgcgtcagcaacctctgtttttcataaacactgtgccattcatgtatttccatgggaccaggaatattttgatgtagagcccagctttactgtgacatatggaaagctagttaagctactttctccaaagcaacagcaaagtaaaacaaaacaaaatgtgttatcacctgaaaaagagaagcagatgtcagagccactagatcaaaaaaaaattaggtcagatcataatgaagaagatgagaaggcctgtgtgctacaagtagtctggaatggacttgaagaattgaacaatgccatcaaatataccaaaaatgtagaagttctccatcttgggaaagtctggcctaaagacataagtgaagaagacataaaaactgtattttattcatggctacagcagtctactaccaccatgcttcctttggtaatatcagaggaagaatttattaagctggaaactaaagatggtccttctagatcctatggtaaaagaagaaaacaaggagtgaattccttaggcgtatcctccttggagcacatcactcacagcctcctgggacgccctttgtctcggcagctgatgtctcttgttgcaggacttaggaatggagctcttttactcacaggaggaaagggaagtggaaaatcaactttagccaaagcaatctgtaaagaagcatttgacaaactggatgcccatgtggagagagttgactgtaaagctttacgaggaaaaaggcttgaaaacatacaaaaaaccctagaggtggctttctcagaggcagtgtggatgcagccatctgttgtcctgctggatgaccttgacctcattgctggactgcctgctgtcccggaacatgagcacagtcctgatgcggtgcagagccagcggcttgctcatgctttgaatgatatgataaaagagtttatctccatgggaagtttggttgcactgattgccacaagtcagtctcagcaatctctacatcctttacttgtttctgctcaaggagttcacatatttcagtgcgtccaacacattcagcctcctaatcaggaacaaagatgtgaaattctgtgtaatgtaataaaaaataaattggactgtgatataaacaagttcaccgatcttgacctgcagcatgtagctaaagaaactggcgggtttgtggctagagattttacagtacttgtggatcgagccatacattctcgactctctcgtcagagtatatccaccagagaaaaattagttttaacaacattggacttccaaaaggctctccgcggatttcttcctgcgtctttgcgaagtgtcaacctgcataaacctagagacctgggttgggacaagattggtgggttacatgaagttaggcagatactcatggatactatccagttacctgccaagtatccagaattatttgcaaacttgcccatacgacaaagaacaggaatactgttgtatggtccgcctggaacaggaaaaaccttactagctggggtaattgcacgagagagtagaatgaattttataagtgtcaaggggccagagttactcagcaaatacattggagcaagtgaacaagctgttcgggatatttttattagagcacaggctgcaaagccctgcattcttttctttgatgaatttgaatccattgctcctcggcggggtcatgataatacaggagttacagaccgagtagttaaccagttgctgactcagttggatggagtagaaggcttacagggtgtttatgtattggctgctactagtcgccctgacttgattgaccctgccctgcttaggcctggtcgactagataaatgtgtatactgtcctcctcctgatcaggatggaagttccagctctgatagtgacctaagtctgtcttcaatggtctttcttaaccatagcagtggctctgacgattcagctggagatggagaatgtggcttagatcagtcccttgtttctttagagatgtccgagatccttccagatgaatcaaaattcaatatgtaccggctctactttggaagctcttatgaatcagaacttggaaatggaacctcttctgatttggaggacgaatccatgaaccaaccaggaccaatcaaaaccagactggctattagtcagtcacatttaatgactgcacttggtcacacaagaccatccattagtgaagatgactggaagaattttgctgagctatatgaaagctttcaaaatccaaagaggagaaaaaatcaaagtggaacaatgtttcgacctggacagaaattctttgatgaaatcactgagctgacatacctgccctcttttcaccataaagctgctcctcaccaggccgagccaggtcccaattcttcctcagcctctgctcccccaccctataatccttttatcacctcctctcctcacactcagtccggcttacagtttcgttctgtgactagccctcccccatctgcccaacaatttcctcttaaagaggtggctggagctaaaggcatagtcaagacagctttagagactgctcccacactagctctccctgtctcatcccaacccttttcattacacacagccgaagtgcagggctgtgcagtcggaattcttacacaaggaccgggaccatgccctgtagcctttttgtccaaacaacttgaccttactgttttaggctcgccatcatgtctccatgcggtagcttccgctgccctaatacttttagaggccctcaaaatcacaaactatgctcaactcactctctacagctctcacaacttccaaaatctattttctttctcacacctgacgcatatactttctgctccccggctccttcagctgtattcactctttgttgagtctcccacaattaccattcttcctggcccagacttcaatctggcctcccacattattctggataccacacctgaccctgatgattgtatgtctctgatctacctgacattcaccccatttccccatatttccttcttttctgttcctcatgttgatcacatttggtttactgacggcagttccaccaggcctgatcgccactcaccagcaaaggcaggctatgctatagaatcttccacatccatcattgaggctactgctctgcccccctccactacctctcagcaagccgaactgattgccttaactcgggccttcactcttgcaaagggactacacgtcaatatttatactgactctaaatatgccttccatatcttgcaccaccatgctgttatatgggctgaaagaggtttcctcactacgcaagggtcctccatcattaatgcctctttaataaaaactcttctcaaggctgctttacttccaaaggaagctggagtcacacactgcaagggccaccaaaaggcgtcagatcccattactctaggaaatgcttatgctgataagggtgtccgctgtgctcctgatccagcgaggcgcccattgccgctcccaattgggctaaaggcttgccattgttcctgcacggctaaaattggaggaaaataccgggcacttgtcggccagttaaaaacgattagtgtggccaccggacttaagactcaggacaggacgatagatggttcctcccaggtgattgaggaaaaaaaccacaatgggtattcagtaattgatacggggactcttgtggaagcagagttagaaaaattgcctaataactggtctcctcaaacgtgtgagctgtttgcactcagccaagccttaaagtacttacagaatcaaaagactatctcaatcctgattcaaaaggaacccagcccagctctaggactcacccctgagcgcaaaggcaatgttgggcatgctggtaaaggaccactagaatccagcagcccagacccctttctttgtggtcaagaaaggcgggaaaaggggtgcaggactgctacatcggtaagcataactaatccgataaacagaggtccatgggtggttacgcaccctggaaaggaactcacccctgagcacaaaggcaatgttgggcacgctgggagagacattctagcaaaagcaggggccattatacacctgaacataggagaaggaacacccgtttgttgtcccctgcttgaggaaggaattaatcctgaagtctgggcaacagaaggacaatatggacgagcaaagaatgcccgtcctgttcaagttaaactaaaggattccacctcctttccctaccaaaggcagtaccccctcagacccaaggcccaacaaggactccaaaagattgttaaggacctaaaagcccaaggcctagtaaaaccatgcagtaacccctgcagtactccaattttaggagtacagaaacccaacagacagtggagaaaccttgtgccatcaagccacccaagcgctcttcaatttcctcgctacctgtggctacatggtttccaaaccaaaggctcaactctgctcacagcaggttacttagggctaaaattatccaaaggcaccagggccctcagtgaggaacacatccagcctatactggcttatcctcatcccaaaaccctaaagcaactaaggggattccttggcgtaataggtttctgccgaaaatggattcccaggtatggcgaaatagccaggtcattaaatacactaattaaggaaactcagaaagccaatacccatttagtaagatggacaactgaagtagaagtggctttccaggccctaacccaagccccagtgttaagtttgccaacagggcaagacttttcttcatatgtcacagaaaaaacaggaatagctctaggagtccttacacagatccgagggatgagcttgcaacctgtggcatacctgactaaggaaattgatgtagtggcaaagggttggcctcattgtttacgggtagtggcagcagtagtagtcttagtatctgaagcagttaaactaatacagggaagagatcttactgtgtggacatctcatgatgtgaatggcatactcactgctaaaggagacttgtggctgtcagacaaccatttacttaaatatcaggctctattacttgaagggccagtgctgcgactgtgcacttgtgcaactcttaacccagccacatttcttccagacaataaagaaaagatagaacataactgtcagcaagtaattgttcaaacctacgctgctcaaggggatcctttagaggttcccttgactgatcctgacctcaccttatgtactgatggaagttcctttgtagaaaaaggacttcgaaaagtggggtatgcagtagtcagtgataatggaatacttgaaagtaatcccctcactccaggaactagtgctcagctagcagaactaatagccctcacttgggcactagaattaggagaagaaaaaagggcaaatatatatacagactctaaatatgcttacctagtcctccatgcccatgcagcaatatggaaagaaagggaattcctaacttctgagagaacacctatcaaacatcaggaagccattaggaaattattattggctgtacagaaacctaaagaggtggcagtcttacactgccggggtcatcagaaaggaaaggaaagggaaatagaagagaactgccaagcagatattgaagccaaaagagctgcaaggcaggaccctccattagaaatgcttataaaacaacccctagtatagggtaatcccttccgggaaaccaagccccagtactcagcaggagaaacagaatggggaacctcacgaggacatagtttcctcccctcaggatggctagccaccgaacaaggaaaaatacctttgcctgcagctaaccaatggaaattacttaaaaccactcaccaaaactttcacttatgcattgatagcacccatcagatggccaaattgttatttactggaccaggacttttcaaaactctcaagcagatagttggggcctgtgaagtgtgccagagaaataatcccctgccttatcgccaagctccttcaggagaacaaagaacaggccattaccctggagaagactggcaactgattttacccacaagcccaaacctcagggatttcagtatctactagtctgggtagatactttcacgggttgggcagaggccttcccctgtaggacagaaaaggcccaagaggtaataaaggcactagttcatgaaataattcccagattcggacttccccgaggcttacagagtgacaatagccctgctttccaggccacagtaacccagggagtatcccaggcgttaggtatacgatatcacttacactgcgcctgaaggccacagtcctcagggaaggtcgagaaaatgaatgaaacactcaaaggacatctaaaaaagcaaacccaggaaacccacctcacatggcctgttctgttgcctatagccttaaaaagaatctgcaactttccccaaaaagcaggacttagcccatacgaaatgctgtatggaaggcccttcataaccaatgaccttgtgcttgacccaagacagccaacttagttgcagacatcacctccttagccaaatatcaacaagttcttaaaacattacaaggaacctatccctgagaagagggaaaagaactattccacccttgtgacatggtattagtcaagtcccttccctctaattccccatccctaggatacatcctgggggaagggacccttacccagttcatttttattttaccccaattgcgggtttaaagtggctggagtggagtcttggatacatcacacttgagtcaaatcctggatactgccaaaggaacctgaaaatccaggagacaacgctagctattcctgtgaacctctagaggatttgcgcctgctcttcaaacaacaaccaggaggaaaaatcgaagctgtaaaactacaaatggagcccaagatgcagtccaagactaagatctaccgcagacccctggaccggcctgttagcccacgatctgatgttaatgacatcaaaggcacccctcctgaggaaatctcagctgcacaacctctactacgccccaattcagcaggaagcagttagagcggtcgtcggccaacctccccaacagcacttaggttttcctgttgagatgggggactgagagacaggactagctggatttcctaggctgattaagaatccctaagcctagctgggaaggtgaccacatccacctttaaacacggggcttgcaacttagctcacacctgaccaatcagagagctcactaaaatgctaattaggcaaagacaggaggtaaagaaatagccaatcatttattgcctgagagcacagcaggagggacaatgatcgggatataaacccaagttttcgagccggcaacggcaaccccctttgggtcccctccctttgtatgggagctctgttttcatgctatttcactctattaaatcttgcaactgc

SEQ ID NO: 20014 - DNA, 6394 bp, Homo sapiens
  SIMILAR (4994)..(6322): 821254mologous to multiple sclerosis associated retrovirus polyprotein,accession number AF009668,Smith-Waterman Score=1859.
  misc_feature (1)...(6394): n = a,t,c or g
atggccctcccttatcatatttttctctttactgttgtttcaccctctttcactctcactgcaccccctccatgccgctgtatgaccagtagctccccttaccaagagtttctatggagaatgcagcgtcccggaaatattgatgccccatcgtataggagtctttgtaagggaacccccaccttcactgcccacacccatatgccccgcaactgctatcactctgccactctttgcatgcatgcaaatactcattattggacaggaaaaatgattaatcctagttgtcctggaggacttggagtcactgtctgttggacttacttcacccaaactggtatgtctgatgggggtggagttcaagatcaggcaagagaaaaacatgtaaaagaagtaatctcccaactcacccggggtacatggcacctctagcccttacaaaggactagatctctcaaaactacatgaaaccctccgtacccatactcgcctggtaagcctatttaataccaccctctctggggttcatgatgtcaacggcttcagaaccctactaactgatgaatatgccttcccctgaacttcaagccatatgtattaatccctgctactgaacaaaggaacaacttacgtacagaaataaacaccacttccgttttaggaggacctcttgcttccaatctgggaaataacccatacctcaaacctcacctgtgtaaaatttaggcaatacttacatacacaaccaactcccaatggcattcaggtgggggtaactccttcccacacaaatagttttgccttaccctcgggattatttttttgtctgtggggtaccttcaggcctattcgttgtttgaatggctcttcagaatctatgtgcttcctctcattcttagtgccccctatgaccatctacactgaacaagatttatacagttatgtcaatatcctaaagcccccgcaaacaaaaagaagtaccccaattcctcccttttgttaataggagcaggaagtgcctaggtgcacctaggtactggcattggcggtatcacaacctctactcagttctactacaaactatctcaagaactaaatggggacatggaacgggtcgcccgactcccctggtcaccttgcaagatcaacttaactccctagcagcagtagtccttcaaaatcgaagagctttagaccttctaaccgctgaaagagggggaacctgtttatttttaggggaagaatgctgttattatgttaatcaatccggaatcgtcactgagaaagttaaagaaattcgagatcgaatacaacgtagagcagaggagcttcgaaacactggaccctggggcctcctcagccaatggatgccctggattctccccttcttaggacctctagcagctataatattgctactcctctttggaccctgtatctttaacctccttgttaactttgtctcttccagaatcgaagctgtaaaactacaaatggagcccaagatgcagtccaagactaagatctaccgcagacccctgggaccggcctgctagcccacgatctgatgttaatgacatcaaaggcacccctcctgaggaaatctcagctgcaaaaacctctacttacgccccaattcaggcagggaaggcagttaggaggcgggtcgttcgggccaaccttccccaacaggcactttagggtttttcctgttggagatggggggactgaggagacagggattagctgggatttccttaggctgacctaagaatcccctaaggncttagcctggggaagggtggaccacatcccacctttttaaaacacggggggctttgcaactttaggttcacaccttgaccaatcagagagctcactaaaatgcctaattaggcaaagacaggaggtaaagaaatagccaatcatctattgcctgaggagcacagtgggagggacaaggattgcaatataaacccaggcattcgagccagcgaacggcaaccgcctttgggtcccttccctttgtatgggagctctgttttcatgctatttcactctatttcactctattaaatcttgcaactgtacactcttctggtcagtgttttttacagctctagctgagcttctgcttgcagtccaccactgctgtttgccgccgccaccgcagacccgctgctggcttccatcccttcggatccggcagggtgtctgctgcattcctgatccagcgaggcgcccattgccacgcccaatcgggctaaaggcttgccattgttcctgcacggttaagtgcccgggttggtcgtaatcgagctgaacacttgtcactgggttccacggttctcttccgtgacccatggcttctaataggaactattaacattaccacatgggcccaagattccattccttgggaattccgtgaggccaagaaccccaggtcagagaatacaaggcttgccaccatcttggaagcggcccgtcgccatcttggaagcggcttgccaccatcttgggagctctgtgcacaaggaccccccggtaacattttggcaaccacgaacggacatccaaagtgatgggaaacgttccccgcaagacaaaaacgcccctaagacgtattctggagaattgggaccaatttgaccctcagacactaaggaaagaaacgacttatattcttctgcagtgccgcctggcactcctgagggaagtataaattataacaccatcttacagctagacttcttttgtagaaaagaaggtaaatggagtgaagtgctatatgtacaaactttcttttcattaagagacaactcacaattattgtaaaaagtgtgatttatgcccctacagggaagccttcagagtctacctcccctatccccagcatccccccaactccttctccaactattaaggaccccccttcaacccaaatggtccaaaaggagatagacaaaagggtaaacagtgaaccaaagagtgccaatattccccaattatgacccctcccaagcagtgggaggaagagaattcggcccagccagagtgcatgtgcctttttctctcccagacttaaagcaaataaaaacagacttaggtaaattctcagataaccctgatggctatattggtgttttacaagggttaggacaattctttgatctgacatggagagatatatatgtcactgctaaatcagacactaaccccaaatgagagaagtgccaccataactgcagcctgagagtttggcgatctctggtatctcagtcaggtcaatggataggatgacaacagagaaaagagaacgattccccacaggccagcaggcagtttccagtgtagaccctcattggggacacagaaatcagtaacatgggagattggtgctgcagacatttgctaacttgtgtgctacaaggactaaggaaaactacgaagaaaatctacgaattactcaatgatgtccaccataacacaggggaagggaagaaaatcctactgcctttctggagagactaagggaggcattgaggaagcgtgcctctctgtcacctgactcttctgaaggccaactaatcttaaagcgtaagtttatcactcagtcagctgcagacattagaaaaaacttcaaaagtctgccgtaggcccggagcaaaacttagaaaccctattgaacttggcaacytcggttttttataatagagatcaggaggagcaggcggaacaggacaaacgggattaaaaaaaaggccaccgctttagtcatgaccctcaggcaagtggactttggaggctctggaaaagggaaaagctgggcaaattgaatgcctaatagggcttgcttccagtgcggtctacaaggacactttaaaaaagattgtccaagtagaagtaagccgccccttcgtccatgccccttatttcaagggaatcactggaaggcccactgccccaggggacaaaggtcttttgagtcagaagccactaaccagatgatccagcagcaggactgagggtgcctggggcaagcgccatcccatgccatcaccctcacagagccctgggtatgcttgaccattgagggccaggaaggttgtctcctggacactggtgcggtcttcttagtcttactcttctgtcccggacaactgtcctccagatctgtcactattctgagggggtcctaagacgggcagtcactagatactttttcccagccactaagttatgaactggggagctttattcttttcacatgcttttctaattatgcttgaaagccccactaccttgttagggagagacattctagcaaaagcaggggccattatacacctgaacataggagaaggaacacccgtttgttgtcccctgcttgaggaaggaattaatcctgaagtctgggcaacagaaggacaatatggacgagccaaagaatgcccgtcctgttcaagttaaactaaaggattctgcctcctttccctaccaaaggcaatacccccttagacctgaggcccaacaaagggcttccaaaagattgttaaggacttaaaagcccaaggcttagtaaaaccatgcataactccctgcagtaattccgtagtggattgaggaggcacagaaacccagtggacagtggagggttagtgcaagatctcaggattatcaatggaggccgttgtccttttatacccagctgtacctagcccttatactgtgctttcccaaataccagaggaagcagagtggtttacactcctggaccttaaggatgccttcttctgcatccctgtacatcctgactctcaattcttgtttgcctttgaagatacttcaaacccaacatctcaactcacctggactgttttaccccaagggttcagggatagcccccatctatttggccaggcattagcccaagacttgagccaatcctcatacctggacactcatgtcctttggtacgtgaatgaaatcacttttagctgtccgttcagaaaccttatgccatcaagccacccaaatgctcttaaatttccttgctacctgtggctacaaggttttcaaaccaaaggctcagctctgctcacagcaggttaaatacttagggctaaaattatccaaaggtaccaaggcccttggtgaggaacgtatccagcctatactggcttaccctcatcccaaaaccctaaagcaactaagagggttccttggcataacaggtttctgccaaatatggattaacaggtatggcaaaatagccaggccattatacacactaattaaggaaactcagaaagccaatacccatttagtaagatggacaactgaagtagaagtggctttccaggccctaacccaagccccagtgttaagtttgccaacagggcaagacttttcttcatatgtcacagaaaaaacaggaatagctctaggagtccttacacagatccgagggatgagcttgcaacctgtggcgtacctgactaaggaaattgatgtagtggcaaagggttggcctcattgtttatgggtaatggtggcagtagcaatcttagtatctgaagcagttaaaataatacaggaaagagatcttactgtgtggacatctcatgatgtgaacagcatactcactgctaaaggagacctgtggctgtcagacagccatttacttaaataccagggtctattacttgaagggccagtgctgcaactgtgcacttgggcaactcttaacccagccacatttcttccagacattgaaaaaaagatagaacgtaactgtcaacaggtgattgctcaaacctatgccgctcgaggaaaccttctagaggttcctttgactgatcctgacctcaacttgtatattgatggaagttcctttgtagaaaaaagacttcgaaaagcagggtatgcagtggtcagtgataatggaatacttgaaaataatcccctcactccaggaactagcgctcagctggcaaaactaatagccattactccggcactaaaattagaaaaagaaaaaagggtaaacatatatacagactctaagtatgcttacctagtcctccatgcccatgcagcaatatggagagaaagggaatacctaacttctgagggaacatctatcaaacatcaggaagccatcaggagattattatcggctgtacagaaacctaaagaggtggcagtcttacactgctggggtcatcagaaaggaaaggaaagggaaatagaagggaaccgccaagcgaatattgaagccaaaagagccacaaggcaggaccctccattaaaaatgcttatagaaggacccctagtatgggcaaggcaatttacctctatagaagggtgtgccctcacagatggagcaatg

SEQ ID NO: 20015 - DNA, 372 bp, Homo sapiens
  SIMILAR (221)..(310): 431254mologous to Escherichia coli O157:H7 unknown protein encoded by cryptic prophage CP-933M,accession number AE005287,Smith -Waterman Score=66.
aacaattaccatttgaagtactttgaggacttcatcccagactcacttgttctgttacagaaactaacctaaaaggctggaaattaaaggatacaacctaagaggttataacagcagactggtaaaacatggcgaaaggagctctctctttccatcactgctggtctcatatcagtccagctcacccccgccttcctccaggaaaggactcctgacctcattaggctcgcgccccctcccgctgacctccgaatgggctgctacaagttcatggttcacctacagggagtggctgcgcacaccagtcactgaggtgagtaagtgcttcatctctctcaatcccggaacagcagacaccaccgtccaaatttt

SEQ ID NO: 20016 - DNA, 1464 bp, Homo sapiens
  SIMILAR (835)..(1032): 891254mologous to Homo sapiens Icln protein,accession number X91788,Smith-Waterman Score=305.
atggcatgctcttggggaatgtggtggctgctgctgttgtttgaggaagccatcagagtcctgcttcctgaaggaggtggtcctggtgctgacaagaccatgggctcccgaggcttctggaagcagagtgttcaagaaggccagtccaaatggaaaggtccagatgccatcctgcttccccctcagtttagcagattcatggacctagctgaagtgatcgtggtcatcggcggttgcgaccgcaaaggtctcctgaagctgcccttcgccgatgcctaccatccagagagccagcggtggaccccactgcccagcctgcccggctacactcgctcagaattcgccgcctgtgctctccgcaatgacgtctacgtctccggaggccacatcaacagtcatgatgtgtggatgtttagctcccatctgcacacctggatcaaggtagcctctctgcacaagggcaggtggaggcacaagatggcagttgtgcaggggcagctgttcgcggtgggtggcttcgacggcctgaggcgcctgcacagcgtggagcgctacgaccccttctccaacacctgggcggccgccgcgcccctcccggaggccgaaccccaggctattataaactatttcagttccctcatgcagcagagggtgcaagagaaaggagagacagcagaagtaaatgaagaaaacagaattcagtcaactgagaagaaaaaccttgctcaaaagaatgacaagcctggaactcctggggtcaagcggtcttcccacctaagcctctccgtgctgggactccggacgcgctccacctcacgcagccgtattcctgctttcaaagcagatggaagagaacaaggacagggggacatccctacattttacacctatgaagaaggattatcccatctaacagcagaaggccaagccacactggagagattagaaggaatgctttctcagtctgtgagcagccagtataatatggctggggtcaggacagaagattcaataagagattatgaagggggctggagccctgggccaagggagacctgtgaccccaggtgccgccgggagaacttcagcccagaggggaaatcagctctccgtgacccagcacccctacccagcagcgcaacagatcctgagaggagctacaggatgattctagaaacagcgcacttcaggaatcatggttggttccgcggaggcacgagcatcctcatctcacacacgggaagcgaggttcggggagaggaacagctggctgggtcacggagctttgaaggggcagaaccagaaacgaacaccttctgcccatctcaggggctcccccttgtggccatcgtgggaggtggccctgcacacagccatcacactctaaatggtcatgcaactggagccttggatgatggccctttttgccagggacctttagataggcctctgagggagatctga

SEQ ID NO: 20017 - DNA, 1407 bp, Homo sapiens
  SIMILAR (67)..(765): 841254mologous to Homo sapiens chloride ion current inducer protein I(Cln),accession number AF232708,Smith-Waterman Score=974.
gcggtgtggtgcacgcattgctgtgctccaactccctcagggcctgtgttgccgcactctgctgctatgagcttcctcaaaagtttcccgccgcctgggccagcggaggggctcctgcggcagcagccagacactgaggctgtgctgaacgggaagggcctcggcactggtaccctttacatcgctgagagccgcctgtcttggttagatggctctggattaggattctcactggaataccccaccattagtttacatgcattatccagggaccgaagtgactgtctaggagagcatttgtatgttatggtgaatgccaaatttgaagaagaatcaaaagaacctgttgctgatgaagaagaggaagacagtgatgatgatgttgaacctattactgaatttagatttgtgcctagtgataaatcagcgttttaatttccttgttcagtggaggcaatgttcactgcaatgtgcgaatgccaggccttgcatccagatcctgaggatgaggattcagatgactacgatggagaagaatatgatgtggaagcacatgaacaaggacagggggacatccctacattttacacctatgaagaaggattatcccatctaacagcagaaggcccaagccacactggagagattagaaggaatgctttctcaggtctgtgagcagcccagtataatatggctgggggtcaggacaagaagattcaataagagattattgaagatggggatgggaggttggataccacacccaacagtttgcttgggacagttttgaggatgcagatgtttgatccacttgaaaatgatttatgcaagtttaagatcctgctccctaagtgtaggagagaacttggtgcctcttccactctggagtgaagttaatgaaagtctttttccttttccaaaacccaacctggaaccagttctttcttgagacagactatactgagacaacaagttgtcaccagcagaagatagataatatgacctttattaacttgatgaattaacttaacccaagagggtatttgtaagtttactatttacccctaaaactttcctgtgtcctgggtacccctctgagtaggcctataattcctaccttgactgtgtgcatcatttgtaagctagcagatctatgtgggtgaaaatgcacaggagcttggtagactgcgggggaaagagagagctcctttcgcacatgttttaccagtctgcgtgttataacctcttaggttgtatcctttaatttccagccttttaggttagtttctgtaacagaacaagtggagtctggggatgaagtcctcaaagtacttcaaatggtaattgttttgtttttggtaatagcttaacaaataaacccaggttttctataaaaaaaaagtcgac

SEQ ID NO: 20018 - DNA, 442 bp, Homo sapiens
  SIMILAR (133)..(363): 981254mologous to Homo sapiens 16-JAN-1998 Human protease HUPM-4 cDNA,accession number X87152_cd1,Smith-Waterman Score=402.
  misc_feature (1)...(442): n = a,t,c or g
ggcccagggctgactctctgtgccaaggnctgtgctgccatcctggatacgggnacgcccttcatcacaggacccactgaggagatcggggccctgcatgcagccattgggggaatccccttgctggctggggagactactcgaaatggcgtccgcctctgcttgtccggtttccaggccctggatgtccctccgcctgcagggcccttctggatcctcggtgacgtcttcttggggacgtatgtggccgtcttcgaccgcggggacatgaagagcagcgcccgggtgggcctggcgcgcgctcgcactcgcggagcggacctcggatggggagagactgcgcaggcgcagttccccgggtgacgcccaagtgaagcgcatgcgcagcgggtggtcgcggaggtcctgctacccagtaaaaatccactatttccattgagcg

SEQ ID NO: 20019 - DNA, 690 bp, Homo sapiens
  SIMILAR (268)..(687): 871254mologous to Homo sapiens MHC B complex protein 12.3,accession number M24194,Smith-Waterman Score=661.
atggtggaaggcaaggaggagcaagtcacatcttacgtggatggcagcaggcaaagagagagcttctgtagagaaactcccatttttaaaaccatcagatctcagaaggagatcctcagacctgtgaaggctgaggttcttgactggttcctgactaggccctctggtttcatgcctgtctttgtttctcttgatggaaaaggggaatctcgatttgccatcatcatgactgagcagatgaccctttgtggcaccctcagggccccaacggctggctgggacaagctggtcaaggtatggaatctggctaactgcaagctgaagaccaaccacattggccacacaggttatctgaacactgtgactatgtctccaaatggatccctctgtgcatctggaggcaaggatggccaggccatgctgtgggatctcaacgaaggcaaacacctttatatgccagatggtgggggcattatcaacaccctgtgcttcagccccaactgctactggctctgtgctgccatgggccccagcatcaagatctgggacttaggggtaaatatcatcgtagatgaactgaagcaagaagttattagtactggcagcaaggcagaaccaccccagtgtacctccctggcctggtctgttggtggtcatttgtttgctggctacacagacaacctggtgtga

SEQ ID NO: 20020 - DNA, 2979 bp, Homo sapiens
  SIMILAR (61)..(1314): 991254mologous to Homo sapiens protocadherin 43,accession number AF052685,Smith-Waterman Score=2106.
atgttaaggagaaagaagcaagaggactgggcagctaaaggaagctcgcatgcctgtggtcagatcccggaggaaagagagaagggtttcgctgtgggcaacgtggtcgcgaaccttggtttggatctcggtagcctctcagcccgcaggttccgggtggtgtctggagctagccgaagattctttgaggtgaaccgggagaccggagagatgtttgtgaacgaccgtctggatcgagaggagctgtgtgggacactgccctcttgcactgtaactctggagttggtagtggagaacccgctggagctgttcagcgtggaagtggtgatccaggacatcaacgacaacaatcctgctttccctacccaggaaatgaaattggagattagcgaggccgtggctccggggacgcgctttccgctcgagagcgcgcacgatcccgatgtgggaagcaactctttacaaacctatgagctgagccgaaatgaatactttgcgcttcgcgtgcagacgcgggaggacagcaccaagtacgcggagctggtgttggagcgcgccctggaccgagaacgggagcctagtctccagttagtgctgacggcgttggacggagggaccccagctctctccgccagcctgcctattcacatcaaggtgctggacgcgaatgacaatgcgcctgtcttcaaccagtccttgtaccgggcgcgcgtcctggaggatgcaccctccggcacgcgcgtggtacaagtccttgcaacggatctggatgaaggccccaacggtgaaattatttactccttcggcagccacaaccgcgccggcgtgcggcaactattcgccttagaccttgtaaccgggatgctgacaatcaagggtcggctggacttcgaggacaccaaactccatgagatttacatccaggccaaagacaagggcgccaatcccgaaggagcacattgcaaagtgttggtggaggttgtggatgtgaatgacaacgccccggagatcacagtcacctccgtgtacagcccagtacccgaggatgcccctctggggactgtcatcgctttgctcagtgtgactgacctggatgctggcgagaacgggctggtgacctgcgaagttccaccgggtctccctttcagccttacttcttccctcaagaattacttcactttgaaaaccagtgcagacctggatcgggagactgtgccagaatacaacctcagcatcaccgcccgagacgccggaaccccttccctctcagcccttacaatagtgcgtgttcaagtgtccgacatcaatgacaacgtttcgcatacatgcaccttgaaggcaaattactttaactcaagtcttaagtacatctcagtctttcaaacacaaggcgcacatgacaagcaccgaagattcgacaaggacgccgaggccgcggtcgcgggcccatcccacgcccctgatacgtccgacgtcggggccacgctgcttgtgtctgacgggacccacagtgtccgatgcctggtgacgcgggaggccctggacacctcggactgggaggagaaggagttcggcttccgcgggacagagggccggctgctgctgctgcaggactgcggggttcatgtccaggtcgctgagggcggcgcgcccgcagagttctatctccaggtggaccgcttcagcctgctgcccacggagcagccccggctacgggtgcctggttgcaaccaagacttagatgttcagaaaaagctctatgactgccttgaggagcacctttcagagtccacctcgtccaatgcaggcctatcactgtcccagcttctggatgaaatgcgggaggaccaggagcatcagggggcactcgtgtgcctggctgaaagctgcctgacactggagggcccttgcacagcaccccctgtcacccactgggctgcctcacgatgcaaggccacgcctcttcagtctctgtcggtggctgagtctcggctgaagctgggtgccagcgtcctactccgggccctagccaccaatcctaacctgaccgcgctggatatcagcggcaacgccatgggggacgcgggcgccaagttgctggccaaggcgctgcgggtcaactcgaggctccggtctgtggtctgggaccggaaccacacatctgctttgggtctgctggacgtggcgcaggcgctggagcagaaccacagcctgaaggccatgcctctgccactgaacgacgtggcccaggcgcagcgcagccgcccggaactgacagcacgtgcagtccatcagatccaagcctgtctcttgaggaacaaccgcgcagaccctgcctcttctgaccacacgacccgccttcagccacttggtctggtctcagacccctcagagcaggtcaatgtcccctccccaaccacgagagcctgcaacatcattttgatggcaagatctgagttggcccacgggaagaaggttcaggcaaagatccaggatgcaaacgggatagctgaacttgctgataaggagtacccagagccaaacagacacagctgggacaagctggtcaaggtatggaatctggctaactgcaagctgaagaccaaccacattggccacacaggttatctgaacactgtgactatgtctccaaatggatccctctgtgcatctggaggcaaggatggccaggccatgctgtgggatctcaacgaaggcaaacacctttatatgccagatggtgggggcattatcaacaccctgtgcttcagccccaactgctactggctctgtgctgccatgggccccagcatcaagatctgggacttaggggtaaatatcatcgtagatgaactgaagcaagaagttattagtactggcagcaaggcagaaccaccccagtgtacctcctggcctggtctgttggtggtcatttgtttgctggctacacagacaacctggtgtgagtgtggcaggtga

SEQ ID NO: 20021 - DNA, 766 bp, Homo sapiens
  SIMILAR (309)..(1): 991254mologous to Homo sapiens aspartyl protease 3,accession number AF200344,Smith-Waterman Score=534.
tttcaatggaaatattggatttttactgagtagcgctagctctgctacccggtgcgcatgcgcatcacctgggcggcacccgcggtactgcgcctgcgcggtctcgcgccttcccaggtccgctccgcgagggcgagcgcgcgccagtcccactcgtgcgccgctcttcatgtccccgcggtcgaagacggtcacatacgcccccaagaaaacgtcgccgaggatccacacaggtactggaggcgaagcgatgtccaaggcccggaagccggacaagcagaggcggacgtcaccctgagcaaactgcaaggcgacaaggcggcaactgggtgtccaggccgccaggaaccaccatttccctgggagtccgtgctctctccgcccccaaccctggggacaagaaatgtttctgtggccccttccggccctagtgatgtccaactaccagctccaccctctcaactccagtcatattacatcactgtggcgtcattatgacggacacctacctggatgacgtaatcctgggccgtgagattaaaccagacccccccaatgaggagtgagactgcggggagctttgggatttctgagcaccggatgatgtactggtggaggagaggaacaagtgaagatgggagattcctgctctgctcaaatcccgtccgtggctccccagtgccatggagtaatgttcatattgagcacctgggtattcagcaccgtgtgtggacagccctgttgcctaggctcctctcatctagtc

SEQ ID NO: 20022 - DNA, 1312 bp, Homo sapiens
  SIMILAR (574)..(2): 801254mologous to Homo sapiens non-muscle myosin B,accession number M69181,Smith-Waterman Score=769.
ctttgagctgctctccagcgccccccagcagctggtagaagatgtggaagctgcactcgtccttggcctggcggatggcccgcgacttctccagcaggtctggacacagcgagtcaaggtgccccatgggctgtgagaggatacaggtctcaatgttggcgcccacgatgtacccggcaacatcaaagttgatgcggatgaatttgccgaatcgggaggagttgtcattcttcactgtcttggcattgccaaaggcctctaggatggggttggcctgaagcagctgccgctccagctcaccggggacacccggctccttcctgccctttggagacgacgccacgtgggcgaggtactggatgaccttcttggtgttttccgtcttcccagctccagactctccagtgcagagaatggactggtcctcacgatcctgcagcatgctccgataggccccctcggtcactgcgtacacgtggggtggcacctcgtggcgcttcttgccccggtacatctccacaatggcttctgtgtagatgggaagctgcttgtacgggttgatgaccacacagaaagccggagtacgtctggttccccaaccggcagcaactccgccgcacgcgccccccagcaggagcccactcacgtagatgaggccggagtagtaccgctcccggaggttgtgcaggaccgaggcctcgttgaggcaggtcagctcggccatgtcctcggccttgctgaacttgggcgggttcatgcgctggatctggtcccgcggcagtcgcagccgcctcccgctctccgccagctccacctccgcctcctcctcgccttcgtcccgcagcgccgccgcctcgaacccgtgaagctccgaaggcacccacacgagacgccgggccgtccactccacctgcggggaggtgcccgagccaggcccgccacccgcgctgggcccgcggggcgtgaacaggaacggctgggccgcctcgggcactgggcccggcctggggggcgccttccgcccgggcaccgacatggtcacggctgccatggtctgggggcgccgaccggagcggggagatggggtgagggcgcgggaatccccgttctcttcaggtgcagcgacctccgcggtccagcgcagggcggggccccgtcgcgtcacagggcgggagcccggctctgatgtcacccagcacctgcccggcggcttccagggccgtcccgaggcttcggccgtcgcgtggtgtccggcgatggtcgtctcgtgccgtcgagcttctccgtagtgtagcgctgggtaggctgtcat

SEQ ID NO: 20023 - DNA, 3250 bp, Homo sapiens
  SIMILAR (118)..(3207): 561254mologous to Bos taurus nonmuscle myosin heavy chain B,accession number AB022023,Smith-Waterman Score=2788.
gctgacttcgcgctggaggccctggccaaggccacctacgagcgcctcttccgctggctggttctgcgcctcaaccgggccttggaccgcagcccccgccaaggcgcctccttcctgggcatcctggacatcgcgggctttgagatcttccaggccacagacaagtcgtttgtggagaaggtagcccaggagcagggcggccaccccaagttccagcggccgaggcacctgcgggatcaggccgacttcagtgttctccactacgcgggcaaggtcgactacaaggccaacgagtggctgatgaaaaacatggaccctctgaatgacaacgtcgcagccttgctccaccagagcacagaccggctgacggcagagatctggaaagacgtggagggcatcgtggggctggaacaggtgagcagcctgggcgacggcccaccaggtggccgcccccgtcggggtatgttccggacagtgggacagctctacaaggagtccctgagccgcctcatggccacactcagcaacaccaaccccagttttgtccggtgcattgtccccaaccacgagaagagggccgggaagctggagccacggctggtgctggaccagcttcgctgcaacggggtcctggagggcatccgcatctgtcgccagggcttccccaaccgcatcctcttccaggagttccggcagcgatacgagatcctgacacccaatgccatccccaagggcttcatggatgggaagcaggcctgtgaaaagatgggtgcaggacttccagtgctaaaacagagaaagcccggggcaacccaggtcaagctgtccgctctccctggccagtccctcgaggggctccagtctggaggtgagacttccatgggcatagagtcccagtcccgggccacaccggacaagcaggtggatgaaggaaaatgggaaagggccttccagaagcgccagcagcagcagagcgccctgagggtgatgcagcggaactgcgcggcctacctcaagctgagacactggcagtggtggcggctgtttaccaaggtgaagccactgctgcaggtgacgcggcaggatgaggtgctgcaggcacgggcccaggagctgcagaaagtgcaggagctacagcagcagagcgcccgcgaagttggggagctccagggccgagtggcacagctggaagaggagcgcgcccgcctggcagagcaattgcgagcagaggcagaactgtgtgcagaggccgaggagacgcgggggaggctggcagcccgcaagcaggagctggagctggtggtgtcagagctggaggctcgcgtgggcgaggaggaggagtgcagccgtcaaatgcaaaccgagaagaagaggctgcagcagcacatacaggagctagaggcccaccttgaggctgaggagggtgcgcggcagaagctgcagctggagaaggtgacgacagaggcaaaaatgaagaaatttgaagaggacctgctgctcctggaagaccagaattccaagctgagcaaggagcggaagctgctggaagatcgtctggccgagttctcatcccaggcagctgaggaggaggagaaggtcaagagcctcaataagctacggctcaaatatgaggccacaatcgcagacatggaggaccgcctacggaaggaggagaagggtcgccaggagctggagaagctgaagcggaggctggatggggagagctcagagctgcaggagcagatggtggagcagcaacagcgggcagaggagctgcgggcccagctgggccggaaggaggaggagctgcaggctgccctggccagggcagaagacgagggtggggcccgggcccagctgctgaaatccctgcgggaggctcaagcagccctggccgaggcccaggaggacctggagtctgagcgtgtggccaggaccaaggcggagaagcagcgccgggacctgggcgaggagctggaggcgctgcggggcgagctggaggacacgctggactccaccaacgcacagcaggagctccggtccaagagggaacaggaggtgacggagctgaagaagactctggaggaggagactcgcatccacgaggcggcagtgcaggagctgaggcagcgccacggccaggccctgggggagctggcggagcagctggagcaggcccggaggggcaaaggtgcatgggagaagacccggctggccctggaggccgaggtgtccgagctgcgggcagaactgagcagcctgcagactgcacgtcaggagggtgagcagcggaggcgccgcctggagttacagctgcaggaggtgcagggccgggctggtgatggggagagggcacgagcggaggctgctgagaagctgcagcgagcccaggctgaactggagaatgtgtctggggcgctgaacgaggctgagtccaaaaccatccgtcttagcaaggagctgagcagcacagaagcccagctgcacgatgcccaggagctgctgcaggaggagaccagggcgaaattggccttggggtcccgggtgcgagccatggaggctgaggcagccgggctgcgtgagcagctggaggaggaggcagctgccagggaacgggcgggccgtgaactgcagactgcccaggcccagctttccgagtggcggcggcgccaggaggaggaggcaggggcactggaggcaggggaggaggcacggcgccgggcagcccgggaggccgaggccctgacccagcgcctggcagaaaagacagagaccgtggatcggctggagcggggccgccgccggctgcagcaggagctggacgacgccaccatggacctggagcagcagcggcagcttgtgagcaccctggagaagaagcagcgcaagtttgaccaggtggggcacctcagttcacccagccggggaatcagcaagtccatctacgcttcccatggtcgttctaatctatttccccctaccccatctccctcaaactggaagcttctggcagaggagaaggcagctgtacttcgggcagtggaggaacgtgagcgggccgaggcagagggccgggagcgtgaggctcgggccctgtcactgacacgggcactggaggaggagcaggaggcacgtgaggagctggagcggcagaaccgggccctgcgggctgagctggaggcactgctgagcagcaaggatgacgtcggcaagagcgtgagcagggcccccgctccccgggacacactgg

SEQ ID NO: 20024 - DNA, 1816 bp, Homo sapiens
  SIMILAR (1337)..(1813): 871254mologous to Homo sapiens MHC B complex protein 12.3,accession number M24194,Smith-Waterman Score=755.
atgctgagctcagtctgcgtctcgtccttccgcgggcgccagggggccagcaagcagcagccggcgccaccgcgacagccgcccgagtccccgccgccgccaccgctgccgccgcagcagcatcagcctgcgcagccggccccgcgcgttccccggcgcgcccccggcaccccgcgggcccggggcggccgcgccgtagcattttgttggattgtgttgttcatattacatcactgtggcgtcattatgacggacacctacctggatgacgtaatcctgggccgccgcagtgttcgccatggaattgccatcatcttccccaggacacacccatccagagactgggacctcacctccccagccagcaaggattcccccaatggctgcatgcagggcccgatctcctcagtgggtcctacgatgacagaagccctacagagtcaagtctacaagctgtcatttgacctggactctggcttccggcagccccaggtcaggcccccgttgaagagccgcctcgctggcctacagccccacccagcactcaccctgcagcatgctccgataggccccctcggtcactgcgtacacgtggggtggcacctcgtggcgcttcttgccccggtacatctccacaatggcttctgtgtagatgggaagctgcttgtacgggttgatgaccacacagaaaaggccggagtacgtctgcagtgggccgggaagctggagccgcggctggtgctggaccagcttcgctgcaacggggtcctggagggcatccgcatctgtcgccagggcttccccaaccgcatcctcttccaggagttccggcagcgcctgggcaacacaatccaggcgctggaactggaccccaacctctaccgcgtgggacagagcaagatcttcttccgggctggggtcctggcccagctggaagaggagcgagacctgaaggtcaccgacatcatcgtctccttccaggcagctgcccggggatacctggctcgcagtggagggcatcgtggggctggaacaggtgagcagcctgggcgacggcccaccaggtggccgcccccgtcggggtatgttccggacagtgggacagctctacaaggagtccctgagccgcctcatggccacactcagcaacaccaaccccagttttgtccgctgcattgtccccaaccacgagaagaggcatgggagtcatgcccatcatgaacatatcacagtgctgcagagatttatgccagttttgggccagtttatggcccagatttgggggcctgttcccaacacctgggtgtatgcagatacactgtctagtatgagagtcacagagtgggtgtcttgtgttcgcttcttgcctaacagcagcaaccctatcactgtctcctgtagctgggacaagctggtcaaggtatggaatctggctaactgcaagctgaagaccaaccacattggccacacaggttatctgaacactgtgactatgtctccaaatggatccctctgtgcatctggaggcaaggatggccaggccatgctgtgggatctcaacgaaggcaaacacctttatatgccagatggtgggggcattatcaacaccctgtgcttcagccccaactgctactggctctgtgctgccatgggccccagcatcaagatctgggacttaggggtaaatatcatcgtagatgaactgaagcaagaagttattagtactggcagcaaggcagaaccaccccagtgtacctccctggcctggtctgttggtggtcatttgtttgctggctacacagacaacctggtgtga

SEQ ID NO: 20025 - DNA, 866 bp, Homo sapiens
  SIMILAR (823)..(41): 611254mologous to Homo sapiens Human aspartic protease SEQ ID NO:1,accession number W57042,Smith-Waterman Score=617.
ttttttttttttttttttcaatggaaatattggatttttactgagtagcgctagctcggctacccggtgcgcatgcgcatcacctgggcggcacccgcggtactgcgcctgcgcggtctccccatatcgccaggtccgctccgcgagggcgagcgcgcgccaagtcccactccgtgcgccgctctctgatgtccccgcggtcgaagacggtcacatacgcccccaagaaaacgtcgccgaggatccacacaggtactggaggcgaacggatgtccaaggccccggaagccggacaagcagaggcggacgtcaccctgagcaaactggatgacgtaaatcctgggccgtgagattaaaccagaccccccccattgagaattgagactgcggggagctttgggatttctgagcaccggatgatgtactccccagccagcaaggggattcccccaatggctgcatgcagggcccggatgctcctcagtgggtcctacgatgacaggtgtgcctgtatccaggatggcagcacagccctgggcgacagagagtcagcggttgagcgcaccttcacactgctccattgtggatctgccagtagtcgggggactgtgactggcacgaaagttgagggggtgggatgtagtgtgtcaggtcttgagccccccaggaccagctctcctccatcagccacttcagggtccctgttgaagtaaaaggagaagacaggcttatccaatagcccctgctccaccagtacatccagcgggggccgaactccttccacagacagaatggggaaaacgaggcgccaatatcccagcggggcgggaaacagtgaagacaaggttggttttccacaagttttc

SEQ ID NO: 20026 - DNA, 397 bp, Homo sapiens
  SIMILAR (139)..(225): 1001254mologous to Homo sapiens Human nucleic acid-binding protein, NuABP-22,accession number B21018,Smith-Waterman Score=145.
gctagcaccaaccctggctctttgttgcccatcttctcccagaccctttcccatcccagcccatgttcaaggccagacagcgctctcctggctgacacacagattcaacaataaacaacagtaaaatagattcagggaggcttcactaagaactctgccctcacccgtcatcagacagtacacatgaaagcagtactctcatcacaggaaggaagagatgcgttatgagtgtgtcggtaaactgtcagattaagttcctcaggtcagcatgtatgagctttcttctgctgtggagagatctagccagtccctgactttgcaacagacctactgactactggatcttaagacccatgtctaggaccaggagtcagcataaggacgctgacctctcctg

SEQ ID NO: 20027 - DNA, 2385 bp, Homo sapiens
  SIMILAR (404)..(1552): 491254mologous to Homo sapiens Human nucleic acid-binding protein, NuABP-22,accession number B21018,Smith-Waterman Score=691.
  misc_feature (1)...(2385): n = a,t,c or g
atgtgtgaccggcagtcaagaacatgggaggtgaagggtgaggcggtggagaagcaaaatgttagtgagacagagtcagaacaagtagtccagagccggagccagacaggtggccaccaggagcacagatgtgttcatgctgaatgtgcgctcatgcacacagcaacaggtgtgccctggggctatgaagagaccaagacgctcctggctattcttagtagttctcaattttatggaaaactccagacctgtcagcagaacagccagatctacagggccatggcggaaggactctgggagcagggttttctgcggaccccagaacagtgtcgcaccaagttcaaaagcctacagttgagttaccgcaaagtgaggagaggccgtgtgcctgagccttgtatcttttatggaggaaatgaatgctcttttcaggctcctgggcctctgcacctcctatggcaagcgatgctgtttcctggtccaagaaggaagtgatattgaggctggagagctgaatcaccagaatggggaacccacggaggtagaagatggcactgtggatggtgcagacagggatgaaaaggacttcaggaatcctgggccaggaagtcaggaaactagacctgccagtgctgttcccaaacagacttggttttgagttcaagaacgagattaaaaaagaaaatctaaaatgggatgattcaaaggaagtagaaataaacaaggctttacagagaaagtccagaggagtttattgggcactctgagctacaaaaaggcttgggaggagtgagccaacatcaaggaaggccaatgtaggaaattctccaggggggagaagtngagggaggaaaaccccatcccaggggagaagatggagttcacccagagtttttttgttgccagggggaccaaagccttgttacacatatcctcttgtgggggaaaaactgctcttcagagtgttgccacttttcccccacaagcccagcgcttcaaacttggaaaaagtatctcattgtcctgaatgtgggaaaacctttagccgaagttcttatcttgttcggcatcaaagaatccacacaggcgagaagccttcacaagtgccagttgagtgcgggaagggcttttagtgagcgcttccaacctcactgcccaccttacggaactcacacaggggagaggccctatcagtgtgggcaatgtgggaaaagcttcaaccagagttccagcctcattgtccaccagaggacccataccggggaaaagccttaccagtgcattgtctgtggaaagagattcaacatctagttcccagttcagtgctcaccggcgcatccacactggggagagcccatacaagtgtgcagtgtgtgggaaaatcttcaacaatagctcccacttcagtgcccaccgaaaaacccacactggtgaaaagccttacaggtgttctcactgtgagagaggcttcactaagaactctgccctcacccgtcatcagacagtacacatgaaagcagtactctcatcacaggaaggaagagatgcgttatgagtgtgtcggtaaactgtcagattaagttcctcaggtcagcatgtatgagctttcttctgctgtggagagatctagccagtccctgactttgcaacagacctactgactactggatcttaagacccatgtctaggaccaggagtcagcataaggacgctgaacctctcctggctgtgcctgtgactccagaagtacctatcttactgtgnactttaaagtttgatggagagaaagctgtaggaatccataaattcctaccaggaaatccagggatcttcctgttcctagacactgagaaatgggacacccagtggttccaagaacaattttcttgggctaaacatagtcctcacacagggactgaggaaagaaagtgtctcctttcctgggaaaggcacatggtaaaaaggttaaggggcccggaatcctcttcctaaaacccaataattggaccctctagggcaccccaccataatactgcctacccttcagggccaggaagacactgnctcctttgtaaccccagcccagccacccaaaaagcaaacagaaagaaggaaggatggttaagcccattggataatactggaatctgtttcccctaagtgactttaacctttagagcaagcacaacgatccaggttaattttttggtaagatttctccttttattattgccctcatcatagttcctgattgtctcttaaagtaagtggtttatagacattactatttctgataataatttacaaactactataaacaaatttataaacattactaatttctggatgaaaataaagttgtttctccctccaaaaaaaaaaaaa

SEQ ID NO: 20028 - DNA, 955 bp, Homo sapiens
  SIMILAR (530)..(691): 551254mologous to Homo sapiens mariner transposase,accession number U49974,Smith-Waterman Score=159.
  misc_feature (1)...(955): n = a,t,c or g
attgtaaaaaaggtatttagcataggtataaccgtttctacgatgcgtgtctcactctctagggaagatgcatatgcgaggctcatgagtgagctcaggagcgcaaggctctcaaatctacgccgagccattcttcgttctccagaggctatcgaggataattctcaagaatagnnnnnnnnnnnnnnnnnnnnnnnnnnnnnnnnnnnnnnnnnnnnnnnnnntgagagagagagagagaaagtcatgtgagaatgtaaacattacgcgaaatcgccgccgacagcagaaacaatagccgacaccatagacacttcaaatggttctgttttcctcatttggactgaaaggtgagagtggaactcggctgcccaaaccgtggcaccaatatcagctgcaggccagagcaagcctttccgaggagattttaaacaaccggtgggagcaagatcctgaagcatttcggcaggatcctgaagaccaagcacgaagccatggctaccaagaggtggcagtgctccagtcgaagcagagacttcttctccaccacgacagtgttcctgatcatgcctttcttcgaacaagggcagctgggcaagacttgccatgggaaaccgtgaggcgtccacctgacaatcctgatttggcgcctgctgacttctctttgtttccttgtcttggaaaactacttgctgagagaagatgtttttctttacaacggagagttccatggccaccagaaaatcaaccaccacaccgacagtgagatacacagatgtgtggatccatgagctgatagaagcttgagacacttagaataagatccaagctgcccccgtaatgcaatgggcatcttcacgaagaataagctccttttcacagcagatggagcctggcgcctgttcttggtgccgctttacacttggcaatgcgttttttggtcaaatcatccctc

SEQ ID NO: 20029 - DNA, 433 bp, Homo sapiens
  SIMILAR (130)..(432): 831254mologous to Homo sapiens dJ1182A14.5.1 (novel gene (isoform 1)),accession number AL137798,Smith-Waterman Score=432.
  misc_feature (1)...(433): n = a,t,c or g
tcaactctcattggctcatcctctcatgttgaatgggaggatgctgtacacattatcccanaaaatgaaagtgatgatgaggaagaggaagaaaaagggccagtgtctcccaggaatctgcaggagtctgaagaggaggaagtcccccaggagtcctgggatgaaggacatcggtgggatcaagtgaaaaaggaggaccaagaggcaacaggtcccaggctcagcagggagctgctggatgagaaagagcctgaagtcttgcaggactcactggatagatgttattcaactccttcagtttatcttggactgactgactcatgccagccctacagaagtgccttttacgtattggagcaacagcgtattggcttggctgttgacatggatgaaattgaaaagtgccaagaagtggaagaagaccaagacccat

SEQ ID NO: 20030 - DNA, 516 bp, Homo sapiens
  SIMILAR (516)..(250): 941254mologous to Homo sapiens hypothetical protein,accession number AL117237,Smith-Waterman Score=440.
  misc_feature (1)...(516): n = a,t,c or g
ccccgtacccactgctcgggccagtagagctgcccaactgcncagcgagcagaggtgnacgaaggtcnngcggnanaangcnncaanaannttttcgctacacagaccgcaattaattggggtcccccggggttttccccttcccccgttgttaacacccggcccgtggattttaatttggggcccctataaaaaaacttttcctctgccaggccgcggttcttaactttggttctttaaaacgggccccccnnnnnnnnnnnnnncaatttctcccacgtcaagagaaaagccaacatgtttttcctccaatgcataaaaggaacttccatagggctggcaggagtcaggctgttcaagacaactggaaggagttgaataacatctatccagtgagtcctgcaagacttcaggctctactacctccagcagctccctgctgagcctggggcatggtgggccttggtcttcttcctcttcttggtcctttttaattctgtccacgtcaagagccaa

SEQ ID NO: 20031 - DNA, 406 bp, Homo sapiens
  SIMILAR (1)..(165): 561254mologous to Homo sapiens HSPC308,accession number AF161426,Smith-Waterman Score=142.
ctgatggaagtggaagagcctgaagtcttgcaggactcactggatatatgttattcgactccgtcaatgtactttgaactacctgacaattgttaacccgctaggctcctttggttagagaagccacagtccttcagcctccaattggtgtcagtacttaggaagaccacagctagatggacaaacagcattgggaggccttagccctgctcctctcaattccatcctgtagagaacaggagtcaggagccgctggcaggagacagcatgtcacccaggactctgccggtgcagaatatgagcaatgccatgttcttgcagaaaacgcttaacctgagtttcataggaggtaatcaccagacaactgcagaatgtggaacactcagctgtctggctcggtggtctt

SEQ ID NO: 20032 - DNA, 439 bp, Homo sapiens
  SIMILAR (396)..(280): 971254mologous to Homo sapiens Secreted protein encoded by gene 18 clone HRGCZ46,accession number W88551,Smith-Waterman Score= 178.
  misc_feature (1)...(439): n = a,t,c or g
ggaccttctctgcccgcagatgggctgaggttggaaactcacagcattgtctctgcagtgttctctacaggatggaattgagaggagcagggctaaggcctcccaatgctgtttgtccatctagctgtggtcttcctaagtactgacaccaattggaggctgaaggactgtggcttctctaaccaaaggagcctagcgggttaacaattgtcaagagcagttggtggttctgaaatacaatcctcagccaaggatccctcctgtgttacagatggatcagctaaaacaagccaacactgaagacacaaagaatgaggttaggttcattgaaaccagggtaacacctttggatgagctaaacacaaagatgacaatgaccttgagcaggtatagaagctccggacgcgtggactcttccnnnttttccggagcggttcct

SEQ ID NO: 20033 - DNA, 328 bp, Homo sapiens
  SIMILAR (61)..(327): 921254mologous to Homo sapiens dJ1182A14.5.1 (novel gene (isoform 1)),accession number AL137798,Smith-Waterman Score=431.
  misc_feature (1)...(328): n = a,t,c or g
aggnagtcccccaggagtcctgggatgaaggttattcgactctctcaattcctcctgaaaggacatcggtgggatcaagtgaaaaaggaggaccaagaggcaacaggtcccaggctcagcagggagctgctggctgagaaagagcctgaagtcttgcaggactcactggatagatgttattcaactccttcagtttatcttggactgactgactcatgccagccctacagaagtgccttttacgtattggagcaacagcgtgttggcttggctgttgacatggatgaaattgaaaagtaccaagaagtggaagaagaccaagacccat

SEQ ID NO: 20034 - DNA, 495 bp, Homo sapiens
  SIMILAR (329)..(403): 441254mologous to Homo sapiens Peptide sequence derived from a human secreted protein,accession number Y40023,Smith-Waterman Score=41.
cggtgacaagtctccacctggtcttccagatgggagtcatattcccacaataagcagcccttactaagccgagaggtgtcattcctgcaggcaggacctataggcacctgaagatttgaatgaaactatagttccatttggaagcccagacataggatgggtcagtgggcatggctctattcttatttcaaaagcatgccagtgccaacctgtgctcagtctgaagacaatggacccacgttaggtgtgacacattcacataactgtgcagcacatgccgggagtgatcagccggacattttaatttgaaccatgtatctctgggtagctacaaaattcctcagggatttcattttgcaggcatgtctctgagcttctatacctactcaagtgtctgctgttgcaaaaagaagaaaacattctctgcctgagttttaatttttgtccaaagttaattttaatctatacaattaaaaccttttgcctatcaaaaaa

SEQ ID NO: 20035 - DNA, 2996 bp, Homo sapiens
  SIMILAR (132)..(2552): 741254mologous to Homo sapiens hypothetical protein,accession number AL117237,Smith-Waterman Score=2925.
aatatgaagagtgcaaagatctcataaaatctatgctgaggaatgagcgacagttcaaggaggagaagcttgcagagcagctcaagcaagctgaggagctcaggcaatataaagtcctggttcacgctcaggaacgagagctgacccagttaagggagaagttgcgggaagggagagatgcctcccgctcattgaatgagcatctccaggccctcctcactccggatgagccggacaagtcccaggggcaggacctccaagaacagctggctgaggggtgtagactggcacagcaccttgtccaaaagctcagcccagaaaatgacaacgatgacgatgaagatgttcaagttgaggtggctgagaaagtgcagaaatcgtctgcccccagggagatgcagaaggctgaagaaaaggaagtccctgaggactcactggaggaatgtgccatcacttgttcaaatagccatggcccttatgactccaaccagccacataggaaaaccaaaatcacatttgaggaagacaaagtcgactcaactctcattggctcatcctctcatgttgaatgggaggatgctgtacacattattccagaaaatgaaagtgatgatgaggaagaggaagaaaaaggaccagtgtctcccaggaatctgcaggagtctgaagaggaggaagtcccccaggagtcctgggatgaaggttattcgactctctcaattcctcctgaaatgttggcctcgtacaagtcttacagcagcacatttcactcattagaggaacagcaagtctgcatggctgttgacataggcagtgagtactccattgtgaaggtgataaagctccagttcatggcccagtctcaggccatgcccgtgccaacctggactgactgtcacgacattgaactcaaggcaggacatcggtgggatcaagtgaaaaaggaggaccacgaggcaacaggtcccaggctcagcagagagctgctggatgagaaagggcctgaagtcttgcaggactcactggatagatgttattcaactccttcaggttgtcttgaactgactgactcatgccagccctacagaagtgccttttacgtattggagcaacagcgtgttggcttggctgttaacatggatgaaattgaaaagtaccaagaagtggaagaagaccaagacccatcatgccccaggctcagcagggagctgctggatgagaaagagcctgaagtcttgcaggactcactgggtagatgttattcgactccttcaggttatcttgaactgcctgacttaggccagccctacagcagtgctgtttactcattggaggaacagtaccttggcttggctcttgacgtggacagaattaaaaaggaccaagaagaggaagaagaccaaggcccaccatgccccaggctcagcagggagctgctggaggtagtagagcctgaagtcttgcaggactcactggatagatgttattcaactccttccagttgtcttgaacagcctgactcctgccagccctatggaagttccttttatgcattggaggaaaagcatgttggcttttctcttgacgtgggagaaattgaaaagaaggggaaggggaagaaaagaaggggaagaagatcaaagaaggaaagaagaaggggaagaaaagaaggggaagaagatcaaaacccaccatgccccaggctcagcagggagctgctggatgagaaagggcctgaagtcttgcaggactcactggatagatgttattcaactccttcaggttgtcttgaactgactgactcatgccagccctacagaagtgccttttacatattggagcaacagcgtgttggcttggctgttgacatggatgaaattgaaaagtaccaagaagtggaagaagaccaagacccatcatgccccaggctcagcggggagctgttggatgagaaagagcctgaagtcttgcaggagtcactggatagatgctattcaactccttcaggttgtcttgaactgactgactcatgccagccctacagaagtgccttttacatattggagcaacagcgtgttggcttggctgttgacatggatgaaattgaaaagtaccaagaagtggaagaagaccaagacccatcatgccccaggctcagcagggagctgctggatgagaaagagcctgaagtcttgcaggactcactgggtagatgttattcgactccttcaggttatcttgaactgcctgacttaggccagccctacagcagtgctgtttactcattggaggaacagtaccttggcttggctcttgacgtggacagaattaaaaaggaccaagaagaggaagaagaccaaggcccaccatgccccaggctcagcagggagctgctggaggtagtagagcctgaagtcttgcaggactcactggatagatgttattcaactccttccagttgtcttgaacagcctgactcctgccagccctatggaagttccttttatgcattggaggaaaaacatgttggcttttctcttgacgtgggagagaacaggagtcaggagccgctggcaggagacagcatgtcacccaggactctgccggtgcagaatatgagcaatgccatgttcttgcagaaaacgcttaacctgagtttcataggagtatttgaacctaaacatataccggtgacattctgtgattatcatcttgcccctaccttggttttggtttttggtgcagttccaggctcttggtgtctttgtttgggacaccaagagcctggaactgcacggcaccagctggaagggcgcacgcacgaaacttcctccgtcccttgcatcctcagggcccgcccggcaggacgactgagcaaggccttggaagaccggagagattggagtgtcgcttttggggccgctgcggagcttccgctgccatcttcggatcctgtgttccgcacgggggctccaccagagcagggatcgtggtga

SEQ ID NO: 20036 - DNA, 493 bp, Homo sapiens
  SIMILAR (350)..(493): 871254mologous to Homo sapiens dJ1182A14.5.1 (novel gene (isoform 1)),accession number AL137798,Smith-Waterman Score=214.
  misc_feature (1)...(493): n = a,t,c or g
ggcacgagtgagaaaagcctaatattgaagtatctctcctatgagggggtagaactatttgcctacaatttattggggaaaaaattgctcatttgtgtacataaacctaggacagagcacatagggaagataacattccaacacaggggaattttgcccaaggctcatgaaagaacccaagccagttttctcaagacttgacctcaggcctactggaatatttctctcaaagtctcctgttctcacactgacaagactgatgtccctgtgttaggattggacagaggaatgtttctgtgtgcaaggaagaactgcttaatgtaagagggcccatctgaatttatttgcaggacatcggtgggatcaagtgaaaaaggaggaccacgaggcaacaggtcccaggctcagcagagagctgctggatgagaaagggcctgaagtcttgcaggactcactggatagantgtattcgaactcttcaaggtgncttgaa

SEQ ID NO: 20037 - DNA, 257 bp, Homo sapiens
  SIMILAR (191)..(223): 541254mologous to Human immunodeficiency virus type 1 envelope glycoprotein gp120,accession number Z48782,Smith-Waterman Score=40.
cagctggtgccgtgcagttccaggctcttggtgtcccaaacaaagacaccaagagcctggaactgcaccaaaaaccaaaaccaaggtaggggcaagatgataatcacagaatgtcaccggtatatgtttaggttcaaatactcctatgaaactcaggttaagcgttttctgcaagaacatggcattgctcatattctgcaccggcagagtcctgggtgacatgctgtctcctgccagcggctcctgactcctgttct

SEQ ID NO: 20038 - DNA, 453 bp, Homo sapiens
  SIMILAR (206)..(451): 831254mologous to Homo sapiens unnamed protein product,accession number AK000726,Smith-Waterman Score=340.
caaagaggagcaagaagacctcttgagaaagcgagagcgtgaactcaccgccctgaagggagccctgaaagaagaggtttccagccatgatcaggagatggacaagctgaaggagcaatatgatgctgagttgcaggccctgagggagagtgtggaagaagcaaccaagaatgtcgaggtcttggcgagcaggagcaacacttcagagcaagaccaggcggggactgaaatgcgcgtgaagcttctgctggctgagaaagagcctgaagtcttgcaggactcactggatagatggtattcgactccttcaggttatcttgaactgcctgacttaggccagccctacagaagtgctgtttactcattggaggaacagtaccttggcttggctcttgacgtggacagaattaaaaaggaccaagaagaggaagaagaccaaggcccaccatgccc

SEQ ID NO: 20039 - DNA, 1320 bp, Homo sapiens; identical to SEQ ID NO: 6084
  SIMILAR (794)..(579): 811254mologous to unidentified cloning vector beta- galactosidase alpha-peptide,accession number M77169,Smith-Waterman Score=307.

SEQ ID NO: 20040 - DNA, 1353 bp, Homo sapiens
  SIMILAR (532)..(1080): 991254mologous to Homo sapiens unnamed protein product,accession number AK000726,Smith-Waterman Score=944.
atggataagcctcgcccagggaaaaccaccttcgtgatcatggtatctcccctgccagccccatatacctcaccctttacacacatggtcacttgccccgcgcacccccgagccttcctagccctgacacacagctgggaccctcaggtccgaccagcggtcctgaacccgctcccacggcacgggagctccttcgtggtgaaacagccagtggcgaagcagcagcccctgcgctgcctcatctacatagaagtcgccctatccgtgatgtcaccgacagcgccttcctcgtcccgaagcccctggaaacgccccggtctgcgacccgggttcgagcagccagggggctcaagggaagctgaacgcctggtgggctcccgggatggctcttcccgttctttgcacagccttcacccagtgagggagcctgtgccctccctgctcagtcgcattcggggcgctgcggagcttccgctgccttcttcggatcctgcgttcggcaccggggctccaccagggcagggatcgtggcaatataaagtcctggttcacgctcaggaacgagagctgacccagttaagggagaagttgcgggaagggagagatgcctcccgctcattgaatgagcatctccaggccctcctcactccggatgagccggacaagtcccaggggcaggacctccaagaacagctggctgaggggtgtagactggcacagcaccttgtccaaaagctcagcccagaaaatgacaacgatgacgatgaagatgttcaagttgagttggctgagaaagtgcagaaatcgtctgcccccagggagatgcagaaggctgaagaaaaggaagtccctgaggactcacaggaggaatgtgccatcacttattcaaatagccatggcccttatgactccaaccagccacataggaaaaccaaaatcacatttgaggaagacaaagtcgactcaactctgattggctcatcctctcatgttgaatgggaggatgctgtacacattattccagaaaatgaaagtgatgatgaggaagaggaagaaaaagggccagtgtctcccagaagcccgaggaaacgccctcgtccgcgacccgagccgccgcctcgaggctcaggggaagctgaacgctcggtgggctcctgggatgcatcttcgcgttctttgcgccgccttcacccactgagggagcctgtgcccaccctgcccagtcgctttcggggccgctgcggagcttccgctgccatcttcggatcctgtgtcccgcacgggggctccaccagggcagtgatgatgaagaagagttccaaacaaaagatctactaccctgagaagcggtga

SEQ ID NO: 20041 - DNA, 2559 bp, Homo sapiens
  SIMILAR (1008)..(1520): 931254mologous to Homo sapiens hypothetical protein,accession number AL117237,Smith-Waterman Score=819.
gctgaatactttagttttcctcctggaaatcatctggggcattttctttgaactgatgggaacaataaagcataactgtttgcacaaacttgggataaatgattttgggataacgatctaccagaatggggatatttcacccttggttctgagatgcaaaccaaagaatatcatgaccagctttcaggcctcctgaagtatatctctcacattgtcctgttctcatgctgaggagcctgagatccctgtgtggggattagacagtggactgttatgggtgtaggtgaattggcttattttgtctgtccctgtctgaatgttttgcaggaattaaaaaggaccaagaagaggaagaagaccaaggcccaccatgccccaggtaactgagcaattgtgaacagctacttctgtgttgacatctggagactcctggttcagggaaaacagagcgggctgacattatcgattacatcttttcaaccaagcctgaattattcctactaacattgctgttggttttcattgcagtagatatttaggtttccatttcttcctccccttatcatttactaacctactgtaggtggaccagacttcaaaaactgtattctcatggcgactgcatggaaacttgagcacattttatggaaaattattgagcacagtcttttcatgatccctgtatgctgtgtgtcctgagggcactaactcagagtgtcctgttactccctcatcagtgtgtcacctggacaattcactgagctcgttctctctctctgtgtgtgtgtgtgtgtgtgtgtgtgtgtgtgtgtctatctgtctttctctttcattcttttccatttggccctgttctgtcccaacatgaaggcaataatttgttacctcattaatggatctatccttttagttttttaaccacttccctatgctacccatgaaacctagttggggctctgttgtgtctgatttcccctggcttattctttactttttcctccttttccaggctcagcagggagctgctggaggtagtagagcctgaagtcttgcaggactcactggatagatgttattcaactccttccagttgtcttgaacagcctgactcctgccagccctatggaagttccttttatgcattggaggaaaaacatgttggcttttctcttgatgtgggagaaattgaaaagaaggggaaggggaagaaaagaaggggaagaagatcaacgaagaaaagaaggagaaggggaagaaaagaaggggaagaagatcaaaacccaccatgccccaggctcagcagggagctgctggctgagaaagagcctgaagtcttgcaggactcactggatagatggtattcgactccttcagtttatcttggactgactgacccatgccagccctgcagaagtgccttttacgtattggagcaacagcgtgttggcttggctgttgacatggatgaaattgaaaagtaccaagaagtggaagaagaccaagacccatcatgccccaggtaactttgagcaattacggatgcttaattctgtgttgacacctggagatgccaggtccagggaaaacaagagtgtgttcaatttcatgttttcaacgaaggttgaattactcctactgacattgctgttggttttcattgcagtagatgtttaggtttccatttcttcctccccttatcatttactcacttactataggttgaccatacctcaaaggctgtatggcaactgcatggaatcttgagcaagtttatggaaaattattgagcccactcttttcatgatcactgttcgctgtgtgtcccgagggcactaactcagagtgtcctttgaccccttcatcagtgtgtcacccggccaattcgctgagctcactttctcctctctctctctctccctctccctgtctttctctttcattcttttctacctggccctggtctatcccaacataaaggcaataattcattacctcattaatggatctgtcctttttctttttgaacagttccttatgttagccatgaaatctagctggggctgtgtggtttctgattccccctggcttattctttactttttcctacttttccaggctcagcagggagctgctggatgagaaagagcctgaagtcttgcaggactcactggatagatgttattcgactccttcaggttatcttgaactgcctgacttaggccagccctacagcagtgctgtttactcattggaggaacagtaccttggcttggctcttgacgtggacagaattaaaaaggaccaagaagaggaagaagaccaaggcccaccatgccccaggctcagcagggagctcctggaggtagtagagcctgaagtcttgcaggactcactggatagatgttattcaactccttccagttgtcttgaacagcctgactcctgccagccctatggaagttccttttatgcattggaggaaaaacatgttggcttttctcttgacgtgggagaaattgaaaagaaggggaaggggaagaaaagaaggggaagaagatc

SEQ ID NO: 20042 - DNA, 7580 bp, Homo sapiens
  SIMILAR (2946)..(4619): 941254mologous to Homo sapiens KIAA1693 protein,accession number AB051480,Smith-Waterman Score=2684.
atggaggaggtagaagaggacagattcaaggaaaatttggaaggcgcgctggctgggcagctcctgggagatgaagcgacgcaggcgctccaggtactggctgtagagctcgatgtcgttgtgcccggcgccctccacccacagcggctccaccgccttggggcagcgctcgtagagcgccagcccgtgcgagaagtcgatcacctcgtcctccctgccgtggatgatgagcacgggagacgtgatcttggacaccttctcgatgttagggaaggcgtcgaagcagtaggtcttcttggtgtcgcggaaggcgacgcgcatgcccgaggtgagcggcgagtgcagcaccaccgcggcacactcgtagcgcgaggccaggtccatggtgggcaccgtgccgatgctctgcccgtacaggatgatgctgtccgggctgatgccgtacctggcggcgccggagcagggtcagccgcggcctccaacgcgcgcgcacccttcccaccagcgggcgtccccgggcccagctccggatgcgaccctccagtctccccactcagccaagtcagtgcacactgggaactgtgtggcccccacatcctgaatgcttcataccttcctgcccgggttagaaagccgttcctggtgcactggccaggacagcggacactcttcctccctgcagcccttgcccacccccttggccatgaggaattcaggcagctgtgtccccaaatgtctccacccaattttggactctcggagtccccacgcccagtgagatgccagtgcaacccaggtcagcatcgagggtggtggctgcggaggtggcaccccctcccaccagcaccttcccttgggagtggacaagtcctcggccacctcagcaccaccagctcccacccaggggcaccctcacccccaggtcattggtgtgcggcccctgacccagctgatccagcaccagttacaaggcctcctcgtgcccagtcccaagcacgcgggacccacctgccaccctgcccatgccgggaccccacaactctcctcccacacgctctaggctctgatcccaggcagacgccctcttgcaaggcaggagcatgggcaggcaggagcccccagctgccacctggatgtcaccactcaaacgaacgggacacatccccagtggaggccctgggcacgctctggcctccccctcatggctctgggcctaggttcctgcaggacaaaggggcagcaggacagatggccgagcagacagagctcagagctggccatggcaggatggccaagctccgcagccacagggcctcatgggccagtcctccggacctggatgcagcagcctcgcctcacttggccccaagtgctgcctcagccgatgggctcccagccacacgtgcacagacccccagaccaccacccactccctcccgccaggctgagctgcccccagggtcgccctcacctggtgcgcagggcctgccaggtggcgtcgatgtcggcatagaggttcctctcggaaggcctgcccgagctggcaccgtagccggaggagtcgtaggtgaagatgttgcagtggaggcgggagcccaggccaatgtagaagctgctcatctggcccaggtccacggcattgccgtgcgagaagaggaccgtgtacctggcaccaggcacgcagcgaacatacatgcaggagacacggttgccgcgggcgctcttggtggggaagacctcgatggtgtccagctcgcgctggctgtactggaagtcggcacgctccgtcagggcttctggtggactctccgaggcaccgatgtagaaacttacccattcagtgcaccaagagcagcttcacatggtgtgggccgacatgaagagctgccagatccaacaggaccttgtggtggacgccttctttcactgaccattcatggggtgactattaggtaccatgccctgctctgggctagaggccccataatgagtaaatctcaggtcctgggggagtgggagccagtgcaaggagggaagtccagtgagaatgacaaatggacgatgtcagacccaggggctgaggcccccacctgcagccgggcagcttctggagtggacaaggagcagcagggaaggtggcaagggctctggaacagccacataaagcccttgaagataaggatggtcaaacaaaataatatcatacctggagaaactcagatcttgctaagatttactggttgggaatccaaagttaatgccaagaagcagctgccagttgggatcaaatgtgagcctatggatcaagaaaatgagcaaacaggtggccatgaaacagatggtcatagaattgtttcagtgcttatccactttccactcatttccatcctgtcttacgccacttggggcttgtcccttctagaatgcatccctggctcccctgtgtgcacacttctagttaggtttagcaatgtgggcacccgatggagcctggaagtgagaggaagcccatgtggttttggcagcaataaggtgtgtggggtaatgactcctgaaattaaaatggtgtgtgtatgtgaaggaaaggcgggcaaagctgtggggagcggtggagtggaaggaacaaaggaggtcagtactgggaacgctgaaggtcccgtccgccacgaggctgtagatggaggtgtccacctggcctttgcgttgctgcaggggctcctctggtcgctgctgctggggccgcctgggctggcgggttggggaggcggagagctcgatgcagtccctgactccacctcttctgccacaaacgtcagcatggtggtatcagccgggcccttggttcaagtaagaagccagagatgaacattctagaaatcagcgagacgttgcgcccccagctggcagagaagaaacagcagttcagaagcctcaaagagaaatgttttctaactcaactggccggcttcctggccaaccgacagaagaaatacaagtatgaagagtgtaaagacctcataaaatttatgctgaggaatgagcgacagttcaaggaggagaagcttgcagagcagctgaagcaagctgaggagctcaggcaatataaagtcgtagttcactctcaggaacgagagctgaaccagctaagggagaagttacgggaagggagagatgcctcccgctcattgtatgagcatctccaggccctcctcactccggatgagccggacaagtcccaggggcaggacctccaagaacagctggctgaggggtgtagactggcacagcaccttgtccaaaagctcagcccagaaaatgacgaagatgaggatgaagatgttcaagttgaggaggctgagaaagtactggaatcatctgcccccagggaggtgcagaaggctgaagagagcaaagtccctgaggactcactggaggaatgtgccatcacttgttcaaatagccacggcccttgtgactccaaccagcctcacaagaacatcaaaatcacatttgaggaagacgaagtcaactcaactctggttgtagacagagaatcctctcatgatgaatgtcaggatgctctaaacattctcccagtccctggccccacctcttctgccacaaacgtcagcatggtggtatcagccggccctttgtccagcgagaaggcagagatgaacattctagaaatcaatgagaaattgcgcccccagctggcagagaagaaacagcagttcagaaacctcaaagagaaatgttttctaactcaactgtccggcttcctggccaaccaacagaagaaatacaaatatgaagagtgcaaagacctcataaaatttatgctgaggaatgagcgacagttcaaggaggagaagcttgcagagcagctcaagcaagctgaggagctcaggcaatataaagtcctggttcacgctcaggaacgagagctgacccagttaaaggagaagttacgggaagggagagatgcctcccgctcattgaatgagcatctccaggccctcctcactccgtatgagccggacaagtcccaggggcaggacctccaagaacagctggctgaggggtgtagactggcacagcaccttgtccaaaagctcagcccagaaaatgacaacgatgacgatgaagatgttcaagttgaggtggctgagaaagtgcagaaatcatctgcccccagggagatgcagaaggctgaagaaaaggaagtccctgaggactcactggaggaatgtgccatcacttattcaaatagccatggctcttatgactccaaccagccacataggaaaaccaaaatcacatttgaggaagacaaagtcgactcaactctcattggctcatcctctcatgttgaatgggaggatgctgtacacattattccagaaaatgaaagtgatgatgaggaagaggaagaaaaagggccagtgtctcccaggaatctgcaggagtctgaagaggaggaagtcccccaggagtcctgggatgaaggttattcgactctctcaattcctcctgaaatgttggcctcgtaccagtcttacagcagcacatttcactcattagaggaacagcaagtctgcatggctgttgacataggcagtgagtactccattgtgaaggtgataaagctccagttcatggcccaggccagtgtcacccttgtctacctctcagtgaaagatgtgacccaggtttcactgaatttattcccattttctgtgtcttctaagttcgcttgttttagctcatctgtccgtcatgttcctggacatcggtgggatcaagtgaaaaaggaggaccaagaggcaacaggtcccagcagggagctgctggatgagaaagggcctgaagtcttgcaggactcacaggatagatgttattcaactccttcaggttgtcttgaactgactgactcatgccagccctacagaagtgccttttacatattggagcaacagcgtgttggcttggctattgacatggatgaaattgaaaagtaccaagaagtggaagaagaccaagacccatcatgccccaggctcagcagggagctgctggatgagaaagagcctgaagtcttgcaggactcactggatagatgttattcgactccttcaggttatcttgaactgcctgacttaggccagccctacagcagtgctgtttactcattggaggaacagtaccttggcttggctcttgacgtggacagaattaaaaaggaccaagaagaggaagaagaccaagacccactcatgccccaggctcagcagggagctgctggaggtagtagagcctgaagtcttgcaggactcactggatagatgttattcaactccttccagttgtcttgaacagcctgactcctgccagccctatggaagttccttttatgcattggaggaaaaacatgttggcttttctcttgacgtgggagaaattgaaaagaaggggaaggggaagaaaagaaggggaagaagatcaaagaaggaaagaagaaggggaagaaaagaaggggaagaagatcaaaacccaccatgccccaggctcagcagggagctgctgaatgagaaaagggcctgaagtcttgcaggactcactggatagatgttattcaactccttcaggttgtcttgaactgactgactcatgccagccctacagaagtgccttttatgtattggagcaacagcgtgttggcttggctgttgacatggatgaaattgaaaagtacaaagaagtggaagaagaccaagacccatcatgccccaggctcagcagggagctgctggcgtgagaaagagcctgaagtcttgcaggactcactggatagatgttattcgattccttcaggttatcttgagctgcctgacttaggccagccctacaagcaagtgctgttttactcattggaggaacagtaccttggcttggctcttgacgtggacagaaattaaaaaggacgaagaagaggaagaagaccaagacccaccatgccccaggctcagcagggagctgctggaggtagtagagcctgaagtcttgcaggactcactggatagatgttattcaactcctttcagtttgtcttgaacaggctgactcctgccagccctatggaagttcctttttatgcattggaggaaaaacatgttggcttttctcttgacgtgggagaaattgaaaagaaggggaaggggaagaaaagaaggggaagaagatcaaagaaggaaagaagagggggacgaaaagaaggggaagaagaggaaaacccaccatgccccaggctcagcagggagctgctggatgagaaagggcctgaagtcttgcaggactcactggatagatgatattccactccttcagggtggcttgaactgactgactcatgccagccctacagaagtgccttttacgtattggagcaacagcgtattggcttggctgttgacatggatgaaattgaaaagtaccaagaagtggaagaagaccaagacccatcatgccccaggctcagcagggagctgctggatgagaaagagcctgaagtcttgcaggactcactggatagatgttattcgactccttcaggttatcttgaactgcctgacttaggccagccctacagcagtgctgtttactcattggaggaacagtaccttggcttggctcttgacgtggacagaactaaaaaggaccaagaagaggaagaagaccaaggcccaccatgccccaggctcagcagggagctgctggaggtagtagagcctgaagtcttgcaggactcactggatagatgttattcaactccttccagttgtcttgaacagcctgactcctgccagccctatggaagttccttttatgcattggaggaaaaacatgttggcttttctcttgacgtgggagatcctagatgtagagccaaaggagatggcaacccagaaataccaacggctacagatccaacaaaccccaatacgatcctgctctctctaggcaaaggatcagcaaagaggcagtctagcaagacaagacacttatatacgatcatcagtttcctcagtgtctgccctccaacctgcgggggctgcggctgccacggttccacgctgggtggacgctgcctgcccgggatccaagagccgccgttgcaggcgggagttggggagtcgtgtgcagcacattctctcatggaatggcagagcaagaccaactttacccgcctctcctccgtgtctcccatacgacatgaggacgtaaatcaagagcttgagaccacccaggatccccagggaatgggaagtgtggaggaagagctgccctgtgatggagaccagggcacctggacttacaagtggcagctggcggtgaggttggcggagcagcggaggaaggggctcgtcgagcgcagctactacctcctcgtccctgttccagttgctggggacacagtagtgcacaacacaggccgttcctgccctctcagaggctgcgtcctcctgggcgaggcaggcagtgacagcccagagacgctgccttcccacaaggcgacctga

SEQ ID NO: 20043 - DNA, 5025 bp, Homo sapiens
  SIMILAR (1237)..(2349): 941254mologous to Homo sapiens hypothetical protein,accession number AL117237,Smith-Waterman Score=1812.
gtaaaagggaaaccatcagtcccatagtcctaggggccttcccgactgtacaagaaatcactacttcatgccccagtgcagtgttttagaggagaggctgcaaggcttgggaaagtggccccgcattcagagtcagacctcaggggctgtgagttctgactccgcttcgttgtggttgaatcatcttgtcaacttccttgacgcgcccttgagtttctctttcttcatctttaaattttggaggatcagatgccagaaagtcaggagactgaagagtaaagatgtggaaatccctgtctagaccctggtactggggagagttttgtccttgggatggacctggctcctgccctgtaggcagtgaccacagcagcatgtccagccttccactgaggcaggcgtgtctgtcttttctcagaggatgaagagtgtaaagacctcataaaatttatgctgaggaatgagcgacagttcaaggaggagaagcttgcagagcagctgaagcaagctgaggagctcaggcaatataaagtcctggttcacgctcaggaacgagagctgacccagttaagggagaagttgcgggaagggagagatgcctcccgcttcattgaatgagcatctccaggccctcctcactccggatgagccggacaagtcccaggggcaggacctccaagaacagctggctgaggggtgtagactgacacagcaccttgtccaaaagctcagcccagaaaatgacaacgatgacgatgaaggtgtttcaaagttgaggtggctgagaaagtgccaaaaatcgtctgcccccagggagatgcagaaggctgaagaaaaggaagtccctgaggactcactggaggaatgtgccatcacttgttcaaatagccatggcccttatgactccaaccagccacataagaaaaccaaaatcacatttgaggaagacaaagtcgactcaactctcattggctcatcctctcatgttgaatgggaggatgctgtacacattattccagaaaatgaaagtgatgatgaggaagaggaagaaaaaggaccagtgtctcccaggaatctgcaggagtctgaagaggaggaagtcctctcagacgccctggcatgaatgactttcgcatctctcaatcctttctgaaatgttggcctcgtacaagtcttacagcagcacatttcactcattagaggaacagcaagtctgcatggctgttgacataggcagacatcggtgggatcaagacgacctgggacgaccatgaggcaacaggtcccatgctcagcagggagctgctggatgagaaagggcctgaagtcttgcaggactcactggatagatgtcattcaactccttcaggttggcttgaactgactgactcatgccagccctacagaagtgcctttttacattattggagccaacagcgtgttggctgggctcttgacatggatgaaattgaaaagtaccaagaagtggaagaagaccaagacccatcatgccccaggctcagcagggagctgctggatgagaaagagcctgaagtcttgcaggactcactggatagatgttattcgactccttcaggttatcttgaactgcctgacttaggccagccctacagaagtgctgtttactcattggaggaacagtaccttggcttggctcttgacgtggacagaattaaaaaggaccaggaagaggaagaagaccaaggcccaccatgccccaggctcagcagggagctgctggaggtagtagagcctgaagtcttgcaggactcactggatagatgttattcaactccttccagttgtcttgaacagcctgactcctgccagccctatggaagttccttttatgcattggaggaaaagcatgttggcttttctcttgacgtgggagaaattgaaaagaaggggaaggggaagaaaagaaggggaagaagatcaatgaagaaaagaaggagaaggggaagaaaagaaggggaagaagatcaaaacccaccatgccccaggctcagcagggagctgctggatgagaaagggcctgaagtcttgcaggactcactggatagatgttattcaactccttcaggttgtcttgaactgactgactcatgccagccctacagaagtgccttttacatattggagcaacagcgtgttggcttggctgttgacatggatgaaattgaaaagtaccaagaagtggaagaagaccaagacccatcatgccccaggctcagtggggagctgttggatgagaaagagcctgaagtcttgcaggagtcactggatagatgctattcaactccttcaggttgtcttgaactgacttgactcatgccagccctacagaagtgccttttacatattggagcaacagcgtgttggcttggctgttgacatggatgaaattgaaaagtaccaagaagtggaagaagaccaagacccatcatgccccaggctcagcagggagctgctggctgagaaagagcctgaaagtcttgcaggactcactggatagatgttattcgactccttcagggttatcttgaactgcctgacttaggccagccctacagcagtgctgtttactcattggaggaacagtaccttggcttggttccttgacgtggacagaattaaaaaggaccaagaagaggaagaagacgaagaccaaggcccaccattcccccagggctcagcagggagctgctggaggtagtagagcctgaagtcttgcagggactcactggatagatgttattcaactccttccagttgtcttgaacagcctgactcctgccagccctacggaagttccttttatgcattggaggtaaaaacatgttgggcttttctcttgacgtgggaggaaattgaaaagaaggggaaggggaagaaaagaaggggaagaagatcaacgaagaaaagaaggagaaggggaagaaaagaaggggaagaagatcaaaacccaccatgccccaggctcagcggtgtgctgactggaagtggaagagcctgaaatcttgcaggactcactgggatagatattattcgactccatcaatgtactttgaactacctgactcattccagcactagagaagtgtgttttactcatttgaggaacagcacatcagctttgcccttgacatggacaataggttttttcactttgacggtgagaagtctccacctggtcttccagatggggagtcatattcccacaataaggcagcccttacttaaggccgagaggtgttcatttcctggcagggcagggacctattagggcacgtggaagattttgaattgaaactatagttccatttgggaagccccagacattagggtggggtcagtggggcatggctctatcccctattctcaaaccatgccagttgcaaccttgtgcttcagtctggaagacaatgggacccacgttaggtgtgacacattcacataactgtgccagcacatgccgggagtgyatcagtcggtacattttaatttgaaccacgtatctctgggtagctacaaaattcctcagggatttcattttgcaggcatgtctctgagcttctatacctgctcaaggtcagtgtcatctttggtgtttagctcatccaaaggtgcttaccctgggtttcaatgaacctaacctgcattctttgtgtctttcagtgttgggcttgttttaggctgatccatctgttaacacagggaggggatccttgggctgagggattgtattttcaggaaccacccaactggcttctttacaattgtttaacccgctagggctcctttgggttagaggaaggccacagtccttcagcctcccaattgggtgtcagtacttagggaagaccacagctaggatgggaccaaacagccattggggaggccttagcccctgctcctctcaattccatcctgtagagaacaggagtcaggagccgctggcaggagacagcatgtcacccaggactctgccggtgcagaatatgagcaatgccatgttcttgcagaaaacgcttagcctgacgtttcataggaggtaatcaccagacaactgcagagtgtagagcactcgggcaggacagctgacctgtctccttcacatagtccatgtcaccacaaatcacacaacaaaaaggagaaagagatattttggggttcaaaaaaaagtaaaaagataatatagctgcattttctttggttattttgggccccaaatatttcctcatctttttgttgtttgtcatgggtggtggtgacatggacttgtttatagaggacaggtcagctctctggctcaatgatctacatttctgaagttgtctgaaaatgtcttcatgattaaattcagcctaaacttttttgacggggaacactgccagagacaatgctgtgagtttccaaccctcagcccatcttscgggacagagaaggttctagtttgtcccatcaccattatgatatcaggactggttacttggttaaggaggggtctaggagatctgtccccttttagagacacttaccttataaatgaagaagtacttgggaaagcgggttttcaagagtataaatatccctgtattttaatgatcattcctctaaacattttatcatttattaatcctccctgcctgtgtctattattatattcgatatctctacactgcaaaatttggggtctcaatttttactgtgcctttgtttttactagtgtcctgctgttgcaaaaagaagaaaacattctctgcctgagttttaatttttgtccaaagttaattttaatctatacaattaaaaccttttgcctatcaaaaaaaaaawwttttttytcttgttttggagcttcaagactttgcatttcctagtatttctgtttgtcagttctcaatttcctgtgtttgcaatgttgaaattttttggtgaagtactgaacctygcttttttccggtttctacatgcagagatgaatttatactgccatct

SEQ ID NO: 20044 - DNA, 641 bp, Homo sapiens
  SIMILAR (634)..(494): 441254mologous to Homo sapiens COL1A1 and PDGFB fusion transcript,accession number Y16346,Smith-Waterman Score=66.
  misc_feature (1)...(641): n = a,t,c or g
ggcacgagagcaaaggcattcattgttaaccttatacccagggctgctgcccagttctgtaaacgcagcccagctaaagctctgctgtctcaagtgtgcatttatacccaggtgatttggacggagcagctaccatggcgtggacgccttcactgaactccgggctgcagtgcagggagctcaaagcagtgctgctaccaaacagtttttaactttgaacaactgtgtcaggcaatggatttgaattttaagtgtattaatagctgtgctctgtgtcgtaggcaaaattccactgaaggagcctctgtgccctgcagccggcagcgcggctgaagcatgtgttggccaaggaatgcctgtcatccaggtgccctgcagccagcagcggncttcaagcatgtgttggccaaggaatgcctgtcagtcatccagggctctgggaggggacgagagttatgtccccaagaacaggaagtcctttacaaagcatccagtctcttcctgtcctccccttccctaggctggggtaggggttagagactggtggcccagggaggtcacctggccttgccctgggatttccctctttcagtgggccagcaggatttgggcagggcaccagttcgccaaggttctggggc

SEQ ID NO: 20045 - DNA, 503 bp, Homo sapiens
  SIMILAR (3)..(296): 461254mologous to Homo sapiens dJ37E16.5 (novel protein similar to nitrophenylphosphatases from various organisms),accession number Z83844,Smith-Waterman Score=221.
caatagagacctctagtagagagccgtggaattccgcgaagcccagccgcttcattttcgactgcgtgtcccaggaatacggcatcaatcccgagcgcaccgtcatggtgggagaccgcctggacacagacatcctcctaggcgccacctgtggcctgaagaccatcctgaccctcaccggagtctccactctaggggatgtgaagaataatcaggaaagtgactgcgtgtctaagaagaaaaaggtccctgacttctatgttgacagcatagccgaccttttgcctgcccttcaaggttaaagattgagtgtctttaatctgcagaataaaaaataagaaattgaaaaccagttacccaaattaataggcggggcttaagcatctgctcggctaagtggcttctaagagtgtacttggagttaagcaaaggcattcattgctaaccttgtaagtacacgtttgggggaccattttgtttacagaagctcggaatcgaacacg

SEQ ID NO: 20046 - DNA, 513 bp, Homo sapiens
  SIMILAR (120)..(500): 351254mologous to Homo sapiens Sequence encoded by allele D4.7 of the human dopamine receptor,accession number R48950,Smith- Waterman Score=131.
ttttgccaggtggaagggtttattagtccctgccagcagctgtcctccctggtgcaggtggcctggccagcccactggattggggacgggccaggctgggccaggtcgggggctcagtctgggaggtaataaaagcagaccgacacgcagatgttgctcgggaagcagatgtcgatgcagagataaatcagccgctgtctccggggcccctctgctcgccgggcccagtagatgggggtcctcatgcacaggcgctgcaccaaagcccccgcctgggcggtagccacttacgaggctcccctgcactgccagcagctcctgggtgtggtgggtgtcctggctggggacccaagcctcttggaccttggaggtatccaccagcagccgcagggtctcccgatcactgtcctccatcaggcggaggaagcagacctggtgctcctcagggcggtaacagatgcagccgctctgcccgtcgaacagcaccgcccagctgtggttgctctgaggtgg

SEQ ID NO: 20047 - DNA, 1593 bp, Homo sapiens
  SIMILAR (1473)..(1228): 371254mologous to Arabidopsis thaliana 4- nitrophenylphosphatase-like protein,accession number AB016886,Smith -Waterman Score=121.
  misc_feature (1)...(1593): n = a,t,c or g
tcagtctgggaggtaataaaagcagaccgacacgcagatgttgctcgggaagcagatgtcgatgcagagataaatcagccgctgtctccggggccctgtggcgagggtgccgtgaatctccaagggctccgcccccagctcctcaaaccatcccgagggcctggccttcccccacagcggtcctgactcaccctctgctcgccgggcccagtagatgggggtcctcatgcacaggcgctgcaccaaagcccccgcctgggcggggtccacttcgaggctcccctgcactgccagcagctcctgggtgtggtgggtgtcctggctggggacccaagcctcttggaccttggaggtatccaccagcagccgcagggtctcccgatcactgtcctccatcaggcggaggaagcagacctggtgctcctcagggcggtaacagatgcagccgctctgcccgtcgaacagcaccgcccagctgtggttgctctgaggtggggtcactgtgatggtcgccgcgttccgggccacgtccaccaggatggtttggttgggccggggcatgtgggggctcgggagggtcattcgcagcgtctgcagccttggcttgggagggccctgagcagagccaagaagccctccagccacaatccccacagcggccagcaccagcagcagcagcagcaggagcaggcccacggctctccagcccccgcaggagggcttggtcttcacctggatgacaggcattccttggccaacacatgcttcagccgcgctgccggctgcagggcacagaggctccttcagtggaattttgccttgaagggcaggcaaaaggtcggctatgctgtcaacatagaagtcagggaccattttcttcttagacacgcagtcactttcctgattattcttcacatcccctagagtggagactccggttgagggtcaggatggtcttcaggccacaggtggcgcctaggaggatgtctgtgtccaggcggtctcccaccatgacggtgcgctcggggttgatgccgtattcctggggacacgcagtccgaaaatgaagcggctggggcttcccgatgatgtcggcctgggcnctggcgcgggccaaattttttcctttttccacccaacccggggggggnnttcggccagacacccggtacgtcgggctccagcggcgcgtgcagccagtcgccgggaccctcgcccctgcagtggctcgggccccacgcccacgctggcgacgcccacggcctccagctccgcggccagggctgggctgcccagcacgtaggccttgggcgcgggggcgccggccaggcgctggcgcaggtagagcgcggtgcagtaggccgtgccgaagacctccaggctggcgccgggccccgcggggccgccgaagcccaggcgccgcagcttctcggcgtaggcagcgcgggtcttgctgctgttgttggtgatgaagcccaggcggccgtcgcagtcgaacagcagcgtgtccacgtcggccagcagcgcctgtgcccgctcggcgctcagccgcacgcagcgggcgtcgtcgccaccggcctccgccgccgccat

SEQ ID NO: 20048 - DNA, 619 bp, Homo sapiens
  SIMILAR (167)..(289): 921254mologous to Homo sapiens high mobility group protein 14,accession number J02621,Smith-Waterman Score=183.
  misc_feature (1)...(619): n = a,t,c or g
gcggccgcgggggcgggcgttctggaacgtttggcggccgggggagctgagggggctattcgaacggggcggcgggaagccgtgacgtcacgcggccgggcattgttctcggggccgggcgggcccgcgagtcctgggactgcggcccgcctctattcgtgcgtctccgtctccgcaggtcagctccgccgaaggcgccgccaaggaagagcccaagaggagatcggcgcggttgtcagctaaacctcctgcaaaagtggaagcgaagccgaaaaaggcagcagcgaagattcttcaaacacctaaatgaaagtgataaattcaaaactgatccttttagttcctcattatatgatatgaagggattaactgtagcaggatagtcaacctgaccgtacggcatggtgcttttttcangataaatcttcagacaaaaaagtgcaaaccaaagggaaaaggggagcaaagggaaaacatgcncgcagtggctaaccaagaaactaaagaagacttacctgcggaaaacgggaaacgaaactgaggagagtncagcctctgatgagcangagaggaagagccaagtctgataataacatatacatgcttatcatggtccctg

SEQ ID NO: 20049 - DNA, 930 bp, Homo sapiens
  SIMILAR (789)..(926): 841254mologous to Homo sapiens high mobility group protein 14,accession number J02621,Smith-Waterman Score=188.
atggagagtccctggaggcagtggagacttcgaaaagttgccaggagtgggggaggacgcctgagcaacaagaggaaactccatctaaaaaaaaaaaagaaaggagaaagaggaggaggaggagcagaaagagaaaaagcagcagcagcagtagctccaggctgcaaagctggtgcagggaatgcaaaaaagtttgttcagaatggtccagggacaaaggagagctctgcttctcaggtgccgacaggaccctcagctgcaggtctgttggagtttgctagaggtccactccagaccctgtttgcctgggtatcagcagcggtgtctgcagaaccacggattttcatgatccgcgaatgctgctgtctgatcgttcctctggaagttttgtctcagaggagtacctggccatgtgagtttttgatctcagactgctgtgctagcaatcagcaagactccatgggcgtaggaccctccgagccaggtgcaggatataatctcctggtgcgccatttcctaagcccgtcggaaaagtgcagtattcgggtgggagtggcccgattttccagggttctcccaccgccccttctggggatctcagcagctcgggcggcgggaggagcggcacgacaggcagcccagcttcgcgaaggctctcggtgcccgcggctcacagacatcccgcacgcaccctccacgccgccagagcaaggtcactccgcggaaggggccgccaaggaagagcccaagaggagatcggcgcggttgtctgctaaacctgctcctgcaaaagtggaagcgaagcgaaaaaggcagcagcaaaggataaatcttcagacaaacaagtgcaaacaaaagggaaaaggggagcaaagggaaaacaggccgaagtggctaaccaagaaactaaagaacatttacctgcagtaa

SEQ ID NO: 20050 - DNA, 533 bp, Homo sapiens
  SIMILAR (2)..(301): 741254mologous to Homo sapiens Human regulator of G-protein signalling 2 (RGPS-2),accession number W30561,Smith-Waterman Score= 365.
gcggccgccgtcagacatccacgacagcgatggcagttccagcagcagccaccagagcctcaagagcacagccaaatgggcggcatccctggagaatctgctggaagacccagaaggcgtgaaaagatttagggaatttttaaaaaaggaattcagtgaagaaaatgttttgttttggctagcatgtgaagattttaagaaaatgcaaaagtggaagcgaagctgaaaaaggcagcagcgaaggataaatcttcaggcaaaaatgtgcaaacaaaagggaaaaggagagcaaagggaaaacaggccaaagtggcaaaccaagaaactaaagaagatttacctgcagaaaacggggaaatgaaaactgaggagagtccagcctctgatgaagcaggagagaaagaaaccaagtctgattaataaccatataccatgtcttatcagtggtccctgtctcccttcttgtacaatccagaggaatatttttatcaactattttgtaaatgcaagttttctagtagctctagaaacat

SEQ ID NO: 20051 - DNA, 1623 bp, Homo sapiens
  SIMILAR (1084)..(1503): 991254mologous to Escherichia coli TEM-derived extended spectrum beta-lactamase,accession number AF308742,Smith-Waterman Score=717.
tcactcaaaggcggtaatacggttatccacagaatcaggggataacgcaggaaagaacatgtgagcaaaaggccagcaaaaggccaggaaccgtaaaaaggccgcgttgctggcgtttttccataggctccgccccccggctccagatttatcagcaataaaccagccagccggaagggccgagcgcagaagtggtcctgcaactttatccgcctccatccagtctattaattgttgccgggaagctagagtaagtagttcgccagttaatagtttgcgcaacgttgttgccattgctacaggcatcgtggtgtcacgctcgtcgtttggtatggcttcattcagctccggttcccaacgatcaaggcgagttacatgatcccccatgttgtgcaaaaaagcggttagctccttcggtcctccgatcgttgtcagaagtaagttggccgcagtgttatcactcatggttatggcagcactgcataattctcttactgtcatgccatccgtaagatgcttttctgtgactggtgagtactcaaccaagtcattctgagaatagtgtatgcggcgaccgagttgctcttgcccggcgtcaatacgggataataccgcgccacatagcagaactttaaaagtgctcatcattggaaaacgttcttcggggcgaaaactctcaaggatcttaccgctgttgagatccagttcgatgtaacccactcgtgcacccaactgatcttcagcatcttttactttcaccagcgtttgcataagtcggtgtatgtcagccgtgatggtgatggcagtgctgaccattgcatgcagatttcttaaaatgacagtgtctgttggccacatatgcagtctgaactttgctttgcagacatccacgacagcgatggcagttccagcagcagccaccagagcctcaagagcacagccaaatgggcggcatccctggagaatctgctggaagacccagaaggcgtgaaaagatttagggaatttttaaaaaaggaattcagtgaagaaaatgttttgttttggctagcatgtgaagattttaagaaaatgcaagataagacgcagaatgacttggttgagtactcaccagtcacagaaaagcatcttacggatggcatgacagtaagagaattatgcagtgctgccataaccatgagtgataacactgcggccaacttacttctgacaacgatcggaggaccgaaggagctaaccgcttttttgcacaacatgggggatcatgtaactcgccttgatcgttgggaaccggagctgaatgaagccataccaaacgacgagcgtgacaccacgatgcctgcagcaatggcaacaacgttgcgcaaactattaactggcgaactacttactctagcttcgcggcaacaattaatagactggatggaggcggataaagttgcaggaccacttctgcgctcggcccttccggctggctggtttattgctgataaatctggagccgactttacgaaacacggaaaccgaagaccattcatgttgttgctcaggtcgcagacgttttgcagcagcagtcgcttcacgttcgctcgcgtatcggtgattcattttgctaaccagtaa

SEQ ID NO: 20052 - DNA, 1368 bp, Homo sapiens
  SIMILAR (162)..(458): 631254mologous to Homo sapiens high mobility group protein 14,accession number J02621,Smith-Waterman Score=280.
  misc_feature (1)...(1368): n = a,t,c or g
ccgcccccgctgtgggtctcagcagctcgggcggcgggaggagtggcagcggcaaggcagcccggtttcgcgaaggctgtcggcgcgccgcggcccgcaggcacccggcacgcgccttccccgcaggcacccggcacgcgccctccctgccgccaggatgcccaagaggaaggtcatctccaccgaaggggccgccaaggaagaancccaagaggacatcggcgagtttgtcagctaaacctcctgcaaaagtggaagcgcagccaaaaaaggcagcagcgaaggataaatcttcagacaaaaaagtgcaaacaaaagggaaaaggggagcaaagggaaaacaggcccgaagtggctaacccaagaaactaaagaagacttaccttgcggaaaacggggaaacgaagacttgaggagagtccagcctcttgattgaagcaggagagaaaagaagccaagtctgattaataaccatataccatgtcttatcagtgggtccctgtctcccttcttgtacaatccagaggaaatatttttatcaactattttgtaaatgcaagttttttacgtagctctagaaacatttttaaagaaggagggaatccccccctcatccccatttttttaaagtgtaaatgctttttttttaagaaggtgaaatcatttgcctggttgtttattttttggtacaaccagaaaaatagtgtggggatatttgaatttatggggaggctctgactgtctccgggtgtccagcttaaccattcccacagatgggggggttagttttttatatccctataaatccaaagcatatttaaatgggccactctggagtccagtccctgccatttaatgtccttgaaccattttaaattacttcctattacccatgttggttttttaggtaggaattggtttccctaaagggaaaccccactcttttgaaaacatggctcttctctgcccaagaattggggtgccactctgtaaccatctttggttgtggtagtcccgggtttccctaataactttggttactgtgctgtgaaaggattacaggatttggaccatgtagtgtacgtgctatctgcagttgtgacttggtggggccgtaatgtaacagctgaccaaccgtgaagatactgggtactttgatagcctcttaaggaaaaatttgcttcccaaattttaagctggaaagtcactggaataactttaaaaaaggnaattacaatacatggctttttagaatttcgctacgctcatgttaagatttgtgtacaaaattgaaaagtctctactgatcctcaacacaataaaatctcagccatgaaaatattttgaagcacatggaaaaaaaaaaat

SEQ ID NO: 20053 - DNA, 3632 bp, Homo sapiens; identical to SEQ ID NO: 7705
  SIMILAR (3303)..(3157): 341254mologous to Mus sp. alpha 2(XI) collagen,accession number S54563,Smith-Waterman Score=74.
  misc_feature (1)...(3632): n = a,t,c or g

SEQ ID NO: 20054 - DNA, 2679 bp, Homo sapiens
  SIMILAR (721)..(1089): 821254mologous to Homo sapiens Human signal peptide- contianing protein (SIGP) (clone ID 1273453),accession number Y21842,Smith-Waterman Score=486.
atgtaccaagaattaaaagatgaagatgatgaagatgattgtttcatacttgagaaagcagctagagggaaaaggcctatttttgaatgtttttggaatggacgattaataccatatacatcagttgaagactttgactggtgtactcctcctaagaagagagggcttgcaccaattgaatgctacaataggatatctggtgcattattcactaatgacaaattccaggtcagcacaaataaattgacgtttatggatcttgagctaaaattgaaagataagaacaccctttttacaaggattttaaatggacaggaacagcgaatgaaaattgacagagaatttgctttgtggctgaaggactgtcatgagaagtatgataaacaaataaaatttacactttttaagggagtaattacacgtcctgatcttccttctaaaaagcaaggtccctgggcaacatatgcagcaatagaatgggatggaaagatatacaaagcaggacagctggaacctcaggcactatatgatgaagtaagaactgtgccaattgcaaagctggataggacagttgctgagaaagctgttaaaaaatatgtagaagatgaaatggcaaggctccctgatagattgtcagtaacttggcctgaaggagatgaattattgcctaatgaggttaggcctgctggaacccctattggtgcgttaagaattgaaatactgaataaaaaaggggaagcaatgcaaaagcttccaggaacaagccatggagggtcaaagaaactcctggttgagctcaaagttattttacattatcttcttcagcagtatcgttctgctgtgtgcaaactagacagtgtgaataaggatcttaacagtcaattagagtaccttcgcactccggatatgaggaagaaaaagcaagaacttgatgaacatgagaaaaatctcaaactaatagaggaaaaactaggtatgactcccatacgtaagtgtaatgactcattgcgtcattcaccaaaggttgagacgacagattgtccagttcctcctaaaagaatgagacgagaagctacaagacaaaatagggcacaagcaccagcccttgcaggggttgcaaggcagttctcaggccccgaaggaatgctccagggaggagcagagcaaccactgccatgccaaagatccagcatggggaaagtggggtcgctagggctccacaacctggcaggtgatagtgggacccggttctctacagttttgacctggttggattccctcctaccatctgctgctggcagcaagctgaaacagccagccaagtcacaggcagtctgtcctcagattgtgaatctgtctcaggctgcaaaacgtttctgtgcagcccgctgtgacttaggatcgggaatggctgccttctatttgtaccacccaggtctgggagtatgggtggagcacttcccactgttcccaatgctctccaagtcagatccagtgcttgaaaatattcagaagttggggaattataccttgaaattacaagttgtgttgaatgaaagtaatgcagacacttatgcaggaagaccactaccatctaaagcaattaagttttctgttaaagagggtaagccagagaaattttcatttggtcttctggatcttccttttcgtgttggagttccatttaatatccctctggagtttcaggatgaatttggtcataccagtcaactagtaactgatattcagccagttcttgaagcaagtggtttatctttacattatgaagaaataaccaaaggaccaaattgtgtaattcgaggtgttacagccaagggccctgtaaactcttgtcaaggcaagagttgtaaagatgtggcacctgtggagaagactattaagttgcttcccagtagccatgttgcaagactacaaatattcagtgtagaaggacaaaaggcaattcagatcaaacatcaggatgaggttaattggatagcgggtgatattatgcataatcttatttttcaaatgtatgatgaaggagaaagagaaatcaatataacatcagctttagcagaaaaaattaaagttaattggactcctgagattaacaaagaacacttgctacagggtctgcttcctgatgtgcaagtaccaacatctgtaaaagatatgcgctattgccaggtttcattccaagatgatcatgtgtctttggaaagtgcgtttacagtaagcatgttggaactacttcaattaatggtgtcactaaagacttctaacttgttaaacaatttcagaccacttcctgatgaacctaaacatttaaaatgtgaaatgaaaggaggaaaaacagtacagatgggccaagagcttcaaggagaagtagttataataattacagatcagtacggaaatcagattcaagcattttcaccaagttctttatcttctttgtcaattgctggggttggacttgatagctcaaatttgaaaacaacctttcaggaaaacacacagagtataagtgtaagaggcatcaaatttattccaggtcctcctggaaataaggatctttgttttacttggcgtgagttttctgactttattcgagtgcaactaatttctggacctcctgctaaacttctccttatagactggccagaactaaaggag

SEQ ID NO: 20055 - DNA, 1470 bp, Homo sapiens
  SIMILAR (25)..(612): 261254mologous to Homo sapiens kinetochore protein CENP- H,accession number AB035124,Smith-Waterman Score=96.
atgttttacaatgatgttaagaagcagcaacaaatggcagcacttacaaaagaaaaggaccaattatctcagtctattgttatgtataaaagtttatttgaagccagccaacagcttcttaatgaaatgaaatgtcaagttgaagaagcaagattaaaagaggcccaattgcgaaatgaactaaaaatacataatattgacattcctacaacacaacaggtgccacacattgaagcacttctgaaaagaaagctatcagaacaagaagaactgaagaaaaaacctagaagatcgtgtactcttccaaactatactaaaggcagtggagatgttttgggaaagagttgtaaagatgtggcacctgtggagaagactattaagttgcttcccagtagccatgttgcaagactacaaatattcagtgtagaaggacaaaaggcaattcagatcaaacatcaggatgaggttaattggatagcgggtgatattatgcataatcttatttttcaaatgtatgatgaaggagaaagagaaatcaatataacatcagctttagcagaaaaaattaaagttaattggactcctgagattaacaaagaacacttgctacagggtctgcttcctgatgtgcaagtaccaacatctgtaaaagatatgcgctattgccaggtttcattccaagatgatcatgtgtctttggaaagtgcgtttacagtaagcatgttggaactacttcaattaatggtgtcactaaagacttctaacttgttaaacaatttcagaccacttcctgatgaacctaaacatttaaaatgtgaaatgaaaggaggaaaaacagtacagatgggccaagagcttcaaggagaagtagaaaatattcagaagttggggaattataccttgaaattacaagttgtgttgaatgaaagtaatgcagacacttatgcaggaagaccactaccatctaaagcaattaagttttctgttaaagagggtaagccagagaaattttcatttggtcttctggatcttccttttcgtgttggagttccatttaatatccctctggagtttcaggatgaatttggtcataccagtcaactagtaactgatattcagccagttcttgaagcaaggcgtggcctgtttaagagcttgtcagcatctgtggccttcacccaaaggtctgaaattgattccaagtgggatgtcacggccacttctcttgatgtacaggatctaaaagcaacactgagaacagtggatgggcagctacatgctgaagtgtggctggaggatgtggcacctgggaagagaaagcacagggtgaccaaagtccttgaagagggaggggtgccggtgctgcaaaccagtgaaagcccaggtcaagggaagagcaggagaaaggatgtcagtcattcttgtgacttttgtaggagaacttgggccattaaaaaagaaaggaagtaa

SEQ ID NO: 20056 - DNA, 379 bp, Homo sapiens
  SIMILAR (291)..(169): 341254mologous to Escherichia coli ORF_o81,accession number L19201,Smith-Waterman Score=67.
cagctgtcctgctttgtatatctttccatcccattctattgctgcatatgttgcccagggaccttgctttttagaaggaagatcaggacgtgtaattactcccttaaaaagtgtaaattttatttgtttatcatacttctcatgacagtccttcagccacaaagcaaattctctgtcaattttcattcgctgttcctgtccatttaaaatccttgtaaaaagggtgttcttatctttcaattttagctcaagatccataaacgtcaatttatttgtgctgacctggaatttgtcattagtgaataatgcaccagatatcctattgtagcattcaattggtgcaagccctctcttcttaggaggagtacaccagtcaaag

SEQ ID NO: 20057 - DNA, 924 bp, Homo sapiens
  SIMILAR (310)..(648): 991254mologous to Homo sapiens Human signal peptide- contianing protein (SIGP) (clone ID 1273453),accession number Y21842,Smith-Waterman Score=598.
atggttatagttgaagtcctgcctaatcaacctgtgaagttagtacctaaaattaaaccacctacaccagctgtttcaaatgttcgctcagttgccagtaggaccttggtcagagatctacatcttagtatcacgttttcaggtgctccaaaccttccagtctatgttgtagattgcagtagttctggaaccagtattttaacaggatctgcaattcaagttcagaatattaaaaaagaccagacgcttaaagcaagaattgaaatacctattgcacatctagcacaaattgaagatgatagagctgcgatggttatttcttggcatctggcaagtgacatggactgtgtagtcaccctaaccactgacgctgcacgtcgtatctatgatgaaacccaaggtcgtcagcaggtgttgccccttgattctatttacaagaagactcttccagattggaaaagatctctacctcatttccgaaatggaaaattgtattttaaacccattggagatccagtctttgctcgagacttgttaacatttccagataatgtagaacattgtgaaacagtatttggtatgctgttaggagacaccattattttggataatctggatgcggccaatcattatagaaaagaggacgttttgcagcctgagacagattcacaatctgaggacagactgcctgtgacttggctggctgtttcagcttgctgccagcagcagatggggcagagtacaggactgggacccgtggaagttacacagtccagcccatcatctaggacatcagagtacttctggttaacaaagcattttcgaaccaggaatttggctcatttgaatgctccctactttgtttcagccctcatcaccattttaaaacaggaaggaaagaagaaaacttactggcatgtttag

SEQ ID NO: 20058 - DNA, 726 bp, Homo sapiens
  SIMILAR (368)..(514): 341254mologous to Mus sp. alpha 2(XI) collagen,accession number S54563,Smith-Waterman Score=74.
  misc_feature (1)...(726): n = a,t,c or g
tttcgtggaggctgagtctttcgcggctgcctgcgccctgcgggtagtcctcagaggccgaggcgggagagcagggctcgggtggcagcgggggaatctcccgaagagctgtgttctctctgtggaaagggccccgctgccttcccgcctctccaggatcccgactgagcttgtaggtgccgcgccggctgactgagccctctctggctgggtcgcagtggacgcggcgtgcgggaagcttcaggccggcggtactcgccgggcgcagagtccaccaaagcgagcacgtgggtccctctgccgagaaaataggcgctacgagagccggcgcccctttttcctcctcatttcttagtagtactgggtgggctccagcgtgggcccccgaggcaaagcgggtccgtgagaacgtcagaagggcgctctgtgacgtcacagcgtccccgccccccgcaccctctgggggccctggagcgccgacggcattcggggtacgggggtgactccagcgccctagttttaacgctgcctgcgcttcgcggtctcccacgtgcgtgtaaattngcaaaggattttgtccttcactggcataatattcatacatgccacttttaaccagtgtgtcatagtgaggtaagaagtcaattcgttctttcgtagctgtcagtagtaactgattgaccgactgtagcaggtataaggtgactccatctttaacagtttcat

SEQ ID NO: 20059 - DNA, 3183 bp, Homo sapiens
  SIMILAR (2110)..(3168): 771254mologous to Mus musculus Pro-Pol-dUTPase polyprotein,accession number Y12713,Smith-Waterman Score=1488.
atggcagaagacaaggaggagcaagtcccatcttacaccgatggcagcaggcaaagagagaatgaggaagacacaagagtgaaaacccctgataaaaccatcagatctcatgagacttattcactaccacgagaacagtatgggggaaactatgcccatgattcaattatctcccaccaggtccctcccacaacatgtgggaattatgggagtacaattcaagatgagatatgggtgggtgatcattcaggatatgttcgtccagtaccagtgccacgcagtttaaatagtgatatttcctattttggtgttgggggcaagcaagctgtcttctttgttggacaatcagccagaatgataagcaaacctgcagattcccaagatgttcacgagcttgtgctttctaaagaagattttgagaagaaggagaaaaataaagaggcaatatatagtggatatattagaaacagaaaggatgactacgacaaccatactggaattgatttggttggcactataatagccaccattaaaggctctaatgaggaagatactgataccccactttttattgggaaagttagaacacttgaattccccttcgtgaatggttcggctgaaatcatgctcatgccttcaaaccaacagcataaaacagatgagaaaggcagggctaatttgggagtattcagtgtttttgcccctaggggagagcatactcttcaggttaaagccatctataacaaaagtatcatagaaggacctataattaagttaatgattcttccagacccagaaaaacccgttcgtctcaatgttaaatatgacaaagatgcatccttcttagcagggggtcttttcactgctccaccactgccagcccagctcatgtcctcgctatcttgtgcctggattattgaatcagttcttaacagctggaggaagggatgcaacaaactcaggaaccagagagccctgcataagaaacaagacagagggaagcttccggaggatagagagcttcagcacactaagaaacagactaattgggcaggacttctgatccctgccatgaacaataacgtggatatgactgccagaaagctgcaaagagacctccagccttttaccagtgtgactgtgcattgcagaaagggaaatgaccagacatttgggggaccactggacgctggctctgagctgacattgattccaggggacccaaaacatcattgtggtcccccagttaaagtaggagcttatggaggccaagtaattaatggagttttagctcagccctcttatttggcttgtgcagaagacagatggatcttgagaatgacagtggactattgtaagcttaaccaagtggtgattccaattgcagctgctgtatcagatgtggtttcattgcttgagcaaattaacacatctcctggtacctggtatgcagccattgacttggcaaatgcctttttctccattcctgtccataaggcccagcagaagcaatttgccttcagctggcaaggccagcaatatacctttactgtcctacctcagtggtatatcaactctccagctttgtgtcataatcttattcggagagaccttgattgcttttcgcttccactagatatcacactggtccattacattgatgacattatgctgattggatccagtgagcaagaagtagcaaacacactggacttattcgtgagacatttgcgtgccagaggatgggaaataaatccaactaaaattcagggaccttctacctcagtaaaatttctagggttccagtggtgtggggcctgtcaagctattccttctaagatgagggataagttgctgcatttagtccctcctacaaccaagaaagaggcacaatgtctaacagctcttggcctgttactggctttggtggaaactgaacatttgactataagtcatcaagtcaccatgcgacctgaactgcctatcatgaactgggtgctttttgacccatctagccataaagtgggttgtgcacagcagcattccatcatcaaatggaagtggtatgtacatgattgggctcgagcaggtcctgaaggcacaaccacccctgtcatttcccaatggccccatgaacaatgtggccatggtggcagggatggaggttatgcatgggctcagcaatgtagacttccactcactaaggctgacctgaatacagccaccgctaagcgcccaatttgccaacagcagagaccaacactgagccctcaatatggcaccattcctcagggtgatcaaccagctacctggtggtgggttgattatatgggatctcttccatcatggaaagggcagaggtttgtcctcactggaatagatacttactctggatatgggtttgcctatcctgcatgcaatgcttctgccaagactgccatttgtggactcacggaatgccttatccaccatcatgatatcccacacagcattgcctctgaccaaggcactcactttatggctaaagaagtgcggcagtgggctcatgatcatggaattcactggtcttaccatgtttcccatcatcctgaagcagctggattgatagaatggtggaatggccttttgaagtcacaattacagtgtcaactaggtgacaatacttggcagggctggggcaaagttctccagaaggtcgtgtatgctctgaatcagcatccaatatatggtactgtttctcccatagccaagattcacaggtccaggaatcaagggctagaagtggcaccactcaccatcacccctagggatccactagcaaaatttttgcttccttttcctgcaacattacagtctgctggcctagaggtcttagttccagaggaaggaacgctgccaccaggagacacaatgattccattaaactggaagttaagattgccacccagacactttgggctcctcctacctttaaatcaacaggctaagaagggagttacagtgttggctggggtgactgacctggactataaagatgaaatcactctcctactccataatggaggtaaggaagagtatgcatggaatacaggagatccattagggcttctcttaatattaccatgccctatgattaaggtcaatgggaaactacaacagctcaagccagatcatcctagatga

SEQ ID NO: 20060 - DNA, 2329 bp, Homo sapiens
  SIMILAR (514)..(699): 981254mologous to Homo sapiens Human secreted protein, SEQ ID NO: 7552,accession number G03471,Smith-Waterman Score=307.
  misc_feature (1)...(2329): n = a,t,c or g
atgctgtactggtcagtcactgccagaccaattgacaagtcttcaggccaggtatctatgtgtgttattcgaaggccattcaaagctcaccattgtaaagcacaaatcctgttgtttgaaggagcaccggaaatattaaaggtggccatacataatagcacaaataagaagttacctgtggctttcttcaagctatttcgaggccgagccggcgtggggcggagggtcttcacggggtctttgggaccttcttggcaatctccccctctaaagccaggacagcacctccattccaactgtgtcactgtcttatacctagtgacatatctaggtctgaagttcactcgatacctgtggacagaagggatggcatctctctttactggctgccgttacaagcaacttccggcgctagacccaaataaagaggactcaggcatgcaggaccctgcctgctctccaggctggcccagaggggatgttggtctcctcagtccagatctgactgggggtcagctggaggagaggtggcagaggttgcagagccaggtcatctcggagctggatgcttgtaaggaatgcacgcagggggtccagagggaggtctccatggtggagggcagggtgtctcatatggagaaaacttgcagcaagctggactctatctcaggaaatcttcagaggatcaaggaggggctcaacaagcatgtcagcagcctgtggaactgtgtcaggcagatgaacggaacgctcaggtcgcattccagagacatttctggcctgaagaattcagtccagcagttctacagccacgtcttccagatttctactgatttgcaagatctggtcaaatttcagccatcagcaaatggagatcgaattcgaagtaatggaaagtttgggggccttcagaataaagctcctccaatggataaacttcggggaatggtatttggagctccagttccaaaacagtgtctgatcttaggggaacaaataggtgcgttaagaattgaaatactgaataaaaaaggggaagcaatgcaaaagcttccaggaacaagccatggagggtcaaagaaactcctggttgagctcaaagttattttacatttttggaagaaaataaacattaccgtgatactaagatgtagatctctgaccaaggtcctactggcaactgagcgaacatttgaaacagctggtgtaggtggtttaattttagataatgaacccagccaattctcagagcccaggaagactttgtccccaactggtacagcacaaccaagctggggggtagatccaaangaggggcctcaggaacttcaggaaaagaagatacaggtgctagaggagaaggttcttcgactcacaaggacggttcttgacctccagtcttcccttgctggagtgagtgaaaatctcaaacatgccactcaggatgatgccagtagaacacgggcaccagggctcagcagccagcaccccaagcctgacaccactgttagtggagacacagaaacgggccagagtcctggtgtcttcaacactaaggaatctggcatgaaggacatcaagtctgaattggctgaagtcaaagatactctaaagaacaaaagtgacaagctggaagagctggatggaaaagtgaagggctacgaagggcagctcagacagctccaggaagcagctcagggcccgacggtgaccatgacaaccaacgaactctaccaagcctatgtggacagtaagatcgacgccctgagagaggagctcatggagggcatggacagaaagctggctgacctgaaaaactcatgtgagtacaagctcactggcctccagcagcagtgtgatgactatgggagcagctacctgggagtgatagagctcataggggagaaggaaacaagcctgagaaaagaaataaataacctccgagcccggctacaggagccttcagcccaggcaaattgctgcgacagtgaaaagaatggtgacattggtcaacagatcaagacattggaccagaaaatcgagagagttgctgaagccaccagaatgctgaatggaagactggacaatgagtttgaccgccttatagttccagagccagatgtggattttgatgcaaaatggaatgaactcgatgcaaggatcaatgtgacggagaagaacgctgaagaacattgcttttacattgaggaaacccttcggggcgccattaatggagaggtgggtgacttgaagcagcttgttgatcagaaaatacagtctctggaagaccgtctggggagcgttctcctacagatgaccaataacactg

SEQ ID NO: 20061 - DNA, 2298 bp, Homo sapiens
  SIMILAR (382)..(885): 1001254mologous to Homo sapiens Human signal peptide- contianing protein (SIGP) (clone ID 1273453),accession number Y21842,Smith-Waterman Score=900.
atgttttacaatgatgttaagaagcagcaacaaatggcagcacttacaaaagaaaaggaccaattatctcagtctattgttatgtataaaagtttatttgaagccagccaacagcttcttaatgaaatgaaatgtcaagttgaagaagcaagattaaaagaggcccaattgcgaaatgaactaaaaatacataatattgacattcctacaacacaacaggtgccacacattgaagcacttctgaaaagaaagctatcagaacaagaagaactgaagaaaaaacctagaagatcgtgtactcttccaaactatactaaaggcagtggagatgttttgggaaagattgcacatctagcacaaattgaagatgatagagctgcgatggttatttcttggcatctggcaagtgacatggactgtgtagtcaccctaaccactgacgctgcacgtcgtatctatgatgaaacccaaggtcgtcagcaggtgttgccccttgattctatttacaagaagactcttccagattggaaaagatctctacctcatttccgaaatggaaaattgtattttaaacccattggagatccagtctttgctcgagacttgttaacatttccagataatgtagaacattgtgaaacagtatttggtatgctgttaggagacaccattattttggataatctggatgcggccaatcattatagaaaagaggttgttaaaattacacactgtcctacactgctgaccagagatggagatcgaattcgaagtaatggaaagtttgggggccttcagaataaagctcctccaatggataaacttcggggaatggtatttggagctccagttccaaaacagtgtctgatcttaggggaacaaatagtgattaatggaagagatttacagaaccctattattgttcaactttgtgatcagtgggataatccagcaccggtacaacatgttaaaataagtcttacaaaagctagcaatttaaagctcatgccttcaaaccaacagcataaaacagatgagaaaggcagggctaatttgggagtattcagtgtttttgcccctaggggagagcatactcttcaggttaaagccatctataacaaaagtatcatagaaggacctataattaagttaatgattcttccagacccagaaaaacccgttcgtctcaatgttaaatatgacaaagatgcatccttcttagcagggggtcttttcactgattttatgattagtgttatttctgaagatgacagtatcattaaaaacattaatccagcacgtatttccatgaaaatgtggaagctgtctaccagtgggaaccgacccccagcaaatgttatagttgaagtcctgcctaatcaacctgtgaagttagtacctaaaattaaaccacctacaccagctgtttcaaatgttcgctcagttgccagtaggaccttggtcagagatctacatcttagtatcacggatgactacgacaaccatactggaattgatttggttggcactataatagccaccattaaaggctctaatgaggaagatactgataccccactttttattgggaaagttagaacacttgaattccccttcgtgaatggttcggctgaaatcatgatgcttcctgcccttgaacattggactccaagtccttcagttttgagactcggactggctctccttgctcctcaagcttgcagacagcctattgtgggaccttgtggatcgtcttgcagacagcctactgtgagaccttgtgatcatgttgttaaaattacacactgtcctacactgctgaccagagatggagatcgaattcgaagtaatggaaagtttgggggccttcagaataaagctcctccaatggataaacttcggggaatggtatttggagctccagttccaaaacagtgtctgatcttaggggaacaaatagcacaaattgaagatgatagagctgcgatggttatttcttggcatctggcaagtgacatggactgtgtagtcaccctaaccactgacgctgcacgtcgtatctatgatgaaacccaaggtcgtcagcaggtgttgccccttgattctatttacaagaagactcttccagattggaaaagatctctacctcatttccgaaatggaaaattgtattttaaacccattggagatccagtctttgctcgagacttgttaacatttccagataatgtagaacattgtgaaacaggtaaaagacattatggtgactttacttttgtacagatgttaaatttgtga

SEQ ID NO: 20062 - DNA, 5005 bp, Homo sapiens
  SIMILAR (1746)..(2546): 1001254mologous to Homo sapiens Human signal peptide- contianing protein (SIGP) (clone ID 1273453),accession number Y21842,Smith-Waterman Score=1416.
gaggaaaaacagtacagatgggccaagagcttcaaggagaagtagttataataattacagatcagtacggaaatcagattcaagcattttcaccaagttctttatcttctttgtcaattgctggggttggacttgatagctcaaatttgaaaacaacctttcaggaaaacacacagagtataagtgtaagaggcatcaaatttattccaggtcctcctggaaataaggatctttgttttacttggcgtgagttttctgactttattcgagtgcaactaatttctggacctcctgctaaacttctccttatagactggccagaactaaaggagtccattccagtgattaatggaagagatttacagaaccctattattgttcaactttgtgatcagtgggataatccagcaccggtacaacatgttaaaataagtcttacaaaagctagcaatttaaagctcatgccttcaaaccaacagcataaaacagatgagaaaggcagggctaatttgggagtattcagtgtttttgcccctaggggagagcatactcttcaggttaaagccatctataacaaaagtatcatagaaggacctataattaagttaatgattcttccagacccagaaaaacccgttcgtctcaatgttaaatatgacaaagatgcatccttcttagcagggggtcttttcactgattttatgattagtgttatttctgaagatgacagtatcattaaaaacattaatccagcacgtatttccatgaaaatgtggaagctgtctaccagtgggaaccgacccccagcaaatgcagaaacatttagttgtaataaaataaaagataatgacaaagaagatggctgcttctatttcagggataaagtaattcctaataaagtggggacatattgtatccagtttggttttatgatggataaaacaaatattctcaacagtgaacaggttatagttgaagtcctgcctaatcaacctgtgaagttagtacctaaaattaaaccacctacaccagctgtttcaaatgttcgctcagttgccagtaggaccttggtcagagatctacatcttagtatcacggatgactacgacaaccatactggaattgatttggttggcactataatagccaccattaaaggctctaatgaggaagatactgataccccactttttattgggaaagttagaacacttgaattccccttcgtgaatggttcggctgaaatcatgagtctggtgctggcagaaagtagtcctggaagggatagtactgaatattttattgtatttgagccccggctaccacttttatcaagaaccttagaaccatatatcctaccgttcatgttttacaatgatgttaagaagcagcaacaaatggcagcacttacaaaagaaaaggaccaattatctcagtctattgttatgtataaaagtttatttgaagccagccaacagcttcttaatgaaatgaaatgtcaagttgaagaagcaagattaaaagaggcccaattgcgaaatgaactaaaaatacataatattgacattcctacaacacaacaggtgccacacattgaagcacttctgaaaagaaagctatcagaacaagaagaactgaagaaaaaacctagaagatcgtgtactcttccaaactatactaaaggcagtggagatgttttgggaaagattgcacatctagcacaaattgaagatgatagagctgcgatggttatttcttggcatctggcaagtgacatggactgtgtagtcaccctaaccactgacgctgcacgtcgtatctatgatgaaacccaaggtcgtcagcaggtgttgccccttgattctatttacaagaagactcttccagattggaaaagatctctacctcatttccgaaatggaaaattgtattttaaacccattggagatccagtctttgctcgagacttgttaacatttccagataatgtagaacattgtgaaacagtatttggtatgctgttaggagacaccattattttggataatctggatgcggccaatcattatagaaaagaggttgttaaaattacacactgtcctacactgctgaccagagatggagatcgaattcgaagtaatggaaagtttgggggccttcagaataaagctcctccaatggataaacttcggggaatggtatttggagctccagttccaaaacagtgtctgatcttaggggaacaaatagatcttcttcagcagtatcgttctgctgtgtgcaaactagacagtgtgaataaggatcttaacagtcaattagagtaccttcgcactccggatatgaggaagaaaaagcaagaacttgatgaacatgagaaaaatctcaaactaatagaggaaaaactaggtatgactcccatacgtaagtgtaatgactcattgcgtcattcaccaaaggttgagacgacagattgtccagttcctcctaaaagaatgagacgagaagctacaagacaaaataggattataaccaaaacagatgtatgagaggtgacagagagaagaggccattggtctcagtaagaatgccctgctttctgcatctctgtttcagaagaccaagagggtgacttaccagactgagtatttctggggacaatacaagtacctgggcatgaatttccatttcgattcagatgggactggaaacaaccattcaattttatgaatcttactggacattatggatttactggaattattccagacattatgccctttggttgtcactaccttgcaaatgtgtaagaggaaaatgtgctaatgtggcagtgactgtaaaactggcacatggcatttattaatcctgaagaaaagtacatgtactatttttcagtataaatataatgaacatgtcagaactatttcttgaaaacctttttattacttttgcgtgaatttatttaacaaagatgttttgtcttttgtgtaagggaggttctagaggctagatgtttaattgtaaatatgtgaggaaactcaatgcagaattcaggataaaaattttaaaagcacaggtatttgggaattgaaatgttaagatacccagaacaacattaaatcaatgagtgaacttgtgacagtggtagcatttcaaatttcaaaagacttatcctgtgtgtgtgtgtgtgtgtatatatatatatatatatataaatatatatatataaaatattcagcagcaccaagttttataactattgtttgtttgactttattaatactagaatatgtagtctcagccttaattttacatttacattattttgtaattttttattactatttttaaggggttaaagagaacatacattctcacattagtgtactttctggtagaaagttgctgcaaaaacatttgaaatgtatattaacctaatgtatgtcatatatatgtctttgtgtaagttcaagactattgatctgtgaagttattttgtaaggacatacatttggtaagtaagtttgtgtcccaggaaatgtatgtgtttttaaaccctttctaaatatgcaggccattaataaataagattgtttcttccctactgaatagataagtgtttttcttttttaaaattggaagcttcataaaagttatcttgttaaaaaacgatgatgatgttaacctatctttataattggaaattatttaaactgtttgttgttacagaagaaacaaaatggtaattacagaattagctgtggggaagattggctcccatggtactacaggttgagtatcccttattcaaaatggttgggacctgaagtgttttggattttggttttttgtggggtttttaaattattattttggaatatttgcattatatttaccaatttagcatccctaatccaaaaatctttcattagaaattggaaatgcttcaatgagcatttcccttatgtgtcatatctgcgctcaaatgttttgaattttggaacatttcttgtttctgacttttagattagggatactcaccccgtaccaatatttggagtccttagacattagattatatgaaaatgattgattgataggtaagaaaggttaaagagaaatgactttttaggaactagacttgaacgtataattaatatgtggaactagtttgcttttataattcattgtatcaagaaggagtcatgttttaaatccaaggcattgagactatctagaagcaaaaaagttggttttaaaaattctttttattagaagtgtgtttaaaaacatgtctttttttcccttgagcgacagtggcctcactacattgcccaggctagtcttgaactcctgggttcaagcagtcttcctgccttggcctcctaagtagcagggattacaggcatgcacccacatgccaatttttattgcttaaaatggcgagttctatggatattatctagccccaagcccatatctgtacacttttgttcattttataataccagaaagaatgttctatcagtaaaagaaggttttaagtatgaatctccatttttgtggagtttttctaccctgtaaaaattaactttgtggttcccagtaattacagtaaggagtttttctatattttcacagttggatttatctaaggatatttctcagcatattaaggaatccttttctacatttgagcaaatactgaggttcatgttgtaccaaataataataaattgcttttgtgtttaatatgtaacacgtaagaacaattgaaattttcttctaagatttaatactagtcttttagtataaaggaatgtaactggagaaaaaaattaatgctacagccatttatcctgtgttatgtgttatataatctgaaatttgtcacaatgttacaatcaggaagttttttttctggtttcttcttccaaaggaaaataatagcctacttgtattttgaagtaactgaaataaaactctctccaagcctttttgc

SEQ ID NO: 20063 - DNA, 3682 bp, Homo sapiens
  SIMILAR (2792)..(3145): 811254mologous to Homo sapiens Human signal peptide- contianing protein (SIGP) (clone ID 1273453),accession number Y21842,Smith-Waterman Score=479.
  misc_feature (1)...(3682): n = a,t,c or g
aatacacgtgtgcttgtataatctggtattacaaagaaatgagaaattgccctgatgacgaatctccagctctaatctcaatttgctgaagtagagaggcaattcatcttacccattaactaagaattagaaaaacaatttgtgtttttctttgagtcatttaactcaaataccactatataaaggaatagaatgagacattcgcatgaatttgaaaggtaaataaaacatcagacttcaaagaaattccattagaatcgggggttacttttttgttttcttttcctccacctccaccttaaggaacatgaacggcatttggccacagtttatgtctttccaattttatcttgcaccatctaccgctcagttctcctcacttccagccaaacaataatttacacgcacgtgggagaccgcgaagcgcaggcagcgttaaaactagggcgctggagtcacccccgtaccccgaatgccgtcggcgctccagggcccccagagggtgcggggggcggggacgctgtgacgtcacagagcgcccttctgacgttctcacggacccgctttgcctcgggggcccacgctggagcccacccagtactactaagaaatgaggaggaaaaaggggcgccggctctcgtagcgcctattttctcggcagagggacccacgtgctcgctttggtggactctgcgcccggcgagtaccgccggcctgaagcttcccgccgccgcgtccacgcgacccagccagagagggctcacggcggacggcggcgggcctggtggggcctctgtggggactgaggaggatggcggaggcgtcggccacaggacggtgtacttgtttgatcggcgcgaaaaggagtccgagctcggggaccggcctctgcaggtcggggagcgctcggactacgcgggatttcgcgcgtatgaaactgttaaagatggagtcaccttatacctgctacagtcggtcaatcagttactactgacagctacgaaagaacgaattgacttcttacctcactatgacacactggttaaaagtggcatgtatgaatattatgccagtgaaggacaaaatcctttgcgatatgttcgtccagtaccagtgccacgcagtttaaatagtgatatttcctattttggtgttgggggcaagcaagctgtcttctttgttggacaatcagccagaatgataagcaaacctgcagattcccaagatgttcacgagcttgtgctttctaaagaagattttgagaagaaggagaaaaataaagaggcaatatatagtggatatattagaaacagaaagccctctgattctgttcacattacaaatgatgatgaaagatttctacatcatcttatcatagaggagaaggaaaaagatagctttactgctgtggttatcacaggggtacaaccagaacacatacagtacttgaaaaattatttccacctttggacacgacagttagcgcatatttatcactactatattcatggcccaaaaggaaatgaaatacgaacatcaaaagaagttgaacctttcaacaatattgatattgaaatttctatgtttgaaaaagggaaggtacctaagattgtcaacctaagggaaatacaagacgacatgcagacgttgtatgtaaacacagcagctgatagttttgaattcaaagctcatgttgaaggagatggtgtagtggaagggattatccgttatcatccattcttatatgatagagaaacttaccctgatgatccatgctttccatcaaaattaaaagatgaagatgatgaagatgattgtttcatacttgagaaagcagctagagggaaaaggcctatttttgaatgtttttggaatggacgattaataccatatacatcagttgaagactttgactggtgtactcctcctaagaagagagggcttgcaccaattgaatgctacaataggatatctggtgcattattcactaatgacaaattccaggtcagcacaaataaattgacgtttatggatcttgagctaaaattgaaagataagaacaccctttttacaaggattttaaatggacaggagtggaaagagctgtcgatggagggctacccattaccctcccctcctccacaaaggagctgtcacctccccttaataggcaaacaactcaggggccatccccatttgtttcttaaacctgcaagtttctggtgggtggagtctcctgcttcagaacaaatgatatctttctcccaagtcagaggtctcaaggctcaacaccacgcagaagctgccaaggtgtgggacttccaccctctgaagccacagcccaagctgtacgttggcccctttcagccatggctggagtggctgggaacagggcaccaagtccctagactgcacactgcagatgttaagaagcagcaacaaatggcagcacttacaaaagaaaaggaccaattatctcagtctattgttatgtataaaagtttatttgaagccagccaacagcttcttaatgaaatgaaatgtcaagttgaagaagcaagattaaaagaggcccaattgcgaaatgaactaaaaatacataatattgacattcctacaacacaacaggtgccacacattgaagcacttctgaaaagaaagctatcagaacaagaagaactgaagaaaaaacctagaagatcgtgtactcttccaaactatactagaaggcagtggagatgttttgggaaagattgcacatctagcacaaattgaagatgatagagctgcgatggttatttcttggcatctggcaagtgacatggacttgtgttagtcacccttaaccacttgacgcttgcacgtcgttattctnatggatggaaacccccagggtcgttcaggcaggtgtttgccccttgattctatttacaagaagactcttccagattggaaaagatctctacctcatttccgaaatggaaaattgtattttaaacccattggagatccagtctttgctcgagacttgttaacatttccagataatgtagaacattgtgaaacagtatttggtatgctgttaggagacaccattattttggataatctggatgcggccaatcattatagaaaagaggttatagttgaagtcctgcctaatcaacctgtgaagttagtacctaaaattaaaccacctacaccagctgtttcaaatgttcgctcagttgccagtaggaccttggtcagagatctacatcttagtatcacggatgactacgacaaccatactggaattgatttggttggcactataatagccaccattaaaggttctaatgaggaagatactgataccccactttttattgggaaagttagaacacttgaattccccttcgtgaatggttcggctgaaatcatgctttttgatgaaacacaaggaaaacctgctgttgcagtgatagataatggaagaggaatgacctctaaacagcttaacaactgggccgtgtataggttgtcaaaattcacaaggcaaggtgactttgaaagagctctttttgcaaaacattcaggagtggaatctagtggagttatatatcagaatgtgcttgtagaaaatatcctgaatgaggatgtcacagggaaaacaaaatgtgctaaaagccatcagacataa

SEQ ID NO: 20064 - DNA, 530 bp, Homo sapiens
  SIMILAR (248)..(129): 411254mologous to Gallus gallus collagen,accession number X00824,Smith-Waterman Score=74.
gagctgaagaggcgagatgccaggcgaacggctgaaggcagaggtctttttacccccatctcccttgtctcccacacaagttgtagggcccctccaccgtgtctggtcctgaattgggaatgccagctcccagcgcggcgaggcccaggtccggtcctaggtgagtttttctctccggctggaagactcgacgccgtggataccagggacccgagccctccggggctgctggctttggagggatttccagacgttgcagtcggggtgagcggagagactaagaagtacaggggactagagaaagcagatgaggaaggggagagttcaataccgtgcacgcgaccacaaagttgttttcgacgagaattcgatgggaagcggaggaacgaatttttcccacattcagaggccaagccaggaactgtaaaacgttcacctttgaaaggtcccaccgagattcgaactcggattgctggattcaaagtccagagtgctaaccattacaccatgggaccaaccacaagggtaca

SEQ ID NO: 20065 - DNA, 4021 bp, Homo sapiens
  SIMILAR (1921)..(3378): 391254mologous to Mus musculus transposase-like protein,accession number AF205599,Smith-Waterman Score=1002.
atgaatcctattagggaaatgcaagtgagtgggatagcattgaagggaacaatgaagggttggactgaacttcccaaaagtcctgtctggacccaaggtaacaaaggccgtaattatttcactaatcttgctctttctctcctctttgaagatgataccaagttgaatccttatgcaggaggagatgcaatccgagttcgaatctcggtgggacctttcaaaggtgaacgttttacagttcctggcttggcctctgaatgtgggaaaaattcgttcctgcgcttcccatcgaattctcgtcgaaaacaactttgtggtcgcgtgcacgggtcatttttgtggttttccatgatgtctcaaagcatgggtggtgataacctcagtagcttagatactaatgaagcagaaattgaaccagaaaacatgagagaaaagttcttcagaagcttagcaaggttactggaaaacaaaagtaataatactaagatattttctaaagcaaagtactgtcagttgataaaggaagtgaaagaagctaaagctaaggcgaaaaaggaatcagttgactaccgtcgcttggctagatttgatgttatccttgtacaaggaaatgagaagctaattgaggctgtaaatggggaaacagataaaatacggtattacttacacagtgaggacttatttgacattctgcataatacacatctcagcattggacatggtggacgtactcgcatggagaaagagttacaagcgaaatacaagaacatcacaaaagaagttataatgctgtatctgaccctctgtaaaccatgccaacagaaaaattcaaaactcaagaaggttctaacatcaaaatcaattaaggaagttagttcaagatgccaagtagatcttatagacatgcagttgaatcctgatggggagtacagatttattttgcattatcaagatctctgtacaaagttaacttttttgcggtcattaaagtctaaaaggcctacggaagttgcacatgctcttttagatatatttacaattattggagcacccagtgtcctacaatctgacaatgggagggaattttcaagccaggttgtcagtgaactcagtaatatttggccagaattgaaaattgtccatgggaagtctcagacctgccaaagccagagttctgcagaacaaactgaggatatccgaaagaggattttctcctggatgcaaactaacaactcatcacactggactgaatttttgtggttcattcagatgtcccaaaatcagccctatcacagaagcatgcaacagactccatgtgaaagtgcatttagctctgaagctaaactgggcttgtcccattctcagctaactgaagaacttgttgccagcttgcatacagaaaatgaattagatcaggctgacaaagagttagaaaatactttaagagcccagtatgaagaaaacattgagactggaacagacagtagtgatattgaagagaatctttctgtcactcctaaggtggctgaaaaaagccctcctgagagcagactaagatttttatcctgtgtagtttgtgaaaaagaatgcacaggtgttaatagttgtatatcatgtgatggaaatatccatgcaatttgtggagtgccctctcaacatgggactgagggctgtggtcggcaaataacttgtagcctttgctatgaaaccagcacaatgaaaaggaaacatgatgagattcaaagaagtttgcctgttaaaccttccaaaatgctaaagccatcagggacaccattttcaccagacaaagtaggagattggatggcgaaacaagcttcactggacttttttgtcaagaaaagacatgccttttctgaacacagtagtagtaataaaagaaatgttaacaatagaagttatcctgaagaagggaaaaccaaaagagttcatgctagtttcactcggaaatatgatccttcatatattgagtttggttttgtagctgtaattgatggtgaagtactaaaaccacagtgtattatttgtggagatgtactggctaatgaagcaatgaaaccatcaaaacttaagcgacatttatattcaaaacataaagaaataagttcacaaccaaaagaattctttgaaagaaagagtagtgaattgaaaagccaaccaaagcaggtgttcaacgtttctcatataaacattagtgctttgcgggcttcatataaagtagcacttccggttgccaagtctaaaacaccatacacaattgctgagacactagtgaaagactgcatcaaagaagtttgcttggaaatgttgggtgaatctgcagcaaagaaggtagctcaggtaccactttccaatgacaccatagctcgacgtattcaggaactggctaatgatatggaagatcaactcatagaacaaataaaactagcaaagtatttttcattgcaacttgatgaatgcagagatattgctaacatgataattcttttagtctatgtgaggtttgaacatgatgatgatataaaggaagagttctttttttcagcctctttgcctacaaacacaactagctcagaactgtatgaagctgtaaagaattatattgttaacaaatgtggtttggaatttaaattttgtgtaggagtatgttctgatggtgcagcttcaatgacaggaaaacattctgaagtggtaacccagattaaggaacttgcgccagaatgtaaaacaacacattgcttcattcatcgagaaagtcttgccatgaaaaaaatatcagctgaactaaatagtgtacttaatgatatagtaaaaattgtgaattatataaaatctaattcattgaattcaagattattctctttattatgtgataatatggaagctgatcataagcaactgttactgcatgctgagatacggtggttatcacggggaaaagttctgtcaagaatgtttgaaatacgaaatgaactcttagtgtttctgcaaggcaagaaacccatgtggtcccaactttttaaagatgtgaattggacagccagacttgcttatttgtctgatatcttcagtatttttaatgatcttaatgcttctatgcaagggaagaatgcaacttatttttcaatggcagataaagttgaaggacaaaaacagaagttagaagcttggaaaaacagaatttctacagattgttatgacatgtttcataatttaacaacaattatcaatgaagtaggtaatgatcttgatattgcacatctgcgaaaagttatcagtgaacatcttacaaatttgttagaatgttttgaattttattttccatcaaaagaagatccacgcataggaaatttgtggatcgcggggtccatttctttgatcgaaagataacttaaatttaactgtaactctacaggataagttgttgaagctggctaccgacgaaggattgaaaatcagttttgaaaatacagcatcacttccttcattttggataaaagctaaaaatgactatcctgagcttgctgagattgctttaaaattgctgcttcttttcccctcaacatacctctgtgagaccggattctctactttaagtgttattaaaacaaaacatagaaacagtttaaatatacattatcccctgagggtagcattgtcatcaaatccaacctagattagacaaattaaccaagcaagaagcaagctcacttatcacattaaaagctttaaatattgatatgtaaggtattggttcaaagtatgcatataagcattgagtgtgaggaatttgctatttcactttaaactttctgtctagttacagttatggaagtatgagaagttatgagtgaaacagcaattttctatataaattgcctatatgtatattttcaattaagaatgtgtacagtttttataattctatttttcctcatatttgtcgtatttattaaaatataattttaaatctgttgattctaatattaaaacatttgatctt

SEQ ID NO: 20066 - DNA, 1425 bp, Homo sapiens
  SIMILAR (637)..(999): 951254mologous to Rattus norvegicus voltage-sensitive sodium channel alpha subunit,accession number M26643,Smith-Waterman Score= 620.
atgaaactcatggaaacacttaaccagtgcataaacgctggtcatgaaatgacgaatgctatcgccattgcacagtttaatgatgacagcccggaagcgaggaaaataacccggcgctggagaataggtgaagcagcggatttagttggggtttcttctcaggctatcagagatgccgagaaagcagggcgactaccgcacccggatatggaaattcgaggacgggttgagcaacgtgttggttatccaattgaacaaattattcatatgcgtgatgtgtttggtacccgattgcgacgtgctggagacgtatttccaccggtgatccgggttgctgcccctgagggtggcgtgtacgcaacctcagttcctgttcatcttgcgtcggatctggctcttgaggggcctcctgaaatacgtcattttcgttcagaccttaatgtgtccggaattggtgggttcttggtcttgctgacttcaagaataaagccgcggaccctcgcggtgagtgttacagttcataaacgcacgcagacccaaagagtgagcagcaacaagatttattgcaaacagcaaaagaacaaaccttccacagagtgggaagaagaccccaatagagtgcccctgctagctcagctgcgagttttcaagttggcaaaatcttggccaacgttaaatatgctaataaagatcatcggcaattccgtgggggctctgggaaatttaaccctcgtcttggccatcatcgtcttcatttttgccgtggtcggcatgcagctctttggtaaaagctacaaagattgtgtctgcaagatcgccagtgattgtcaactcccacgctggcacatgaatgacttcttccactccttcctgattgtgttccgcgtgctgtgtggggagtggatagagaccatgtgggactgtatggaggttgctggtcaagccatgtgccttactgtcttcatgatggtcatggtgattggaaacctagtgagccttgctgagagccgcactgcgggaatccgcctccagacaaacgtgcagaaaatggtgtcttcctttacaaccagtgacaggaaacagacttccccttcttcatactccgtttcctttattcctgaattccatttcctcggcccgcccacccactgtcctcagacagccgtttcccagtgtgacctccttttccagctgcactctccggcggaggcccttttcccagcccggaccctcccgggcggccctcgcagccctcacctccgggtccccgccgcccctgctccattacagcacgatccccgccacacaggcccgcctctccctccgacagccaatcgcggcgcgaccccgcccctcccgctgggggcccggggcgctagagcgctccgggaggctaggggagctgaattctgcgtcttcctttag

SEQ ID NO: 20067 - DNA, 739 bp, Homo sapiens
  SIMILAR (117)..(278): 221254mologous to Homo sapiens Urokinase-type plasminogen activator-binding domain peptide,accession number W99896,Smith- Waterman Score=66.
gctacttgctgatatttacattcaatcagcaaaatatgacatggcagaagacctgttaaaacggtgcctgcgtcataatagatcttgctgcaaagcttatgaatatatgggatacattatggaaaaagagcaagcatatacagatgcttgccttgaactatgagatggcatggaaatatagcaatcggacaaatccggcagtaggatacaaactggcatttaattacttaaaagcaaaaagatatgtggattcaattgacatatgtcaccaaggttcttgaagcacatccaacttatccaaaaatcagaaaggatatacttgataaggcccgtgcgtctttaagaccttgaaaataattttaacttaggtgttggtttaacaggaaatgaaagaaatctaactttcagttcttcctgttcaaaacaggtttgagctcagtgctttgttattagaagtatacccttttttctccagcagaggttgctgctgtacatcaagagaagtactatgtgaaattggtgtttcctaatggagttgaatgagagctggtctatttgactctgttttgattgggtacagatttggtgactctgtggtaaagactataattatttctataaagaatattttgttaaaatctaggtaattaaataccctgtatcttttctaaggaatattatttcaggaaatatatttaaaatgcattgttctcttttaaaaaaaaaaaaaaaaaaaaaa

SEQ ID NO: 20068 - DNA, 4203 bp, Homo sapiens
  SIMILAR (2779)..(3345): 961254mologous to Homo sapiens unnamed protein product,accession number AK021519,Smith-Waterman Score=933.
atggtgatccttaaagacttcatgaaatttgaaatgaactcagaagaaggagattttctcagaacgtgtgattttttttttctgcgccaccttgtggccgtaaaacaacttgcccacgtgaaagttgaccgctttttcccgcgccggcagagccttgctgagagccgcactgcgggaatccgcctccagacaaacgtgcagaaaatggtgtcttcctttacaaccagtgacaggaaacagacttccccttcttcatactccgtttcctttattcctgaattccatttcctcggcccgcccacccactgtcctcagacagccgtttcccagtgtgacctccttttccagctgcactctccggcggaggcccttttcccagcccggaccctcccgggcggccctcgcagccctcacctccgggtccccgccgcccctgctccattacagcacgatccccgccacacaggcccgcctctccctccgacagccaatcgcggcgcgaccccgcccctcccgctggggcccggggcgctagagcgctccgggaggctaggggagctgaattctgcgtcttcctttaggctgcggcgagacaatccccagagccccgcggcccggcctcggggcagccatggactcgcaggaattgaaggtgagcggactttgattaattactattgtcaagagagatatttccatcatgtattactggttgccagtgaaggaattaagaggtatggaagtgatccagtcttcaggttttatcatgcctatggcacattaatggaaggtaaaactcaagaagctcttcgagaatttgaggctattaaaaataaacaagatgtatcactttgttctctacttgcactgatatatgcccataaaatgagtcctaatccagatagagaagctattctggaatcagatgccagagtgaaggaacaacgtaaaggagctggagagaaagccttataccatgcaggcttatttttatggcacattggtcgccatgataaagcaagggaatatattgacagaatgatcaaaatatcagatggtagtaaacagggacacgttttgaaagcatggcttgatattacaagaggaaaagagccttacactaaaaaagcactgaagtattttgaagagggactccaagatgggaatgatacttttgctctgctgggtaaggcacaatgccttgagatgcgccagaattattcaggtgccctggagactgtgaaccagataatcgtgaattttccgagcttccttcctgcttttgttaagaaaatgaaattacaactagccttgcaggattgggaccagacagttgagacagcacaaaggttgctgctccaagatagccaaaatgtggaagcactgagaatgcaggcactctactatgtgtgtagagagggggatatagagaaggcttccaccaagctggaaaacttgggaaatacattggatgccatggaaccacagaatgctcaacttttctataacattacactcgccttcagcagaacttgtggacgtagtcaacttattcttcaaaaaattcaaacgttacttgagagagcttttagtttaaaccctcagcaatcagaatttgctacagaacttggataccaaatgattttacaaggaagagttaaagaggcactgaagtggtataagaccgccatgacacttgatgagactagtgtgtctgccctagttggatttatccaatgtcagttgatagaagggcaattacaggatgcagatcagcagctagaatttttaaatgaaatccagcaatccattggaaaatctgcggaattaatctatttacatgcagttcttgccatgaagaaaaataaacgacaagaagaagttattaatttgttaaatgatgtcctggacactcacttttcacaattagaaggtttgcctcttggcatacagtattttgaaaagctaaatcctgatttcttgttagaaattgttatggagtatctgagcttctgtccaatgcagcctgcaagtcctgggcaacctctttgtccacttctcaggcgttgcatctcagtcctggagactgtagtaagaactgttccaggtcttctgcaaacagtcttcctaatagcaaaagtgaaatatttgtcaggtgatattgaagcagctttcaataaccttcagcactgcttagaacacaatccctcttatgctgatgctcatctgctgctagctcaggtttacttgtctcaagaaaaagtcaaattgtgttctcagtctcttgaactttgtctgagctatgattttaaggtgagagactatcctttatatcatttgataaaagctcagtcacaaaagaaaatgggagaaatagcagacgcaattaaaacaatgcatatggcaatgagtttaccaggaatgaaaagaattggagcttccacaaaatcaaaagacagaaaaactgaagttgatacaagccatcgtttatcgatctttcttgaattgatagacgttcaccgcttaaatggagagcagcatgaggcaaccaaagttttacaagatgccatccatgaattttctggaacatctgaagaagtgcgggttaccattgctaatgcagaccttgctctagcccaaggagatattgaacgggctttaagcatccttcagaatgttacagccgaacagccttattttatagaggccagagaaaaaatggcagatatttatctgaagcacagaaaagataaaatgttatatatcacttgttttagtaattcaactgagaagcaagaatctgtgcaactggcagtaagaacagcagaaaaacttcttaaggaactaaaacctcagactgttcagggtcacgtacagcttcgcataatggaaaactattgcttaatggctaccaaacagaaatctaatgttgaacaagcattaaataccttcactgaaatagcagcatctgagaaggagcatatcccagcgctcttgggaatggcaacggcttatatgatcttgaaacagactccacgagccagaaaccagctgaagcgtattgcgaaaatgaattggaatgctattgatgctgaagagtttgagaagagttggctgctacttgctgatatttacattcaatcagcaaaatatgacatggcagaagacctgttaaaacggtgcctgcgtcataatagatcttgctgcaaagcttatgaatatatgggatacattatggaaaaagagcaagcatatacagatgctgccttgaactatgagatggcatggaaatatagcaatcggacaaatccggcaattatgttggaactggcacgattatacctggcacaagatgaccctgattcctgcctgcggcagtgtgctctactgcttcagagtgaccaggataacgaagctgctaccatgatgatggctgatctcatgttcagaaaacaagactatgaacaagcagtgtttcatttacagcagcttttagaacgtaagccagataattatatgacattatctcgtttgattgatctcctaagaagatgtggaaaactcgaggatgtcccaagatttttctcaatggctgagaaacgtaactccagagcaaaattggaaccaggatttcagtattgtaaaggactgtatctttggtacactggagaaccaaatgatgcccttcgacattttaataaagctcggaaagatcgtgactggggccaaaatgccctttataatatgatagagatctgtttgaatccagataatgaaactgttggagtaaatgaactgtcagctctcatggaggatggacgttgtcaagttcttctagcaaaagtttatagtaaaatggaaaaacttggtgatgcgatcactgcattacaacaggctcgagaattacaagctcgggtactaaaacgtgttcagatggaacagccagatgcagttcctgcacagaaacatttagcagctgaaatttgtgcagagattgcaaaacattctgttgctcagcgagactatgaaaaagcaattaagttttatagagaggctctggttcactgcgaaacagataataaggtcgccatgggttgggcagatcctgaagagaaccaacttgagtctgacagtccttccagaacacggcacccacctccaccatataacacagccaagtacgtccttaaaatgaaaatataa

SEQ ID NO: 20069 - DNA, 1467 bp, Homo sapiens
  SIMILAR (508)..(1197): 931254mologous to Homo sapiens H91620p,accession number AB025580,Smith-Waterman Score=1055.
atggggtttcgccatgttggccaggctggtcttgaactcctgacctcaggtctagggctggtaacagcttcaggttattgcactatttcttggggttccccatgcacctgtgcctttgggaatggtcccatagacggtcactcgctgagcatcatcttagaaatggggctgtgcactatgaagactaaacaagagttccaggactggaccaaaagaagtgtggaacttgagggtgggaatgcctcatcagaacttcaaagcttccaaggccatcacaacaaggagggtctgagaaactgtcgcagccaggaggagcccgaggagatgctcccgaccatcatgtggaatcctggacgggatccagtagaagactcagaaagtggtgtttacatgcgattcatgaggtcacacaagtgttatgacatcgttccaaccagttcaaagcttgttgtctttgatactacattacaagttaaaaaggccttctttgctttggtagccaacggtgtccgagcagcgccactgtgggagagtaaaaaacaaagttttgtagagctttatttacaagaaacatttaagcctttagtgaatatatctccagatgcaagcctcttcgatgctgtatactccttgatcaaaaataaaatccacagattgcccgttattgaccctatcagtgggaatgcactttatatacttacccacaaaagaatcctcaagttcctccagctttttatgtctgatatgccaaagcctgccttcatgaagcagaacctggatgagcttggaataggaacgtaccacaacattgccttcatacatccagacactcccatcatcaaagccttgaacatatttgtggaaagacgaatatcagctctgcctgttgtggatgagtcaggaaaagttgtagatatttattccaaatttgatgtaattaatcttgctgctgagaaaacatacaataacctagatatcacggtgacccaggcccttcagcaccgttcacagtattttgaaggtgttgtgaagtgcaataagctggaaatactggagaccatcgtggacagaatagtaagagctgaggtccatcggctggtggtggtaaatgaagcagatagtattgtgggtattatttccctgtcggacattctgcaagccctgatcctcacaccagcagccccagtcaaatatgaacaacccagcctttgtcagggccacatggacccgatgtgggagcaaacagcatgccctttgaactctcagaatccaatattaaacgaattcactggtatggaacaggtgatgtggcataaggtgagtgcacggtatgttcagatcacagtgccttatgtccgaatacagcaatatgtcaccgccgcagccggggcgcacgcgtgtgaaacaacaccgagcttgaatgtggaagtctttgaaccttttaccaaatcagtttgttttctttag

SEQ ID NO: 20070 - DNA, 858 bp, Homo sapiens
  SIMILAR (238)..(525): 981254mologous to Homo sapiens AMP-activated protein kinase gamma2 subunit,accession number AJ249976,Smith-Waterman Score=497.
atggcgtcagggctgaggcgccggcaggcctgggcctgcagagacgacctggctctgctcctgagaagcgctcacttcctcacctgccccaggccaccagagcagatgctttgccacatccaccacaaggtcctgtggcgttgcgctgccccggagccccactggggaaccccatactctcctgatgctaccagttgccattggagctgggagctgcccaggcggctgcacgatggctcctccggcctctcctcctctccgtcaacacccacccaagtgaccaagcagcacacgtttcccctggaatcctataagcacgagcctgaacggttagagaatcgcatctatgcctcgtcttcccccccggacacagggcagaggttctgcccgtcttccttccagagcccgaccaggcctccactggcatcaccgacacactatgctccctccaaagccgcggcgctggcggcggccctgggacccgcggaagccggcatgctggagaagctggagttcgaggacgaaggtgagtgcgccccgcccgctgccggcccggcgctcccacggcccggccgcccgaggaccgggacccgcggggaccccgcgccccatctccggcgctgccccacggcgagctgcgtcctgcggaagcccaggggccggggcgggaaccggggcggggatgcgggcgccggcgagctcgggctgcgggggccatgtgacctcccatctcagaactttctctgcttcctggtggatgtgttgaagaatggcctcttggccctacagctgttcagctccaaccccacagccagctgtgctgagtccttacccatgcttcggacccctgtgatataa

SEQ ID NO: 20071 - DNA, 2303 bp, Homo sapiens
  SIMILAR (53)..(451): 771254mologous to Homo sapiens H91620p,accession number AB025580,Smith-Waterman Score=462.
  misc_feature (1)...(2303): n = a,t,c or g
cagcgctcggccggccgcgagcccgccggcgggggaacgagcgtcgcagctcatgctgatcgctgtcctcctcctccccctcaggcggcgctggcggcgagccctgggacccgcggaagccggcatgctggagaagctggagttcgaggacgaagcagtagaagactcagaaagtggtgtttacatgcgattcatgaggtcacacaagtgttatgacatcgttccaaccagttcaaagcttgttgtctttgatactacattacaagttaaaaaggccttctttgctttggtagccaacggtgtccgagcagcgccactgtggggagagtaaaaaacaaagttttgtaggaatgctaacaattacagatttcataaatatactacatagatactataaatcacctatggtacagattttatggaattagaggaccataaaaatttggaaaccatggagggagctttatttacaaggaaacatttaagcctttagtgaatatatctccaggatggcaagcctcttcggatggctgtatacgtccttgatcaaaaataaaatccacagattgcccgttattgaccctatcagtgggaatgcactttatatacttacccacaaaagaatcctcaagttcctccagctttttatgtctgatatgccaaagcctgcctttcatgaagcagaacctggatgagcttggaataggaacgtaccacaacattgccttcatacatccagacactcccatcatcaaagccttgaacatatttgtgggaaagaccgaatatcagctctgcctggttgtgggatgagtcagggaaaagttggtagatatttaattccccaaatttgaatgtaaattaaatccttgcctgcctggaggaaaacataccaaataaccttagataatccacggtgaccccaggccccttcagcaccgttcacagtattttgaaggtgttgtgaagtgccaattaagctggaaattcctggagacccatcgttggaccagaatagtaagagctgagggtccatccggcttggtggtggtaaaatgaagcagatagtattgtgggtattatttccctgtcggacattcttgcaagccctgatcctccacaccagcaggtgccaaacaaaaggagacagaaacggagtgacccgccgtgaatgtagacgccctaggaggagaacttgaacaaagtctctgggtcacgttttgcctcatgaacactggctgcaagtggttaagaatgtattatcagggtttaacgatagggtatttcttccagttgatgttgaaattaagcttaaaaaaggaaaggttttatgtgcttgaaggtttcagggcttgcatttaaaagactgttttcaagaacctttgtgctgaagggattttaaaatgctggatgtgattaaagtgcactgtgtcctgaagttttcattatttttcatttcaaagaattcactggtatggaacaggtgatgtggcataaggtgagtgcacggtatgttcagatcacagtgccttatgttcgaaatacagcaatatgtcaccgccgcagccggggcgcacgcgtgtgaaacaacaccgagcttgaatggtggaagtctttgaaccttttacccaaatcagtttgttttctttagatttgtcaaaaagttgtaatttgaatattaaataattactttaaaaattttaatgacacttttacacgtaaggttttttgttctgggctaccgtgtcaacgagggctgctttacaacagctttatttatttttactttcatgcaatttttttacacatctttttggtgggagtaaacttcaccacatccatgaataaactctcagttattttgaaatggcaaatttctcattatttaagtttggatctggaaaggacatgacttctgaaatagccgctgctgggttttacacacctgaggtcccccaaaagtngtggaggaagacggttgcccgtcacggggaagccaaagttgccgggaagatgtctattttttyttccttgtgtattgaaatgtaaaatcaaggatgtttgttatgaactgctgatgccgattgtttttgtaaattttattgtggcatatacacgtattgtcatacagttgaagagaaacaatgtttccthaatgtaagtgctctgtaaaatgttgacactgtatatatatatatgaaggatagtttgtttttttttgttttgggtttttttttttttttttcagattgraaaaattaaaaataaaatcctactatctaccaaaaaaaaaaaaaaaaaac

SEQ ID NO: 20072 - DNA, 457 bp, Homo sapiens
  SIMILAR (232)..(447): 361254mologous to Mycoplasma gallisepticum putative variable cytadhesin protein,accession number AF224059,Smith-Waterman Score= 105.
ggttagtatggtcttctctacaccaccactggtttcaataaagttcttctttcgtaacacatatgccctgctgccagtttcaaattgaccaacgtttataagcaaggaaaaacgagggtccacggaagatctccaggaccgatcaaaaggccgcacattcactgtggggcctccgcttttccagagaaacccggcaggctgagctgagcgtctggcgaggcgtggggttttgcgggccctgaccgctgcggcgccgctggtgaggaacacgcccaggagcagaggaagggggcgactcacccgtcggcgtcagctccaagcaaggcacagggagtcccgggggccaggccccgtccttccctctctctccggccagcctccccacagtccgcagtccccgagacctggagccgggatttcggtcctcggtctcaagaagctcccgacacgaaatcgt

SEQ ID NO: 20073 - DNA, 1584 bp, Homo sapiens
  SIMILAR (450)..(1316): 501254mologous to Homo sapiens Protein regulating gene expression PRGE-13,accession number Y58620,Smith-Waterman Score= 533.
gagaactgtcgggagcttcttgagaccgaggaccgaaatcccggctccaggcctctttggactgcggactgtggggaggctggccggagagagagggaaggacggggcctggcccccgggactccctgtgccttgcttggagctgacgccgacggtttattgcaggcatgcttacaagatcacattttgagaagaagttggaaagaatcccaagtggatgaactgaatatctggatgaggacaagatctgtggggagagactgtaagatagaatgagtccatttaagtcccaggacgggggaaactagctagtaaattgcagccatgttggggaagctgctgctgaaatcccagtccttgcgggctgtgttctttcagaaagatgcgatcacctccaaaatacagacctttcttagcatgcttcacctatacaactgataaacagtccgagcaaagaaaatacaagaacagtggaaaagctctataaatgttcagttgacattaggaaaattcgtagatttaaaaaggatggggtacttttaagaagatgaaaaccctatgttgaaagaaattgccgaatattttaccaagaactaggtgcccgatgagactgctgtagccagtatttttggaacgctgcccggaagcaattgtctggaagtccaaccgctgttaacacccagagaaaactctggcagttggtctgcaaaaatgaggaagagttaatcaagttaatagagcagtttccagaatctttctttactattaaagaccaagagaaccagaagctgaatgttcagttctttcaagacgttgggactaaaaaatgtggtcattagcagacttttgacagctgcacctaactgtttttcataatcctgttgagaagaataagcaaatggtaagaattcttccaagagagttatctagattataggtggctctgaggccaacatgaaaagttttggcttactaaaattgtttaagccaaaacccttttattttgtttaaatttctcccacagctataaaggaaacactagaatttctccaggagccaaggtttccaccagctttgaaatttctccagcttcctatcccaaactcaaaaggatttctttttcaactttgccccaagaagtatacagaatagtatttccttctctaaaaatgccttttaaatgcacagattttcatggaccctgaagcaattaagttttgaaatggccctgcccttttatattattcctgttcccagttttagaagagagaatgcaaggattattgagagaaggaatttccatagctcagataaggagagacgccaatggttcttgaattaacaccacagatagtacagtacaggataaggaaactgaattcctcaggctacagaataaaggatggacatctagcaaatctaaatggatcaaaaaaagagtttgaagctaattttggcaaaattcaggccaaaaaagccctgcagaaccttttattacggagtttaaattattatgatgaactcactgtgggagaatgtggaaaccggaaaggccggggaacaaatgtgaacacaaccctgtga

SEQ ID NO: 20074 - DNA, 455 bp, Homo sapiens
  SIMILAR (39)..(455): 891254mologous to Homo sapiens transcriptional regulator protein HCNGP,accession number AF119664,Smith-Waterman Score=671.
tttcgtggagtgagccacgcccgggctgtgggaataagatggcggggaagatgaatgttctgtcgtctctcgcagtttacgcggaagattcagagcccgagtctgatggcgaggctggaatcgaggcggtgggcagcgcggctgaggagaaaggcggattggtatctgatgcctatggggaggatgacttttctcgtctagggggtgatgaagatggttatgaagaagaagaagatgagaacagtagacagtcggataatacagaagcagaaaagcgagacccccaggaactcgtggcctccttttctgaaagagttcggaacatgtcgcctgatgaaatcaagatcccgccagaaccccctggcagatgttcaaatcacttgcaagacaagatccagaagctttatgaacgaaagataaaggagggaatggatatgaactacattatccaaagg

SEQ ID NO: 20075 - DNA, 443 bp, Homo sapiens
  SIMILAR (59)..(409): 811254mologous to Homo sapiens transcriptional regulator protein HCNGP,accession number AF119664,Smith-Waterman Score=471.
  misc_feature (1)...(443): n = a,t,c or g
ggnatggccanatttgaagcttagtacagtccgcantccctggtcgacccacgcgtccgcggggaagaagaatgttctgtcgnctctcgcagtttacgcggaagattcagagcccgagtctgatggcgaggctgggatcgaggcggtgggcagcgcggctgaagagaaaggcggattggtatctgatgcctatggggaggatgacttttctcgtctagggggtgatgaacatggttatgaagaagaataagatcagatcagtagacagtcggaagatgaccattcatagactgattatcctgatgctgaagacccaaatgtttatacagtagcagacaagcgagacccccaggaactattggcctacttttctgagagagttcggaacatgattcctgttgaagtaagatcccgccatatccccctggcagatgttcatatcg

SEQ ID NO: 20076 - DNA, 452 bp, Homo sapiens
  SIMILAR (33)..(353): 821254mologous to Homo sapiens transcriptional regulator protein HCNGP,accession number AF119664,Smith-Waterman Score=430.
gccttggaattctcctggtcgacgatttcgtgaatgttctgtcgtctctcgcagtttacgcggaagattcagagcccgagtctgatggcgaggctggaatcgaggcggtgggcagcgcggctgaggagaaaggcggattggtatctgatgcctatggggaggatgacttttctcgtctagggggtgatgaagatggttatgaagaagaagaagatgagaacagtagacagtcggaagatgacgattcagagactgaaaaacctgaggctgatgacccaaaggagaagctcggcacagtgacagaggcacccagggctcagcaagctcatggcccagcttgttggactcagagggcagaagaatcacattctaaacatgataagagacgtgactcaacaacctcagctgagcctggcagcacacacaccccacactcctttccatctccaggt

SEQ ID NO: 20077 - DNA, 334 bp, Homo sapiens
  SIMILAR (220)..(333): 1001254mologous to Mus musculus HCNGP,accession number X68061,Smith-Waterman Score=213.
aatcacgtcaccctccgtgccagacaaccagacaacaagctccagcctctaacaggtccatctccctgggagagtggagggccatcaggaagcttgcttagagcagctgagctggatttaaaagttgtgaaggttttgtgtcagccccaggagctggatggttcaggtcccatgcagggacgtggacttgtgcctgctcagcgccggcactgttctttcagcatctacgagaagctgatccagttctgtgccattgacgagcttggcaccaactacccaaaggatatgtttgatccccatggctggtctgaggactcctactatgaggcattag

SEQ ID NO: 20078 - DNA, 690 bp, Homo sapiens
  SIMILAR (256)..(471): 1001254mologous to Homo sapiens transcriptional regulator protein HCNGP,accession number AF119664,Smith-Waterman Score=363.
atggtcgcactctcctgtaaaggcgtcttaaaagagtcaaacccaaagaccttcttcagcgtactccggactcgccgctcagggtcaaaaggaaaggtggtatggtggctgctcatcttagccaagaacagtggccaaaggttaaggcaaagtgtggcgcgggggtctcctgggttccgaaagaacctgcctttccgcccggaagtcggcgtcttgagtcataggagtgagccacgcccgggctgtgggaataagatggcggggaagaagaatgttctgtcgtctctcgcagtttacgcggaagattcagagcccgagtctgatggcgaggctggaatcgaggcggtgggcagcgcggctgaggagaaaggcggattggtatctgatgcctatggggaggatgacttttctcgtctagggggtgatgaagatggttatgaagaagaagaagatgagaacagtagacagtcggcaggaggcaacaccctgtctgctaccattagcaccttccagagcccacctcccctgcccagccgtaccctgctctgccccatctgggatgctgtgctcaggcatgagctggcagggccgcacacagcctccctggaaaagagaggaaacaaagcatctgataaagccactatcatggcctttgatgccctggtgaccttctgtgaagaactggggtaa

SEQ ID NO: 20079 - DNA, 1280 bp, Homo sapiens
  SIMILAR (74)..(850): 561254mologous to Homo sapiens transcriptional regulator protein HCNGP,accession number AF119664,Smith-Waterman Score=606.
  misc_feature (1)...(1280): n = a,t,c or g
cgcccgggctgtgggaataagatggcggggaagaagaatgttctgtcgtctctcgcagcttacgcttatgatatcagagcccgagtctgatggcgaggctggaatcgaggcggtgggcagcgcggctgacgagaaaggcggattggtatctgatgcctatggggaggatgacttttctcgtctagggggtgatgaagatggttatgaagaagaagaagatgagaacagtagacagtcggaagatgacgattcagagactgaaaaacctgaggctgatgacccaaaggataatacagaagcagaaaagcgagacccccaggaactcgtggcctccttttctgaaagagttcggaacatgtcgcctgatgaaatcaagatcccgccagaaccccctgggcagatgttcaaatcacttgcaagacaagatccagaagctttatgaacgaaagataaaggagggaatggatatgaactacattatccaaaggaagaaaagaatttcggaaccctagcatctaccgagaagcttgatccagttctgttgccattgacgagcttggcaccaactacccaaaggatatgtttgatccccatggctggtctgaggactcctactatgaggcattagccaaggcccagaaaattgagatgggacaaattgggaaaaggccaaaaaaggagcggaaccaaaaatttgagttttgtgacggggcaccaaaaaagggcacccacggaccaacgccacgtccaccaccactaccacgtgccaagcacagctgtttgcagattgcttcagaagaggaaagaggcaagtggggattcgggctatccccagtgcaacgaagcccaaaagggnnnccccccccaaancccncccaaataccctcaccaccacagccaccctgcccagcttgttgtcacggtcacccacccaagcgccagcggctccaaagacccacccgtcatctcctgctgtggggcacccattgtgaaagaaaggccaaagcaagtgaccctgaggggcccacccctaggacttgaaagagaccgtgcagccccagtgacccactgcccagtgggaggcgcccactttgtatatttcaggactgggacctactccccaagatgccacctgagaggagcttctgtttggcattccagatggaaggacaggcagcacgggagccaggcgctgtggacagggtctgtccacgcaccacctggggtctgccgcctattaaaagtgccgtattcttacctcttggcatctcagaaaaaaa

SEQ ID NO: 20080 - DNA, 708 bp, Homo sapiens
  SIMILAR (228)..(482): 341254mologous to Bacillus anthracis VrrB,accession number AF238898,Smith-Waterman Score=106.
atggcatattctgcccctgagaagtcctgcactgagggccatgaaagccctcatcccacacagctggccactcgggctggcatggtggataggccctgcgacagagaggccactcgtgcccgaaagagggaacacgaggacacccccagaccctggctccgctcaccagtgcccacaacacgctgctgggctcccaaggctaaccagctccttcatgattgtttcgtcatcatcaccatcgtcactgtcatcatcatcatcatcaccaccagtgatttcctgaatgccaaccaagcaccagtcatcaagcgaacccacatcacaggccagacctgcatgatcgccaggcacccgactcgggttatgaaggtgtctctcctaagagagtggcagaggcaaactttagccttggcagtgcgcctcaagctgctcaggggagaagtcacggccaaagccctggagtgcatgggttctttagccatggttctcctgcagcttcctctgatattatgaagcgcctgccgccaccaggcttgttttgactcccttccatgatccacccttttgagtggggtttggcttctgtacagctctcctgtgggcactgagcccactagtcagagcaagagggctccagtctctggacagtcacagtgcttggtggcaaaacataaattgtcattcattcataaaaaaaaaaaaaaaaaa

SEQ ID NO: 20081 - DNA, 522 bp, Homo sapiens
  SIMILAR (419)..(225): 1001254mologous to Homo sapiens in heart tissue the shorter mRNA is only present; in other tissues both mRNA's are present in different ratios,accession number Y14372,Smith-Waterman Score=345.
aggtcattgataggtgtgaccatgccaagactgagaggaggtgaagaaaaacccgagaaagaattggccatgatgtaatctgcaatctgctgtaatgctagtaatccagttgggttgtggcctttcttcatctgttcttgaataaggcattccaagtcttcccgaaaggcttagaatttctccattaagaaatgtactcatttggaaatagaataccactggccaggactttgcaggatctgagtaactcgtttcctctgctccatcatgttgaagtcttgtcgtagatcaggagacatgttcctctccctaatgtattctgggtcattttcattgatgcggtcaaaatatctctctttgtgaggcatgctgggaggaggaggagtggtaatcacgccttggctggcatctgagctcatgttttaagtctgtggattactcttgttatctcgcagcgcgtagccggctttgtgtttcccctccctccttctcggcagccgcccgggctgcagcagccgccgg

SEQ ID NO: 20082 - DNA, 467 bp, Homo sapiens
  SIMILAR (322)..(426): 511254mologous to Homo sapiens super cysteine rich protein; SCRP,accession number U63332,Smith-Waterman Score=121.
atttcctggaatcctcttgcacctcccaaatggctcacggttccagagcgcatgtcttccttcagggtgaggtggcaaatagagtgcaatggagatacctgctaccacccaggatgcccaaacggccactggaagatgtccttgggctggcccaggatgcccaaacggccaccagtatccaactgaagacagctctcccagctgaagacagctcccctccatgtgatgattcagaaacccaggctccttccgactcctggctgcactgttccttagggtcttgggcctcatgattatctgtattcaatactcagcattgagagaagctgctgctgctaatgctgctgctgctgctgccgccgccgccgctgctgctgctgctgttggtctgaggctgcagtaggtttctgtgcagcattgcagaatccacaccctctggggctttgcggcgcttaagaggcggccgc

SEQ ID NO: 20083 - DNA, 1083 bp, Homo sapiens
  SIMILAR (13)..(225): 301254mologous to Brassica napus cytochrome b,accession number X68727,Smith-Waterman Score=69.
atgaggcccaagaccctaaggaacagtgcagccaggagtcggaaggagcctgggtttctgaatcatcacatggaggggagctgtcttcagctgggagagctgtcttcagttggatactggtggccgtttgggcatcctgggccagcccaaggacatcttccagtggccgtttgggcatcctgggtggtagcaggtatctccattgcactctatttgccacctcaccctgaaggaaggtacgagggccccttcaaacgccatacaaagaccttccggagtgcccagtgtgcagattgcctgagagaaaatcccaaagaaggtgtttctgcggcttggcaaagggaggagagagttcatgggttctcaggaatgctacagttaatgcctctaattaacaccccaggtgcttctgctacggctgcactgctgctttgtaatcatttctctgtactctgcctcagacatgcgctctggaaccgtgagccatttgggaggtgcaagaggattccaggaaatggcagcaaggccttagaggagtttaaaggtattggggcagaggtggtgtgtagaggggctcattttgaggatgtgcaatatcctcagactgtggaacaggatgtgcgacagtcccgaggcacaaaggaaggtgagaaagaggcccagagaagagtagctcctcctttgtttgaagctgctggaaggtctctttgtgccaaagagctgagggaagccatgggaacaggttgttttcacagctgtgctgaactccaacttagagctgtccatcccactgctcacacactcgggcaactctggcgaagagggaaaggatggccaccacctcattttgtggaggaggaaactgctttcctcaggccttgctgcatctgctgcttattttgtgaacttaggccaaaggcaggccccacagagtccccacagcttcctgctcaccctgctgcttccctcacaagccctgcaagcctgcaaagatctgagttgccaaccagtatctgtctgtctggtgtctatctctctccctctctctttaaccgggaccaggtatatactcaagataaatga

SEQ ID NO: 20084 - DNA, 776 bp, Homo sapiens
  SIMILAR (339)..(1): 921254mologous to Homo sapiens adducin-like protein,accession number D67031,Smith-Waterman Score=525.
  misc_feature (1)...(776): n = a,t,c or g
ctccttacttattcttactgagatataggtatntgccaggtgtgcccatccaaacaagtctacaagtctgtacaggctggcaagtttacagcgagtaagtttttctcccttcacatatgaggatgtatctgcaccaggaaggtcattgataggtgtgaccatgccaagactgagaggaggtgaagaaaaacccgagaaagaattggccatgatgtaatctgcaatctgctgtaatgctagtaatccagttgggttgtggcctttcttcatctgttcttgaataaggcattccaagtcttcccgaaaggcntgaggtgggganttggagaccagcttgaccaacatggagaatcctcgtctttacttaaaantacaaaattagcccagcgtggtggtgcatgcctgtaatcccagctactcaggaggctgaggcaggagaatagcttgaactcgggaggaggaggatgtggtgagccgagatcatgccattgcactcccagcctgggcaacaagagcggaaactccatttagaatttctccattaagaaatgtactcatttggaaatagaataccactggccaggactttgcaggatctgagtaactcgtttcctctgctccatcatgttgaagtcttgtcgtagatcaggagacatgttcctctccctaatgtattctgggtcattttcattgatgcggtcaaaatatctctctttntgaggcatgctgggaggaggaggagtggtaatcacgcagctggctggcatctgagctca

SEQ ID NO: 20085 - DNA, 2404 bp, Homo sapiens
  SIMILAR (2217)..(256): 1001254mologous to Homo sapiens adducin gamma subunit,accession number U37122,Smith-Waterman Score=3395.
aataataaacttcatgagggcagagctaattaaaactagtaattgcttaaaattccaaagccatttctggacatataaaatgagagatgaatcttgaagtttttcttttgtaaaacctctttccagttcttaaagtccagtttgctacatcccccaatctgatctaccattgcatattaatgatcaacttaaatgtggtatttagatgtgcaatgtcacattgttataataataattataaaaagactttatttaggcctcaactttctccttttttttgttctttttcagaaaagaaggagtgcggaatttcttctttttcttggatggcgattttgaaggggagccttcaggtgacaggacttcttcgattttctctggagacttaatagtaatctcgatgttttctatggttgtacttgtgcttaacctactcactcgcttagcaagctcatcttcaacatcatgcatatcatccttgccatttactaccatgacaggcacttccatggagatgaagctcttggaaaacagctcatggttttcttctaggccttgttgtttacgttcgattgtcctcttatactcttcaagttctccttctgtgagatgactaaatgggttaggaggagctggtgggccatgatcatcatcttcaaattgcatagtagaaggtggcttatccacaacaattccagcaagcaactgagattgtggtcctgctgttttcaagtcatatcgattttgttcccgaatcttatttctcttttctagtacctcattcgggtttgtgtttaaaggaacaaactgatttggatcttcaatttggataggtgttccaccactaactttagatgagtcttctgctttcatccacgtgattttggttcggggactggtttctccgttccgagactcctcaggcacattcactttcatgtaagtatttggtgagttcagccatcttgttttttcacgcttgttgcctcttgtgccatgtatttggagaggagagagtggcattgtatcgtcttcaaaggaaaaagcagtcacagttgctgggatttccacatcactcttgtgcctaggcttctctcgaatgagaggatgcctgtaagcatagcctgttctataccccaagttgtccagagtcctcataagcccttcaaactcaatttcgccaaccttccattttggatgggaacccatattcacacctcctccaccagacgctgctacagtgtaagtgaaagctttatacttctgaaagtccagtacatggagattgtctactccacctgcacctgctagggcctgcacctgaatctcacaggctagttgcacattaaaaatataatgaaaagcctcctctaatgtttctccaagtgcaaccacaccatgattcctgagtaccagcaccttacaacttggtcccagaaccttctgcagttgaattctctcctcctgttcttcaagtgacccttggtagtcataataggcaacatctcccagaagaagagactcttgagaaattggaaggatcccacatttcatggaggatacagctgctgttgcaagggtatggatgtgtatcacacacttaacatcaggacgtgttgaatagattgcagcatggggactgaatcctgtatggtcaattttcaaattggtacttccctggtcaaccacttctcctattatattgactttcaccaaattggaggctgtagcttcagaaaaagataggcctctgggaattattataatgtggtcttgctccttacttattcttactgagatataggtatttgccaggtgtgcccatccaaacaagtctacaagtctgtacaggctggcaagtttacagcgagtaagtttttctcccttcacatatgaggatgtatctgcaccaggaaggtcattgataggtgtgaccatgccaagactgagaggaggtgaagaaaaacccgagaaagaattggccatgatgtaatctgcaatctgctgtaatgctagtaatccagttgggttgtggcctttcttcatctgttcttgaataaggcattccaagtcttcccgaaaggcaggactttgcaggatctgagtaactcgtttcctctgctccatcatgttgaagtcttgtcgtagatcaggagacatgttcctctccctaatgtattctgggtcattttcattgatgcggtcaaaatatctctcttacgtgaggcatgctgggaggaggaggagtggtaatcacgccttggctggcatctgagctcatgttttaagtctgtggattactcttgttatctcgcagcgcgtagccggctttgtgtttcccctccctccttctcgcgagccgcccgggctgcagcagccgcctggagtcgccgctgcggccgct

SEQ ID NO: 20086 - DNA, 1059 bp, Homo sapiens
  SIMILAR (408)..(512): 511254mologous to Homo sapiens super cysteine rich protein; SCRP,accession number U63332,Smith-Waterman Score=121.
aattgtccaaattttttatttactatagggaacatctgttggttttgcccactctgcttccattctcccattttctagtaacgcccctcagtcttcctttggggaatactcccatagcccctcttagtccatgtggttcaaatgaggccgatgccacctccatccccacttccatcctgagaatggtgaagtgacttgctcagccacagagcatgggaaactcaagtttgcttcctaaccagctccctttcttcctcccagtatccaactgaagacagctctcccagctgaagacagctcccctccatgtgatgattcagaaacccaggctccttccgactcctggctgcactgttccttagggtcttgggcctcatgattatctgtattcaatactcagcattgagagaagctgctgctgctaatgctgctgctgctgctgccgccgccgccgctgctgctgctgctgttggtctgaggctgcagtaggtttctgtgcagcattgcagaatccacaccctctggggctctgcggcgcttaagaggcggccgcagcggcggatccggcggctgctgcagcccgggcggctgccgagaaggagggaggggaaacacaaagccggctacgcgctgcgaggtaatctgcgggggagggtccgggggtggcggtgcacggcctgcggcgccgccgggtgggcccgacgcttcgcgcgtctgctggttttccttgaatacttcgattgtctttttctcctgccctttttgtctcattttgtaaggcaatgattcatacttgagtgaattcactgtttcaaagtagattttgttgttgttttggtgtatggtagtggtttcctgggttttggtggttttttctttccatattttccaaaaacttactgtggtagcagccatgggtagaacccaggagcttgtcaactcccagagtttgttgtcagctcttcggaagctagagcctttggcaaaggacagattctttccaaaatacgtgaaatgagcaaggatagcaacttttcctaaagcaaactgtagaaacat

SEQ ID NO: 20087 - DNA, 360 bp, Homo sapiens
  SIMILAR (130)..(360): 911254mologous to Homo sapiens rare transcript,accession number Y13619,Smith-Waterman Score=355.
gaatggatacagcaaaataatatcttatccatagtcttgcaagacagtcttcatcaaccacaatatgtagaaaagctagagaaaattcttcgttttgtgattaaagaaaaggctcttacattacaggaccttgataatatctgggcagcacaggcaagttggacaaatgcaagtaaaaagcaacgtgaaaagctccttgagttgatacgccgtcttgcagaagatgataaagatggtgtgatggcacacaaagtgttgaaccttctttggaacctggctcagagtgatgatgtgcctgtagacatcatggaccttgctcttagtgcccacataaaaatactagattatagttgttcccag

SEQ ID NO: 20088 - DNA, 3681 bp, Homo sapiens
  SIMILAR (2581)..(3678): 991254mologous to Homo sapiens ubiquitin hydrolase,accession number X98296,Smith-Waterman Score=1992.
atggtagtagtctatgccttgttaatgcctgctggtgcacctctggctgatgattcctctgattttcagtttcacttcttgaaaagtggtggcctaccccttgtactgagtatgctaaccagaaataacttcctaccgaatgcagatatggaaactcgaaggggtgcctacctcaatgctcttaaaatagccaagcttttgctaactgccattggctatggtcatgttcgagctgtggcagaagcttgtcagccaggtgtagaaggtgtgaatcccatgacacagatcaaccaagttacccatgatcaagcagtggtgctacaaagtgcccttcagagcattcctaatccatcatccgagtgcatgcttagaaatgtgtcagttcgtcttgctcagcagatatctgatgagaccaatgcaggcaatgagccagacttggaagacgaacaggtttgctgtgaagcattggaagtgatgaccttatgttttgccttgattccaacagccttagatgctcttagtaaagaaaaggcttggcagacattcatcattgacttactattgcactgtcacagcaatatttctgattcaggaggtctgcattggagcctgagagttggcatttctaacaagttcccagataatgctgatgttgctgctctggggaccgtgcttttggaactgccagtacggtatacggcagcagtccccaacccttttggcaccagggcccagtttcatggaagacaatttttccgtggatcagggagacaccttcttaattacgcttacaatagtaatattaatgtacccaatgctgaagttcttctcaataatgaaattgattggcttaaaagaattagggatgatgttaaaagaacaggagaaacgggtattgaagagacgatcttagagggccaccttggagtgacaaaggagttactggcctttcaaacttctgagaaaaaatttcatattggttgtgaaaaaggaggtgctaatctcattaaagaattaattgatgatttcatatttcctgcatccaatgtttacctacagtatatgagaaatggagagcttccagctgaacaggctattccggtctgtggttcaccacctacaattaatgctggttttgaattacttgtagcattagctgttggctgtgtgaggaatctcaaacaaatagtagattctttgactgaaatgtattacattggcacagcaataactacttgtgaagcacttactgagtgggaatatctgccacctgttggaccccgcccacccaaaggattcgtggggctgaaaaatgccggtgctacttgttacatgaattctgtgattcagcaactctacatgattccttccattaggaacggtattcttgccattgaaggcacaggtagtgatgtagatgatgatatgtctggggatgagaagcaggacaatgagagcaatgttgatcccagggatgatgtatttggatatcctcaacaatttgaagataaaccagcattaagtaaaactgaagatagaaaagagtacaacattggtgtcctaagacaccttcaggtcatctttggtcatttagctgcttctcgactgcaatactatgtgcccagaggattttggaaacagttcaggtacgaatgtgaagaatcttttacgaccctaaacgtagacattagaaatcaccaaaatcttcttgattctttggaacagtatgtcaaaggagatttactagaaggtgcaaatgcatatcattgtgaaaaatgcaataaaaaggaaaccaccttcgtgggaacaacagtaaacatcaaacaggttgataccgtaaagcgcttgctgattaaaaaattacctcctgttcttgctatacaactaaagcgatttgactatgactgggaaagagaatgtgcaatcaagttcaatgattattttgaatttcctcgagagctggacatggaaccttacacagttgcaggtgtcgcaaagctggaaggggataatgtaaacccagagagtcagttgatacaacagagtgagcagtctgaaagtgagacagcaggaagcacaaaatacagacttgtgggtgtgctcgtacacagtggtcaagcgagtggggggcattattattcttacatcatccaaaggaatggtggagatggtgagagaaatcgctggtataaatttgatgatggtgatgtaacagaatgtaaaatggatgatgacgaagaaatgaaaaaccagtgttttggtggagagtacatgggagaagtgtttgatcacatgatgaagcgtatgtcatacaggcgccagaaaaggtggtggaatgcttatatacttttttatgaacgaatggacacaatagaccaagatgatgagttgataagatatatatcagagcttgctatcaccaccagacctcatcagattattatgccatcagccattgagagaagtgtacggaaacagaacgtacaattcatgcataaccgaatgcagtacagtatggagtattttcagtttatgaaaaaactgcttacatgtaatggcgtttacttaaaccctcctcccggtgtggcagagaagacacagcttctgaaattgagtgtacctgctacttttatgcttgtgtctttagatgaaggtccaggtcctccaatcaaataccagtatgctgaattaggcaaattatactcagtagtgtcacagctgatccgctgttgcaatgtctcttcaagaatgcagtcttcaatcaatggtaatcctcctcttcccaatccttttggtgatcctaatttatcacaacctataatgccaattcagcagaatgtggcagacattttatttgtgagaacaagttatgtgaagaaaatcattgaagactgcagtaattcagaggaaaccgtcaaattgcttcgtttttgctgctgggagaatcctcagttctcatctactgtcctcagtgaacttctctggcaggttgcatattcctatacctatgaactgcggccctatttggatctgcttttgcaaatcttactgattgaggactcctggcaaactcacagaattcataatgcactgaaaggaattccagatgaccgagatgggctgtttgacacaatccagcgctctaagaatcactatcaaaaaagagcataccagtgtataaaatgtatggtagctctatttagtaactgtcctgttgcttaccaaatcctgcagggcaatggagatcttaaaagaaagtggacctgggcagtggaatggcttggagatgaacttgaaagaagaccatatactggcaatcctcagtacacttacaacaattggtctcccccagtgcaaagcaatgaaacgtccaatggttatttcttggagagatcacatagtgctaggatgacacttgcaaaagcttgtgaactctgtccagaggaggagccagatgaccaagatgctccagatgaacatgagtcgcctccacctgaagatgccccattgtacccccattcacctggatctcagtatcaacagaataaccatgtgcatggacagccatatacaggcccagcagcacatcacatgaacaaccctcagagaactggccaacgagcacaagaaaattatgaaggcagtgaagaagtatccccacctcaaaccaaggatcaatga

SEQ ID NO: 20089 - DNA, 293 bp, Homo sapiens
  SIMILAR (127)..(291): 851254mologous to Homo sapiens rare transcript,accession number Y13619,Smith-Waterman Score=251.
atcaaccaagttacccatgatcaagcagtggtgctacaaagtgcccttcagagcattcctaatccatcatccgagtgcatgcttagaaatgtgtcagttcgtcttgctcagcagatatctgatgagaccaatgcaggcaatgagccagacttggaagacgaacaggtttgctgtgaagcattggaagtgatgaccttatgttttgccttgattccaacagccttagatgctcttagtaaagaaaaggcttggcagacattcatcattgacttactattgcactgtcacagcaa

SEQ ID NO: 20090 - DNA, 658 bp, Homo sapiens
  SIMILAR (593)..(291): 981254mologous to Homo sapiens ubiquitin hydrolase,accession number X98296,Smith-Waterman Score=521.
tttttttttttttacacattagcatcaggccatttattacaaaacactatacactttccactgcaggcgggttatatattgacagcaaatttctgcagataagacagtgaataaactctccactccatgttgattaggaatagtttttctagttttaaatattagccagacacagaaaaaggttggactgtaaggcctgggtgcacagtcttgatggaaccagttaattatgtgcatttcattgatccttggtttgaggtggggatacttcttcactgccttcataattttcttgtgcttcctgctgtctcactttcagactgctcactctgttgtatcaactgactctctgggtttacattatccccttccagctttgcgacacctgcaactgtgtaaggttccatgtccagctctcgaggaaattcaaaataatcattgaacttgattgcacattctctttcccagtcatagtcaaatcgctttagttgtttagcaagaacaggaggtaattttttaatcagcaagcgctttacggtatcaacctttttattgcatttttcacaatgatatgcatttgcaccttctagtaaactcctttgacatactggtccaaagaatcaagaagattttggggatttctaatggctacgtttag

SEQ ID NO: 20091 - DNA, 1126 bp, Homo sapiens
  SIMILAR (1)..(459): 1001254mologous to Homo sapiens ubiquitin hydrolase,accession number X98296,Smith-Waterman Score=822.
gttgataccgtaaagcgcttgctgattaaaaaattacctcctgttcttgctatacaactaaagcgatttgactatgactgggaaagagaatgtgcaatcaagttcaatgattattttgaatttcctcgagagctggacatggaaccttacacagttgcaggtgtcgcaaagctggaaggggataatgtaaacccagagagtcagttgatacaacagagtgagcagtctgaaagtgagacagcaggaagcacaaaatacagacttgtgggtgtgctcgtacacagtggtcaagcgagtggggggcattattattcttacatcatccaaaggaatggtggagatggtgagagaaatcgctggtataaatttgatgatggtgatgtaacagaatgtaaaatggatgatgacgaagaaatgaaaaaccagtgttttggtggagagtacatgggagaagtgttttgatcacatgatgaagcgtatgtcatacaggcgccagaaaaggtggtggaatgcttatatacttttttatgaacgaatggacacaatagaccaagatgatgagttgataagatatatatcagagcttgctatcaccaccagacctcatcagattattatgccatcagccattgagagaagtgtacggaaacagaacgtacaattcatgcataaccgaatgcagtacagtatggagtattttcagtttatgaaaaaactgcttacatgtaatggcgtttacttaaaccctcctcccggtgtggcagagaagacacagcttctgaaattgagtgtacctgctacttttatgcttgtgtctttagatgaaggtccaggtcctccaatcaaataccagtatgctgaattaggcaaattatactcagtagtgtcacagctgatccgctgttgcaatgtctcttcaagaatgcagtcttctatcaatgatgcagaaacggctttcaataaaattcagcatcgtttcatgttaaaaatcctcaacaagcaaggcattgaagaaacatacatcaaaataacaagagccatctatgacaaacccacagccaacatcatactgaatgggcaaatgctggaagcattgcccttgagaaacagaacaagacaagggtga

SEQ ID NO: 20092 - DNA, 1542 bp, Homo sapiens
  SIMILAR (1)..(1032): 991254mologous to Homo sapiens ubiquitin hydrolase,accession number AF070645,Smith-Waterman Score=1877.
ggcaaattatactcagtagtgtcacagctgatccgctgttgcaatgtctcttcaagaatgcagtcttcaatcaatggtaatcctcctcttcccaatccttttggtgatcctaatttatcacaacctataatgccaattcagcagaatgtggcagacattttatttgtgagaacaagttatgtgaagaaaatcattgaagactgcagtaattcagaggaaaccgtcaaattgcttcgtttttgctgctgggagaatcctcagttctcatctactgtcctcagtgaacttctctggcaggttgcatattcctatacctatgaactgcggccctatttggatctgcttttgcaaatcttactgattgaggactcctggcaaactcacagaattcataatgcactgaaaggaattccagatgaccgagatgggctgtttgacacaatccagcgctctaagaatcactatcaaaaaagagcataccagtgtataaaatgtatggtagctctatttagtaactgtcctgttgcttaccaaatcctgcagggcaatggagatcttaaaagaaagtggacctgggcagtggaatggcttggagatgaacttgaaagaagaccatatactggcaatcctcagtacacttacaacaattggtctcccccagtgcaaagcaatgaaacgtccaatggttatttcttggagagatcacatagtgctaggatgacacttgcaaaagcttgtgaactctgtccagaggaggtaaaaaaagccaccagtgtgcagcagatagaaatggaagagagcaaagagccagatgaccaagatgctccagatgaacatgagtcgcctccacctgaagatgccccattgtacccccattcacctggatctcagtatcaacagaataaccatgtgcatggacagccatatacaggcccagcagcacatcacatgaacaaccctcagagaactggccaacgagcacaagaaaattatgaaggcagtgaagaagtatccccacctcaaaccagggatccaatgaaaatgcacataaattaactggttcccatccaaggactgtgccacccccgggccctaacagtcccaacccttttcctgtgtcctggcctaatatttaaaacctagaaaaacctatcccctaatccaaacatggaagtggagagtttaattccactgtccttatcctgcagaaatttgcctgtcaatatataacccgcctgcagtggaaagtgtatagtgttttgtaataaatggcctgatgcctaatgtgtaaatggcaaaggtgtatattagtatattaatgttgactgttaattcttaagcaagaaactttttttcttgatgagactcacagatctacacaaactacaaaagttaattttcttgttacacccactgcactctgcaaccagtgttgcctgcctgcctcatgggcagttgggatcagactcctttacaaaaatgacaatgtaaaaaccatcagtaccataacagagcccatccatgtcatccacaccaatattt

SEQ ID NO: 20093 - DNA, 7788 bp, Homo sapiens
  SIMILAR (1447)..(6180): 941254mologous to Homo sapiens ubiquitin hydrolase,accession number X98296,Smith-Waterman Score=7782.
atgacagccacgactcgtggctctccggtcggagggaatgacaaccagggccaggctcctgatggacagtctcagccccccctccaacagaatcagacttcatcgcctgattcttccaatgaaaattccccggcaactcccccagatgagcaaggtcaaggtgatgccccaccacagcttgaagatgaggaacctgcatttccacatactgacttggccaagttggatgacatgatcaacaggcctcgatgggtggttccagttttgccgaaaggggaattagaagtgcttttagaagctgctattgatcttagtaaaaagggccttgatgttaaaagtgaagcatgtcagcgatttttccgtgatgggctaacaatatcattcactaaaattcttacagatgaagcagtgagtggctggaagtttgaaattcatgtgagtcttgcatttgactttaaaggatcagatttacatagtgatgcctgtgagtgggaagagaggtgtattattaacaatactcatcgtctggtggagctatggtgtggcccaagttgtccccaagactggtttcgcacttttagaacttcttgccatggccttaaatcctcattgcaaattccatatctacaatggtacacgtccatgtgaatcagtttcctcaagtgttcagttgcctgaagatgaactctttgctcgttctccagatcctcgatcaccaaagggttggctagtggatcttctcaacaaatttggcactttaaatgggttccagattttgcatgatcgttttattaatggatcagcattaaacgttcaaataattgcagcccttattaaaccatttgggcaatgctatgagtttctcactcttcatacagtgaaagaagtactttcttccaataatagaaatggttccacagtttttagaaaacttaactgatgaagagctgaaaaaagaagcaaagaatgaagccaaaaatgatgctctttcaatgattattaaatctctgaagaatttagcttcaagggttccaggacaagaagaacctgttaaaagcttagaaatatttaggttaaaaatgatacttagattatcgcaagtttcttctctcaatggaaagatgaatgcagtgaatgaagttaataaggtgatatctagtgtatcatgctatcctcatcgacatggtaatcctgaggaggaagagtggctcacagctgaacgaatggcagaatggatacagcagaacaatatcttatccatagtgttgcgagatagtcttcatcagccacagtatgtagaaaagttagagaagattcttcgttttgtcatcaaagaaaaagctctgaccttacaggatcttgataatatctgggcagcacaggcagggaaacatgaagccattgtgaagaatgtacatgatctcctggcaaaattggcatgggcttttttctcctgaacaacttgatcatctttttgattgttttaaggccagttggacaaatgcgagtaaaaagcaacgtgaaaagctacttgagctgatacgtcgtcttgcagaagatgataaagatggtgtgatggcacacaaagtgttgaaccttctgtggaatctggctcacagtgatgatgtgcctgtagatatcatggacctggctctcagtgcccacataaaaatactagattacagttgctcccaggaccgtgatacacaaaagatccaatggatagatcgctttatagaagaacttcgcacaaatgacaaatgggttattcccgcactgaaacaaattagagaaatttgtagtttgtttggtgaagcgcctcaaaatttgagtcaaactcagcgaagtccccatgtgttttatcgccatgacttaatcaatcaacttcaacacaatcatgccctagttactttggtagcagaaaaccttgcaacttacatggaaagcatgagactatatgctagagaccatgaagattatgacccacaaactgtgaggctgggaagtagatatagtcatgttcaagaagttcaagaacggcttaacttccttagatttttattgaaggatggtcagctgtggctatgtgctcctcaggcaaaacaaatatggaaatgcttagctgagaatgcagtttacctttgtgatcgtgaagcctgttttaagtggtattccaagttgatgggggatgaaccagacttagatcctgatattaataaggacttctttgaaagtaatgtgcttcagcttgatccttctctgttaactgaaaatggaatgaagtgttttgagcgattcttcaaagctgtgaattgtcgagaaggaaaactagtagcaaaaaggagagcctatatgatggatgacttggagttaataggattagattacctttggagggtcgtgattcagagtaatgatgatattgccagcagagctatagatctcctcaaagagatatacacgaaccttggtccaagactacaagtcaatcaggtggtgatccatgaagacttcattcagtcttgttttgatcgtctgaaggcttcctatgacacattgtgtgttttggatggtgacaaagacagtgttaattgtgcaagacaggaagctgttcgaatggttcgagtattaactgttttaagggaatatataaatgaatgtgacagtgattatcatgaggaaagaacaattctccctatgtcgagagcattccgcggtaaacacctctcttttgtagttcgatttccaaaccagggcagacaggttgatgacttggaggtatggtctcatacaaatgatacaattggttcagtacgacgatgtattctcaatcgtattaaagccaacgtagcccatacaaaaattgagctctttgtgggcggtgagctgatagatcctgcagatgatagaaagttgattggacaattaaacttaaaagataaatcgcttattacagccaaacttacacagataagttccaatatgccttcaagccctgatagctcttctgattcctccactggatctcctggaaaccatggtaatcattacagtgatggtcccaatccagaagtggaaagctgtttgcctggagtgataatgtcactgcatcccagatacatctcttttctttggcaagttgcagacttaggtagcagcctaaatatgccaccccttagagatggagcaagagtacttatgaaacttatgccgccagatagcacaacgatagaaaaattaagagctatttgtttagaccatgccaaacttggagaaagcagccttagtccatctcttgactcacttttctttggtccttcagcctcacaagtgctatatctaacagaggtagtctatgccttgttaatgcctgctggtgcacctctggctgatgattcctctgattttcagtttcacttcttgaaaagtggtggcctaccccttgtactgagtatgctaaccagaaataacttcctaccgaatgcagatatggaaactcgaaggggtgcctacctcaatgctcttaaaatagccaagcttttgctaactgccattggctatggtcatgttcgagctgtggcagaagcttgtcagccaggtgtagaaggtgtgaatcccatgacacagatcaaccaagttacccatgatcaagcagtggtgctacaaagtgcccttcagagcattcctaatccatcatccgagtgcatgcttagaaatgtgtcagttcgtcttgctcagcagatatctgatgaggcttcaagatatatgcctgatatttgtgtaattagagctatacaaaaaattatctgggcatcaggatgtgggtcgttacagctagtatttagcccaaatgaagaaatcactaaaatttatgagaagaccaatgcaggcaatgagccagacttggaagacgaacaggtttgctgtgaagcattggaagtgatgaccttatgttttgccttgattccaacagccttagatgctcttagtaaagaaaaggcttggcagacattcatcattgacttactattgcactgtcacagcaatatttctgattcaggaggtctgcattggagcctgagagttggcatttctaacaagttcccagataatgctgatgttgctgctctggggaccgtgcttttggaactgccagtacggtatacggcagcagtccccaacccttttggcaccagggcccagtttcatggaagacaatttttccgtggatcagggagacaccttcttaattacgcttacaatagtaatattaatgtacccaatgctgaagttcttctcaataatgaaattgattggcttaaaagaattagggatgatgttaaaagaacaggagaaacgggtattgaagagacgatcttagagggccaccttggagtgacaaaggagttactggcctttcaaacttctgagaaaaaatttcatattggttgtgaaaaaggaggtgctaatctcattaaagaattaattgatgatttcatatttcctgcatccaatgtttacctacagtatatgagaaatggagagcttccagctgaacaggctattccggtctgtggttcaccacctacaattaatgctggttttgaattacttgtagcattagctgttggctgtgtgaggaatctcaaacaaatagtagattctttgactgaaatgtattacattggcacagcaataactacttgtgaagcacttactgagtgggaatatctgccacctgttggaccccgcccacccaaaggattcgtggggctgaaaaatgccggtgctacttgttacatgaattctgtgattcagcaactctacatgattccttccattaggaacggtattcttgccattgaaggcacaggtagtgatgtagatgatgatatgtctggggatgagaagcaggacaatgagagcaatgttgatcccagggatgatgtatttggatatcctcaacaatttgaagataaaccagcattaagtaaaactgaagatagaaaagagtacaacattggtgtcctaagacaccttcaggtcatctttggtcatttagctgcttctcgactgcaatactatgtgcccagaggattttggaaacagttcaggctttggggtgagcctgttaatctgcgtgaacaacacgatgctttagaattttttaattcattggtggatagtttagatgaagctttaaaagctttaggacatccagctatgctaagtaaagtcttaggaggttcctttgctgatcagaagatctgccaaggctgcccacataggtacgaatgtgaagaatcttttacgaccctaaacgtagacattagaaatcaccaaaatcttcttgattctttggaacagtatgtcaaaggagatttactagaaggtgcaaatgcatatcattgtgaaaaatgcaataaaaaggttgataccgtaaagcgcttgctgattaaaaaattacctcctgttcttgctatacaactaaagcgatttgactatgactgggaaagagaatgtgcaatcaagttcaatgattattttgaatttcctcgagagctggacatggaaccttacacagttgcaggtgtcgcaaagctggaaggggataatgtaaacccagagagtcagttgatacaacagagtgagcagtctgaaagtcgagacagcaggaagcacaaaatacagacttgtggggtgtgctccgtacacagtggtcaagcgagtggggggcattattattcttacatcatccaaaggaatggtggagatggtgagagaaatcgctggtataaatttgatgatggtgatgtaacagaatgtaaaatggatgatgacgaagaaatgaaaaaccagtgttttggtggagagtacatgggagaagtgtttgatcacatgatgaagcgtatgtcatacaggcgccagaaaaggtggtggaatgcttatatacttttttatgaacgaatggacacaatagaccaagatgatgagttgataagatatatatcagagcttgctatcaccaccagacctcatcagattattatgccatcagccattgagagaagtgtacggaaacagaacgtacaattcatgcataaccgaatgcagtacagtatggagtattttcagtttatgaaaaaaactgttaccttgtaagggcgtttacttaaaccctcctcccgggcaagatcacctgttgcctgaagcagaagaaatcactatgatcagtattcaacttgctgctaggttcctctttactacaggatttcacacaaagaaagtagtccgtggctctgccagtgattgcaagaatgtacgtttttggtttgctcataacgtcctttttaatgtttcaaatcgcttctccgaataccttctggagtgccctagtgcagaagtgaggggtgcgtttgcaaaacttatagtctttattgcacatttttccttgcaagatgggccatgtccttcaccttttgcctctcctgggaccttctagtcaggcttatgacaacttaagcttgagtgatcacttactaagagcagtactaaatctcttgagaagggaagtttcagagcatgggcgttcatttacagcagtatttcaacctgtttgtaatgtatgccaatttaggtgtgggcagaggaagacacagcttctgaaattgagtgtacctggctacttttatggcttgtgtctttaggatgaaggtccagggtccctccaattcaaatacccagtatggctggaattagggcaaattattactcagtaggtgttcacaggctggatcccgctgttgcaatgtctccttcaaggaatgcagtcttcaatcaatggtaatcctcctcttcccaatccttttgggtgatcctaatttatccacaacctattaatgccaattcaggcagaatgtgggcagacattttatttgtgagaacaagtttatgtgaaggaaatcattggagactgcagtaattccagagggaaccggtccaaattggcttcggtttttggctgctggggagaatcctcagttctcatctactgtcctcagtggaacttatctgggcaggttgcatattcctatacctatggaactgcggccctatttgggatctgcttttgcaaatctttactggattgagggactcctgggccaaacttcacaggaatttcataatggcactgaaagggatttccaggtggaccgagatggggctgttttgacacaatccagcgctctaagaatcactatcaaaaaagagcataccagtgtataaaatgtatggtagctctatttagtaactgtcctgttgcttaccaaatcctgcagggcaatggagatcttaaaagaaagtggacctgggcagtggaatggcttggagatgaacttgaaagaagaccatatactggcaatcctcagtacacttacaacaattggtctcccccagtgcaaagcaattgaaacgtccaatggttatttcttggagagatcacatagtgctaggatgacacttgcaaaagcttgtgaactctgtccagaggaggagccagatgaccaagatgctccagatgaacatgagtcgcctccacctgaagatgccccattgtacccccattcacctggatctcagtatcaacagaataaccatgtgcatggacagccatatacaggcccagcagcacatcacatgaacaaccctcagagaactggccaacgagcacaagaaaattatgaaggcagtgaagaagtatccccacctcaaaccaaggatcaatga

SEQ ID NO: 20094 - DNA, 9332 bp, Homo sapiens
  SIMILAR (1237)..(5502): 991254mologous to Homo sapiens ubiquitin hydrolase,accession number X98296,Smith-Waterman Score=7396.
ttaaccctgtcgtggccacacaccccgccagtccctgccgcccagcccctcccgagtggtgtgccagatcttttcgggcctcccttccccaacttcggtcctagagccacctctgccctcgtcccgctcctgagccgaggggcatggaacaggatttctggccgtagcacgaccctgaaggggccagccggaagaaacagtactgcgcgaacaatctttaccgcattgtcttcccctcccccaccctagctctccgggttcccggcggctcgcgccgaagcccggccccctcagcggctcgcgctgctctcccagccttgacggcccggggtggagggagagaagagggggcagctgagcgggagggggctgggcaggagcagggggagggccgaaaggaggggcctgaaaggggcgggccctgacgggggcggagaacttcgggtcttgggcggctctggggctagtgggagtctgcgccgccgccgccgccgccaccgctgctgccgccgtcgccgctaccgccgccgccaacagctcccgggcctcgcgggagcccgccgccgccgcctctctctcacgggaggcggccgccttagcgcccggtgcttgggtcggcgccgggagctgaggagcgagcatacttcaaaagcacaaccaggacatggagcggggacagaggcggcgactaggggaaggtgaagccgtcgctgcaggaggaggagcaggaggaggtgacgcaggagaaacgcaccgcccggagcccgtctgagctcagcgagacgcccagcctgaggggaggaaggggaagagggccgtcgccggcacagcgaggaggaggaggcgggcgcggcgaggagcgagttccggcgccggtgtgcagccttttggttgagacgcccgcagccccgaagcccggccgccgcagcactttcgatacacttttgtttgccggtcacccccgggcctgggattgcacccaaggttaggtctcgtcccggggaccgaagccccaccgtcgcctggtgcctcccgcctccgtgtgccctggttgtgagaagacgtctgtgtcgtgcggttatgcaatggtctctgcaagatggtttattcttgaattggacctttttaagactgacaaatgctggtacttcatcgttctataagtggactataatttcttttctcaagacaactacataagcagacaaaattgcaaagatctgccctgtgtcgagtatgacagccacgactcgtggctctccggtcggagggaatgacaaccagggccaggctcctgatggacagtctcagccccccctccaacagaatcagacttcatcgcctgattcttccaatgaaaattccccggcaactcccccagatgagcaaggtcaaggtgatgccccaccacagcttgaagatgaggaacctgcatttccacatactgacttggccaagttggatgacatgatcaacaggcctcgatgggtggttccagttttgccgaaaggggaattagaagtgaaattagaagctaatattgatcttagtaaaaagggccttgatgttaaaagtgaagcatgtcagcgatttttccgtgatgggctaacaatatcattcactaaaattcttacagatgaagcagtgagtggctggaagtttgaaattcataggtgtctggtggagctatgtgtggccaagttgtcccaagactggtttccacttttagaacttcttgccatggccttaaatcctcattgcaaattccatatctacaatggtacacgtccatgtgaatcagtttcctcaagtgttcagttgcctgaagatgaactctttgctcgttctccagatcctcgatcaccaaagggttggctagtggatcttctcaacaaatttggcactttaaatgggttccagattttgcatgatcgttttattaatggatcagcattaaacgttcaaataattgcagcccttattaaaccatttgggcaatgctatgagtttctcactcttcatacagtgaaaaagtactttcttccaataatagaaatggttccacagtttttagaaaacttaactgatgaagaactgaaaaaagaagcaaagaatgaagccaaaaatgatgctctttcaatgattattaaatctttgaagaatttagcttcaagggttccaggacaagaagaaactgttaaaaacttagaaatatttaggttaaaaatgatacttagattattgcaaatttcttctttcaatggaaagatgaatgcactgaatgaagttaataaggtgatatctagtgtatcatactatactcatcgacatggtaatcctgaggaggaagagtggctcacagctgaacgaatggcagaatggatacagcagaacaatatcttatccatagtgttgcgagatagtcttcatcagccacagtatgtagaaaagttagagaagattcttcgttttgtcatcaaagaaaaagctctgaccttacaggatcttgataatatctgggcagcacaggcagggaaacatgaagccattgtgaagaatgtacatgatctcctggcaaaattggcatgggatttttctcctgaacaacttgatcatccttttgattgttttaaggccagtcggacaaatgcgagtaaaaagcaacgtgaaaagctacttgagctgatacgtcgtcttgcagaagatgataaagatggtgtgatggcacacagagtgttgaaccttctgtggaatctggctcacagtgatgatgtgcctgtagatatcatggacctggctctcagtgcccacataaaaatactagattacagttgctcccaggaccgtgatacacaaaagatccaatggatagatcgctttatagaagaacttcgcacaaatgacaaatgggttattcccgcactgaaacaaattagagaaatttgtagtttgtttggtgaagcgcctcaaaatttgagtcaaactcagcgaagtccccatgtgttttatcgccatgacttaatcaatcaacttcaacacaatcatgccctagttactttggtagcagaaaaccttgtaacttacatggaaagcatgagactatatgctagagaccatgaagattatgacccacaaactgtgaggctgggaagtagatatagtcatgttcaagaagttcaagaacggcttaacttccttagatttttattgaaggatggtcagctgtggctatgtgctcctcaggcaaaacaaatatggaaatgcttagctgagaatgcagtttacctttgtgatcgtgaagcctgttttaagtggtattccaagttgatgggggatgaaccagacttagatcctgatattaataaggacttctttgaaagtaatgtgcttcagcttgatccttctctgttaactgaaaatggaatgaagtgttttgagcgattcttcaaagctgtgaattgtcgagaaggaaaactagtagcaaaaaggagagcctatatgatggatgacttggagttaataggattagattacctttggagggtcgtgattcagagtaatgatgatattgccagcagagctatagatctcctcaaagagatatacacgaaccttggtccaagactacaagtcaatcaggtggtgatccatgaagacttcattcagtcttgttttgatcgtctgaaggcttcctatgacacattgtgtgttttggatggtgacaaagacagtgttaattgtgcaagacaggaagctgttcgaatggttcgagtattaactgttttaagggaatatataaatgaatgtgacagtgattatcatgaggaaagaacaattctccctatgtcgagagcattccgcggtaaacacctctcttttgtagttcgatttccaaaccagggcagacaggttgatgacttggaggtatggtctcatacaaatgatacaattggttcagtacgacgatgtattctcaatcgtattaaagccaacgtagcccatacaaaaattgagctctttgtgggcggtgagctgatagatcctgcagatgatagaaagttgattggacaattaaacttaaaagataaatcgcttattacagccaaacttacacagataagttccaatatgccttcaagccctgatagctcttctgattcctccactggatctcctggaaaccatggtaatcattacagtgatggtcccaatccagaagtggaaagctgtttgcctggagtgataatgtcactgcatcccagatacatctcttttctttggcaagttgcagacttaggtagcagcctaaatatgccaccccttagagatggagcaagagtacttatgaaacttatgccgccagatagcacaacgatagaaaaattaagagctatttgtttagaccatgccaaacttggagaaagcagccttagtccatctcttgactcacttttctttggtccttcagcctcacaagtgctatatctaacagaggtagtctatgccttgttaatgcctgctggtgcacctctggctgatgattcctctgattttcagtttcacttcttgaaaagtggtggcctaccccttgtactgagtatgctaaccagaaataacttcctaccgaatgcagatatggaaactcgaaggggtgcctacctcaatgctcttaaaatagccaagcttttgctaactgccattggctatggtcatgttcgagctgtggcagaagcttgtcagccaggtgtagaaggtgtgaatcccatgacacagatcaaccaagttacccatgatcaagcagtggtgctacaaagtgcccttcagagcattcctaatccatcatccgagtgcatgcttagaaatgtgtcagttcgtcttgctcagcagatatctgatgaggcttcaagatatatgcctgatatttgtgtaattagagctatacaaaaaattatctgggcatcaggatgtgggtcgttacagctagtatttagcccaaatgaagaaatcactaaaatttatgagaagaccaatgcaggcaatgagccagacttggaagacgaacaggtttgctgtgaagcattggaagtgatgaccttatgttttgccttgattccaacagccttagatgctcttagtaaagaaaaggcttggcagacattcatcattgacttactattgcactgtcacagcaaaactgttcgtcaggtggcacaggagcagttctttttaatgtgcaccagatgttgcatgggacaccggcctctacttttcttcattactctactctttactgttttggggagcacagcaagagagagagctaaacactcaggcgactactttactcttttaagacaccttcttaattacgcttacaatagtaatattaatgtacccaatgctgaagttcttttcaataatgaaattgattggcttaaaagaattagggatgatgttaaaagaacaggagaaacgggtattgaagagaccgatcttagagggccaccttggagtgacaaaggagttactggcctttcaaacttctgagaaaaaatttcatattggttgtgaaaaaggaggtgctaatctcattaaagaattaattgatgatttcatatttcctgcatccaatggtttacctacagtatatgagaaatggagagcctccagctgaacaggctattccggtctgtggttcaccacctacaattaatgctggttttgaattacttgtagcattagctgttggctgtgtgaggaatctcaaacaaatagtagattctttgactgaaatgtattacattggcacagcaataactacttgtgaagcacttactgagtgggaatatctgccacctgttggaccccgcccacccaaaggattcgtggggctgaaaaatgccggtgctacttgttacatgaattctgtgattcagcaactctacatgattccttccattaggaacggtattcttgccattgaaggcacaggtagtgatgtagatgatgatatgtctggggatgagaagcaggacaatgagagcaatgttgatcccagggatgatgtatttggatatcctcaacaatttgaagataaaccagcattaagtaaaactgaagatagaaaagagtacaacattggtgtcctaagacaccttcaggtcatctttggtcatttagctgcttctcgactgcaatactatgtgcccagaggattttggaaacagttcaggctttggggtgagcctgttaatctgcgtgaacaacacgatgctttagaattttttaattcattggtggatagtttagatgaagctttaaaagctttaggacatccagctatgctaagtaaagtcttaggaggttcctttgctgatcagaagatctgccaaggctgcccacataggtacgaatgtgaagaatcttttacgaccctaaacgtagacattagaaatcaccaaaatcttcttgattctttggaacagtatgtcaaaggagatttactagaaggtgcaaatgcatatcattgtgaaaaatgcaataaaaaggttgataccgtaaagcgcttgctgattaaaaaattacctcctgttcttgctatacaactaaagcgatttgactatgactgggaaagagaatgtgcaatcaagttcaatgattattttgaatttcctcgagagctggacatggaaccttacacagttgcaggtgtcgcaaagctggaaggggataatgtaaacccagagagtcagttgatacaacagagtgagcagtctgaaagtgagacagcaggaagcacaaaatacagacttgtgggtgtgctcgtacacagtggtcaagcgagtggggggcattattattcttacatcatccaaaggaatggtggagatggtgagagaaatcgctggtataaatttgatgatggtgatgtaacagaatgtaaaatggatgatgacgaagaaatgaaaaaccagtgttttggtggagagtacatgggagaagtgtttgatcacatgatgaagcgtatgtcatacaggcgccagaaaaggtggtggaatgcttatatacctttttatgaacgaatggacacaatagaccaagatgatgagttgataagatatatatcagagcttgctatcaccaccagacctcatcagattattatgccatcagccattgagagaagtgtacggaaacagaacgtacaattcatgcataaccgaatgcagtacagtatggagtattttcagtttatgaaaaaactgcttacatgtaatggcgtttacttaaaccctcctcccgggcaagatcacctgttgcctgaagcagaagaaatcactatgatcagtattcaacttgctgctaggttcctctttactacaggatttcacacaaagaaagtagtccgtggctctgccagtgattggtatgatgcattgtgtattctccttcgtcacagcaagaatgtacgtttttggtttgctcataacgtcctttttaatgtttcaaatcgcttctccgaataccttctgggagtgccctaagtgcaagaagtgaggggtgcgtttgcaaaacttatagtctttattgcacatttttccttgcaagatgggccatggtccttcaccttttgcctctcctggaccttctagtcaggcttatgacaacttaagcttgagtgatcacttactaagagcagtactaaatctcttgagaagggaagtttcagagcatgggcgtcatttacagcagtatttcaacctgtttgtaatgtatgccaatttaggtgtggcagagaagacacagcttctgaaattgagtgtacctgctacttttatgcttgtgtctttagatgaaggtccaggtcctccaatcaaataccagtatgctgaattaggcaaattatactcagtagtgtcacagctgatccgctgttgcaatgtctcttcaagaatgcagtcttcaatcaatggtaatcctcctcttcccaatccttttggtgatcctaatttatcacaacctataatgccaattcagcagaatgtggcagacattttatttgtgagaacaagttatgtgaagaaaatcattgaagactgcagtaattcagaggataccatcaaattacttcgctttttgctcttgggagaatcctcagttctcatctactgtcctcagcgaacttctctggcaggttgcatattcatatacctatgaacttcggccatatttagatctacttttccaaattttactgattgaggactcctggcagactcacagaattcataatgcaccttaaagggaattccagatgaccagagatgggctgttcgatacaatacaggcgctccgaagaatcactatcaaaaaacggagcatatcagtgcataaaatgtatggtagctctatttagcagttgtcctgttgcttaccagatcttacagggtaacggagatcttaaaagaaaatggacctggggcagtggaatggcttggagatgaacttgaaagaagaccatatactggcaatcctcagtacacttacaacaattggtctccccccagtgcaaagcaattgaaacgtcgaatgattattccttggagagatcacatagtgctagggatgacacttgcaaaggcttgtgaactctgtccagaggaggagccagatgaccaagatgctcccagatgaacatggtgtccgcctccacctgatagatgcccccattgtacccccccattccacctgggatcttcagtatcaaacagaataacccatgtgccatggacagcccatatacaggccccagcacgcacatcacatgaacaaccctcaagaggaactggcccaacgagcaccaagaaaattatgaaggcagttgaagaagtatccccaccttcaaaccaaggatcaatggaaatggcacataattaactggttccatcaagactgtgcaccccaggccttacagttccaaccttttttctgtgtctggctaatatttaaaactagaaaaactattcctaatcaacatggagtggagagtttattcactgtcttatctgcagaaatttgctgtcaatataataaccgccttgcagtggaaaagtgtatagtgttttgtaataaatggccctaatgctaatgtgtaaatggcaaaggtgtatatagtatattaatgttgactgttaattcttaagcaagaaacttttttcttgatgagactcacagatctacacaaactacaaaagttaattttcttgttacacccactgcactctgcaaccagtgttgcctgcctcatggcagttggatcagctcctttacaa

SEQ ID NO: 20095 - DNA, 710 bp, Homo sapiens
  SIMILAR (155)..(709): 981254mologous to Escherichia coli K12 ferredoxin-type protein: electron transfer,accession number AE000309,Smith-Waterman Score=974.
gagtgtcacagaagagaaagtcaatgaaattaaagaagacagtcattgtggagaaacttttaccccagttccagatgacaggctgaacttccagaagaagaaagcttctcctgaagtaaaatcatgtgacagctttgtgtgtgaagttggcctagcgaaacctcaaaatggtcgccgccgctttctgcgcgatgtcgttcgcacagcaggcgggctggctgccgtgggtgtggcgctggggttacaacagcaaaccggacgcgcatctggcgtgcggttgcgcccgcccggagccataaacgagaacgcctttgccagtgcctgtgtgcgttgcggtcagtgtgttcaggcttgcccttacgacaccttaaaactggcgacgctggcctctggtctgtcggcgggcacgccatattttgtcgcacgggatattccttgcgaaatgtgtgaggacattccgtgcgccaaagtgtgcccaagcggtgcgctggatcgtgagattgaatcgatcgacgacgcgcggatggggctggcggtactggtggaccatgaaaactgtctcaactttcaagggctgcgctgcgatgtttgttatcgcgaatgcccgaaaattgatgaagccatcaccctggagctggagcgcaacacgcgtaccggtaagcacgcccgctttctgccgacagttcacagcgacgcctgtaccgggtgcg

SEQ ID NO: 20096 - DNA, 1705 bp, Homo sapiens
  SIMILAR (253)..(1239): 571254mologous to Homo sapiens zinc finger protein (583 AA),accession number X51760,Smith-Waterman Score=975.
cggccgctggatgtgggtgggccggcagccgggactccgggcgtcctgtcccgtccctgcccgtcgactgcggccttggccccgaagcccttttgtgcagctccgcgcccgcagcccgacgccccagcttgtgcgggggccacgggagggtcatgcgcggatttcgactcgggtgtggatttcgtccgtaggaggagcagcggtctgtggggcccacagcctccactttttcctgttaaaaattatactgaggacccagtggcttttaaggatgtggctgtgaacttcacccaggaggagtgggctttgctggatatttcccagaagaatctctacagggaagtgatgctggaaactttctggaacctgacctctataggaaaaaagtggaaagaccagaacattgaatatgagtaccaaaaccccaggagaaacttcaggagtgtcacagaagagaaagtcaatgaaattaaagaagacagtcattgtggagaaacttttaccccagttccagatgacaggctgaacttccagaagaagaaagcttctcctgaagtaaaatcatgtgacagctttgtgtgtgaagttggcctaggtaactcatcttctaatatgaacatcagaggtgacactggacacaaggcatgtgaatgtcaggaatatggaccaaagccatggaagagtcaacaacctaaaaaagccttcagatatcacccctccttgagaacacaagaaagggatcacactggaaagaaaccctatgcttgtaaagaatgtggaaaaaacattatttaccattcaagcattcaaagacacatggtagtgcacagtggggatggaccttataaatgtaagttttgtgggaaagcattccattgtctcagtttatatcttatccatgaaagaactcacactggagagaaaccgtatgaatgtaaacaatgtggtaaatcttttagttattctgctacccatcgaatacatgaaagaactcacattggagaaaagccttatgaatgtcaggaatgtgggaaagcattccatagtcccagatcctgtcacagacatgaaaggagtcacatgggagagaaggcttatcaatgtaaggaatgtggaaaagcattcatgtgtccccgttatgttcgtagacatgaaaggacccactctaggaaaaaactttatgaatgtaagcagtgtgggaaagcattatcctctcttacaagttttcaaacacacataaggaatgcactctggagaaagaccttatgaatgtaagacatgtgggaaaggcttttattctgccaagtcatttcaaagacatgaaaaaactcacagtggagagaaaccgtataaatgcaagcaatgtggtaaagccttcactcgttccggttcctttcgatatcatgaaaggactcacactggagagaaaccctatgagtgtaagcaatgtgggaaagccttcagatctgccccaaatcttcaattgcatggtaggactcacactggagagaaaccgtatcaatgtaaggaatgtgggaaagctttcagatctgcctcacaacttcgaatccatcgtaggattcacactggagagaaaccctatgaatgtaagaaatgtgggaaagccttcagatatgtccagaactttcgatttcatgaaaggacacaaacacataagaatgcactctggagaaagaccttataa

SEQ ID NO: 20097 - DNA, 2414 bp, Homo sapiens
  SIMILAR (114)..(1745): 551254mologous to Homo sapiens zinc finger protein (583 AA),accession number X51760,Smith-Waterman Score=1579.
gctgcggctgggatccggtctttccagccccgagagggacctggttcctctgcccaggcttctgtcactctgtcacctacgctatgccctgctgtagtcacaggaggtgtagagaggaccccgggacatctgaaagccaggaaatggaggagtgggctttgctggatatttcccagaggaaactctacaaggaagtgatgctggaaactttcaggaacctgacctctgtaggaaaaagttggaaagaccagaacattgaatatgagtaccaaaaccccaggagaaacttcaggagtctcatagaaaagaaagtcaatgaaattaaagatgacagtcattgtggagaaacttttacccaggttccagatgacaggctgaacttccaggagaagaaagcttctcctgaaataaaatcatgtgacagctttgtgtgtggagaagttggcctaggtaactcatcttttaatatgaacatcagaggtgacattggacacaaggcctatgagtatcaggaatatggaccgaagccatgtaagtgtcaacaacctaaaaataagaaagccttcaggtatcgcccatccattagaacacaagaaagggatcacactggagagaaaccctatgcttgtaaagtctgtggaaaaacctttattttccattcaagcattcaaagacacgtggtaatgcacagtggggatggaccttataaatgtaaattttgtgggaaagccttccattgtctcagtttatatcttatccatgaaagaattcacactggagagaaaccatatgaatgtaaacaatgtggtaaatcctttagttattctgctacccttcgaatacacgaaagaactcacactggagaaaagccttatgaatgtcagcaatgtgggaaagcatttcatagtcccagatgctatcgtagacatgaaaggattcacacgggagagaaggcttatcaatgtaaggaatgtggaaaagcattcacgtgtccccagtatgttcgtatacatgaaaggacccactctaggaaaaaaccctatgaatgtacgcagtgtgggaaagcattatcctctcttacaagttttcaaacacacataagaatgcactctggagaaagaccttatgaatgtaagatatgtgggaaaggcttttgttctgccaattcatttcaaagacatgaaaaaactcacagtggagagaaaccctataaatgcaagcaatgtggtaaagccttcattcattccagttcccttcgttatcatgaaaggattcacactggagagaaaccctatgagtgtaagcaatgtgggaaggccttcagatcttcctcacaccttcaattgcatggtaggactcacactggagagaagccctatgaatgtcaggaatgtgggaaagccttcagatctatgaagaaccttcaaagtcatgaaaggacacaaacacacgtaagaatacactctggagaaagaccttataaatgtaagctatgtgggaaaggcttttattgtcccaaatcattgcaaagacatgaaaaaactcacactggagagaaactctatgaatgcaagcaatgtggtgaagccttcagtagttccagttcctttcgataccatgaaaggactcacactggagagaaaccctataaatgcaagcaatgtgggaaagccttcagagctgcctcagtccttcgaatgcatggtaggactcaccctgaagataaaccctatgagttgttggaagttctggccagggcaatcaggaaggacaaagaactaaagggtattcaagtaggaaaagaggaagtcaaattgtccctgtttgcagatgacatgattgtatatttagaaaaccctatcatctcagcccaaaatctccttaagctgataagcaacttcagcaaagtctcaggatacaaaatcaatgtgcaaaaatcacaagcattcctatacaccaacaacagacaaacagagagccaaatcatgagtgaactcccattcacaattgcttcaaagagaataaaatacctaggaatccaacttacaagggatgtgaaggacctcttcaaagagaactacaaaccactgctcaacgaaatcaaagaggacacaaacaaatggaagaacattccatgctcgtggataggaagaatcaatatcatgaaaatggccatactgcccaaggtaatttgtagattccatgccatccccatcaagctaccgatgactttcttcacagaattggaaaaaactactttaaagttcatatggaaccaaagaagagcccacattgccaagacaatcctaagccaaaagaacaaagctcaaggcattaggctacctgacttcaaactatactacaaggctacagtaaccaaaacagcatggtactggtaccaaacagagatatag

SEQ ID NO: 20098 - DNA, 2321 bp, Homo sapiens
  SIMILAR (121)..(1935): 541254mologous to Homo sapiens gonadotropin inducible transcription repressor-4,accession number AB021644,Smith-Waterman Score=1681.
atggggaaaaacacccccatgattcaattatctccaccaggtcccttccacaacagtgagtacagattcccagtgctgtcagtttcagctttcctcctctacacatgtgagatgtttcaggacccagtggcttttgaggatgtggctgtgatcttcacccaggaggagtgggctttgctggatatttcccagaggaaactctacagggaagtgatgctggaaactttcaggaacctgacctctttaggaaaaaggtggaaagaccagaacattgaatatgagcaccaaaaccccaggagaaacttcaggagtctcatagaagaaaaagtcaatgaaattaaagatgacagtcattgtggagaaacttttaccccagttccagatgacagactgaacttccaggagaagaaagcttctcctgaagtaaaatcatgtgaaagctttgtgtgtggagaagttggcctaggtaactcatcttttaatatgaacatcagaggtgacattggacacaaggcatatgagtatcaggaatatggaccaaagccatgtaagtgtcaacaacctaaaaaagccttcagataccgcccctcctttagaacacaagaaagggatcacactggagagaaacccaatgcttgtaaagtatgtggaaaaacctttatttcccattcaagtgttcgaagacacatggtaatgcacagtggggatggaccttataaatgtaagttttgtgggaaagcattccattgtctcagattatatcttatccatgaaagaattcacactggagagaaaccatgtgaatgtaaacagtgtggtaaatcctttagttattctgctacccatcgaatacataaaagaactcacactggagaaaagccttatgaatatcaggagtgtgggaaagcatttcatagtcccagatcctatcgtagacatgaaaggattcacatgggagaaaaggcttatcaatgtaaggaatgtggaaaagcattcacgtgtccccgttatgttcgtatacatgaaaggacccactctaggaaaaatctctatgaatgtaagcagtgtgggaaagcattatcctctcttacaagttttcaaacacacgtaagattgcactctggagaaagaccttatgaatgtaagatatgtggaaaagacttttgttctgtgaattcatttcaaagacatgaaaaaattcacagtggagagaaaccctataaatgtaagcagtgtggtaaagccttacctcattccagttcccttcgatatcatgtaaggactcacactggagagaaaccctatgagtgtaagcaatgtgggaaagcgacacacaatggagagaagccctatgcatgtaaggaatgtgggaaacccttcggatctgcccagaaccttcgaattcatgaaaggacacaaacacacataatgcactctgtagagagaccttataaatgtaagatatgtgggaggggcttttattctgccaagtcatttcaaatacatgaaaaatcttacactggagagaaaccctatgagtgtaagcaatgtgggaaagcctttgtttccttcacttcctttcgatatcatgaaaggactcacactggagagaacccctatgagtgtaagcaatttgggaaagccttcagatctgtcaaaaatcttcgatttcataaaaggacacacactggagagaaaccctgtgaatacatgaaaagactcacactggaaggaaacactatgaatgcaagcaatgtggcaaagctttcacttcttccagttcttttcaatatcatgaaagaacacactagggagaaaccctatcaatgtaagcaatgtgcaaaagcctttatttcttccacttcttttcaatatcatgaaaggactcacatgggagagaaaccctatgagtgtatgccaagtgggaaagccttcatttcctctaagttcccttcaatatcatgaaaggactcacactggagagaagccctatgaatataagcaatgtgggaaagccttcagatcagcctcgcaccttcaaatgcatggaaggactcacactggagaaaaaccctatgaatgtaagcagtatgggaaagcgttcagacctgacaagattctttgaatacagataatgaatgtaaacaattaactgtttataataactgtatactaacaaatgatattctttttaaataagaagctataatatcccattggtgtcatgtattagatcagccttatactgttaaattgttattatttggacattgtgagtcagtataaccatgtggataaaatgccagacatctttttattcg

SEQ ID NO: 20099 - DNA, 420 bp, Homo sapiens
  SIMILAR (86)..(259): 1001254mologous to Homo sapiens dJ694E4.1 (similar to phosphatidylserine decarboxylase),accession number AL031255,Smith- Waterman Score=309.
  misc_feature (1)...(420): n = a,t,c or g
ggtaccggtccggaattnnngttttgacgatttcgtcaccgatgtctgggattactgcacggggttgcgccgtggcggagcagatgccagaaaaatccacactgcccctgcccgaaccatgttcctgctgcgtcccctgcccattctgttggtgacaggcggcgggtatgcagggtaccggcagtatgagaagtacagggagcgagagctggagaagctgggattggagattccacccaaacttgctggtcactgggagccctgaccctctattctgcaccctgtgagccaccgagactgaaccaaacccaggaagcggcgccaccaaccagcctcgcagaggcagaggccctggagcagtgacagcacaggagatctgctggctcgggggaaggggaggaaagaggaaaacaaagggag

SEQ ID NO: 20100 - DNA, 470 bp, Homo sapiens
  SIMILAR (139)..(348): 781254mologous to Cricetulus griseus phosphatidylserine decarboxylase,accession number M62722,Smith-Waterman Score=309.
  misc_feature (1)...(470): n = a,t,c or g
cgcctgtaggcggcacgagaagatggcgacgnnnnnnnacaccgatgtctgggattactgcacggggtcgcgccgtggcggagcagcctccatccctgtgagatcactgccctgagccaatccctacagcccttacggaagctgccttttagagcctttcgcacagatgccagaaaaatccacactgcccctgcccgaaccatgttcctgctgcgtcccctgcccattctgttggtgacaggcggcgggtatgcagggtaccggcagtatgagaagtacagggagcgagagctggagaagctgggattggagattccacccaaacttgctggtcactgggagattagcccatcggatggaaggatcctcaactttgggcaggtgaagaactgtgaggtggagcaggtaaagggggtcacctactccctggagtcggtcctgggcccgcgtatgtgcacagaggacctgcc

SEQ ID NO: 20101 - DNA, 482 bp, Homo sapiens
  SIMILAR (318)..(13): 281254mologous to Lilium longiflorum ribulose 1,5 bisphosphate carboxylase small subunit,accession number AB047542,Smith-Waterman Score=76.
tcttctgaggacactgatgacactgattaatgatacagacctgcagcaggcaagaccaatcaatcactgaacctgcctcatggcaccagagtgaacagggcaggcaggtagtaggcccagctggggaaatgggagagttcctgtccccctccacatatccctacatgaaatatgggaaagttgctgctattgattcagggtctgtcttggaggcagaggacccttggtggatagttggtcagtgcctggaaaacctgtcccagtttatcaggaacgcaggcctggggagcccccagtggcggggacagggccagatttcatgttgaccctggggatgctgtgaatttctcctgcaggagagacatcattgaattttttcaactgtatcagtagcacagtatttttgtatgaaaagtgggagacttctgaacagtaattcatttaattgcaaagcattttgaaataaaaaaaatcaaacttaa

SEQ ID NO: 20102 - DNA, 2679 bp, Homo sapiens
  SIMILAR (737)..(1189): 861254mologous to Cricetulus griseus phosphatidylserine decarboxylase,accession number M62722,Smith-Waterman Score=722.
  misc_feature (1)...(2679): n = a,t,c or g
cgctgagaaggagcagacaagatggcgacgtccgtggggcaccgatgtctgggattactgcacggggtcgcgccgtggcggagcagcctccatccctgtgagatgactgccctgagccaatccctacagcccttacggaagctgccttttagagcctttcgcacagatgccagaaaaatccacactgcccctgcccgaaccatgttcctgctgcgtcccctgcccattctgttggtgacaggcggcgggtatgcagggtaccggcagtatgagaagtacagggagcgagagctggagaagctgggattggagattccacccaaacttgcttggtcactggggagtgtggctttgtacaagtcagtgccaacgcgcttgcttgtcacgggcctggggtcgcctcaatcaggttggagctgcccacactggcttgcgcaggccccgttttacaagcctgttacatctggacgtttggggtgaacatgaaagaggcccgtgtggaggacctgcatcactaccgcaacctcagcgagttcttccggcgcaagctgaagccgcaggcccggcctgtctgtggcctgcacagcgtggtgaggcctgaccctttcctcctgcaggaaacaggactttttcctgcctccccagcacagcccccctggtctccagcgtatctggaaggggcaggatgacaaggggaggtgggggctgtctcctggggggaggagaccctgctctccctggcagcaagcctctcctgcccttccagattagcccatcggatggaaggatcctcaactttgggcaggtgaagaactgtgaggtggagcaggtaaagggggtcacctactccctggagtcgttcctgggcccgcgtatgtgcacagaggacctgcccttcccaccagccgcgtcgtgtgactccttcaagaaccagctggtcacccgggaagggaatgagctctatcactgtgtcatctacctggcccctggggactaccactgcttccactcccccaccgactggactgtgtcccaccggcgccacttcccaggctccctgatgtcagtgaaccctggcatggctcgctggatcaaagagctcttctgccataacgagcgggtggtcctgacgggggactggaaacatggcttcttctcactgacagctgtgggggccacccaactggggctccactcgcatctattttgaccgggaccgcaacacaaacaacccaaggcacagcaagggctcctacaatgacttcagcttcgtgacgcacaccaatagagagggcgtccccatgcgtaagggcgagcacctgggcgagttcaacctgggctccaccatcgtgctcatcttcgaggcccccaaggacttcaatttccagctgaaaacaggacagaaaatccgctttggggaagccctgggctcgctctagagtctctttcctgattatggctgctaagggatcttttccaaacagagtgaggggtcttttcaagagggaggcccatgagcgcattccagggtaagggccctgcctcagcgtaggttgggagtctgaccaggtaaggacttgaattgattcggctacccacctgtttccagaagttgccagacaagaggttggcgagagcccccattcattgcccctcaaccttttcccgtttcctttttggccttacaattaaaaagttgcagggtgggattgatcttcagttcacatttgggatctttttaaaacactgtattggacgggaaggagccttgcatttcctgaccgaaccttcagttgggtctcggttgttcgttttttcttgctgctcctccccccatcacctgagctgttttctgttgggccccttttgttttttggccttaacgctcctgctgcacagggtgaggtacctccttgggcacagactgtgggatggcctctcccccaggcagagccacacagccttcgtgacaactgctttccgttcccacattcacctcatcctgctctttaggaaaaagcagtctttgtgcttgtgggtggaacggcatcacccgggactttgctaggtgtctttctgaggaccactgatggacactggatttaatgataacagacctttggcagggacctggatggagttgaccctttttgggagctgggccagggtcctctggcaggcagggcaaggaccaatcaaaccactgaaacctgcnctccatggccacccagagtgaaacagggccaggccaggtagtagggccccagctggggaaaatgggaaaagttccctgtccccccctcccacatatccccctacatgaaatatgggaaaagttgcctgcctattgaattccagggtcctgtccttggaggcagaggacccttggtggatagttggtcagtgccctggaaaaccctgtcccagtctattcaggaaccgcagggcctagggtagcccccagttggcggggacagggccagatttcatgttgaccctggggaatgctgtgaatttctcctgcaggagagacatcatttgaattttttcaactgtatcagtagcatagtatttttgtatgaaaagtgggagacttctgaacagtaattcatttaatgtgcaaagcattttgaaataaaaaaaatccaccttaaaaagaaaaaataaaaaacaaaaaaa

SEQ ID NO: 20103 - DNA, 1438 bp, Homo sapiens
  SIMILAR (538)..(1125): 361254mologous to Homo sapiens Human secreted protein clone rd232_5 protein sequence SEQ ID NO:58,accession number Y94926,Smith -Waterman Score=236.
ggtcgacccacgcgtccggcgagtcgccggtcgccggtcgcggcggagcctgggcgctgaagtaccggggcctggacgagggggccgcggtctggctagggagccgcgcgggctcatggcgaagggacttggagggaagcgggcctggagctgctgccgccgcccctgagctcggacgcgaaggctggccccgtccccgggctgccgccgtggtcctgcagtgaagaaaatgaggcacgaggaattgttaaccaagaccttccaaggcccagctgttgtgtgtgggactccgaccagccacgtatacatgtttaagaatggcagtggggactcgggggactcttctgaagaagagtctcaccgtgtggttttgcggccccgggtcaaggagcgccacaagagcggtgtccaccagcctccccaggcgggagcaggtgacgtggtgctgctgcagcgggagctggcccaggaggacagcctcaacaagctggcgctgcagtatggctgcaaacattcagagtgattaacaatggcaaagttgcagatatcaagaaagtcaacaacttcatcagagaacaagacttatatgctttgaaatctgttaagattccagtgagaaaccatgggatcctgatggagacccacaaagaactgaaaccccttctgagcccgtcttccgagaccacagtgaccgtggaactgccagaggcagacagagcaggcgcgggcaccggtgcccaggccggccaactgatgggcttctttaaggggattgaccaggatattgagcgtgcagtgcagtcagaaatctttctacatgaaagttactgcatggacacctcccatcagccactgctcccggcacctccgaagacgcctatggatggtgcagattgtggcattcagtggtggaatgctgttttcatcatgctgctgattggtattgtcttgcctgtcttttatttggtctactttaaaatacaagctagtggtgagacccctaatagcttgaacacaactgtcatccccaatggctcgatggcaatgggtacagttccagggcaagcccccagactagcagttgcagtgccagccgtcacttctgcagacagccagttcagtcagaccacccaagcggggagctaagctttgtttttaaagactcggcccagctttagcaattggctgttgatgtgcctcagctgtcactggcgatgtcctaggggtgctgcattttgcttccggggaaggatggacacttttcagaagtcactgcagtattcccaattgcactggccctgggcatggccttacccagtctaagctggcaggatctaaaacagcagcgacctcggcccctatccagagaggtgcagcaagagagccatttccctgtgacatatagtggactggccagttcatagcagcacaatgtatt

SEQ ID NO: 20104 - DNA, 626 bp, Homo sapiens
  SIMILAR (7)..(249): 311254mologous to Gorilla gorilla transitional protein 2,accession number AF215718,Smith-Waterman Score=86.
agatattccagtacactcaccagaccctggactcagactccgaggacgagagccagtcctcacagtcgctgttgcaggcgcactcactgccagaccctcgcctcccagacctacaaagccttcaagggcaggggtccatgccagcaggaggccaccacaggacctggggcccataggcaagggatctgctaagaccaagggcccccgacatcaaaggaagcatcatgaaagcatcacacccccaagcaggtcgcccaccaaggaggcacctccaggcctcaatgatgacgcccagatcccagcctctcaagaatccgtggcacctctgtggatcccagtgacagctccttgagctcacagagttctttcctcctgtgagtttggagcggcatttgagtctgcaggtgaagaggagggcgagggggaggtcagtgcctcgcaggcagccgtgcaggcggcggacacagacgaggcgctgaggtgctacatccgctccttgcggccctgtaccagaaggtgcttctgtaccagccctttgagctgcgggagctgcaggcagagctgaggcagaacggcctccgtgtgtccccgcgcaggctgttggactttctggacaaccactgtca

SEQ ID NO: 20105 - DNA, 5770 bp, Homo sapiens
  SIMILAR (120)..(677): 271254mologous to Leishmania major L8453.1,accession number AC008054,Smith-Waterman Score=127.
ggcccagcaatgcctgtggaggcataacccacgctgggtgtcccaggtcctccctgcaaatggcgggggtggggactcctgatggcaggttggggtggggtcgggatggccccatcagttccgctccaccttcttcttgccccgaggctgccgcctcctgccctggagcttctccctgcgggtggcggcagtggtgaaggtgatacagtgggtgtccaggaagtccaacagcctgcgcgaggacacacggaggccgttctgcctcagctctgcctgcagctcccgcagctcaaagggctggtacagcagcaccttctggtacagggccggcttggagcggatgtagcacctcagagcctcgtactgtgtccgccgcctgcacggctgcctgcgaggcactgacctccccctcgccctcctcttcacctgcagactcaaatgccgctccaaactcacaggaggaagaactgaaaagagccagaccaggacgttgtgcaacccctttctctccagcccctgagaccatgagcctctttaaaggaaggaaggtgtctacgggtcccatggagcctggcctctgtgagctcaaggagctgtcactgccatccacagaggtggccacggattcttgagaggctgggatctgggcgtcatcattgaggcctggaggtgcctccttggtgggcgacctgcttgggggtgtgatgctttcatgatgcttcctttgatgtcgggggcccttggtcttagcaggtcccttgggcctatgggccccaggtcctgtggtggcctcctgctgggcatggacccctgcccttgaaggcttgtaggtctgggaggcgagggtctggcagtgaggcgcctgcaacagcggctgtgaggactggctctcgtcctcggagtctgagtccagggtctggtgagtgtactggaatatctccttcagcttcagaaccatctggcgtttaggcagagggcggactccaaacctatccagttccttcttcagcaccggcgtctccataatggaatactgtggcatcggcgttatgggcactttggggggcaagttcttcttccgattagcacctttgggtgtctctaacccttcgggcttctgagctccaccagcgcttggcatctgggccggaggaggggtctctggaggcctctgctcttccccgtcccaaacgtcccacagagccgaattcagaaagctcggcctgctattccccagggagcccgcgcccgaggacttctcttgcaatttcctctgggtagtgcagcttcctcggatgggggtggtgtccaggagtcccggggagcgacagtcacggctgtcggcggcctcgttcatcctgcggctggggctgctggtgctcagggggccggtccgctccaggttccagtggtcaatgggaattggcgagaggggctccatgtgccagcagcagtcgtcaattggaattggggggtcactgtccagtggggggcttctgttggcctgatgggaggccacctcctgctcatcgtcactgtctccgacttccaccacttcacccgctggggtctggttcaggaagcttggcccaggcggcgagtgtttcaggaaccgcctgctgaagtgggcgcggtcccctgagatgggatgtggagccagcggagaggagtgcgggtggcccccggggtggggacgggaagggcttctgtggccttgccttctgccgtcagaagttcctggagagacgggagtgaggcatgaggacggtgtctggggcggtggtgtctggggcctgatgacagaaaacttctgtgcgacttcgttcccttccctgtttcctactgaggccctgggcgtgtgctgagtcaccgcctgcacggccagcccgctcctgaggctgctgatttgggtctgggaagaacagtcacggcttctgctggccagcggggtggcgggcaccagccacgaggtgtctgtggtgctggcctcgctggggctgctctcacggtcacagaacagccagggagcccctctcctgcccaaagagccccgattctccggcagcgccccctcatcctcctgctgcagcacagcttcgcttcttggtgggctctgggaaggttcctgatctgcatcaacatcaatgatggaaaacagctcacaggacctagggctaatttctagagctttcttttcttccagaggatcactagaaatggacttcattttggtttgttctagctccagctcctcatccgagtccagtaagaggatgacctcatcttcttcgttcagtttggatgaagatttctgagatctggagctcgaatggtcaggatttgactgggttaggtcaatagacggagatttttctgggaacatcaggacccccttatttctgcactccagcacggaccgacgctctttgcctttctggtgccctggctctttagacagcgtgaggatgctcctgtcccttttctgctttgatggcacagctggagacagcaaggttggggagcccacctgggaagttccgccacgggaccggggtgttgacagggacgacccacttgtgtgatgagacccgcggggactcccgccctggggaggccccaataggaagcggcacgggtgcggtggagatgcctgccagggagccaggcgatgagaaacctccagccccctttccctgacagcgccactttgttcctcgggctcacttgttatttgggacggctctgagatctctccctgagttgatgagaagagctgttcgtaatccccggcatcatctgagtgcggaagagagccttcttttctctctgcctggcagtccctggaagggctggagcagctggaatggccaagcgcctcctctggcgcctcctgctcaggggcctctgctccccgtgcccctgagtgctggccctggggtggcgggagagcgcactgtcccatcttctcccaggtggtggcggcctcatctcttcctggctccaacggctccatctcctccaccttgtcccactgtttctgcacctggacacctgctaggagttgcccagaaaccggactgccaccctccagccagtcagcgtcctcgccggcacccgctgccctttcttcctggagaagctttcgctgagtagctgcaaattcataaatttcttccatttctgcttcattcacgttttcttgatcttcttcgtggtccttggatttcaacaaagtcttcgcttcctcctcttcatctgcccacattgacctcaagagttcctgggaaattctcggccctgctttcgcaattctctgcttccttctcctcccatggtttgccctctgagtcagtggcaataggcacctgttcgacacaggtgaacgagctcactcacgccaaacctgtgggccagggagctcagctcagagctaaggccaggaggaaggccagtgtccgcagtgtagagatagtgcaggaacgtgcgggcggcctcggtgctcacgtcacccagcaggacacgctgggtcagaaccccgtcctctacagcggagaagccttcattgttcacatactggatgaggagcgggcatcgggcataaagcacgaacttgtgggcgtaaagcacctccccgctgtccgtctgaaactggacatcactcaggtgtgggttattgaccatggcgccaaagtcagcaaccagcagcccgagggagagcaaggtgcggccgcccctgtccgggtgcttgtcctgcgatggcaccacaaacccagtcagaggaaggccgccgggcaccacgtccaaccctgcagtcccttccgagccagccaggcccccactgccgggccacgggctggcgcatcagtccctccctcgccaggtccacgaggtcctgcagggcctggtgctccctctggctggccgaaggcgacgggcccctggagccacagcctgcagtgggggtgccgtggagagcgggtgaccttcgctcgctcagctctgagtgctcaggtggcaccagaggcggcacgggctcctgcataaggccctgggcaggccgctggggcacgagaggagggaccagcctggccgtgtagaagtcctccatggcccaggccccagtcagtgcgctgccctcccacagaaagctctgcgttgcgttcaggtgggaggaggacacttggcccgcttctttcccacccttcctttaaaatcctgctggcaggaagtggtggcgtgctagacaattccacttcctcagagaggagcagggccacacggtcctctatctgtcggcctgtggtttcagagtcctggactaacaacaatgggggggataccgggggtttcttcttgcgacttttattctccgggacctgctgatggcctctcccagggtcactcttctgatcacacaaacctgcttctggtcttatcctctcagaaaaggcactttccagcctgagcgctggtacagccgcacccggctccatctccgaccgggacagagccatggccaccagcaggtcctcggacggtgcctcgtccaccttccgcctcttccgtggctccttcttgctggtgggtcctctccgtttcagacctctactgtgatcactgaagctgaacatgggtgggctgctgctaccctcaggctgtgctgtctgcagccgcacagcctgaagcaggagctgggggccaacctccatcttcacagcacactgcttcaagtgactggttctgctctttaaggtaagaaacggtttcccacaaatcgggcactcagggatctgaggcacagaaggtcttagtgtcttttcagcttcatccaagcacctgttcacatgctgttcccttcgggtcacgttcatggctgagaggttcttttgacaaatctggcagaagaacaaacccttttcctccaggctatcatcatgtgccgatgctcctacccgtgcaaactcctgctgcagggtcaaggccaccgcagcgtcgctctctggggcagggggcccaagcccatacacattccccgccatcatctcctcttgaggatcctttgggacattttcttcccgcgcagcctcgagggagcactcttctgaagcgtgtctcaaacgctcggggtctgctctcttgaactgctgcattcgctgtaggaccaattgtgctgtgcggggtttggagggacttggcactgctctggttttctctctggaaaggtttggcgatggttcttgctggttacccgtctgggtgttttgtgctgtttcccggagcacaggtggatctggagcagaggcaagcacacccccctccccattcacagagtgggccggttcacttgcttgccatttggttaccctttgctttttagtcctaggggcctggctgccagacggaggtttcttctctgcagggccttgaagggttttggtcttggtagcagtttgtttggtccttttcaatttgcttcttatctgagtgccgtttgaggcagccttttgtgtcttcctttctcctgacacttccttgattccatgttttttcaccctttggaaaaagctagcgcagagttctttaaagtcctcatcagactcatccatcatctgaccagttttaaggctttcaggctggtcttcagaggagcgagggtcaatcccaggacaggcagacagatgagaaagtgaacccaagtagaagcctagctgagcctcattcacactcagtttcattagggttcttctctacttctccattagatacttgg

SEQ ID NO: 20106 - DNA, 538 bp, Homo sapiens
  SIMILAR (169)..(537): 951254mologous to Homo sapiens BAT2-iso,accession number AF253978,Smith-Waterman Score=616.
  misc_feature (1)...(538): n = a,t,c or g
ctcgctcgctccccctcggaaagctgcgaaagtgctttggcggtttgtccatccgcagcttcggcttttccagtctggtggcccttccggccacccctttaaccccagctttccctcccccttctttcgatcagagatcggcggagaccctcgaagtgcgcaaacttgacactcaccctgaccgttgcagctcgacatggattacagagtcttggaaaagtcggtatttcacggcgtatgcctccacctgctaacctcccaagtcttaaagcagaaaacaaaggcaatgatcctaatgtaaacattgtacctaaagatggcacagggtgggcatcaaaacaagagcaacatgaagaagaaaaaacaccagaagtgccaccagcacagccaaaacctggggttgcagctcccccagaagtagcacctgctcccaaatcatgggccagtaacaagcaaggtgggcaaggagatggaatccaagtgaaatagcagtttcagcaagaatttcccagcctgcaggcagctggggatcagaaan

SEQ ID NO: 20107 - DNA, 569 bp, Homo sapiens
  SIMILAR (494)..(6): 381254mologous to Leishmania major proteophosphoglycan,accession number AJ243460,Smith-Waterman Score= 214.
atgactggggcagctggggaagaggctgctggggctggcgttggagctgaagttgatgctagggctgaagcaagaatgggaattgaggctgaggcaagaatggtgacagaagctggggttgaaactgaggcaaggatgggggttggagctggggctgaggctggagctgaagaagaggttatagctgcagctgaagtagaggctggaactgaagctgagactgaggctgaggctgaaactggagctaagggtgaggctggaactggagctgaggttgaggccagaactggagctaaagttgaggctggaaccggagctgaggttgaggctggaactggagttaaggttgccggaagtggagctgaggttgaggctggaactgaagctgaggttgaaggtggaagtggagccgaagctagagcctctgctggtgatacccaggcagtggacctccagcaaattccaacagacctgcagctgagggacctggctgttagaaggaaaactaacaaacagaaaggaatagcatcaacatcaacaaaaaggacatccacaccaaaaccccatct

SEQ ID NO: 20108 - DNA, 1098 bp, Homo sapiens
  SIMILAR (975)..(844): 771254mologous to Mus musculus GM2 activator protein,accession number U09816,Smith-Waterman Score=177.
atgcccggacccaaggccctctccacgcggccccctagcctccgggcgccagggtctgggtgcgctcccacgccccaggccgcactctggccgttcccgatggggccctctttgatcgcggcccccacaccctcgctttccttaccgggtgagtgtcaagtttgcgcacttcgagggtctccgccgatctctgatcgaaagaagggggagggaaagctggggttaaaggggtggccggaagggccaccagactggaaaagccgaagctgcggatggacaaaccgccaaagcactttcgcagctttccgagggggagcgagcgagcgagaaaaagaagcaagatggcggctagccagcccctacgtactacgtcatgacgctaagtacaatcaatttgtcacattcccctcaaaatccagctggagtcctggagagtgggctgtcccgcttccgagtgggaacgttcatagtgtcgttgatgagagattaaatatgggtgatgttgagaaaggcagaagacttttgttcagagtgtgctcagtgccacatggacccaatcttcatggcctctttggaaaacagatgagttcactggattctctctcacagacattaggtgtccgctgttcttctgatccagtgaggtgcccattgccactcctgatcaggctagaggcttgccattattcctgcatggctaagtgccgaggatctataggaactactaaaacaggctcattgtctggggtaaataccaaggttcttgatctcatggccaaggaaatcaaggatgcagatgcatacagactgagattggagcaggagtttaaaagccaggatgggagagacagcaatcttgaggcagctcagacgctttcctccgctgctcaggatgctctcaatgcggtagtttctggtgctgagccagctgggcagctccaggtcaggcacagtgaactcactcatggacatagtagagatatttgtgtggctcaggaaggacaaagattggacctgtcagacatgtacagtgtcctgtggggagaaaatctagtgatgaccctaaattttggaacttggacttttgtggatgactaa

SEQ ID NO: 20109 - DNA, 2415 bp, Homo sapiens
  SIMILAR (626)..(2062): 451254mologous to Homo sapiens KIAA1096 protein,accession number AB029019,Smith-Waterman Score=806.
atgtggaaaggatttaccattctagactcctttaagaacattagtgattcatgggaggatgtcagaatatcaacattaacaggggtttggaagaagttgattgtaaccctcatggatgacttggaggaattcaagacatcagtggaggaaataactctgacgcaaagaaagttgttttttgtgatggaatctcctgtaggtcccattagtccaccacagccaccttcagtcagtgcatggaataagcccttaacatcgtttggatcagctccttcatcagagggagcgaagaatggtcaagaaagtggactcgaaattggaactgacacaattcagtttggtgctccagcctcaaatggaaatgaaaatgaagttgttcctgtgctttcggaaaaatctgctgacaaaatacctgaacctaaagaacagcggcagaagcagccacgagcaggacctatcaaagcccagaagcttccagatttgagtccagtagacaacaaaagaacacaaacctggtcccattggaaaggaacgttcattaaaaaatagaaaagtaaaagatgcccaacaggtggagccagaaggacaagagaaaccaagcccagctacagtcagaagcacagatcctgtcacgacaaaggagactaaagcagtctcagaaatgtctactgaaataggaacaatgatctcggtatcatctgcagaatatggtactaatgcaaaggagtctgtaacagactatactacaccctcttcttctttgcctaacaccgtggctactaataatacaaagatggaggatactttggttaataatatggagtctgcacgcaaagcatgggagaattctccaaatgtaagggaaaaggggtctccagtaacttccacagcacctccaattgcaactggagtcagcagtagtgccagtggaccaagcactgctaattacaattcgttctcaagtgcatccatgccccagattcctgttgcttcagtcactcctacagcatcactatcaggagctggtacatacactacctcttctttgagcacaaaatctacaaccacatcggaccctccaaatatttgtaaagtgaaacctcagcagttacagacaagcagcctgccttctgcaagtcatttttcacagttaagctgtatgccttcccttattgcccagcagcaacagaatccgcaagtttatgtgtctcagtctgcagcaggacacttactactgcttgtttatcctgatggtctacagctcaaatcccagccttctatatggacacaagtcatttattcaatacccaacatgcacgattggctccgccatccttggctcaacaacagggtttccaaccaggtctctctcagatctcagccagcttttatgcaaagcagtttatcccagccatctgtggtcctttctggtactgctattcacaactttccaactgtccaacaccaagaacttgccaaggcacaatccggtcttgcctttcagcaaacatcaaatactcagcccattcctatattgtatgaacatcaactggggcaggcatcaggactaggaggttcccagctgattgacacacatcttctccaggttacagtacctttaccagcatcgcagctttccttgcctaattttggatctacagggcaacctctaattgctttgcctcagactcttcagcccccattacagcataccactccccaagcacaggctcagagtctgagtcgtcctgcacaagtaagccagcctttcagaggattaattcctgctggaacacagcatagcatgattgcaaccacaggaaaaatgtctgaaatggaactaaaagcctttggaagtggcattgatataaaaccaggcacacctccaatcgctggtagaagcaccacaccaacatctagtcccttccgggctacttctacaagtccgaacagccagtccagcaaaatgaacagcattgtctaccagaagcagttccagtcagcccctgccactgtgagaatgacacaaccatttcctacacagtttgcaccccagaagagagctgtgggaagaggactcagccacaagacatttggtcctaggtgttggtaatgccacaatataagtgcttccttttcattttattgtagaccacatattgataactagaagttttaagtgttacatgtatgtttttagatttgcaagcaggttcccgcctgctgttctccaggtgccctcagttcaaggtaatcagcccgccaaagcatcttgttttgggctggcatttcctgaactccttcagtggttaagctcagggatctggagttggcaattctggtgtgctttaaccttggacaagtaactcagccactttttacgttgagtaggtgtcctgacctccttgcctaatt

SEQ ID NO: 20110 - DNA, 10578 bp, Homo sapiens
  SIMILAR (5980)..(7845): 831254mologous to Homo sapiens hypothetical protein,accession number AL096857,Smith-Waterman Score=2456.
tagccgccatcttgcttctttttctcgctcgctcgctccccctcggaaagctgcgaaagtgctttggcggtttgtccatccgcagcttcggcttttccagtctggtggcccttccggccacccctttaaccccagctttccctcccccttctttcgatcagagatcggccggagacccctcgaagtgcgcaaacttgacactcaccctgaccggacctggggttttaaggggtgtggcaggaggttttggactcgatgagtttccaccgaaatgtcggagaagtcaggccagagcacaaaagcaaaggatgggaaaaagtatgcaacactcagttttatttaatacttcaaaggggaaatcattagaaacacagaaaaccacagttgcagctcgacatggattacagagtcttggaaaagtcggtatttcacggcagtatgcctccaccatgctaacctcccaagttcttaaagccagaataacaaagagcaaatgatcctaatgtaaacattgtacctaaagatggcacagggtgggcatcaaaacaagagcaacatgaagaagaaaaaaacaccagaagtgccaccagcaacagccaaaacctggggttgcagctcccccagaagtagcacctgctcccaaatcatgggccagtaacaagcaaggtgggcaaggagatggaatccaagtgaatagtcagtttcagcaagaatttcccagcctgcaggcagctgtggatcaggaaaaaaaaagaaaaggaaacaaatgatgacaactatggaccttgacccagtttacgtccaccaaatgttgcttgttggagagatggtggtaaggctgctggctcaccttcgtcatctgatcaagatgaaaagctccctggccaggatgaaagcacagctggaacatcagagcaaaatgatatcctcaaagtggtggaaaagaggatagcttgtggtcctccacaggctaaactgaatggacagcaggctgctctcgcttcccagtatagagctatgatgcctccttatatgttccaacagtatccgaggatgacatatcctcctctacatggtcccatgagattcccaccttctttatctgaaacaaacaaaggccttcgaggaagaggcccacctccttcatgggcctctgagcctgaacgcccatccattcttagtgcatcagaacttgaaggagcttgataaatttgataacctagatgctgaagcctgatgaaggttggggcaggtgctcagatgggaagtagattattacagaggcaactggaattttcagtgatgatgatgacaaaggaagtaaccagtcctaaagagaataacagtgaggatcaaggttcaaaagcctctgaaaacaacgaaaacaaaaaagaaacagatgaagtttccaacactaaatcattcttcccaaatacctgcccaaccatcagtagcaaaagttccctatgggaaaaggaccttcatttaatcaggaacgtggaacatcttcacatctgccaccacctccaaagttgcttgcacagcagcatccacctccagatcgaccaggcagtacctgggaagaccaggcccctttccctccaagcagcaagtagctgatggaagatggaaatatgggaagcaaagacgaagacaacaatcagaaatttctgcagcagtagaacgtgctcgtaaaacggcgtgaagaggaagagcgaagaatgggaggaacaaagggaaggcagcttgtgcggagaaactgaaacgattggatgagaagcttggcatcctggaaaaacaacccatctccagaggaaattagggaaagggagcgagaaaaagaacgggagcgtgagaaagaacttgaaaaaagaacaagaacaggagcgagagaaggagagggaaaaagacagagagagacagcaggaaaaggagaaagagctggagaaggagcaggaaaaacaaagagaaatggagaaagaaagaaagcaagaaaaagaaaaagaactagaacggcagaaagaaaaggaaaaagaactacaaaagatgaaagaacaagaaaaggaatgtgagctggagaaggaaagggaaaaattagaggagaaaattgaacccagagaacctaatttagagcccatggtagaaaaacaagaaagtgaaaacagctgtaataaagaggaggaacccgttttcactagacaagacagcaatcgcagtgaaaaggaagccacaccagtggtgcatgaaacagaaccaagaatccagggtctcaacctcggccggctgtattatctggctatttcaaacagtttcagaagtctttacctccacgattccagcggcagcaggaacagatgaaacagcagcagtggcagcagcagcaacagcaaggtgtacttccacagactgttccttcacaaccgtccagtagtactgtccctcctccaccacacagacctctttatcagcctatgcagcctcatcctcaagcatttggcttctatgggttttgatccaaggtggctcatgatgcaagtcctacaatggatcctcgaatgatgtcaggaagaccctgctatgggatattccacccattcatcctgggaatgattcctccctaaaccattaatgaggaagaggacagatggaagggtcaccgaacagttctggagtcatttgagcatatagctcgatctgcaagagatcacgcaatttccctttctgagcctcgtatgctgtgggggttcagatccctatcctcatgctgagcctcaacaagcaactactcccaaagcaacagaagagcctgaggatgtaaggtctgaagctgcgttggaccaggaacagattactgctgcttattctgtagaacataatcaattagaggctcacccaaaggcagactttatcagagaatcaagtgaggcacaagtacaaaagttttttaagcagatctgtggaagatgttagacctcaccatactgatgcaaataatcagtctgcttgttttgaagcacctgatcaaaagaccttatccactcctcaagaggagcggatttcagctgtagaaagtcagccttcccggaaaagaagtgtttcccatggatctaaccatacgcaaaaaccagacgagcagagaagtgaaccatctgcaggcattcctaaagtaaccagcagatgcattgattcaaaagaaccaatagaaaggccagaggagaaaccaaaaaaggaaggctttatacgatcttctgaaggaccaaaacctgaaaaagtatataaatctaaatcagaaactcgttggggcccacgaccaagctctaacagaagggaagaagttaatgatagaccctgtgagaagatcaggtcccattaaaaaacctgtacttagagatatgaaagaggaacgggaacagaggaaggagaaagaaggagaaaaggccgaaaaggtcactgaaaaagtagttgtaaagcctgaaaagacggaaaagaaggatcttcctcctcccccaccaccacctcagccaccagcaccaattcagccacagtcagttccaccaccaattcaaccagaagcagagaaatttccttcaacagaaactgcaactttggctcaaaaaccatctcaggatactgagaagcctctggaacctgtgagtactgttcaggtagagcctgcagttaagactgtaaaccaacagactatggcagcaccagtagtcaaagaagaaaaacaacctgagaaagtcatcagcaaagaccttgttatagagaggcctcgaccagattcaagaccagcagttaaaaaagaatcaactttgcctcccaggacctattggaaagaagctagagagagagattggtttccagatcaaggatacagaggtcgaggccgaggtgaatattactccagagggtcgaagctatagaggttctttatgggaggggcgtggcaggggttggtagggggacacacttcgagattatcctcagtatagagacaataagccaagagcagagcatataccctcagggcctctcagacagcgagaagaaagtgaaacacggagtgagagctctgattttgaagttgtccccaaaagaagacgacagcggggttcagagactgacacagacagtgaaattcatgaaagtgcaagtgacaaggacagtttaagtaaaggcaaacttcccaaaagagaggaacggcctgaaaacaaaaaacctgtaaagcctcattcttctttcaagcctgataatcatgttcgaatagataatagactgctagaaaagccttatgtaagggatgacgataaagctaaaccaggctttcttcctaaaggagagcctacaaggagaggcagagggggaacattcaggcgtggtggaagggatcctggaggccgtccatcacgcccttccactttacgaagaccagcttatcgggacaatcagtggaacccaaggcagtcagaagttcctaaaccagaagatggagagccgccaagaagacatgagcagtttattcctatagcagcagataaacgacctccaaaatttgagcgaaaatttgacccagctagagaaaggcctcgaaggcagcgtcctactcgaccaccaaggcaagacaagccacctcgatttagacggctaagagagagggaggctgcttcaaaatcaaatgaggtggtagcagtgcccacaaatggcacagttaataatgtggctcaagaaccagttaatactcttggggatatttccgggaataagacaccagatttatctaatcagaactcttcagatcaggcaaatgaagaatgggaaacagcttctgaaagcagtgatttcaatgagaggcgagagagggatgaaaaaaaaaaatgctgacttgaatgcacaaacagttgtaaaggttggagagaatgttctacctccaaagagggaaattgcaaagagaagtttttctagtcagagaccagtagatcgtcagaatcgacgtggcaacaatggtccacccaaatcaggaaggaatttctcaggtcctagaaatgaaaggagaagtggcccaccatcaaaaagtgggaagagagggccatttgatgacacatcctgcaggcacaactggggttgacctcatcaatggcagctctgcacaccatcaggaaggagtacctaatggtgcaggacaaaagaactccaaagattgtactgggaaaaaaagagaagaccccaaaccaggccctaaaaaaccaaaagagaaagtggatgctctatctcaggttgatctccacaattatgcaagtgttgttataattgatgatcatcctgaagtaacagtaattgaagatccccagtcaaatttgaatgatgatgggttttactgaagtggtatccaaaaaacaacaaaaacgtttacaggatgaagaacgccgaaagaaggaagaacaagtcatacaggtctggaacaaaaagaatgcaaatgaaaaagggagaagccagacttctaagcttcctccaagatttgccaaaaaacagggctacagggatccagcaagcacagtcttcagcctcagttccacctctagcttcggctccacttccaccttcaacctcagcttcagttccagcctcaacctcagctccacttccagcaaccttaactccagttccagcctcaacctcaggttcggtttcaaccttaaccttaagttccagtttgggcttcaccttcagctccagttccagcctcccccttagctccagtttcagcctcagcctcagtctcagcttcagttccagcctctacttcagctgcagctataacctcttcttcagctccagcctcagccccagctccaacccccatccttgcttcagtttcaaccccagcttctgtcaccaatcctgcctcagcctcaattcccattcgtgcttcagccctagcatctacttcagctccaacgccagccccagcagcctcttccccagctgccccagtcatcacagctccaactatcccagcctcagcccctactgcctcagtcccacatgcaactgcctcagcttcagccccagccccagcccctaccccagtctcagccccaaatcctgccccacctgccccagcccagactcaggcacagacccacaaaccagtccagaatccactacagactacatctcagtcttcaaaacaaccacccaccatcaattaggctgccttcagctcaaacaccctaatggcacagattatgtagcctcaggaaaatccatccagaccccacagtcacatggcactctgacagctgaatttatggggataacaaggtggccccccaccaagctgtgctgaatgatatcctcctaagaaaattagggtccccattagtcccacccacagcccaccttcagtcagtgcatggaataagccccttaacatcgtttggatcagctccttcatcagagggagcgaagaatggtcaagaaagtggactcgaaattggaactgacacaattcagtttggtgctccagcctcaaatggaaatgaaaatgaagttgttcctgtgctttcggaaaaatctgctgacaaaatacctgaacctaaagaacagcggcagaagcagccacgagcaggacctatcaaagcccagaagcttccagatttgagtccagtagaaaacaaagaacacaaacctggtcccattggaaaggaacgttcattaaaaaatagaaaagtaaaagatgcccaacaggtggagccagaaggacaagagaaaccaagcccagctacagtcagaagcacagatcctgtcacgacaaaggagactaaagcagtctcagaaatgtctactgaaataggaacaatgatctcggtatcatctgcagaatatggtactaatgcaaaggagtctgtaacagactatactacaccctcttcttctttgcctaacaccgtggctactaataatacaaagatggaggatactttggttaataatgtgcccctgcccaacacccttcccctccctaagagggagactatacaacagagctccagcctaacttcagttcctcccactactttcagcctcaccttcaagatggagtctgcacgcaaagcatgggagaattctccaaatgtaagggaaaaggggtctccagtaacttccacagcacctccaattgcaactggagtcagcagtagtgccagtggaccaagcactgctaattacaattcgttctcaagtgcatccatgccccagattcctgttgcttcagtcactcctacagcatcactatcaggagctggtacatacactacctcttctttgagcacaaaatctacaaccacatcggaccctccaaatatttgtaaagtgaaacctcagcagttacagacaagcagcctgccttctgcaagtcatttttcacagttaagctgtatgccttcccttattgcccagcagcaacagaatccgcaagtttatgtgtctcagtctgcagcagctcaaatcccagccttctatatggacacaagtcatttattcaatacccaacatgcacgattggctccgccatccttggctcaacaacagggtttccaaccaggtctctctcagccaacttcagttcagcagattccaatccctatttatgcaccactgcaagggcagcatcaagcccaactgagtttgggggctggccctgctgtttcccaggctcaggaattgttcagctcctcacttcaaccatatagatctcagccagcttttatgcaaagcagtttatcccagccatctgtggtcctttctgggtactgctattcacaactttccaactgtccaacaccaagaacttgccaaggcacaatccgggtcttgcctttcagcaaacatcaaatactcagcccattcctatattgtatgaacatcaactggggcaggcatcaggactaggaggttcccagctgattgacacacatcttctccaggccagagcaaatcttacccaggcctcaaatctttattctggacaagtacaacagcctggtcagacaaatttttataacactgcccagtcaccaagtgctctccagcaggtaaactatggcatggttacagtacctttaccagcatcccagctttccttgcctaattttggatctacagggcaacctcttaattgctttgcctcagactcttcagcccccattacagcataccactccccaagcacagcatgcagagtgtaggtcgtcctgctcaagtaagccagcctttcagagggattaattcctggctggaacacagcataggcatggattggcaaccacaggaaaaatgttttggaaatgggaactaaaagcctttggaagtggcattgatataaaaccaggcacacctccaatcgctggtagaagcaccacaccaacatctagtcccttccgggctacttctacaagtccgaacagccagtccagcaaaatgaacagcattgtctaccagaagcagttccagtcagcccctgccactgtgagaatgacacaaccatttcctacacagtttgcaccccaggcaaagcagagagcagaggttcttcagtccacgcaacggttctttctctgaacagcaacagagcaaacagataggaggaggcaaagcccagaaagtggacagtgattcaagtaaacctcctgaaacactgaccgaccctcctggggtctgtcagggaaaaagtagaagaaaagccaccccctgcaccctccatagccaccaaacctgttagaactggaccaatcaaacctcaggcgatcaaaaccgaagaaacaaaatcttaaaggctatggtttattgcaggggattgggaggggggcgggaaaacatggagaattaagtcagataatgctggcagccaaaggggcaaaatggcctgtgacattatcctgttcagagcttggagatgtacaagggacataggagcaatttacactgacacacagctgctgtaccagtgaaaacgaggctttgcaagcttgtacctactatataacatgtgcttggttgatggccatgcatcttcagtcagaatttataatataaatgtatgcacccatttttttggagtgcatataatttaggacctaaaaatccttatggattagggtgaaacacccaaaaatataagggaaaataacacaggcagagggaataggctcagcctggaacagtgtggatgggtccccagctactacatcaggtggcgggttttttttgctcccttatgttcttcggatatggttatggcatttgtaggcttgggaggtaaagaactgaagataactggtgctggatagaggagccttattttttattatggcagcttgctatttttataacatggtgattgagttgaacacaattcaaagtacagtagtaactgatgtccccttcttcctgggtgaatgagcagataaatattggatgtcagcatccttgaaccatatcaaagtgagcagtgtttggctactgcttctatttgaaatggtgctgtgttttggttgtggtctgaagctttgaagcgctacttagcatctcctttcttccatggagctctcacgattcaaacatgacagatttggtaaaatgctggttagggtttgagtcttcctttgcccccacttcagtcatcctttgtatgaatcccatgatttgggggtttttttcttttttttttttataccagtttttagctggtgtttatgaagaacagtgagtacctagaactgtgccactaattaaaggaaatcctaaagaaggtgcatttctttacaagagctgtgtcatgccatcctttgggccctctgctggaaaagtagaatcaagtctcaaataatgcctttttaattgtatcctctagtattatagatatagggacagtactgtatcatacctctgtgaatgtaaaatatcttgtacctgctttatgatacgtagtagttgaccgtgctttatcagagctgtttttaatgatgttattctagaatgttttctttccagatgatgattcagaagctaattttaaaaaacggtgccagggtaccacaacagtaacagaactttgccaattttctgggggttttgttttttacctttttccccccccttttttttaaatgggagtgtgctgggatgtctctataaattttatttcagatggactgcagaacctggaaaacgcggttgctgctattgatgcataacatactgctattkggtctttttatataaatatatatatatatatacatatatatatatataatttgaatttttggaaactttatgctgtgctgtcaactttggaaaaagtatcccgttttactgtgttgagttggcattgtacagaaaattaacagcccaattggtctagaaacgttaaacttaattttttttccatttgtacaggggtaacgcaactgtattaaatatgtaagcttcttatccacatgggtttgatcacaggaactaataaagtattctctgaataatgaaaaaaaaaaaaaaaaaaaaagggcggccgct

SEQ ID NO: 20111 - DNA, 561 bp, Homo sapiens
  SIMILAR (1)..(165): 761254mologous to Homo sapiens PRO0066,accession number AF113007,Smith-Waterman Score=223.
  misc_feature (1)...(561): n = a,t,c or g
gagtgttcgacttggaattacttctggcaacaagtcctggatcctgcctggcaccttctgtttgatgggtgcaacctgaccagagagagctggaaggccctggagcgggcagcttctctaagctgaagctgcagcacatccaggccccactgtcctgggagttggtgcgccctcatatctatggatatgctgtgaaatagtgtgagctggcagttaagagctgaatggctcaaagaatttaaagcttcagttttacatttaaaatgctaagtgggtgacaagagcaagactccgtctcaaaaaaaaaaaaaaaaaaaaaaaagaagtagagacagggagacagggtctcactgtgttgcctaggccggtcttgaactcctgggctcaagtgattctcccaccttgacctcctaaattgttgggattacaggtgtgagacagtgcacctggccgaaatagctcaagtttctgaaaaacaaatctgaatcnaatttgttaatccttagngtcactgggtctgggctttcaggaattaacctacaagggtttgccaacctaggt

SEQ ID NO: 20112 - DNA, 2391 bp, Homo sapiens
  SIMILAR (382)..(1122): 761254mologous to Homo sapiens Human secreted protein clone yk251_1 protein sequence SEQ ID NO:90,accession number Y94942,Smith -Waterman Score=933.
  misc_feature (1)...(2391): n = a,t,c or g
tttcgtctggagagcccggtggggtgtaagtacactgcgcttataaaactctagcaggaagctagcagctgtctccaaacccagagaaggggaaacaggaatcgattaggaataaaggattataatccactttccttctgaggaaaagctgggaacgcttctcattttgccttatgaaagactaagctgaatcgactgctgccaaacatctattaagcaaaattggcctcttgcccatgatttgactttccagcacagccagttctttttctcctctgcagctgattggctctggagtgaggccagaagcctctctcctgcaattaaaggagtcgggtctctaactgttgatctgtttttttcccttctgagcaatggagcctaccatttttattcctgagactggccatttacatcctgacttttcccttgtacctgctgaactttctgggcttgtggagctggatatgcaaaaaatggttcccctacttcttggtgaggttcactgtgatatacaacgaacagatggcaagcaagaagcgggagctcttcagtaacctgcaggagtttgcgggcccctccgggaaactctccctgctggaagtgggctgtggcacgggggccaacttcaagttctacccacctgggtgcagggtgacctgtattgaccccaaccccaactttgagaagttgttgatcaagagcattgcagagaaccgacacctgcagtttgaggcgctttgtgggtaggttgccggggagaacatgcaccaggtggcttgatggctctgtgggatgtggtggtctgcaccctggtgctgtgctctgtgaaaaaccaggagcgggattctccgcgaggtgtgcaagaatgcctgaagaccgggaggggctttcctatttcatggaagcatgtggcaagctgaagtgttcgacttggaattacttctggcaacaagtccctggatcctgccctggcaccttctgtttgatgggtgcaacctgaccagagagagctggaaagccctggagcgggccagcttctctaagctgaagctgcagcacatccaggccccactgtcctgggagttggtgcgccctcatatctatggatatgctgtgaaatagtgtgagctggcagttaagagctgaatggctcaaagaatttaaagcttcagttttacatttaaaatgctaagtgggagaagagaaaccttttttttggggggcggtttttttggtttgttgttggttttttttttttttttggcgggaagaaagagttttgctcttgttgcccaggctggagtgcaatggcgtgatctccgctcactgcaacctccacctcgcgggtttaggcgattcttctgcctcagcctccctggtgcctgtggtcccaggtacttggggggctgaggcaggagaatctcttgaacccagaaggcgaaggttgcagtgaaccgagatcgtgccgttgtactctggcctgggtgacaagagcaagactccgtctcaaaaaaaaaaaaaagaaaaaaaaagaagtagagacagggaggcggggtctcactgtgttgcctaggccggtcttgaactcctggggctcaagtgattctcccaccttgacctcctaaattgttgggattacaggtgtgagacaagtgcacctggccgaaatagctcaagtttctgaaaaacaaatctgaatctatttgtgattcttagcgtcactggtctagctttcagaattaacatacaaggttgccacacgcgtagttctggcccagctttatggtcttttatttccagtattccaccaaagttttgtttttcctgcaattccagttctcaaagtcttaaggattaaaggattgtactttgacagtttaggtattatccataaaaactatttgagggtggttaaggttccttgggttcaattttccttaatactttgcctgaatattggagattgggggttgnaagagngggnccccaaccaaatagaaaaagtcctactaaattagggaaaacccttgaataattagggtaccccccagggaagagccccccctaaacatcaaggcaatcctgtgagtcctgtaaaagaaataaatattttttgggattattccttatcctaattccccaccccctgttggaagatgatttcctttgttcctttgcaacctatggaagctgtgaaaatcgatcacaagtgcctctgaaagcgagtgttaggttggttagagggtttaatattttctgcaatggtttgtaggaattttaataaatggtagtatattttttttwkatgattttgtaaaagtactattttaaatatgcaaatcaaccaataaattcaccctctgtgttaggaacagaaaaaaaaaaaaa

SEQ ID NO: 20113 - DNA, 732 bp, Homo sapiens
  SIMILAR (176)..(442): 351254mologous to Homo sapiens Fragmented human NF-H gene +2 frameshift mutant product,accession number W18663,Smith-Waterman Score=99.
atgcccttctctctagctgactgtgatagccaacactgcctactttttgctgtggtagatcttgggactgccaaagccacttcctgtatgtcagacacatttgacttttacagcagttcaggcaattcggcaaatttgaaggaaggtgggaagagcccgccggccggccccgggaaggggcctcgaggagcccagaaaagaaagtattctggcccctggaaccgaaaggagtcttgcaaaaagcacgaaggggtcaagggggccgaagggagagggggaaccgtcgcctccgtccgagagtcagcgaacctcgctttaaaatggcggcattcagtatgcacccctgctaaaggctctcccggcaccggggccacctcgcgcagcgctgcttttgcttctgccgctaacagatggcatgtgccgctgtcgctgccgctgcccctgctgctgccgctgagagcagggccccttagcctctgggtttgcgctagcagcgtaaggttgccaaatcgggcctttgatgggagggcatttcctataggtcgatggtccaatagagactggccaaataaagttgagggccctgaatttgccattaacgtctgccagataattcttaactcagaggaatttgattcttccaatactcaaattgaaaattgtgcccttaacatgtgtagagcagttggcacaaaggggaagggcgctaatttatctgactctagtcaataa

SEQ ID NO: 20114 - DNA, 412 bp, Homo sapiens
  SIMILAR (2)..(157): 421254mologous to Homo sapiens Human neuroendocrine-specific protein NSP-A mutant fragment 18,accession number Y21451,Smith- Waterman Score=68.
cacatggacctggcccaaccctcacagccagtagacgagctggagctctcggtgctcgagcggcagccagaagagaacacgcctctcaatggtgccgacgaggtcttcccttctttggacgaggaggtccccccggccgaggctaacaaggaaagcccctggagctcctgtaataagaatgtggttggaagatgcaaactgtggatgatcatcacctccattttcctaggtgtcattacagtgatcatcataggcttatgtcttgctgcagtaacttatgttgatgaagatgaaaatgaaatacttgaattatcatcaaacaaaacattcttcatcatgctgaagattccagaggagtgtgttgctgaagaggaattgcctcacctgctcaccgaaaggctcacagatgtgt

SEQ ID NO: 20115 - DNA, 413 bp, Homo sapiens
  SIMILAR (305)..(24): 321254mologous to Homo sapiens dJ635E8.3 (novel protein),accession number AL110502,Smith-Waterman Score=75.
  misc_feature (1)...(413): n = a,t,c or g
aattcagatttctgcctgtgtccttcactcatctgttggtgattataacctctgagcatcctccgagattntgagtctttggccatggctgccagtgagggagggagcacacttccacagctgttactctgtcctaggggcagatgggcctttggggtgatgcttctccccatagtagcactgctgaaatgtggggagatggaagatgtggttttctttcgaggcaaagtatcactcagatagaggccttctttatgctgttttttcctttcttccagacttctaaagtgctctttactctgtggctggctcgccagcacagctgtggcaggctcagtggcaacagcatcagcatcagcaggaaactgagtggaaggggatagattcgtggaattgccacacggctcattaat

SEQ ID NO: 20116 - DNA, 530 bp, Homo sapiens
  SIMILAR (239)..(529): 691254mologous to Rattus norvegicus putative,accession number X74226,Smith-Waterman Score=350.
gccaaagactcagaatctcggaggatgctcagaggttataatccccaacagatgagtgaaggacacaggcagaaatctgaattttataaccgcacagcatctgaatcaaatgtctacttgaatagtttccattatccagatcacagctacaaggaccaggcctttgatactctgagcctcgatagctctgatagcatggagaccagcatctctgcttgctcaccagacaacatctcttagtgccagcacttcaaatattgctagaatagaagaaatggagagacttttgaagcaggctcatgcagaaaagacgcggctgctcgaatccagggaacgggaaatggaagccaaaaaacgagccctggaagaagaaaaacgacgccgggaaatcctggaaaaacgattacaggaagaaactagccagaggcagaagttaatagaaaaggaagtaaaaataagggagagacaaagggcacaggctcgtcctttgacacgctacctgcctgtccggaaggaagactttgatttgc

SEQ ID NO: 20117 - DNA, 595 bp, Homo sapiens
  SIMILAR (7)..(588): 311254mologous to Rattus norvegicus putative,accession number X74226,Smith-Waterman Score=200.
gagttggatatggaatgtgctcttttggatggagaacagaaatctgaaacaactgaacttatgaaggagaaggagattttggatcatctaaaccggaaaatagctgaactggaaaagaacattgttggtgaaaagaccaaggagaaggtaaagcttgatgctgaaagggaaaaactagagaggcttcaggagctttactccgagcagaagacccagctggacaattgtcctgagtccatgagggaacagttacaacaacaactgaagagggatgctgacctgttggatgttgaaagcaaacactttgaagacctggagttccagcagcttgaacatgagagccgtctagatgaagaaaaggagaacttgactcaacagctcctgcgtgaagttgctgaatatcaacggaacatcgtttctagaaagggaaaaattttctgcattgaaaaagcaagccaatcacattgttcagcaggctcagagagagcaagatcattttgtgaaagaaaagaataatttaataatgatgttgcagagaagaaaggagaatctttgtaatttggaaaggaatactccagcctctctgggaggaaag

SEQ ID NO: 20118 - DNA, 1027 bp, Homo sapiens
  SIMILAR (616)..(116): 711254mologous to Homo sapiens neuronal protein NP25,accession number AF112201,Smith-Waterman Score=554.
tttttttttttttttttgacacatgtatcaattactttattaggtgcattctataggttgaagaggagaatttttggcaaataaataaataaataaataaataaataaataatcaaacagagactctggggcccgaggagctcaggaaaacggaagcggagtctttgcatagttctaaatgaacaggaggtggcagcagtaggcaacgcggagttctcggcggaaatgcagcacttgcaaaaaccagggacagaaaggcttggagaaagaggagaaggtcagaaggtgactaactatttctttttcgtaaaagaccatggtgtggaaacattcgtcctctctaaccaggggcaggatgccgcgtcctaacatgaatctgcctgggcatcccgtaccctgtcatgcacgcctgggaggctcccttgttgctgcccatctgcaggcctattacgttctgtccctggcgaagctgctcctcggaaaagcctctccgattctgctgggctttcctgtgaaaccaggatggctctccccgatagcagccatcatccttggtgactgcaacgctgcctaaagccatcagggtcctctgcacaagctgccatgtccttcccttcccataagaaccaccgtctggaaaagatgtcgggggttctgacaccataggtctccgcagcttttagggaactgggagatttgctccatctgcctaaaaagccatcttttgactctgagaaccttgggtatgggcttctggtcctggtggggataaactatttatcagcttggcacaggacccgcccgtcccattaaccctttcctgaaatgggccctgccggggggcgggtgctctatgtcctcggcgcactgcaggatgatccagtccaccagcttgttctccaggtccgcatcatacttctgctcgatcttctcctgcacctctcggcttaagccatagctcgggcccctgttagccatctctggaaagaagagaagacacgcgcggcatccacacaatagcagcaca

SEQ ID NO: 20119 - DNA, 4553 bp, Homo sapiens
  SIMILAR (1956)..(2702): 381254mologous to Rattus norvegicus putative,accession number X74226,Smith-Waterman Score=321.
agactgagctgcagcagctgggccaaaaaactgcagacggttcaccaggtctaaagagagccttaatatttgcccttaactttcacagttccccgccagggaaggacatggcagctgtgcagaggaccctgatggctttaggcagcgttgcagtcaccaaggatgatggctgctatcggggagagccatcctggtttcacaggaaagcccagcagaatcggagaggcttttccgaggagcagcttcgccagggacagaacgtaataggcctgcagatgggcagcaacaagggagcctcccaggcgggcatgacagggctgtcagatcccacaccatggactgcacacctcgggatgtatgttcaggggaatgccaagtttgtctccccggtgagaagaattgtggtccacgagtactataacagtcagacttttgattatgatattgctttgctacagctcagtattgcctggcctgagaccctgaaacagctcattcagccaatatgcattcctcccactggtcagagagttcgcagtggggagaagtgctgggtaactggctgggggcgaagacacgaagcagataataaaggctccctcgttctgcagcaagcggaggtagagctcattgatcaaacgctctgtgtttccacctacgggatcatcacttctcggatgctctgtgcaggcataatgtcaggcaagagagatgcctgcaaaaagaggaaactgggcacagagaggcccggcacccaggcagcccctaaacggagatggtctgcatctgcaggcgcggggaaaggcatagcaggcagcgccctgaacaaatcagaaaaacagccttcggctctggagcccactccggcacggcctcaggtgctctaccccgcgggatccagggagtggccgccactcacagttgcccctcctgtccgctccggtccgctcccgccgcccgaggtccgcgacgccccgcccagtgggtggagtgtgaggcggggaggtcgctcgactcgccggcgctgtggcctcccgcggagccgctcagactttccctgccggcacatggacctggcccaaccctcacagccagtagacgagctggagctctcggtgctcgagcggcagccagaagagaacacgcctctcaatggtgccgacaaggtcttcccttctttggacgaggaggtccccccggccgaggatgctgacctgttggatgttgaaagcaaacactttgaagacctggagttccagcagcttgaacatgagagccgtctagatgaaggaaaaggagaacttgacctcaacagctcctgcgtgaagttgctgaatatcaacggaacatcgtttctagaaaggaaaaaatttctgcattgaaaaagcaagccaatcacattgttcagcaggctcagagagagcaagatcattttgtgaaagaaaagaataatttaataatgatgttgcaaagagaaaaggagaatctttgtaatttggaaaagaaatactccagcctctctggggggaaagggtttcccgttaaccccaatactttaaaagagggctatatcagtgtaaatgagattaatgagccgtgtggcaattccacggaatctatccccttccactcagtttcctgctggatgctggatgctgttgccacttgagcctgccacagctgtgctggcgagccagccacagagtaaagagcaaagatcacctgtctattctggatttgtgtttccttccgctctttctcctcatcctatcactcaacatacatcagccccatggcctgaattcatggctacatctgtcgatcctttacctttaaatgacacacctcctcctttaccagctaagaaacacagaaggcagcagcagcagcaggagcaacagcactttagaagtctggaagaaaggaaaaaacagcataaagaaggcctctatctgagtgatactttgcctcgaaagaaaaccacatcttccatctccccacatttcagcagtgctactatggggagaagcatcaccccaaaggcccatctgcccctaggacagagtaacagctgtggaagtgtgctccctccctcactggcagccatggccaaagactcagaatctcggaggatgctcagaggttataatcaccaacagatgagtgaaggacacaggcagaaatctgaattttataaccgcacagcatctgaatcaaatgtctacttgaatagtttccattatccagatcacagctacaaggaccaggcctttgatactctgagcctcgatagctctgatagcatggagaccagcatctctgcttgctcaccagacaacatctctaggttctatgctacagggatacaggcacgaaagtctgtctgtatgtcctcaagagagtctagtaaagaaggcagagagacttctcagtctaaaccaatattctcaaaaggctttggtgtttcattcagtgccagcacttcaaatattgctagaatagaagaaatggagagacttttgaagcaggctcatgcagaaaagacgcggctgctcgaatccagggaacgggaaatggaagccaaaaaacgagccctggaagaagaaaaacgacgccgggaaatcctggaaaaacgattacaggaagaaactagccagaggcagaagttaatagaaaaggaagtaaaaataagggagagacaaaagggcacaggctcgtcctttgacacgctacctgcctgtccggaagagagactttgatttgcggagccatgtagagactgctggccacaatattgacacctgttaccatgtatcaatcacagagaagacctgccgaggattcctcatcaaaatgggtgggaaaattaaaacgtgaaaaaaacgttggtttggttttgatcggaacgagcgaacattctcttaatatgcagacaagcatgaaacttaaattgaaaaggagtaatatactttcaagccattgaagaagtctattatgatcacctcaagaatgctaataagagtcctaatccgttactcacctttagcgtcaagactcatgacagaatctattatatggtagccccatcgccagaagccatgcggatctggatggatgttatagttacgggggcagaaggttacactcacttcttgttgtagtgaactgaggcaacagtccacttcagggcagacggcaataatctcttacaagaatgaagccatattcaaccccagatgagaaaacccaacagatccatcccttgagctgtaaacactcagaactcctttcatatcaagacaagttatttgtaaaaaataaagaaggggttttaatacaaaccttcataataaatagcaaaataattgaagcttccatgagaaagaaaacactattttgataaattggatcacttataggaacatttctaataaactgtttttaatcagttgtcggatttggtgaaataaactaaacaggttacagaatatctgtatgtacttggaaatacagaataactttatcaccccacatcattggcattgacattattggtaatcaactggcttttttttaaaaaggtagcattttgttgacagttattttgtaaacataagcaaataagggcttggagggaaatacattttaggaggagttttgccttaattttttaagtactgcaccaaaaccaaagagctgacctgacttctgtggaacagtagtaactgcaagtgatgaactgcatttcgtattgttctgtatatttcaaaatggtattttgatgccatcaaatgcccaggaaattgactttgcagtgtcaccactggtgtaagctactatatatgtatatatatatatgtagtaaaccactttttgtaaaagaagaaagagcaaaaagctgtgtgttttagaaaaaaaagccaggttacgcaacaggcattctgtcatgttgaacaattttaaataaagagaatatctggtgttaggagcttgttttgctgaagatttctccattcctggtgctgagaataaaggcaaccagtagccaatgtcctttagattgtctgatttctttttgttgtggagcacacctgctaactgctccctcaacataactatgaaatcatagctctgttttcaccaaaggaacagaccaattaacatacttatttgcagaagtgggtgtagttctacaaaacgggcaaatgaagttcaacttaatattctctataatgtattattttattttatttttttacaattaggccttttttttaggttaatttttgtccaaatggaaacggacttcaggggcaagtctcttttataatggtttttcaagtgccatttattctagtttatcatgttttgcatgtttgaaagtatgaatgtgctctttcctaaaacatggcaaatgaatagatgtagagaataacaatattacttacaagatgaaatgattagattagaagtgtccctttattagactttgtcagcctgactgggtacaattcttttgttaatttgcagtgtggtttgtatacacgtatacg

SEQ ID NO: 20120 - DNA, 2218 bp, Homo sapiens
  SIMILAR (273)..(800): 431254mologous to Sus scrofa destrin,accession number D90053,Smith-Waterman Score=211.
ccgggtcgacgatttcgtcgcgccgccgcgtcagctcagcgctgggtctctcggtcccgcagccgtgaggaggacggtctgcatactcgctgcccgccggctccctcccccgcgtccctgcgaccgccgcggcgaagatgattttcagttcacccactagaggcaaagacgtaagagagctaccagcgtattgagaggagatacacaggcactacgagaatggagtttagaagaagttcagagccctgggcagtgttgggccaggctttagggcctcaggagtgcaagtagctgatgaagtatggtcgcatttttgtatgacatgaaagttcggtaaatgctccagcaccagaagaagatcaagacaaagaaagaagtgctgtcatttttttgtctcagtgcagacaaaaagtgcatcattgtagaaggaaggccaaggagatcttggttggagatgttgggtggaacccataaactgatcccttccagccattttgtggggaatgcttccctgaaaaaagattgttcgctatgcttttgttatggatggcaagcttttggaaacaaaaggattccagaaaaggaagagtttgatgtttttttttgtggggcaccagaactaggcacctctgaaaaagtaaaaatgatcttattgcaagctccaagggatggcatttaaaaagaattttcaaggcataaaacatgaatgtcaagcaaaatggaccagaagatctcaatcgggccttgtattgctgaaaaattaaggtggatccttaattgtagcctttgaaggatgcccctgtgtagatcatcattcagtgccacaaattgaaaagcttccaatgtttaattgttatcctcttgctatataaataaagcaaatatatttagggcaggggtctcactgagggggagcttgtcttgtgcatcttttaggagtaaactatttctataaaacattatggcaaacagccctaaataaatctaaagtctaaaagttttaattgatgtgacattaaaatcttactggcccaaatgcctgttttgatgagttgatatataaaagatttttgttaagctcagggattttaaattacacaggtcacaaacagttaagggcatgtgaagagaattattacatcttattttaaccctcagcaatttactttgtttcttttgcttaggaaattgctcataatctggttataatttgggtccaaattctttattcttccttggagctaagcagaataatgggaatataatatgtcttccataatataaccaacacctaatacacctaatagtaagatttaagttaggcaagtcttcctacccaaatgtgtaatggatgattgccctcaaaattggtgtccacataaatccacgctccatcttgcaaagcggtaattccagccccatcattggaatacaggaaagtagccctgcacttgcccagtgagctcgccattcactggattggaagagtggacctgggcatcttgggaaatcattggtgtgtcctcagggagaatgtgcaagtgtcttgtaacaactttaattataatgcgaaattagggctaacattgtaaatctgctttgttaaatgaaaaatgaataaaacagaatattgccaagctaggacacctgtggtatctttaattgtatctcctatcagaagtttgcttcttatggtataataaaagtatggaagaataattgagtatatgtttactctgggcctgggagaacttaaaactttctagagcagtttgttgacttgtgtgcaatggggagaggtaccatgatgacactcacaagggagccactgttcactgacacttggaagcggtcattgttaatatcacgggcgtaacactttgaacgatatagagatgcacaaacagttgaacttagaagtagcagtattggctttatgtaataaaggaagcatttttgacttacctctcgtgtaattttcatgtgtgaattgggaatacaggattttgccttccatatggggtaaggcattgaggtttgggtatttccaataattaagagttaaggttggcctcctaaagtgctgtgattacaggtgtgagccactgtgtcctgctagtgattgtgattaacaggcctccaaggaagtgccataagccccagactgccgtactccaaaagtcagccatgtaggtaagccaagatatttggccaggag

SEQ ID NO: 20121 - DNA, 1510 bp, Homo sapiens
  SIMILAR (1024)..(1458): 311254mologous to Caenorhabditis elegans contains similarity to Pfam family PF01391 (Collagen triple helix repeats), score=66, E =8.2e-16, N=2,accession number AC006743,Smith-Waterman Score=104.
ggagagttgaaacagatgggggattcgcccaggagctgaaaccgagggaggtaagcgagccagagccttgtgtgcacgtgtgtgtgcgtaacacacaaaccagggggcatcgctaataaatcaaatatcgtgataaattcaggagggccatcgatcaggtccacttggctggaaacgacgtgaatctgcctcttttccgctttcttcttctcctctctcggagctggagggagccaaatgttccgcggggagtgcgacagccccggccgggcgctcccctcgtaatgacacgttaataaatgttttcttttatctgctttcacaggactcgccccggtctgcaaacactcccctgcctttcccgaaagcctcgcgctcgcctacagccacacacatttgccattggagaggccggcgccggccgcgacccgcagctcaatcgcagggcaaaccgagctgcctgtgcgcgcccgagaactccccgagaaattaacttcggctcaacctggtcctctgccaggacttgatggaatcgctgcccacttggcacccaggtctgtcctcaccctgcgatggctcttgggtgactcatcaatttgtgcttatatccggtcgtctgtggctctggcaggtcctggtacccacaagggctgggctgccaaccaggcttgcagcagaggcctctggggtatgtaccccgaagaactgaaaaacagggacttgaagagagatttgtctcccatgctcatagcagcgttattcacaatagccaaaagggcgatggtcactgttgttcttgcctctcctctgagttccggtctcatttatccaacagacatcttgacatctccacctggatgttttgaaggcaactcaagccagtgtgcctgggtgtgggtagagtggactgctgaggtcatggacaaaagcctgcaggcaaaaagaagaagatattggcagttagaagtggctctgagcctgctggagggttccagggctatgtggagggcacggaacagcatctgctcccctggggatgatgacagccccggtgctttgtgggaacagagtcctggccctctctgagcctggcctggtgctgtctcagaagagcccatggtctgtgctgagccagtgcaagagcagagtggaccgcagcttcctcctccacggcactcccgaagcccctcgggtgactccggccaaccaggtgttccagcagagagaaggaggattatggggatggcagatgcttaagtacatgcaggctgtgaagaactatcattatcctcagtttatagaggaggagactcaggcacagagaggtttaaataacctgcccaaggtcacacagctaagccttggtcctgcccagaccctagtgctgtcctcctgtgaggatgacctggccaggccatgtgatgaaggtgccctgtcagggaccctcggccagctcaggggtaagaatgcagtgacagtcagcggtgatgtcccctgtgaagagccctga

SEQ ID NO: 20122 - DNA, 539 bp, Homo sapiens
  SIMILAR (43)..(198): 821254mologous to Homo sapiens bA189K21.6 (Sec23 (S. cerevisiae) homolog B),accession number AL121893,Smith-Waterman Score=230.
atttgctgatggatactttcttcaaattgtcatttatcttgtgagaccatagcccagtggcgtaaagctggctaccaggacatgcccgagtatgaaaacttcaagcaccttctgcaggcaccactggatgatgctcaagaaattctgcaagcacgcttcccgatgcctgttaagctgaggatacaaccaggaaatgcaacggtgtcagattgtgttcaaaatgtctagaaaggcttgataacattcctgttacttttctagcagattttaacaaataatcaaggacattttatatgtaactctttagattataatttatttgtattcctgtctttgtcctttttcttgcactataaaattataaggtcataaatgttttggtacttgtagatgtttatgtgctttttgtatcctaacttttagaatctaaataaaatcagaggtaatgtattttggcagcttgtttaggtgagaatcttaatgatcataaaggaaataaatctagatgcagaaagtactggctaaaatattgctaataa

SEQ ID NO: 20123 - DNA, 798 bp, Homo sapiens
  SIMILAR (105)..(446): 921254mologous to Homo sapiens Sec23 protein,accession number X97065,Smith-Waterman Score=569.
  misc_feature (1)...(798): n = a,t,c or g
cggcgtgacaccatcgcccgaaattgggcaaatgtacagagtcaggtcaggcacatagagcaagcatttgaccaggaggctgcggcaagtgttgatggcacggcttgggggtgttcgaaccgaagtcaaaggaggggcccgatgtgctccggtggctggaccgacaactcatccgactgtgtcaaaagtttggacagtatancaaagaagaccccacttcttttaggttatcagattccttttctctatatcctcagtntatgttccatctgagaagatctccatttcttcaagtgtttaacaacagtcctgatgagtcgtcatattacagacatcattttgcccggcaggacctgacccagtccctcatcatgatccagcccattctctactcttactcctttcatgggccaccagagccagtactcttggatagcagcacgcttcccgatgccacgttacatcaacacggagcatggaggcagtcaggctcgattccttttgtccaaagtgaacccatctcagacacacaataacctgtatgcttggggacaggaaactggagcacccatcctaactgatgatgttagcctgcaggtgttcatggaccatttgaagaagctggctgtctccagtgcctgttaagctgaggatacaaccaggaaatgcaacggtgtcagattgtgttcaaaatgtctagaaaggcttgataacaatcctgttacttttctagcagattttaacaaataatcaaggacattttatatgtaactctttagattataatttatttgtaaa

SEQ ID NO: 20124 - DNA, 566 bp, Homo sapiens
  SIMILAR (501)..(280): 971254mologous to Homo sapiens Sec23 protein,accession number X97065,Smith-Waterman Score=375.
  misc_feature (1)...(566): n = a,t,c or g
acattatttttgattttatttagattctaaaagttaggatacaaaaagcacataaacatctacaagtaccaaaacatttatgaccttataattttatagtgcaagaaaaaggacaaagacaggaatacaaataaattataatctaaagagttacatataaaatgtccttgattatttgttaaaatctgctagaaaagtaacaggaatgttatcaagcctttctagacattttgaacacaatctgacaccgttgcatttcctggttgtatcctcagcttaacaggcactggagacagccagcttcttcaaatggtccatgaacacctgcaggctaacatcatcagttaggatgggtgctccagtttcctgtccccaagcatacaggttattgtgtgtctgagatgggttcactttggacaaaaggaatcgagcctgactgcctccatgctccgtgttgatgtaacgtggcatcggggagcgtgcttgcagaaattcttgagcatgtnctggtagccagctttacgccactgggctatggtctcaccaagataaatgacaatntgaaa

SEQ ID NO: 20125 - DNA, 3033 bp, Homo sapiens; identical to SEQ ID NO: 14916
  SIMILAR (1087)..(2310): 921254mologous to Homo sapiens putative p150,accession number U93572,Smith-Waterman Score=1954.

SEQ ID NO: 20126 - DNA, 2678 bp, Homo sapiens
  SIMILAR (1968)..(2675): 971254mologous to Escherichia coli parA (aa 1-398),accession number X02954,Smith-Waterman Score=1171.
atggcggaggtgaaggtgaaggtgcagccgcctgacgcggatccggtcgaaatagaaaacaggattatagaattatgtcaccagttccctcatggaatcacagaccaagtaattcagaatgaaatgcctcatatagaagcccagcagcgggcagtagccatcaataggttgttgtctatgggtcagttggatctcttaaggagcaatacgggccttttatatagaataaaggactctcagaatgctggtaaaatgaagggatccgataaccaagaaaaactagtatatcaaatcatagaggatgcaggaaataaaggaatatggagcagagatatccgctataaaagtaatttgccattaacagaaatcaacaaaattctgaagaatctggaaagtaaaaagcttatcaaagctgttaagtctgtagcactcggcattcctgctggctgttctgtttgccctaaatgtggggccagcaatcacctgtctgcccgattctgtggctcctgtggtatttgtgtgaagtccctagtgaaacttagcttggacagaagcctggctctagctgctgaggaacctcgccctttttctgagtccctgaatattcctttgcccagatctgatgttgggactaagagggacataggaacacagactgttggcctcttctacccatctggcaagctgctagcaaaaaaggaacaggaactagcctctcaaaagcagaggcaggagaaaatgagtgaccataaacccctcctgacagccatcagcccaggaagagaaaacattggggaaaatcttcaggtcattggtctggtcaaaaatttcttgagcaatattccacaagcaccggccacccaagccaaaatgggcaaatgggatccacgccagcgaggtgctcagtcccctctgatctttctctatgtggttgacacatgcctggaggaagatgaccttcaagcactcaaagagtccctgcagatgtccctgagtcttcttcctccagaatgctctggtgggtctgatcacatttggaaggatggtgcaggttcatgagctaagctgtgaaggaatctccaaaagttatgtcttccgagggaccaaggatttaactgcaaagcaaatacaggatatgttgggcctgaccaagccagccatgcccatgcagcaagcacgaccatgcacaaccacaggagcacccttttgcttcaagcagatttctgcagccctgttcacaagattgatatgaacctcactgatcttcttggggagctacagagggacccatggccagtaactcaggggaagagacctttgcgatccactggtgtggctttgtccatttgctgttggcttgctggagggcacttttccaaacacagggagccaggatcatgctgtttactggaggtccccctacccaagggcctggcatggtggttggagatgaattaaagattcctattccgttcttggcatgatattggagaaagataatgcacgattccatgaaaaaggcaaccaagcactatgagatgcttgctaatcgaacagctgcaaatggtcactgcattgatatttatgcttgtgcccttgatcaaactggacttttggagatgaagtgttgtgcaaatcttactggaggctacatggtaatgggagattctttcaacacttctctcttcaagcagacattccaaagaatctttactaaagattttaatggagatttccgaatggcatttggtgctactttggacgtaaagagggttcaagttggggagaggggaagggaagccaaaaacaagctgtggactgtccatgcccacagttcctggagagccttgaacactggactgagaagctttgactttatcccagggacagtaagagagcctgtaaagattttaggcagaaggttgacatcggatttgcagattaggaacagccctttagaggctgctgtacaaggcggtgtgtcaaaaactgtatcgacggtttctctggcgcatgcaatgcgtgctcaccctcatcttcttatggaggatttaaggattctggttattgaccttgatccgcaatcttcagcaacgatgtttttaagccataaacactctattggtatcgtaaacgcaacatctgcacaggctatgttgcagaatgtaagccgtgaagagctgttagaggagtttattgttccttctgttgtacctggggttgacgttatgcctgcgtcgattgacgatgcctttattgcatccgattggagagagctgtgcaatgagcatctaccgggtcagaacatccatgctgtcctgaaagaaaatgtgattgataagctgaagagcgattatgactttatactcgttgatagtggacctcaccttgacgccttcctgaaaaatgctttggcctcggccaatatactgcttacacctctgccgccagcaactgtcgatttccactcatcgcttaaatacgttgcccgccttcctgagttggtgaaactcatttcggatgaaggctgcgagtgccagcttgcgactaacattggtgttatgtccaagttgagtaacaaggcagaccataagtattgccatagactggctaaagaagtgttcagtggggatatgcttgatgtcttcctgcctcgccttgacggctgtgaacgctga

SEQ ID NO: 20127 - DNA, 3837 bp, Homo sapiens
  SIMILAR (767)..(1834): 861254mologous to Homo sapiens Sec23 protein,accession number X97065,Smith-Waterman Score=1535.
  misc_feature (1)...(3837): n = a,t,c or g
tcatcgttctcgctttccggtagctaaggcgatcagcgggacttcccactgagacgagcggatgtcatattgtatcagggcgaacctctgaggagcgctggctgcgcttaggcaacggtgcggcaggcgccggggttttctgaaacagaaacgtttaggggtggggaaacgtgttccgaggaactctcgttttgaagtgcgacatacacctgtcttgccctgttccaagatggtggcagagcttctctgagtctctcgcttcctccagtccgtcggagaagcgctctttgattggccagtggacagcgccgtggcatgacgcgctggggcgctggccaatcggttgagagctgagctggacttggcggtgggagccggagcctgcttgttgcagctgtgggtgaggacggctctagctaggtgagcggctccggccaggtgagcggggcgcatatgtgacggagggccgagggcacgggtatgagtttctgccgggggcgaggtgagcggcttctgggaggaggccttttcttgacagtttagggtagcgggggaatggatgatccgggagtcccctgcggatgtcgtcccgcaccaggccgggaccgatttctggctccagtttccccagaattgcggagtgcgcacacctggaaggacccaagtcccgttttatagttgagaaactcaagactcagacaagtgaaacgacttttgcttcatgacagctggaactggaacccagttcccttttagactatggacgacatacctgaatgtcatccagcagaatgaagaacgggatggtgtgcgttttagttggaacgtgtggccttccagccggctggaggctacaagaatggttgtacccctggcttgtctccttactcctttgaaagaacgtccagacctacctcctgtacaatatgaacctgtgctttgcagcaggccaacttgtaaagctgttctcaacccactttgtcaggtttgattatcgagcaaaacttttgggcctgtaatttctgttttcaaagaaatcagtttcctccagcttatggaggcatatctgaggtgaatcaacctgccgaattgatgccccagttttctacaattgagtacgtgataccagcgaggtgctcagtcccctctgatctttctctatgtggttgacacatgcctggaggaagatgaccttcaagcactcaaagagtccctgcagatgtccctgagtcttcttcctccagatgctctggtgggtctgatcacatttggaaggatggtgcaggttcatgagctaagctgtgaaggaatctccaaaagttatgtcttccgagggaccaaggatttaactgcaaagcaaatacaggatatgttgggcctgaccaagccagccatgcccatgcagcaagcacgacctgcacaaccacaggagcacccttttgcttcaagcagatttctgcagcctgttcacaagattgatatgaacctcactgatcttcttggggagctacagagggacccatggccagtaactcaggggaagagacctttgcgatccactggtgtggctttgtccattgctgttggcttgctggagggcacttttccaaacacaggagccaggatcatgctgtttactggaggtccccctacccaagggcctggcatggtggttggagatgaattaaagattcctattcgttcttggcatgatattgagaaagataatgcacgattcatgaaaaaggcaaccaagccactatgagatgccttgctaatcgaaccagctgcaaatggtcactgcattgatatttatgcttgtgcccttgatcaaaactggacttttggagatgaagtgttgtgcaaatcttactggaggctacatggtaatgggagattctttcaacacttctctcttcaagcagacattcccaaagaatctttactaaagattttaatggagatttccgaatggcatttggtgctactttggacgtaaagacctctcctagggaactgaagattcgaggagccattggtccatgcgtatctctgaatgtgaaaggaccgtgtgtgtcagaaaatgagcttggtgttggtggcacgagtcagtggaaaatctgtggcctagatcctacatctacacttggcatctattttgaagttgtcaatcagcacaacaccccgatcccccaaggaggcagaggagccatccagtttgtcacgcattatcagcagtccagcacccagagacgcatccgcgtgaccaccatcgcccgaaattggggcagatgtacagagtcagctcaggcacataggaagcagcattttgaccaggagggttgcggcagtgttgatgggcacggcttggggtgttccgagcggagtcagagggaggggcccgatgtgctccggtggctggaccgacaactcatccgactgtgtcaaaagtttggacagtataacaaagaagaccccacttcttttaggttatcagattccttttctctatatcctcaggttttggttccatctgagaagatctccatttcttcaagtgtttaacaacagtcctgatgagtcgtcatattacagacatcattttgcccggcaggacctgacccagttccctcatcatgatccagcccattctctactgttactcctttcatggggccaccagagccagtcattttgggatagcagcagcacttctagctgacacgaattttgctgatgggatactttctttcaaattgtcatttatcttggtgagaccatagcccagtggcgtaaaagctggcctaccaggcacatgcccggagtatgaaaaacttcaagcacccttctgcaggccaccactggatgatgctcaaagaaattctggcaagcacggttccccgatgcccacgttacatcaacacgggagccatgaagccaatcgaggctggattccttttgtccaaaagtgaacccccatctcagaccccaccaataaccctgtatgcttgggggacagggaaactgggagcaccccatccttaactgatggatgttagccctgccaggtgttccatggacccatttggaaggaagctggctgtctcccagtgccctggttaagctgaggataccaaccagggaaatgccaacggtgtccagattgtgttcaaaatgtctagaaaggcttgataacattccctgttacttttctagcagatttttaacaaataatcaaggacattttatatgtaactctttagattataattgtatttggtattccctgtctttgtcctttttctttgcactaataaaattataaggttcataaatagttttgggtacttgtagatggtttaatgtgctttttggtatcctacacttttagaanttctaaataaaatcaagaggtaaatngtattttggcacggcttgtttaggtgagaatcttaatgatcataaaaggaaataaatctagatgcagaaagtactggctaaaatattgctaatacaaatgtgatttcctgaggtctctgtgtgagtgtgtatgtgttttaagtgacttccttaagaggtgtttcctgaacctaattctcataattaaagtaatgtatatgcaggatcaaaatgaaacaaatataccttatcctaaagagctcataacaaataagttacctccactctataaactcagacctactttttgaagataactgcttttaacctctccttacaagatttttgttgttgatgtatttaattttagcccatgtctcaattctcattttcaaagaaatcaatatattaatatacctttggtcaaaaaaaaaaaaa

SEQ ID NO: 20128 - DNA, 1369 bp, Homo sapiens
  SIMILAR (203)..(1366): 981254mologous to Homo sapiens unnamed protein product,accession number AK025355,Smith-Waterman Score=1984.
ggctgcattccagtatggtatcaaaatgtctgaagggcggaaaaccaggcgcttcaaggaaaccaatgacaaagcagagcttgatcgccagtggaagaagattagtgcaatcattgagaagaggaagaagatggaagctgatggtgtgggtggttccgaggctgactaccctgcggcggcgcggctcgcagtccttctcagcatggaccgcacttgtgaggagaggcccgctgaggatgggagcgacgaggaggacccagactccatggaagccccaacccggatccgggacactccggaagacatcgtgctggaagctccggctagtgggctggcgttccatccggcccgtgacctactggctgcaggggacgtggacggggacgtgttcgtcttttcctactcttgccaagagggagaaaccaaggagctctggtcatcaggtcaccatctcaaggcctgccgagctgtggccttctctgaagatgggcagaagctcattactgtctccaaggacaaagccatccatgttctagatgtggagcagggccaactggaaagacgtgtttccaaggctcatggtgcccccatcaacagtcttctgctggtggatgagaatgttctggccactggggatgacacaggtggtatccgtctctgggaccagcggaaggagggccccttaatggatatgaggcaacatgaagagtacatcgcagacatggctctggatccagccaaaaagctgctgctgacagccagcggggatggctgccttggcatcttcaacattaagaggcgtcggtttgagctgctctcagaacctcagtctggggacctgacctctgtcactctcatgaaagtacagctggttatgtgggggaagaaggtagcctgtggctccagtgaaggtaccatctacctcttcaattggaatggctttggggccacaagtgaccgctttgccctgagagctgaatctatcgactgcatggttccagtcaccgagagtctgctgtgtactggctccactgatggagtcatcagggctgtgaacatcctaccgaaccgagtggtgggcagtgtgggccagcacactggggagcctgtggaggagctggccctctcccactgtggccgcttcctggccagtagtggccatgaccagcgcctcaagttttgggacatggcccagctgcgagctgtggtggtggatgactaccgtcggcgcaaaaaaaagggaggaccactgcgggctctgagcagcaagacttggagcaccgatgacttcttcgcaggactgagggaagagggagaagactccatggctcaggaagaaaaggaggagactggggatgacagtgactga

SEQ ID NO: 20129 - DNA, 1593 bp, Homo sapiens
  SIMILAR (836)..(1273): 951254mologous to Homo sapiens unnamed protein product,accession number AK025355,Smith-Waterman Score=721.
atgttagaaggaaaatatggtccacccccgggaagcttccagacccggcgcaccgccctagcccgctctcacacgaacacgtcaccgtccacgtctcctgcagctaacaggcttaatgcccttgggataggagagagggacgctagtccttcgtggcttggtgaaacccaagatcaagtcaagcgacagcctgggctgtcaggaagccgcaaaatcccacgctgcgcgatgacatacgggagtctgggacagcaggcagctcaagcagctggtgtccacgcccctaacgtctttgtggccagtttgctgtgccagttcctacaatttgtctacagaaactcaatgggctggacaggcggtgcggacttttcctactcttgccaagagggagaaaccaaggagctctggtcatcaggtcaccatctcaaggcctgccgagctgtggccttctctgaagatgggcagagtgagtactggggaagacaaccagcaatgtggtggaagggagcagtgagcagcaccatgactctgggcaccttttccccagagctcattactgtctccaaggacaaagccatccatgttctagatgtggagcagggccaactggaaagacgtgtttccaaggctcatggtgcccccatcaatagtcttctgctggtggatgagaatgttctggccactggggatgacacaggtggtatctgtctctgggaccagcggaaggagggccccttaatggatatgaggcaacatgaagagtacatcgcagacatggctctggatccagccaaaaagctgctgctgacagccagcctactgctctactctctacagcggggatggctgccttggcatcttcaacattaagaggcgtcggtttgagctgctctcagaacctcagtctggggacctgacctctgtcactctcatgaaagtacagctggttatgtgggggaagaaggtagcctgtggctccagtgaaggtaccatctacctcttcaattggaatggctttggggccacaagtgaccgctttgccctgagagctgaatctatcgactgcatggttccagtcaccgagagtctgctgtgtactggctccactgatggagtcatcagggctgtgaacatcctaccgaaccgagtggtgggcagtgtgggccagcacattggggagcctgtggaggagctggccctctcccactgtggccgcttcctggccagtagtggccatgaccagcgcctcaagttttgggacatggcccagcttgcgagctgtggtggtggatgactaccgtcggcgcaaaaaaaagggaggaccactgcgggctctgagcagcaagacttggagcaccgatgacttcttcgcaggactgaggcaagagggagaagcctccatggctcacagaagaaaaggaggagactggggatgacagtgactgaaggaatgaattgaatcttgagacgggtcctcaccaggcaagagtcttgcttattgggctgcatccccagagaggatatgaattattttttaaaagacagggtctgtttgcgccgctctgaggatcaagcttcggcgcgtgcatagag

SEQ ID NO: 20130 - DNA, 886 bp, Homo sapiens
  SIMILAR (350)..(715): 501254mologous to Rattus rattus ribosomal protein L35 (AA 1- 123),accession number X51705,Smith-Waterman Score=221.
tttttttacaattttttttttttaattagccaagcatggtggcacacacccgcaatcccacctactcaaggaagtgaagatgggaggatcacatgagcccaggccgcgaaggcgccagtgagccaagacagcgccactgcattccagcctgagtgacagagtgagaccctgtctcaaaaaataataatctgctataaatatttttgtacacatttgttgaagacatatattttcatttttttctgggcatgtacttgccgtatcattaggtaagtttatatttgaatctacgctctttccctcggagcgggcggcgcggcggcgtcggcggcctgtgcagcaatggccaagattcaaggctcgagatcttcgcgggaagaagaaggaggagcttctgaaacagctggacgavcctgaaggtggaagctgtccacagctgcgcgtcgccaaagttaccggccgttgcggcctccaagctttctaagatccgaggtcgtccggaaatccattgcccgtgttctcacagttatttaaccagactcagaaagaaaacctcaggaaattctacaagggcaagaagtacaagcccctgggacctgcgggccttaaggaagacaccgtgccatgcggccgccggcttcaaaccaagcacggagggagaaccttgaaggacccaaggaagcaggcagcggaaagggagcggcttttacccgttgcgggaagtaacgcgggtcaagggccctgagggggcgcctttgtcaataaaagcacaaggagaacctgaagaccaagaagcagcagcggaaggagcggctgtacccgctgcggaagtacgcggtcaaggcctgaggggcgcattgtcaataaagcacagctggctgagaaa

SEQ ID NO: 20131 - DNA, 533 bp, Homo sapiens
  SIMILAR (16)..(240): 641254mologous to Homo sapiens KRAB zinc finger protein; Method: conceptual translation supplied by author,accession number U37263,Smith-Waterman Score=263.
tttttttttttttttgagtgtggttaatcctttaccaatagcttttctgttacaattcacaggagaatacataatggagagaaatcctatgagtgcagtgattgtggaaaatcctttaatgttctctcatccgttaagaaacacatgagaactcacactggaaaaaaaccctatgaatgtaattattgcgggaaatccttcacaagtaactcctacctttctgtgcatacgagaatgcataataggcaaatgtgaattcaataactgtgggaaaagcattcattgatctttcatgcctcagataacatgagcaaactctaacaagatgtatgaatcacctgctactgtgtaacaaattaccccccaaaattttgtggcttcaaacaaaaacacttgttatctcaaaatttttgtaggtcaggaattcagaaacaacatagctctatagttcttcaggatatctcaagaggttacagtccagatgtcagcagaactgtaatcatccagaattgttactggtgaagggaccactt

SEQ ID NO: 20132 - DNA, 1769 bp, Homo sapiens
  SIMILAR (681)..(1490): 511254mologous to Homo sapiens R31665_2,accession number AC005498,Smith-Waterman Score=788.
ggcacgagggagaagagccgcgcttgcagcgtctgggagaatctttcggtctccgcgagaggtgcttcattccacgaaaaaagtataattcaagctcagatttgtgttgaaaccagcctcaagtttcacctatcctcactgatccgtggacttctgtatgatcagggtgctgtcctgagagcgctgcggggataaaggaggagcgtcctgcttcccggctgccctgttgctgtcggagtcacaggatggcggctgtcgtcctgcccccaactgccgctctgtcttccctgttcccagcctctcagcgagaaggacacacagagggcggagagctggttaatgagctcctgaaaagctggctaaagggcttggtgacctttgaggatgtggccgtggagttcacccaggaggagtgggcattgctggaccctgcccaaaggacactgtacagggacgtgatgctggagaactgcaggaacctggcctcactggggaaccaagttgataaacctaggctgatctcccagctggagcaagaagataaagtgatgacagaagagagaggaattctctcaggtacctgtccagatgtggagaatccatttaaagccaaagggttaactcctaagctgcatgtttttcgaaaagaacaatctagaaatatgaaaatggagaggaatcatcttggagcaacactcaacgaatgtaatcagtgttttaaagtcttcagcacaaaatcttcccttacacggcacaggaagtattccatactgggagaaagaccctatggctgcagtgaatgtgggaaatcctacagcagtagatcttaccttgctgttcataagagaatccacaatggggtgaaaccctatgagtgcaataactgtgggaaaaccttcagcagcagatcttaccttactgttcataagagaatccacaatggggagaaaccctacgattgcagttactgtgggaaaaccttcagcaattcctgatacctcagaccgcacttgagaattcacactggagaaaaaccgtacaaatgtaaccagtgttttcgtgagttccgcaatcagtcaatcttcacaaggcacaagagagttcatacgggggagggtcattatgtatgtaatcagtgtggaaaggctttcggcacgaggtcatctctttcttcgcactatagcattcatacaggggagtacccttacgaatgccacgattgtgggagaaccttcaggaggaggtcgaatctgacacagcacataagaactcatactggagaaaaaccctacacatgtaatgagtgtgggaaatcctttaccaatagcttttgtcttacaattcacaggagaatacataatggagagaaatcctatgagtgcagtgattgtggaaaatcctttaatgttctctcatccgttaagaaacacatgagaactcacactggaaaaaaaccctatgaatgtaattattgcgggaaatccttcacaattggtcagggagatggatttgagattgttctcccacctcctcagctgcagcagctgattaaagccttcttccttggcaatactcattgtctcagcgataggctttctgtgcagtgcatccactacagcatccgctacctccacctcaatatccactacctccactacagcatccactacctccactacagcatctgctacctccactacagcatcatggatccaccacagcaatcaccacatccactacagcatccactacagaatccactacagtga

SEQ ID NO: 20133 - DNA, 408 bp, Homo sapiens
  SIMILAR (155)..(406): 941254mologous to Homo sapiens bA346K17.2 (A novel protein similar to the cell division control protein 91 (CDC91, YLR459W or L9122.2) from Yeast),accession number AL118520,Smith-Waterman Score =386.
  misc_feature (1)...(408): n = a,t,c or g
tttcgtgctggtggtggctgtgacagtgctggcggtcttgttccgctccagtctggccgagttcatttccgagcgggtggaggtggtgtccccactgagctcttggaagagagtggttgaaggcctttcactgttggacttgggagtatctccgtattctggagcagtatttcatgaaataactgatgcactcactgctattgccctgtattttgcaatccaggacttcaataaagttgtgtttaaaaagcagaaactcctcctagaactggaccagtatgccccagatgtggccgaactcatccggacccctatggaaatgcgttacatccctttgaaagtggccctgttctatctcttaaatccttacacgattttgtcttgtgttgccaagtctacctgtgccan

SEQ ID NO: 20134 - DNA, 280 bp, Homo sapiens
  SIMILAR (1)..(156): 981254mologous to Homo sapiens Human secreted protein sequence encoded by gene 24 SEQ ID NO:113,accession number B08956,Smith-Waterman Score=276.
cggcagtacatacctgtgaaaatgaagagcaaagccttctggatcttttcttgggagtatgccatgatgtatgtgggaagcctagtggtaatcatttgcctctccttcttccttctcagctcttgggatttcatccccgcagtctatggctttatggagcaccccatcttcttcatgtttatccagatcgctgtcatcgccatctttaagtcctacccgacagtgggggacgtggcgctctacatggccttcttccccgtgtggaaccatctctacagat

SEQ ID NO: 20135 - DNA, 469 bp, Homo sapiens; identical to SEQ ID NO: 11912
  SIMILAR (363)..(467): 941254mologous to Homo sapiens Human secreted protein fragment encoded from gene 33,accession number Y07776,Smith- Waterman Score=168.

SEQ ID NO: 20136 - DNA, 1818 bp, Homo sapiens
  SIMILAR (7)..(969): 871254mologous to Homo sapiens bA346K17.2 (A novel protein similar to the cell division control protein 91 (CDC91, YLR459W or L9122.2) from Yeast),accession number AL118520,Smith-Waterman Score =1341.
tttcgtatggcggctcccttggtcctggtgctggtggtggctgtgacagtgcgggcggccttgttccgctccagtctggccgagttcatttccgagcgggtggaggtggtgtccccactgagctcttggaagagagtggttgaaggcctttcactgttggacttgggagtatctccgtattctggagcagtatttcatgaaactccattaataatatacctctttcatttcctaattgactatgctgaattggtgtttatgataactgatgcactcactgctattgccctgtattttgcaatccaggacttcaataaagttgtgtttaaaaagcagaaactcctcctagaactggaccagtatgccccagatgtggccgaactcatccggacccctatggaaatgcgttacatccctttgaaagcggccctgttctatctcttaaatccttacacgattttgtcttgtgttgccaagtctacctgtgccatcaacaacaccctcattgctttcttcattttgactacgataaaaggtaaggccctgaaaggagagtacaaaggcagtgctttcctcagtgctatttttcttgccttagcgacataccagtctctgtacccactcaccttgtttgtcccaggactcctctatctcctccagcggcagtacatacctgtgaaaatgaagagcaaagccttctggatcttttcttgggagtatgccatgatgtatgtgggaagcctagtggtaatcatttgcctctccttcttccttctcagctcttgggatttcatccccgcagtctatggctttatactttctgttccagatctcactccaaacattggtcattttctggtacttctttgcagagatgtttgagcacttcagcctcttctttgtatgtgtgtttcagatcaacgtcttcttctacaccatccccttagccataaagctaaaggagcaccccatcttcttcatgtttatccagatcgctgtcatcgccatctttaagtcctacccgacagtgggggacgtggcgctctacatggccttcttccccgtgtggaaccatctctacagattcctgagaaacatctttgtcctcacctgcatcatcatcgtctgttccctgctcttccctgtcctgtggcacctctggatttatgcaggaagtgccaactctaatttcttttaaggcatcacactgaccttcaacgttgggcagctgccccatgagctcttcatcatggtcccagagggaggcggccctggagccctcatggctgccatagagaggaatgtggaccgagccgtccctgggggcagcgctgagagggaccccatcgagaggtccacattacatatcctgctcatctctgattacttctatgccttcctgcggcgggagtactacctcacacatggcctctacttgaccccccaagggattgcaccagaggccatgctcgtgcttcaaagtaggcctggctggcacagggcttcatggaccctcagggggcttgtggggccagaagctgggccaaagctctccagcccagagttgccagcaggcgagtgcttgggcagaagaggttcgagtccaagggtcacaagttctctggtaccaaaaagggacccatggctgactgacagcaaggcctatggggaagaactgggagctccccaacttggacccccaccttgtggctctgcacaccaaggagccccctcccagacaggaaggagaagaggcaggtgagcagggcttgttagattgtggctacttaataaatgttttttgttatgaagtctaaa

SEQ ID NO: 20137 - DNA, 554 bp, Homo sapiens; identical to SEQ ID NO: 5859
  SIMILAR (290)..(538): 961254mologous to Homo sapiens Human phospholipase 2 HPPL2,accession number B03628,Smith-Waterman Score=435.
  misc_feature (1)...(554): n = a,t,c or g

SEQ ID NO: 20138 - DNA, 432 bp, Homo sapiens
  SIMILAR (196)..(432): 931254mologous to Homo sapiens cytosolic phospholipase A2 beta,accession number AF065215,Smith-Waterman Score=384.
  misc_feature (1)...(432): n = a,t,c or g
tttcgttgcggagcgagttacgagaattcccggccgctgcaagggagctctgcgtgcctcttgctgtgccctacctggacaaacccccaactccgctccacttctaccgggactgggtctgccccaacaggccgtgcattatccgcaacgctctgcagcactggccggccctccagaagtggtccctcccctatttcagaggtgagtgtggccgcgaccccagatggttacgcggatgccgagagaggggatcgcttcatgatgccagctgagcgccgcctgcccctgagcttcgtgctggatgtgctggagggccgggcccagcaccctggagtcctctatgtgcagaagcagtgctccaacctgcccagcgagctgccccagctgcttgctgatctggaatcccatgtgccctgggcctncgaagccctg

SEQ ID NO: 20139 - DNA, 470 bp, Homo sapiens
  SIMILAR (318)..(470): 781254mologous to Homo sapiens Human PLA2 protein,accession number Y51557,Smith-Waterman Score=188.
  misc_feature (1)...(470): n = a,t,c or g
nttcgagaatcgatgaacactagcccagngcggnggaattccgcttccactgcccagcctgctgggagcaggagctgagtattcgcctgcacgtatgcccccgaggagcaactaaaggcgccactgagtgccctgccctctggtcaagtggcgaggcttgtcttccccacgtgccaggagcccctgatgagagtggagctgacaaaagaagnnnnnnnnnnnnnnnnnnnnnnnnnnnnnnnnnnnnnnnnnnnnnnnnnnnnnnnnnnnnnnnnnnnnnnnnnnnnnnnnnnnnnnnnnnnnnnnnnnnnnnnntgagggagctgaccgggcgactggtcttcaggccctgtgcaaaggagcaggccttcctgagcatgacgaagcaggtggcggccgcggacttgaagcaagccctgcagctggacggagacctgcaagaggatgagatcccactggtagctattatg

SEQ ID NO: 20140 - DNA, 570 bp, Homo sapiens
  SIMILAR (2)..(265): 1001254mologous to Homo sapiens Human PLA2 protein,accession number Y51557,Smith-Waterman Score=482.
  misc_feature (1)...(570): n = a,t,c or g
ggaatcccatgtgccctgggcctccgaagccctgggaaagatgcccgatgctgtgaacttctggctgggggaggcggctgcagtgacttctttgcacaaggaccactatgagaacctctactgcgtggtctcaggagagaagcatttcctgttccatccgcccagcgaccggcccttcatcccctatgagctgtacacgccggcaacctaccagctaactgaagagggcacctttaaggtggtggatgaagaggccatggagaaggtgccctggatcccactggaccccttggcgccagacctagcacggtaccctagttacagtcaggcccaggcccttcgctgcacggtgcgggccggtgagatgctctatctgccggctctgtggttccaccacgtccagcaagtcccagggctgcatcgagggtgaagagttgcccaggccacctggggaagaaggccctnccaaagtgaatttcttggtatgacatggaatacgacctcaagtatagttacttccaagctgctcgactcccttcaccaaggctttcaggccttttgactgatgga

SEQ ID NO: 20141 - DNA, 567 bp, Homo sapiens
  SIMILAR (3)..(566): 941254mologous to Homo sapiens cytosolic phospholipase A2 beta,accession number AF065215,Smith-Waterman Score=940.
acaaggagcaggtcccccttctgaagatagaagaaccaccctcaacagccggcagaatagctgagtttttcaccgatcttctgacgtggcgtccactggcccaggccacacataatttcctgcgtggcctccatttccacaaagactactttcagcatcctcacttctccacatggaaagctaccactctggatgggctccccaaccagctgacaccctcggagccccacctgtgcctgctggatgttggctacctcatcaataccagctgcctgcccctcctgcagcccactcgggacgtggacctcatcctgtcattggactacaacctccacggagccttccaggttgagaagggtgggcagcccaccagggaggcgcagttgcagctcctgggccggttctgccaggagcaggggatcccgttcccacccatctcgcccagccccgaagagcagctccagcctcgggagtgccacaccttctccgaccccacctgccccggagcccctgcggtgctgcactttcctctggtcagcgactccttccgggagtactcggcccctg

SEQ ID NO: 20142 - DNA, 1317 bp, Homo sapiens
  SIMILAR (193)..(603): 991254mologous to Homo sapiens cytosolic phospholipase A2 beta,accession number AF065215,Smith-Waterman Score=745.
atggaggagcttgaccagacggcccaaaccctcactggccccgaagtccctgagcagcagcgtgtggtgcaggagaggctccgggagcagctgcgggcactgcaggagttggcggccacacggctgtgctcagctcatgctaccggcctggatcccacacctgccaagggcgagtggggcagcgaggggtgtctctgcgtgcctcttgctgtgccctacctggacaaacccccaactccgctccacttctaccgggactgggtctgccccaacaggccgtgcattatccgcaacgctctgcagcactggccggccctccagaagtggtccctcccctatttcagagccacagtgggctccacagaggtgagtgtggccgtgaccccagatggttacgcggatgccgtgagaggggatcgcttcatgatgccagctgagcgccgcctgcccctgagcttcgtgctggatgtgctggagggccgggcccagcaccctggagtcctctatgtgcagaagcagtgctccaacctgcccagcgagctgccccagctgctgcctgatctggaatcccatgtgccctgggcctccgaagccctgggtgagtggagctattttgaccctgggggtcttgccatgattggggcctggagccacatccatggctctgctccggacgcccctgggttaagagcagcagcctctcaagccactctgtggcaggagctccaggtggaggtaaaagctcaccaggggcaggtgcaacgggtgctgagttctgggcggagcctggcagcctcagggcacccccaagcccaacacatcgtggagcagtgccaggagctggaaggccactgggcagagctggagagggcatgtgaagcgcgggcccagtgtctgcagcaggctgtcactttccagcagttgcagctcttgggccggttctgcaaggagcaggggatcccgttcccacccatctcgcccagccccaaagagcagctccagcctcgggagtgccacaccttctccgaccccacctgccccggagcccctgcggtgctgcactttcctttggtcagcgactccttccgggagtactcggcccctggggtccggcggacacccgaggaggcggcagctggggaggtgaacctgtcttcatcggactctccctaccactacacgaaggtgacctacagccaggaggacgtggacaagctgctgcacctgacacattacaatgtctgcaacaaccaggagcagctgctggaggctctgcgccaggcagtgcagcggaggcggcagcgcaggccccactga

SEQ ID NO: 20143 - DNA, 3684 bp, Homo sapiens
  SIMILAR (3055)..(3681): 991254mologous to Escherichia coli K12 probable hexulose-6- phosphate synthase,accession number AE000491,Smith-Waterman Score= 1076.
  misc_feature (1)...(3684): n = a,t,c or g
atggactctcagtacgagacgggccacattcgcaagctacaggcccggcacatgcagatgcaggagaagactttcaccaagtggatcaataacgtcttccagtgcggccaggaaaggtggaagcaaggcttcttcccatgtggtaagaacaattggaacaagctgggcttccctccttacataaccattattgggcaagtccgcatatacaactgtgaagcagccaagagcatctacttccgcattgcgcaaaagtttggagatggagtgcagttcacacggacacaccacgtggtgcggaagacgaccctctatgacatggatgtggagcccagctggaagtacacggctatcggctgccaggaccgaaatattcggatatttaacatcagcagtggaaagcagaagaagctgtttaaagggtcacagggtgaggacggcacactcattaaggtgcagacagacccctcagggatctacattccatggatttcctccatgttgggcctgcaattcagcaatttgtcttccaaagccctacctttcaccaagataccatattgtcagcttttcccccgtcctagctcgagctcctgggacagctgccgcgggaacttgcagggcagctctctgagcctgttcctggatgagaggatggcagcggagaaagtagcttccatagacctccttgacctcacgggagcccgggtgcacgaactcaagtccctgagtgagatgctgaaggtggaggcccatgactctgagattctgtgcctggagtattctaagccagacacaggtctgaaactgctagcatcggcgagccgggaccggctgatccatgtgctggatgccgggcgggagtacagcctacagcagacgctggacgaacactcatcctccatcactgctgttaagtttgcaganacttttatcatggctgagaagatgtcagacaactcattagatgcaggtgtgatgggatcacatgagaaggtagcccagctccgcagggcccggttggaggaggccatggccctgttcggtttctgcagttcctgtggggagctccagttgtggctggagaagcagacagtgatgctccaaagggtgcagccccaggctgacaccctggaggtcatgcagctcaaatatgaggctgagtttatcagggagggacagaggctgctgcaggggggccacccagcctcggaggccatccaggagcgactggaggagctgggagcactctggggtgagctgcaagacaactcccagaagaaggtggccaagctccagaaggcctgtgaggccctgcgtctgcggcggagcatggaggaactggagaactggctggagcccatcgaggttgagctgagagcccccactgtgggccaggccctgcctggggtgggcgagctcctgggcacacagagggagctggaggcagcagtggacaagaaggccaggcaggctgaggcactgctgggccaggcccaggcctttgtgagggaaggccactgccttgcccaagatgtggaagagcaggcccggcggctgcttcagagtctgaggagctgcatgaagcagccaaacctgatgagcttttacagggaaaaagaactgcagagctggggtctcatgggccatgcagtgaccccctctgactgctacgtgactctctggctgcccacggcctgcagccacaggctccagacacgcacggtcaagaacagcagtagccctgtctggaaccagagctttcacttcaggatccacaggcagctcaagaatgtcatggaactgaaagtctttgaccaggacctggtgaccggagatgaccctgtgttgtcagtactgtttgatgcggggactctgcgggctggggagttccggcgcgagagcttctcactgagccctcaggcaaggcggtgtttccacggcagccctagctggaaagatgcccgatgctgtgaacttctggctggggaaggcggctgcagtgacttcttgaaaaccatcactgcccttgctttctcccctgatggcaaggacttggtcactgganaggaggagtttggggccagcgcagccctgctgtccaccaaggaagccctgctggtctggtgccagcggaagacagccagctacaccaacgtgaacattacagatttctcccgaagctggagcgatgggctgggcttcaatgccctcatccatgcccacaggcttgaaggagggaaagtggacacagataatgtcatggaactgaaagtctttgaccaggacctggtgaccggagatgaccctgtgttgtcagtactgtttgatgcggggactctgcgggctggggagttccggcgcgagagcttctcactgagccctcaggcaaggcggtgtttccacggcagccctagctgtcgcctcttctctggagtggcgaatgccaggtatccagacaccattgccttgacctttgatcctactaatcagtggctgtcttgtgtgtacaacgatcatagcatttatgtttgggatgtgagggaccccaagaaagtgggcaaggtgtactcggctctgtatcattcttcctgcgtctggagtgtggagcccccccgtccgaacaaaaaattggggtgcctcaaaaaattttcaagtcggcccaaagcaagtgccattttggaagaattcaagaaatttgccaaaaccgccaacgtgaagacccctcttttggattccaaagcccgccaaccgccaatgggatggccccaatgccggaggccgcagccaccgctcctcatcatgcagcagcgcctcgttgatgagggcccacaggttggtgaaacagcttgggtagccccagcgggcacgctcggccagctcctgccgcggttgaggtcaaccacgatgaccacgatccggtggatatcctcatcaccatggcggcggttcgatgccattactcaccagaaagtgggcatcatgcagatcgtcaacctgtttgaagatgaagagaattttgaccgtttacgcgcctgccgtaccgagcaaggaatcgcgctggacaaccagactatggatagcgcctacgaaaccactcgcctgattgccgaagaagtcgacattatcgaagtgggcaccattctgtgcgtgggcgaaggcgtgcgtgcggttcgtgacctgaaagcgctctacccgcacaaaatcgtactggcagacgccaaaattgccgatgcaggcaaaatcctttcgcgtatgtgcttcgaagccaacgctgactgggtgacggtaatttgctgtgcggatatcaacaccgccaaaggcgcgctggacgtggcaaaagagtttaacggcgacgtgcagatcgaactgaccggttactggacctgggaacaggcgcaacagtggcgcgatgcaggcattgggcaggtggtttatcaccgcagccgtgacgcgcaggccgcaggcgtggcgtggggcgaagcggacatcaccgcgatcaaacgtctttccgatatgggcttcaaagtcaccgtcaccggaggcctggcgctggaagatctgccgctgttcaagggtattccgattcacgtctttatcgcgggccgtagtatccgtgatgccgcttctccggtggaagccgcacgtcagttcaaacgttccatcgctgaactgtggggctaa

SEQ ID NO: 20144 - DNA, 4499 bp, Homo sapiens
  SIMILAR (2942)..(4390): 691254mologous to Homo sapiens cytosolic phospholipase A2 beta,accession number AF065215,Smith-Waterman Score=1568.
ggtgcacgaacttcagtccctgagtgagatgctgaagccagaagttttatctcctactgtgaagggcaaactgctcactggaattaaatctccacggtcatatactcccaaacccaatcctgtgacacacgtcatctccacagggattcaaaagatctggataggagccacagtgggctccacagaggtgagtgtggccgtgaccccagatggttacgcggatgccgtgagaggggatcgcttcatgatgccagctgagcgccgcctgcccctgagcttcgtgctggatgtgctggagggccgggcccagcaccctggagtcctctatgtgcagaagcagtgctccaacctgcccagcgagctgccccagctgctgcctgatctggaatcccatgtgccctgggcctccgaagccctggtgcacaagcaccactatgagaacctttactgcgtggtctcaggagagaagcatttcctgttccatccgcccagcgaccggcccttcatcccctatgagctgtacacgccggcaacctaccagctaactgaagagggcacctttaaggtggtggatgaagaggccatggagaaggtgtctgtcctgttcttgggctctagggagggagaagggcagaagcctggctctgaagaacaggcacaaaagatctggggagtggaggcagccgtccagaggctgggcatgctggaggctggcatcttgccccaggaggggcgcttccaggccctggctgagatcgcagacatcctccggcaggagcagtaccacagctgggcagatgtggcccgcagagggcctccactgaaaggatgtcagcgagctgccagctctcccgggcttcagctcctgtggctgcagcaggagctcctgttccatcttggggagtgggcaaggtgggggcagctggaggccctgaagagggagaaggccgtgcagctggcacacagtgtggaagtgtgcagttttctgcaggagtgtggacccacacaggtccagctgcgagacgtgctcctccagctggaggccctgcagccagggagctcagaggacacctgccacgccctgcagctggcccagaagaagaccctggtgctggagaggagggtccacttcctccaaagtgtggtcgtaaagtacggccagcgcagtggtggcattgggaggcagtcagagtggcctttccttcatgcctgccaaagcacaaagatcagtggcctcacccaagtctcacagacccaagagtctagtctggggatcccaggctctagcttatacatggtgaccttggagaaggtgctgggaattacagtgtctggaggcagaggacttgcctgtgacccccgatcaggtttagttgcttacccagcaggggctgaccgtggcgagtggctcgtcagcaatggcgttctggtggtggctggctgcaagatgccctcagcagagcaaagtcggattgcccagctcctcagagacaccttctcttcagtgcgacaggagctggaagctgtggctggggcagtgctgtccagcccaggcagcagccctggggctgtgggagccgagcagacacaggccctgctggagcaatactcagaactgttgcgggaaaatgacgacttatttatgatgccacgaattgttaatgtgacatcattggccacagagggaggtttggtagatatgggtggcagcaaatatcctcatgaagttcctgatagcaagccatctgaccatctgaaagacaccgtcaggggggaagataattccttagaggataagggtagaatctcttccagaggaaacagagatggcagagtgacgttgggtccaacgcaggtttttctggcaaacaaagattctggttatccacaaatagttgacgtttccaatatgcagaaagcacaagagttcttacctaaaaagatttctggtgatatgagagggattcagtataaatggaaagagagtgaatcaagaggggagagagtgaagtcaaaggattcttcatttcataaattaaagatgaaagatctcaaggactcaagcatagagatggaactgaggaaagtaacatcagctatagaggaagcagctcttgattccagtgaactgctgactaacatggaagatgaggatgatactgatgagacactgacttcactgctcaatgaaattgcctttcttaatcaacaactaaatgatgactctgttggcctggctgaactacccagctctatggatacagagttcccaggggatgctcggcgggcttttattagtaaggttcctcctggaagcagagcaactttccaggttgagcacttgggaactggtttgaaagagttgcctgatgttcaaggggagagtgactctatcagtcccctcctcttgcacttggaagacgatgacttttctgagaatgaaaaacaacttgcagaaccagcctctgagccagatgtccttaaaaatgttattgactctgaaataaaggatttcctcctttccaacaagaaaagctatggatggaggaaagaatacttctggcctccctgcagagcccgaattggattttcagtgcgggatgcatggccaacctctacccagcaaggccctcttaccccggccgagtttcctcggaactcgcggagccgccgtcggagctgcaggcagtgctccaggtcctggcccaggtcaccaacattcatcttcacctcctgtgaaagccgaagccacaactggagctccccacaggaactgcagaaaccgaacagggccatggcctcctccaaccgggccctgcggagctggggagaggtggcccaaggctggggacgtcttggggtgcagggctctcagcatgatggtttgcctcctcccgtgcccctgccctccataccctgcccccgggccttctttctgttggcagtgcacaaggaccactatgagaacctctactgcgtggtctcaggagagaagcatttcctgttccatccgcccagcgaccggcccttcatcccctatgagctgtacacgccggcaacctaccagctaactgaagagggcacctttaaggtggtggatgaagaggccatggagaaggcagaggtgtccaggacctgcctgctcacggttcgtgtcctgcaggcccatcgcctaccctctaaggacctagtgaccccctctgactgctacgtgactctctggctgcccacggcctgcagccacaggctccagacacgcacggtcaagaacagcagtagccctgtctggaaccagagctttcacttcaggatccacaggcagctcaaggtccaggcctgctgctaccacaaagagcccaggattcccataggatccacctcctaccactctccatcccccagatgggatgagctatgcatggggcagcacagacacagggagcaggacacacaaggatacctgagctggctcccaaagcaacaggcacaggaggaacaagagcgtgggggctgggggcagtgtaaggatgatcagataagaaaagcagggagacaaggagggagggtgaggggcgcctggaagttgaatttcgcctgcagagtctcctcagagcacagagttcagcttgtggttcctgggtcctgtgagggtccgcaggaggcctctgtgggcactggcaccttccgcttccactgcccagcctgctgggagcaggagctgagtattcgcctgcaggatgcccccgaggagcaactaaaggcgccactgagtgccctgccctctggtcaagtggtgaggcttgtcttccccacgtcccaggagcccctgatgagagtggagctgaaaaaagaagcaggactgagggagctggccgtgcgactgggcttcgggccctgtgcagaggagcaggccttcctgagcaggaggaagcaggtggtggccgcggccttgaggcaggccctgcagctggatggagacctgcaggaggatgagatcccagtggtagctattatggccactggtggtgggatccgggcaatgacttccctgtatgggcagctggctggcctgaaggagctgggcctcttggattgcgtctcctacatcaccggggcctcgggctccacctggggccttggcaaacctttatgaggacccagagtggtctcagaaggacctggcagggcccactgagttgctgaagacccaggtgaccaagaacaagctgggtgtgctggcccccagccagctggcagcggtaccggcaggagctggccgagcgtgcccgcttgggctacccaagctgcttcaccaacctgtgggcccttattcaacgagggcgttgttgcattgatggagccccatgatcacaagctctcagatcaacggggaggccctgagtcatggccagaaccctctgcccatctactgtgccctcaacaccaaagggcagagcctgaccacttttgaatttgggggtgagtggcccaagagctga

SEQ ID NO: 20145 - DNA, 3419 bp, Homo sapiens
  SIMILAR (1102)..(3099): 731254mologous to Homo sapiens cytosolic phospholipase A2 beta,accession number AF065215,Smith-Waterman Score=2264.
ctgataccccagcttggcacggggacgcgaacaggacgaaagcggctttggaagccgcgcggagcgattatttagaattcccgcccgctgcaagggagctctgcgtgcctcttgctgtgccctacctggacaaacccccaactccgctccacttctaccgggactgggtctgccccaacaggccgtgcattatccgcaacgctctgcagcactggccggccctccagaagtggtccctcccctatttcagagccacagtgggctccacaaaggtgagtgtgggccgtgaccccagatggttacgcggatgccgttgagagggggattcgtttcattgattgccagttgagcgccgcctgcccctgagcttcgtgctggatgtgctggagggccgggcccagcaccctggagtcctctatgtgcagaagcagtgctccaacctgcccagcgagctgccccagctgctgcctgatctggaatcccatgtgccctgggcctccgaagccctgggaaagatgcccgatgctgtgaacttctggctgggggaggcggtttgagtgacttttttgcacaaggaccactatgagaacctttactgcgtgggctcaggagagaagcatttcctgttccatccgcccagcgaccggcccttcatcccctatgagctgtacacgccggcaacctaccagctaactgaagagggcacctttaaggtggtggatgaagaggccatggagaaggcagaggtgtccaggacctgcctgctcacggttcgtgtcctgcaggcccatcgcctaccctctaaggacctagtgaccccctctgactgctacgtgactctctggctgcccacggcctgcagccacaggctccagacacgcacggtcaagaacagcagtagccctgtctggaaccagagctttcacttcaggatccacaggcagctcaagaatgtcatggaactgaaagtctttgaccaggacctggtgaccggagatgaccctgtgttgtcagtactgtttgatgcggggactctgcgggctggggagttccggcgcgagagcttctcactgagccctcagggtgaggggcgcctggtaagttgaatttcgcctgcagagtctggctgaccgtggcgagtggctcgtcagcaatggcgttctggtggcccgggagctctcctgcttgcacgttcaactggaggagacaggagaccagaagtcctcagagcacagagttcagcttgtggttcctgggtcctgtgagggtccgcaggaggcctctgtgggcactggcaccttccgcttccactgcccagcctgctgggagcaggagctgagtattcgcctgcaggatgcccccgaggagcaactaaaggcgccactgagtgccctgccctctggtcaagtggtgaggcttgtcttccccacgtcccaggagcccctgatgagagtggagctgaaaaaagaagcaggactgagggagctggccgtgcgactgggcttcgggccctgtgcagaggagcaggccttcctgagcaggaggaagcaggtggtggccgcggccttgaggcaggccctgcagctggatggagacctgcaggaggatgagatcccagtggtagctattatggccactggtggtgggatccgggcaatgacttccctgtatgggcagctggctggcctgaaggagctgggcctcttggattgcgtctcctacatcaccggggcctcgggctccacctgggccttggccaacctttatgaggacccagagtggtctcagaaggacctggcagggcccactgagttgctgaagacccaggtgaccaagaacaagctgggtgtgctggcccccagccagctgcagcggtaccggcaggagctggccgagcgtgcccgcttgggctacccaagctgcttcaccaacctgtgggccctcatcaacgaggcgctgctgcatgatgagccccatgatcacaagctctcagatcaacgggaggccctgagtcatggccagaaccctctgcccatctactgtgccctcaacaccaaagggcagagcctgaccacttttgaatttggggagtggtgcgagttctctccctacgaggtcggcttccccaagtacggggccttcaatcccctctgagctctttggctccgagttctttatggggcagctgaagaagaggcttcctgagtcccgcatctgcttctttagaaggtatctggagcaacctgtatgcagccaacctccagggacagcttatactgggcctcagagcccagccaattctggggaccgctggggtcaaggaaccaggccaacctgggacaaggagcaggtcccccttctgaagatagaagaaccaccctcaacagccggcagaatagctgagtttttcaccgatcttctggacgtggcgtccactggcccaggccacacaaaattttcctgcgtgggcgttccattttccacaaagactactttcagcatcctcacttctccacatggaaagctaccactctggatgggctccccaaccagctgacaccctcggagccccacctgtgcctgctggatggtggctaactttaataaataccagctgcctgcccctcctgcagcccactcgggacgtggacctcatcctgtcattggactacaacctccacggagccttccagcagttgcagctcctggggccggttctgccagggagcaggggatcccgttcccacccatcttcgcccagccccgaagaggcagctccagccttggggagttgccacaccttctccgaccccacctgccccggagcccctgcggtgctgcactttcctctggtcagcgactccttccgggagtactcggcccctggggtccggcggacaccccgaggaggcggcagctggcggaggtgaacctgtcttcatcggactcttccctaccactaacacgaaggtgacctacagccaggaggacgtggacaagctgctgcacctgacacattacaatgtctgcaacaaccaggagcagctgctgggaaggctctgcgccccaggcagtgcaaacggaaggcggcagcgcaaggcccccactgaatggccggggcccctgcccaccccctaactctcattcattcccctggctgctgagttgcaggtgggaacttgtcattcacgcagtgcttccagagcctcgggctcaggtggaactgtcccagggtcccaggctgagggctgggagctcccttgcgcctcagcagtttgcagtggggtaaggaggccaagcccatttgtgtaatcacccaaaaccccgccggcctgtgcctgttttcccttctgcgctaccttgagtagttggagcacttgatacatcacagactcatacaaatgtgaaaaaaaaaaaaa

SEQ ID NO: 20146 - DNA, 1239 bp, Homo sapiens
  SIMILAR (598)..(660): 851254mologous to Homo sapiens MTHSP75,accession number L15189,Smith-Waterman Score=94.
atggcgccgtcctccaggagcggagctgggaacacgtccacgcccggggggtgtgcacgcgcccgggctcccccagggaacgctggcgtgcactcgggcacccagaccggggctgtccgagatacggccttcatatccccttcctcccctggactctttctgagctcagagccgccgcagccgggacagagggcaggctttctccaaccatcatgctgcggagcatattacctgtacccctggctccgggagcggcagtcgagtatcctctggtcaggcggcgcggcggcgcctcagcggaagagcgggcctctgggccgcagtgaccaaccccccccctcaccccacgtggttggaggtttccagaagcgctgccgccaccgctcgcgcagctctttgccgtcggagcgcttgtttgctgcctcgtactcctcatttatccgccatgataagtgccagccgagctgcagcagcccgtctcggggcgccgcagcctcccggggcctacgggccgcccgccaccagatcagaagcaatcaagggacagttgttggtattgatttgggtactaccaactcctgcgtggcagttatgaagaaaaatgttccctttaaaattgtccgtgcctccaatggtgatgcctgggtgaggctcatgggaaattgtattctccgagtcagattggagcatttgtgtgatgaagatgaaagagactgcagactaatagttgccttgcctgagggtatggaggaaccggaatttgactaccagaatgacatggggaacagccaggacctggagaggcggagggggtgtgctgcggagccctgggaggagggggttgggcagtcgctggcgctgccgctggtgtccctgtgcttgaagtgccggtggtatcggagtccatgcacccaaggccagcacccagcaacattctctggcccagcagagggggtcatctctgagagaagtatgctggaacattggcatgaggaaatcaatcaatgcaaagcatataatgaggatgtattcagcaccatgaggaccaacccagcgagaataagctcagaagcaatggcaccagcagatatcattgatcattcctcccaaagaccagatttcacgagtggcaaaatgttagcggatgagtttggaactgcatctaacattaagtcacgagtaaacgcctttcagtcctgggagccattacatctgtacaacaaagactcaaacttataa

SEQ ID NO: 20147 - DNA, 728 bp, Homo sapiens
  SIMILAR (312)..(728): 991254mologous to Homo sapiens MTHSP75,accession number L15189,Smith-Waterman Score=714.
tttcgtccgagctgcagcagcccgtctcgtgggcgccgcagcctcccggggccctacggccgcccgccaccaggtgaggaactgggaccttcccgaatggggtcacggcctcgggccttgggcctcgggcttcgctgcggcgggccgcgcgccctttagggtttgaattctccagtataggtcaggcgggaaggaaggtaacgggccttccatagttagcgctgccgggtcaagattttgcccaaggttttgcctccggcttgggccctgctgagtcacacccctcgcgatctagagtgtcatttcaaaattaccaggatagctggaatggccttagtcatgaggcttttagacttgtttcaaggcgggattatgcatcagaagcaatcaagggagcagttgttggtattgatttgggtactaccaactcctgcgtggcagttatggaaggtaaacaagcaaaggtgctggagaatgccgaaggtgccagaaccaccccttcagttgtggcctttacagcagatggtgagcgacttgttggaatgccggccaagcgacaggctgtcaccaacccaaacaatacattttatgctaccaagcgtctcattggccggcgatatgatgatcctgaagtacagaaagacattaaaaatgttccctttaaaattgtccgtgcctccaatggtgatgcctgggttgaggctcatgggaaattgtattctccgagt

SEQ ID NO: 20148 - DNA, 3721 bp, Homo sapiens
  SIMILAR (448)..(1800): 891254mologous to Homo sapiens MTHSP75,accession number L15189,Smith-Waterman Score=1929.
  misc_feature (1)...(3721): n = a,t,c or g
atggcgccgtcctccaggagcggagctgggaacacgtccacgcccggggggtgtgcacgcgcccgggctcccccagggaacgctggcgtgcactcgggcacccagaccggggctgtccgagatacggccttcatatccccttcctcccctggactctttctgagctcagagccgccgcagccgggacagagggcaggctttctccaaccatcatgctgcggagcatattacctgtacccctggctccgggagcggcagtcgagtatcctctggtcaggcggcgcggcggcgcctcagcggaagagcgggcctctgggccgcagtgaccaaccccccccctcaccccacgtggttggaggtttccagaagcgctgccgccaccgcatcgcgcagctctttgccgtcggagcgcttgtttgctgcctcgtactcctccatttatccgccatgataagtgccagccgagctgcagcagcccgtctcgtgggcgccgcagcctcccggggccctacgggccgcccgccaccaggatagctgggaatggccttagtcatgaggcttttagacttgtttcaaggcgggattatgtcatcagtaagcaatcaagggagcagttgttggtattgtatttgggtactaccaactcctgcgtggcagttatggaaggcaatcaagccaagggtgttggagaatgccgaaggtgccaaaaccaccccttcagttgtggcctttacagcagatggtgagcgacttggtggaatgccggccaagcgacaggctgtcaccaacccaaacaatacattttatgctaccaagcgtctcattggccggcgatatgatgatcctgaagtacagaaagacattaaaaatgttccctttaaaattgtccgtgcctccaatggtgatgcctgggttgaggctcatgggaaattgtattctccgagtcagattggagcatttgtgttgatgaagatgaaagagactgcagaaaattacttggggcacacagcaaaaaatgctgtgatcacagtcccagcttatttcaatgactcgcagagacaggccactaaagatgctggccagatatctggactgaatgtgcttcgggtgattaatgagcccacagctgctgctcttgcctatggtctagacaaatcagaagacaaagtcattgctgtatatgatttaggtggtggaacttttgatatttctatcctggaaattcagaaaggagtatttgaggtgaaatccacaaatggggataccttcttaggtggggaagactttgaccaggccttgctacggcacattgtgaaggagttcaagagagagacaggggttgatttgactaaagacaacatggcacttcagagggtacgggaagctgctgaaaaggctaaatgtgaactctcctcatctgtgcagactgacatcaatttgccctatcttacaatggattcttctggacccaagcatttgaatatgaagttgacccgtgctcaatttgaagggattgtcactgatctaatcagaaggactatcgctccatgccaaaaagctatgcaagatgcagaagtcagcaagagtgacataggagaagtgattcttgtgggtggcatgactaggatgcccaaggttcagcagactgtacaggatctttttggcagagccccaagtaaagctgtcaatcctgatgaggctgtggccattggagctgccattcagggaggtgtgttggccggcgatgtcacggatgtgctgctccttgatgtcactcccctgtctctgggtattgaaactccacggagccgtcttttccaaacttattaataggaaaacaaatattccaaccaagaagagccaggtattctctactgccgctgatggtcaaacgcaagtggaaattaaagtgtgtcagggtgaaagagagatggctggagacaacaaactccttggacagtttactttgattggaattccaccagcccctcgtggagttcctcagattgaagttacatttgacattgatgccaatgggatagtacatgtttctgctaaagataaaggcacaggacgtgagcagcagattgtaaatccagtcttctggtggattaagcaaagatgatattgaaaatatggttaaaaatgcagagaaatatgctgaagaagaccggcgaaagaaggaacgagttgaagcagttaatatggctgaaggaatcattcacgacacagaaaccaagatgggagaattccaaggacccaattaccctgcctgatgagtgcaacaagctgaaagaagagatttccaaaatgaggggagctccctggctagaaaaagaccagcgaaaactgggaggaaaatattagaccaggccagcatcctctcttcgagcgaggcatcgactgaagcttgttcgaaatggcataccaaaaagatgggcatctgagcggagaaggctctggaagttctggcactgggggaacaaaagggaagattcaaaagggagggaaaaaccagtaattaatagcagaaattttgaagccagaaggaccaacatatgaagcttaggagtgaagagacttccctgagcagaaatgggcgaaccttcagtccttttacctgtgtttttgcagtattcctatatataatttccttaatttgtaaatttagtgaccattagctagtgatcatttaatggacagtgaatcctaacagtataaaagttcacaatattcctatgtcccctaccctgtcattttttcagctgcatgttaaaagggaggtagggatggattggttccttattaaaggttttaactatttttatgctggaagtgacccatatttttccaaggggtgaaaacccatcttcgcacaacagccaatgaaaggtagtccatcccatagaacttgaaatgagacccaccatatggggggatgagatccttctaggttagcctagtactgctgtactgggcctgtatgtacagggggtccttcaactgagggccttgcaagttcaaggctggctgtgccatgtttgtagatggggccgagggaacttagacacatgggaaaccttagctatttatattagggcacgctattaaaacgaaggtaggaatgaggctagacctttaacttccctaaggcatacttttctagctaccttctgccctgtgtctggcacctacatccttgatgattgttctcttacccattctggaatttttttttttttaaaataaatacagaaagcatcttgatctcttgtttgtgaggggtgatgccctgagatttagcttcaaggaatatgccatggctcatgcttcccatatttcccaaagaggggnaatacaggatttgctaacactggttaaaaatgcaaattcaagatttggaagggctgttataatgaaataatgagcagtatcagcatgtgcaaatcttgtttgaaggattttattttctccccttagacctttggtacatttagaatcttgaaagtttctagatctctaacatgaaagtttctagatctctaacatgaaagtttttagatctctaacatgaaaaccaaggtggctattttcaggttgctttcagctccaagtagaaataaccagaattggcttacattaaagaaactgcatctagaaataagtcctaagatactatttctatggctcaaaaataaaaggaacccagatttctttccct

SEQ ID NO: 20149 - DNA, 448 bp, Homo sapiens
  SIMILAR (9)..(164): 841254mologous to Homo sapiens CGI-96 protein,accession number AF151854,Smith-Waterman Score=211.
ctggagagggagagacggaagcgcagccgaaaagagctgctcaacttctacgcctggcagcatcgagagagcaagatggagcatctacggcactgcgcaagaagttcgaggaggacaagcagaggatcgagctgctgcgggcccagcgcaaattccgaccgtactgagctgtgagagccgcagtgaatggctggaggtgcagggccaggaggaggcgaggcagggcctgcagcggtctctgagaggccgagctctgccaacgggccccaggttgaaggccaccgcgtccaacagccccatcagagtccacacaggccaggagggaaggaccaggccacccctcgggtcttgtgcttcagcagtcctggggaccctggatgaatccgttctgtgcttccttttccctcaatgcaaaagcccttgctggcaacgaaaaagcctcaaaagc

SEQ ID NO: 20150 - DNA, 2570 bp, Homo sapiens
  SIMILAR (2513)..(2229): 871254mologous to Homo sapiens Human Hydrolase protein-15 (HYDRL-15),accession number Y71117,Smith-Waterman Score=480.
  misc_feature (1)...(2570): n = a,t,c or g
gcgctcgcgccggcgccgaaccgcaactcccggcgacccccgcgctcccgggtggcaagatggtggcgcgcagtctcgctggcctcagctcagggtagcctggccatccctcccctcccatttcctttccagctattccaatcaagttctctgaaaagcaacaggcttctcactacctctatgtgagagcacacggcattcaacaaggcaccaagtggagggaggctttgggatggccctgcggatgctcacacttggcttccctctccctgcagcaggagagcctgtcctgcctccagtccacctgtggccttgtccagtctgtagagttgaagttcccagatttgccacatccttgcacttcctgcctggctttttctgtcccgtgttaaagctcacggaccgtctctgctggccacctgcagggccttccccggctcccctcctgcttccccactgagggagctccttccccaggcttgggggccgggtctccaggagcactgttgttcagagaccttgtgccagacgtgggaaggagcccccaacctctgacatctctctctcttcagggtttccaggtagcctacgtggtgttccagaagccaagtggggtgtcagcggccttggcggtggggcccaaatgccaggcctgaggaagccccgtttccctggctcccttttcctcagaatggatcagtgactacgcagactctgtgcccgaccctggctggaggctgcgggaggtcccaggcgcccaccggacgatgggatcaccttccttgcaggaagaagctaaggccaaggaggaggagggggtccctgacgaggagggctgggtgaaggtgacccgccggggccggcggcctgtgctcccccggactgaggcagccagcttgcgggtgctggagagggagagacggaagcgcagccgaaaaagagctgctcaaacttctacgcttggcagcattcgagagagcaaagatggagcattcttaaggcaagtgcgcaagaagtttcgaggaggacaagcagaggattcgagcttgctgcgggcccaagcgcaaaattccggaccgtaactgagctgtgagagccgcagtgaatggctggaggtgcagggcccaggaggaacatgaggtgaagcagggcctgcagcggtctctgagaggccgagctctggccaacgggccccaggtttgaaggccaccgcgtccaacagccccatcagagtccacacaggccaggagggaaggaccaggccacccctcgggtcttgtgcttcagcagtcctggggacccaggcgtgccggagaggaggacttgtccttcctgcttcttgcctccacacccctcctctccaggaccctggatgaatccgttttgtgcttccttttccctcaatgcaaaagcccttgctggcaacgaaaaagcctcaaaagcagtgagaatacaagaaccttttattttccatccagttgggcagcagggaaaggctaggtgggcccagcccgcccttccttcctccagctggctggatatttattattagccaggagaaagcagccctggaacccagactctgtctcccccttgaggtcacagatgttgaagttggaatctcgctccttcccctgactaccatcctaggctgggcctcaagactagtgaggccttgtccccaccatccctgggccttgttgtgggggctcaggaactcaagagtcccagtgttgagtctggggagcactagggtctttcatagttccagggggccagagctacagctggggctgggggagcatggtgttgtngcgctgtaaagaaggagctgatgatactgggccacggtgcttggggttcgctcatgtggacacagtggattgcctgggacttccacaaacttggaaccgctctttgagggtggatttcattgtgtctatcatgaacgacagggactccttgtcagagtaattctctcttggatcaaaatatccgtggactgctttgatcaacaggacatgggcctgcagcttcctgatggaatgcgcacacagctccctgctgacgaagtcaatgctgttctctgccagctccccgtccacaccgggcacccacctctgcagcagctgcttcaggctgaacacgtgcgagggctcctgggaggcctctacctgcagcacgtgctctatggctctccgcttgtaggtcagcaagttctccatttccattccgcccacgacgccacctgccacaactcttcggatctcactcacaaaagtctggaggtaatatgggacacctgggctgtaatgggacgagagcccatgacctccgaaatccatggcaacgtaataaaagtcttgcgggagaagagggatgagtctgtcgaaggagctggcattgtccagccagccgtgcaggcagagaactggagggccctgcagggagccccaggctttggctgcgatgtggccccagggcacagccagcttcagctctgagatcagaccccaggcaagccccgcaactccagcagtccccgcaactccagccgtccccgcccccat

SEQ ID NO: 20151 - DNA, 418 bp, Homo sapiens; identical to SEQ ID NO: 15884
  SIMILAR (157)..(333): 1001254mologous to Homo sapiens sirtuin type 2,accession number AF083107,Smith-Waterman Score=304.

SEQ ID NO: 20152 - DNA, 453 bp, Homo sapiens
  SIMILAR (124)..(198): 1001254mologous to Homo sapiens silencing information regulator 2-like protein,accession number AF095714,Smith-Waterman Score=133.
aattcgagaacactgtcgagagccgtggaattcctaggatacaaacccaggccacctggctccagggtctgtgctcttagctctcccttccctgctcctgcccctgacccaccccctccctgacagtcggaccctttcctggggatgattatgggcctcggaggaggcatggactttgactccaagaaggcctacaggtgaggccccgccgggggttggggcagcctggaatggacagggtgaggtgggagcgggggcacgaaggcagatgagaggagcaggcaggggcgagcccgcctgggaactctgatctcctgctgcaccgcagggacgtggcctggctgggtgaatgcgaccagggctgcctggcccttgctgagctccttggatggaaggtgaggagctgagcaaccccagcctgtcctgagccccatccctggaccctctccccac

SEQ ID NO: 20153 - DNA, 458 bp, Homo sapiens
  SIMILAR (211)..(456): 911254mologous to Homo sapiens Human breast tumour-associated protein 1,accession number Y48540,Smith-Waterman Score=382.
aaagcaaagccactcacatgaggtcttgctcctggggacgggcatggccaggactccaaccccggcaggctgtcccagagccctggagctagccccagtgcagtctctccaccaccccgcacttcctcaggccaccttcctgccacagccttttccccaaacctggtatcaccccctctcctccctccctaatcccacctctcgggcctggccactccaccccaccccttccaggactcagattcagactctgagggaggagccgctggtggagaagcagacatggacttcctgcggaacttattctcccagacgctcagcctgggcagccagaaggagcgtctgctggacgagctgaccttggaaggggtggcccggtacatgcagagcgaacgctgtcgcagagtcatctgtttggtgggagctggaatctccacatccgcaggcatccccgactt

SEQ ID NO: 20154 - DNA, 2007 bp, Homo sapiens
  SIMILAR (297)..(812): 631254mologous to Homo sapiens sirtuin type 2,accession number AF083107,Smith-Waterman Score=456.
ggcacgaggggtgacaggacagagcagtcggtgacgggacacagtggttggtgacgggacagagcggtcggtgacagcctcaagggcttcagcaccgcgcccatggcagagccagacccctctcaccctctggagacccaggcagggaaggtgcaggaggctcaggactcagattcagactctgagggaggagccgctggtggagaagcagacatggacttcctgcggaacttattctcccagacgctcagccttgggcagccagaaggagcgtctgctggacgagctgaccttggaaggggtggccccggtacatgcagagcgaacgttgttcgcagagttcatcttgtttggtgggagctggaatctccacatccgcaggcattccccgacttttcgcttctccatccaccggcctcttattgaacaacctagagaagtgaccatctttccctaacccagaggccatcttttgagattcagctattttcaagaaacattccggaaccctttttcgccctcgccaagggaactcttatcctggggcagtttcaaggccaaccatctgttcaataatttcatgcggcttgcttgaaagggacaaaggggggctactcctgcggttgttaaaaggagggaacattaggttacctgggagcgaatagccggggttggaacaggaggacttggtggaggcgcacggcaccttctacacatcacactgcgtcagcgccagctgccggcacgaatacccgctaagctggatgaaagagaagatcttctctgaggtgacgcccaagtgtgaagactgttcagagcctggtgaagcctgataatcgtcttttttggtgagagcctgggagcgcgtttcttctcctgttattgcagttcagattttctgaaggttggaccttcttctgggtcatgggtacctccttgcagggacgtggcctggctgggtgaatgcgaccagggctgcctggcccttgctgagctccttggatggaagaaggagctggaggaccttgtccggagggagcacgccagcatagatgcccagtcgggggcgggggtccccaaccccagcacttcagcttcccccaagaagtccccgccacctgccaaggacgaggccaggacaacagagagggagaaaccccagtgacagctgcatctcccaggcgggatgccgagctcctcagggacagctgagccccaaccgggcctggccccctcttaaccagcagttcttgtctggggagctcagaacatcccccaatctcttacagctcccttccccaaaaactgggggtcccagcaaccctggcccccaaaccccagcaaatctctaaaaacctcctagaggcccaaggctttaaaccaggcattttctaccagcccccaactgtcttctaaacaaatccctgggcctaaaggagtaaacctcccctcatctcctaaaaacttgccccacggggcccagggctacccccagaactttttaactcttccccaggacaggggagcttcgggccccccactctgtctgcctgcccccggggggcctggtggtaaagtaaaccatacctaacctaccccagtgtgggtgtcgggcctctgaatctaacccacgacccagcgtaggggggagtcttgagccgggagggctcccgaagtctctagccttcagcttcccaaagtggggtggtggggcccccttcacgtgggacccacttcccatgctggatggggcagaagacattgcttattgtagacaaattagaaacaataacaactaacaaaaaatattacagaaaggggcggcgatttaaaaggtccccacgaggggcccacgttaacagaggcgtccaagctcatacttgtcaccttatggggggcctaataaaagcctaggcccggcccgtcatttaaaacacgatgggccggaaaaatcctcaatctggaaatcttgtggaaggaccttaatttttgcgaggagaaaaattg

SEQ ID NO: 20155 - DNA, 413 bp, Homo sapiens
  SIMILAR (298)..(86): 381254mologous to Mycobacterium leprae unknown,accession number Z95398,Smith-Waterman Score=71.
actttggtttcaatgggtgttccaaaaggatcatcaagcttcaggagctttctgaccttgaagaaagggaaaatgaagatagcatggtgccacttccgaagcaaagcctgaagttcttctgtgctttagaagtggtgttgccatcctgtgattgcaggagtcctggcattggcttggtggaggagcctatggataaggtggaggaaggaccattatcattccttatgaaaaggaagacagcccagaagcttgctattcagaaggctttgtcagatgcattccagaaactgttgattgttgttctaggtaagactgtcttgatcatccttgaagtacttcagtttcagtaagcaaataaactcattttgaaaagttaattgaataaaaatattgatatctaaagcaaaaaaaaa

SEQ ID NO: 20156 - DNA, 1822 bp, Homo sapiens
  SIMILAR (777)..(193): 341254mologous to Homo sapiens Human secreted protein clone dd119_4 protein sequence SEQ ID NO:108,accession number Y53051,Smith-Waterman Score=197.
tcatttgcttgcttcttggctgggagaagttagcgtccctgatatgtcgtactgctgagactgtataccctgcagcctcctactgtattggagaggggttctcatctttagtaggttctggagattcagctgaagtctcctgttgaactggtaaaggtccagtctcttccgatgactctcttgatatactggaggttggggtacaaattccttaggaggctgagttggggtctcctgcatggttggagaaagttcaatttctgtagtggattctggagtgatgataaaccccaggtccaaaggttgaagtgtgacactggccagtgttgaaagctgagcttgatcctgaccttgtgttggaattgtcacctcataacgaggtggaagttgagctacaacctccgtaggtggttctggaagttgatttgagttctccatggttggaggaaatatattctctgggaccatctgctggcttgaaagttctatattcttggggggctctgaagcctgaactgtggcctcctgctggtttggagaaggctctgcctccatagggggtatggagtctgagctggaaagttttgctgagttagagagggttccacttcctgagggagctaaagtctgagctggtgactgagttgtgggctcttgagggactggaggaagttcatcattttcaggggtatttagctgctgaataatcatttcttgctggtctttcaaatgctgaaactgccctgagtttttatcttcacatacttgaattaaaccgtgtagttcttcttcgcatctgacacctacgatgtcttcactgggtctgtactccacagctattttaccactttcttcctccaccttatccataggctcctccaccaagccaatgccaggactcctgcaatcacaggatggcaacaccacttctaaagcacagaagaacttcaggctttgcttcggaagtggcaccatgctatcttcattttccctttcttcaaggtcagaaagctcctgaagcttgatgatccttttggaacacccattgaaaccaaagtagtaattcgccagttcttggcatttggaactgttcagggcaagggcttgatgttgaactgccttatgtctggtgccaagacgaaccttgactggagatttctgaaaaagctgcttccggtcgcatgccttttgggctctgtgggcagcccttgcagaataaaacttaatgacggcatagaaaccaggatgggccactgcagcatttgggaagacccggactgaatacagaaggccaaactgagaaaatgctgtgaacagagaatgctgtgggggtgggacaagtaaatgcatgaaatctcacgcccagaaaacaaaaccggcacatgccctcatattccccaaacctctcttcgcgaaggatgcgattcaaaacacttcccacttaatcaacaggttttcctcttaaaatcctaaactttaagaagcactggaaggtaaaacgttctgaaggtgaagagatacctctccgggactctaaatatctgttgggggtcgtcagttgtcagttgggatcccctttataattaagagtccttcagcggaggctcaggcaggtgagggtctgaggcaggactccggaactcccagtcagcgggtgggcagctttctccatccctccctccatcctggccccggctcacatgcaaagcctcggccgtgggtccggagctcagctcccacactagcaaggttttgtcactaaaaatgggaaccgcaaaaggtaccaactccgccatccacgaaatcgtcgacccgggaaatc

SEQ ID NO: 20157 - DNA, 864 bp, Homo sapiens
  SIMILAR (5)..(724): 971254mologous to Homo sapiens KIAA1322 protein,accession number AB037743,Smith-Waterman Score=1229.
ggaattccagcagcagacagaagaagccagtctggagcttattaaactggacatttctagaacatttcctaatctctgcattttccagcaaggtggtccatatcatgacatgttgcacagtattttgggcgcttatacttgttaccggccagatgtgggttatgtccagggcatgtccttcatagcagcagtgttgatcttgaacttagatactgcagatgcctttattgccttttctaaccttctgaataaaccctgtcaaatggcgttttttagagtggaccatggccttatgttgacttattttgctgcatttgaagtattctttgaagaaaatttgccgaaattatttgcgcatttcaagaagaacaacctaactccagatatctacctaattgattggatctttaccttatatagtaaatctctgcccctcgacctggcctgtcgtatctgggacgtgttctgtcgcgatggggaagagttcctgttccgcacggccctgggcatcctgaagctgttcgaggacatcctgaccaagatggacttcattcacatggcccagttcctgacccggctgcccgaggacctgcccgccgaggagctgtttgcctccatcgccacgatccagatgcagagccgaaacaagaagtgggctcaggtactgactgcattgcagaaagacagccgggaaatggagaagggaagtccgtccctccgacactgaggctgcagcgggaattcgcactcggcaccaatcagagccccatgccgcggcccctctgttgtttcagactgacacccgggcagccgagaagaacagacgctctttaagtttgattcctaacactggagttggcctta

SEQ ID NO: 20158 - DNA, 1052 bp, Homo sapiens
  SIMILAR (60)..(362): 281254mologous to Saccharomyces cerevisiae ADA2,accession number M95396,Smith-Waterman Score=102.
agtgcggtggaattcccaagatggaagagtcggcagagtacgaggcagcgcggcataaacgggagaagaggatggagaacataaacctagccggctccaaacggggaaaggaggacggcaaagacagcgagttcgccgccattgagaaccttccaggcttcgagctcctgtcagatcgcgagaaggtgctctgcagctctttaaacttgagtccagcccgctacgtgactgtgaagactattataattaaagaccacctccagaagcggcaaggaatcccctccaaaagccgccttcctagctacctggacaaagtcctaaagaaaaggattttgaatttcctcacagaaagcggctggatctccagggacgcgtcttgaagctgagacgctttgaaagccagggtgatgctcagacagtgtgccagccaaaatgacttgggggaggggagccgcttccccactgttgctcttttttaaacaaattgagttcctttttttaagatagaaattcttttcatggtcctctgaaagaagcaatagtaacaatcttatattggatcatgggggaagcaaatgtgtgtattttaagtgagttcctgcgagtcatacactgcgatgatgctccgcctttacccgttcagttgggagcttattgtgagattggatcatttccttttgagtgttcttctctttggtacaaaagctattgtgggtgacaggagccagtgtttcctgctggacccgcaagccaccagctatttcctggtgacacaagctcttctcaggcggggctgcctgcaggctcccgttttctgagcccacgctgcccacagctgaccccagcgcagccccgggcacgcggcactttacatgggggcagcttgggcccagactcctccgctgtgtagcagatgaggaaaatcaggccagaggacaacaggctggcgttttgttgggaactgaagaggaatctgttgaacacagcgaccagatgaccttccatttcaccggcggcaaaaggttttcagcgtgcagttcccaaaccccaaa

SEQ ID NO: 20159 - DNA, 513 bp, Homo sapiens
  SIMILAR (124)..(510): 1001254mologous to Homo sapiens KIAA1322 protein,accession number AB037743,Smith-Waterman Score=691.
cctagcggtaccgggcccggatttcccgggtcgacgatttcgtgagggagggagggaggccggccctccgctcgctgggcatggagcctccggccgcgcgcctctaaggccccggcgttcatggaatatgaagacaaggctggaagacctagcaagccaccctctccaaagcagaatgtgaggaagaatcttgactttgaaccactttccaccaccgcactcatcctcgaggacagaccagcaaatctcccagcaaaaccagctgaagaagctcagaagcacagacagcagtatgaagaaatggtggttcaggccaaaaagcgagagctgaaagaagcccagcgaaggaagaagcagctggaagaaagatgcagagtcgaggaaagcattggaaacgctgtgctcacctggaataatgagatcttacctaactgggaaacaatgtggtgctctagaaaagttcgagatttatggtggcagggaatccctccaagtgtgagaggcaaagtctcg

SEQ ID NO: 20160 - DNA, 4017 bp, Homo sapiens
  SIMILAR (2884)..(3624): 991254mologous to Homo sapiens KIAA1322 protein,accession number AB037743,Smith-Waterman Score=1256.
aaaaccaagaatggaaacgaagccctcccatcacggtagctaaggccactcaaggagcctacttgaacattctcaaagacaccctacgagctcagaaagagcaaaaggaaggcaaggaggaagtcatccataaaggtgctaagctgcaccccaacggatacaggatggcgcagggaagtgagactctggtggcaagaggaggcccgtgcagatccgtggagccctcagctgcttctccgcaggagctcaggggctggtgggaggcccaagctctgaaacggtggggcctgatgggaggcgtttgggtcatggaggtggatccctcgtggcttggtgccatctctgcaatagtgagttctagtgccagccggttgttgaaaagtgtgtggcacatcccctgcccccacttcctcctgctccggccacagctgaaagaagcccagcgaaggaagaagcagctggaagaaagatgcagagtcgaggaaagcattggaaacgctgtgctcacctggaataatgagatcttacctaactgggaaacaatgtggtgctctagaaaagttcgagatttatggtggcagggaatccctccaagtgtgagaggcaaagtctggagcttagccattggcaacgagttaaatatcacccacgagctctttgacatctgtcttgcccgagccaaggagaggtggcggtcccttagcacaggaggctctgaagtggagaacgaaggactgtgtgtagcagtctgcgctcagcaaggccatgttggtgtgatgggcttcggctcagatgagcccagtgcagtgagcccgtgtgagaaagggaaatccctggcagcctgggttctcatctttgtggatttccgtgtgggtcttcagaaatcttttcagaagaggaaagagagggaatctacaaagctccagcagctttggtcctggtgtctgatgttgacttattttgctgcatttgaagtattctttgaagaaaatttgccgaaattatttgcgcatttcaagaagaacaacctaactccagatatctacctaattgattgtgattcaggctccttgttgggtgctgacagttcggtgaaagctcagatcagaaacaggttgggcagtagggaggaagcaaaggggaagaacagactttacataagacctgtcctagaagctgccatttcagaagcactcgtcactgtggtcttcagtgttcaggagcaggtgtacctatttctgggcacagaagaagtcactgaggcccatggtgtgaggtccagcagccatcggagcctcctggaaactggcctcttgagtcggctgtgtatgcagcagcccctccgcagccttggacagaagctggtgtcgagggctggagaagctgcacaggccaaggccggctctgcccctgccgcccgcctgcgcggtggaagcacagacgaagatatggctgcccacgttggtgcttcccggactccccaagaggtgatggagcattacgtgagcatgtacatccacgggaacctggggaaggcctgcatccccgacaccatccccaaccgcgtgacagaccacacctgtcccagcggaggccccctctcacccagcctcaccaccccgctgcccccgctggacatctctgtggctgagcagcagcagctgggctacatgccgctgcgggatgattacgagatcgagtatgaccaggatgccgagacgctcatcagcgggctctctgtcaactatgatgacgacgacgtggagatcgagctgaagcgcgcccacgtggacatgtacgtgcggaagctgaaagagagacagcggcggaagaacatcgcccgtgactacaatctggtgccagccttcctggggaaatgacaagaaggagaaggaaaaggcgctgaagcgcaagatcaccaaggaggagaaggagctgcgcctgaagctgaggccgctgtaccagttcatgtcatgcaaggagtttgatgacctttttgaaaacatgcacaaagaaaaaatgctccgggccaagatccgagaactgcagcggtaccggcgaaacgggatcaccaagatggaagagtcggcagagtacgaggcagcgcggcataaacgggagaagaggaaggagaacaaaaacctagccggctccaaacggggaaaggaggacggcaaagacagcgagttcgccgccattgagaaccttccaggcttcgagctcctgtcagatcgcgagaaggtgctctgcagctctttaaacttgagtccagccccgctacgtgactgtgaagactattataattaaagaccacctccagaagcggcaaggaatcccctccaaaagccgccttcctagctacctggacaaagtcctaaagaaaaggattttgaatttcctcacagaaagcggctggatctccagggacgcgctcccgttttctgagcccacgctgcccacagctgaccccagcgcagccccgggcacgcggcactttacatgggggcagcttgggcccagactcctccgctgtgtagcagatgaggaaaatcagggccaagaggacaacaggctggccgtttttgtttgggaactggaagaggaatcttgttgaacacaccgaccagatgaccttccatttcaccggcggcagcagtttcagcgtgcagttccccaaaccccaaagctgaccctgcgccccatttgaatacggccagagcctgctggttcactttgggtagagccgtgcctcttgggcaggctcccatagtgaccacgtccccacgaatgggaaagcacgttagtgggagggacgtaggacacgtgtggaccgccaggccctctcagtccattttccggggctgctcggtgctgctgttaagactttctccttggaccaagatgactgatggaaaactctccacctctacaaatggcgtagccttcatgggtattctggatggtcgaccaggaaacccccttcagaacctgcaacacgtcaatctcaaggcgccccgactcctctccgcgcctgagtacgggcccaagctgaaactcagggctttagaagaccggcacagcctccagtccgtggactcggggattcctaccctggagatcgggaacccggagcctgtaccctgcagcgcggtccacgtgaggaggaagcagtccgactccgacctcatccccgagcgggccttccagagcgcctgcgcgctgccatcctgtgcgccaccagctcctagcagcaccgagcgggaacagagcgtgcgcaaatcctccacgtttcccaggacaggctatgactcggtaaagctctatagcccgacctccaaagccctgacccgcagcgatgatgtctccgtctgcagcgtgtccagtcttgggacagagctgtccaccacgctgtccgtcagcaatgaggacatcttggaccttgtggtcacgagcagctccagtgccattgtgaccctggagaatgacgatgacccacagtttaccaacgtcaccttgagctctatcaaggaaacccgtggcttacaccagcaggactgtgttcatgaagctgaggaggggagtaaattgaaaatattggggccatttagtaacttctttgcaagaattagctctagtgacctgagatggaacattgtaactatgccttttctgtgcaaacagtttgttaatattgctggtgactttgccctggcattatggatatacagatggcacctgctatggacctgcgttgctgctggtgtgtatgagcttagttgcggcgatgaaaggaccattctaatcaaggtgttgggctgcagttgtcagggagtaaggaagcaagaagattcgaaggtgggcagactagtgctggaggccactgggtcagtccctctactgtgtgatgaggatctggagagagatgtgaacaaagcagcaaagcccgttgacagctcagaaagaagtaacagggctgagatgccagctggccttcgaaagtgctgtccacccgcctga

SEQ ID NO: 20161 - DNA, 556 bp, Homo sapiens
  SIMILAR (256)..(555): 1001254mologous to Homo sapiens epsilon-COP protein,accession number AJ249366,Smith-Waterman Score=494.
  misc_feature (1)...(556): n = a,t,c or g
cggccaccaaattgagcactgcattgangggcaatccgcanaggcagaggagctggngagaagacagcgaaatggcgcctccggcccccggcccggcctccggcggtttcggagaggtttacgagctgttcgacgtaaagaacgccttctacatcggcagctaccagcagtgcataaacgaggcgcagcgggtgaagctatcaagcccagagagagacgtggagagggacgtcttcctgtatagagcgtacctggcgcagggacagcatcgtggccgagctggaccgagagatgagcaggagcgtggacgtgaccaacaccaccttcctgctcatggccgcctccatctatctccacgaccagaacccggatgccgccctgcgtgcgctgcaccagggggacagcctggagtgcacagccatgacagtgcagatcctgctgaagctggaccgcctggacctcgcccggaaggagctgaagagaatgcaggacctggacgaggatgccaccctcacccagctcgccactgcctgggtcagcctggccacgggtggtg

SEQ ID NO: 20162 - DNA, 792 bp, Homo sapiens
  SIMILAR (218)..(637): 831254mologous to Homo sapiens Polypeptide fragment encoded by gene 15,accession number W88758,Smith-Waterman Score=590.
  misc_feature (1)...(792): n = a,t,c or g
ttcttttataagagcgtcctggcccaaaaggaagttcgttgtgtcctggatgagtcagccctctcgggccccctgagctcaagnccgtgcgcatgtttgctgatcttcgccccacgagagtcggagggacagctccgtgcccgagctggccgagaagatgagcaggagcgtggacgtgcccacaccaccttccctgctcatggcggcctccatctatctccacgaccagaacccggatgccgccctgcgtgcgctgcaccagggggacagcctggagtgcacagccatgacaatgcaggatgcctactacatcttccaggagatggctgacaagtgctcgcccaccctgctgctgctcaatgggcaggcggcctgccacatggcccagggccgctgggaggccgctgagggcctgctgcaggaggcgctagacaaggatagtggctacccggagacgctggtcaacctcatcgtcctgtcccagcacctgggcaagccccctgaggtgacaaaccgatacctgtcccagctgaaggatgcccacaggtcccatcccttcatcaaggagtaccaggccaaggagaacgactttgacaggctggtgctacagtacgctcccagcgcctgaggctggcccagagctgtcaggaccatgaagccaggacagaggccaggagccagccctgcagccctccccacccggcatccacctgcatcccctctgggggcaggagcccacccccagcacccccatctgttaataaatatctcaactccagggtgttccacctg

SEQ ID NO: 20163 - DNA, 886 bp, Homo sapiens
  SIMILAR (68)..(553): 801254mologous to Homo sapiens epsilon-COP protein,accession number AJ249366,Smith-Waterman Score=605.
aggaagttcggtgtggtcctggatgagatcaagccctcctcggcccctgagctccaggccgtgcgcattgtttgctgactacctcgcccacgagagtcggagggacagcatcgtggccgagctggaccgagagatgagcaggagcgtggacgtgaccaacaccaccttcctgctcatggccgcctccatctatctccacgaccagaacccggatgccgccctgcgtgcgctgcaccagggggacagcctgggagtgcacagccatgacagtgcagatcctgctgaaagctggaccgcctgggacctcgcccggaaggagctgaagagaatgcaggacctgggacgaggatgccaccctcacccagctcgccactgcctggggtcagcctgggccacgggtggtgagaagctgcaggatgcctactacatcttccaggagatggctgacaagtgctcgcccaccctgctgctgctcaatgggcaggcggcctgccacatggcccagggccgctgggaggccgctgagggcctgctgcaggaggcgctagacaagccacctcatggctgctcctgtgagcgcaagctggtgtcccccttcatggtggagactgaggctcagaaaagtccggtctgcaaaaaggtgccctgccatgggccgccgtgggcaggtcgggctctgggcgcatcctcgttggatagtggctacccagagacgctggtcaacctcatcgtcctgtcccagcacctgggcaagccccctgaggtgacaaaccgatacctgtcccagctgaaggatgcccacaggtcccatcccttcatcaaggagtaccaggccaaggagaacgactttgacaggctggtgctacagtacgctcccagcgcctga

SEQ ID NO: 20164 - DNA, 1531 bp, Homo sapiens
  SIMILAR (53)..(814): 421254mologous to Homo sapiens Epsilon COP,accession number AJ131182,Smith-Waterman Score=285.
  misc_feature (1)...(1531): n = a,t,c or g
tgtggtggaattcgaggagctggtgagaagacagcgaaatggcgcctccggcccccggcccgngcctgccggcggctccggggaggtagacgagctgttcgacgtaaagaacgccttctacatcggcagcgtaccagcagtgcataaacgaggcgcagcggggtgaagctatcaagcccagagnagyagdacstggagagggacgtcttcctgtatagagctgtacctgggcgcagaggaaagttcggtgatggtcctggatgaagatcaaagccctccttcggcccctgagcttccagggccgtgccgcatgttttgcttgacttacctcggcccacgagaagtcggaagggacaagcatcgttggcccgagcttgggaccgaggagattgagccaggagcttgggacgttgaccaacaccacctttccttgttcatgggccgcctcccatctatcttccacgaccagaacccggatgccgccctgcgtgcgctgcaccagggggactagcctggagtgcacagccatgacagtgcagattctggctgaagctggaccgcctggacctcgcccggaaaggagctgaagagaatgcaggactggaccgagaatgccaccttcacccagcttcgccactggctggggtcagcctggcccacgggttggtgagaagctgcaggatgcctactacatcttccaggaagatggctgacaaggtgctcgcccaccctgctgctgcctcaaatgggcaggcgggcctgccaccatggccccagggtccgctgggaggcccgctgaagggccttgctgcagggaggcgctagacaaggatagtggcttacccggagacgctggtcaacctcatcgtcctgtcccaagcaaccttggcaagccccctcacccagctcgccactgcctgggtcagcctggccacgggtggtgagaagctgcaggatgcccacaggtcccatcccttcatcaaggagtaccaggccaaggagaaacgacttttgacaggctggtgctacagtacggctnccagcgccctgaggctggcccgagagctgtcaggaccatgaagccaggacacgagcccaggagccaggccctgcagccctccccacccggcatccacctgcatccccttctgggggcaggagtcccaccacccgcccccccatctgttaataaatatctcaactccgagggtgttccacctgnnnnnnnnnnnnnngggggggcccgttttaaaggatccctgggggggcccaaagttaacgggggcggtgcaaggaaaaagttttttccttatggggggccgaataaaaaccaacttgggaatttttgggaaagaacccttacttttgggggggaaacaaattgggccaaccttccctacaaaatttaaaggctctagggaaaataaaaaattttaaagggtaaagggggtaaaacaacctgcatatgctggttgttggaaagttttgcttccggggtttgatttttgaaaatttttttccccggggctgg

SEQ ID NO: 20165 - DNA, 413 bp, Homo sapiens
  SIMILAR (45)..(413): 851254mologous to Homo sapiens Similar to tricarboxylate carrier-like protein,accession number BC000124,Smith-Waterman Score =523.
tttcgtggcggttctgagagcttcagagagcgatggaaagcaaaatgggtgaattgcctttagacatcaacatccaggaacctcgctgggaccaaagtactttcctgggcagagcccggcactttttcactgttactgatcctcgaaatctgctgctgtccggggcacagctggaagcttctcggaacatcgtgcagaactacagggccggcgtggtgaccccagggatcaccgaggaccagctgtggagggccaagtatgtgtatgactccgccttccatccggacacaggggagaaggtggtcctgattggccgcatgtcagcccaggggtctaaagatgagggccactgtagacggggcagaagtgagtgtctttgttccctcaggaagaccccaaccgtggtgttctgg

SEQ ID NO: 20166 - DNA, 2215 bp, Homo sapiens
  SIMILAR (694)..(1194): 851254mologous to Homo sapiens bA108L7.2 (novel protein similar to rat tricarboxylate carrier),accession number AL133215,Smith-Waterman Score=734.
  misc_feature (1)...(2215): n = a,t,c or g
atgaagcaccccaacatcaactcggccctccaggccccccacccctttgtgcctggtcggcctcacctggtcgctggtgtggcgccgccagccttgtcaaaccacccgcaggcgagagctactgccgcagccggcaaaccccacccacgctgcgcggaggctgcgggaattgggctggcctgcaccgccccgggctcccattggctgaaaatgggtgaattgcctttagacatcaacatccaggaacctcgctgggaccaaagtactttcctgggcagagcgccggcactttttcactgttactgatcctcgaaatctgctgctgtccggggcacagctggaagcttctcggaacatcgtgcagaactacagggccggcgtggtgaccccagggatcaccgaggaccagctgtggagggccaagtatgtgtatgactccgccttccatccggacacaggggagaaggtggtcctgattggccgcatgtcagcccaggtgcccatgaacatgaccatcactggctgcatgctcacattctacaggcaggggtctaaagatgagggccactgtagacggggcagaagtgagtgtctttgttccctcaggaagaccccaaccgtggtgttctggcagtgggtgaatcagtccttcaatgccattgttaactactccaaccgcaggtggtgacacttcccatcacttgtgaggcagctggggaccagcctatgtgagtgccanccactggagctgtggccacggccctgggactcaaatccctcaccaagcacctgccccccttggtcggcagatttgtgccctttgcagcagtggcagctgccaactgcatcaacatccccctgatgaggcagagagagctgcaggtgggcatcccggtggctgatgaggcaggtcaaaggcttggctactcggtgactgcagccaagcagggaatcttccaggtggtgatttctagaatctgcatggcgattcctgccatggccatcccaccactgatcatggacactctggagaagaaagacttcctgaagcgccgcccctggctgggggcacccctgcaggtgggactggtgggcttctgctccatacacataagcaacctggaaccagagctgagagctcagatccatgagcaaaaccccagcgttgaagtggtctactacaacaaggggctttgaggagggtcagcctctgtcccctccctcacttccttgggctgctgctttagtggagccatgtcacccctaccacttggctatctgcctatcactgggcaggggcctcggtgggcagatggcaattgaaggcagcaacctattaaggtgggggagggacccccataaggcttttcctcccttctctggtttcaaagatcagagcacataacccctcctgtgcttgagtgtccatgcatatacatacatgatacacatgtgtatgtgtacattgggtcctgaaagctaggaagcaggcatgctagcctagtatgttctgacatctggcttcccttctcagcctcatgtccacctgcctgccagccagggtaacaggtgtgacttccttcttttaaactgttacaccagccaagttattttttgatgggcacctcatcccttctaggaattagggaggagccccagggttttcagggacagagacttatagacactagtaggacaaagcgggcttgaatccttcaggtttctgaatacctagctccccaagctgactgggctggcagaggagaacatgttgagacaagggaggcagggggacttatgcatcccttcagtgccatcccttgtatcctggaatagctccatttcccctcctcctctctaccagacaaaggagtgcctgtttcctgtactgccctcgctgtctcccccaccaccctacttgacagcgtgggcatcttcaggcacagccttgggagttcctggtgtgctcttgacatcatgacctcaaatctaaaatcctccaatcccaactccctttcccaaacaaaaagccacagaggcagagcaagcattcccctttaagagctttcactgcaccccctcccaagggacacagcggtaggaatggtgcttaaactccacaggtatcagagagggtgtaactaggacatcctcaagggcagctaggccccgaatgtacaatgttaagacagggaattttgtgttccattgactt

SEQ ID NO: 20167 - DNA, 480 bp, Homo sapiens
  SIMILAR (478)..(212): 971254mologous to Homo sapiens 20-MAY-1996 Human imidazoline receptor subtype 1 cDNA,accession number V06060_cd1,Smith-Waterman Score=473.
  misc_feature (1)...(480): n = a,t,c or g
gacggtgtcaaactctgctttattggaatagagaatacaggcagcaggaatcacgcttggtgctggcagctccaggtcccctgcccccacgggctctcccacttgtctggatcaggggagacctccactttgaagaacaatatggggtgggagcttccaatgtgcattctgctaccagcctcaggattagcagcaagatgccaacagcaacagcaacagcaacagcaacagttgtgggtgccacggttgggcatggggttgaagtcggccttgatgacgttgaggtgctggggcgtgagcaacagccagtaggggatggcggcggacttgacggcctcagagggcgcgcagcaggagcgccgcacggctgaacagagtgtgcagctggcccactcgatgttgcctgagtagtccccggcggccgtctgcaccatgcgcttgtcactgtagaccangtagacggggaagcagccctggctg

SEQ ID NO: 20168 - DNA, 1182 bp, Homo sapiens
  SIMILAR (388)..(807): 921254mologous to Homo sapiens A human hyaluronan-binding protein, designated WF-HABP,accession number Y93910,Smith-Waterman Score=656.
atgtttgaacaactggacaacaacacaagcaacgaaaggagaaaagagccagaagaatggccctcagagcggaagacccttctacccgctcctcggggctgcagatcccggacccctccccaagcccccgagtcggactcccggttccagccaccacccccgcttcgggtgcccgcgcccccaacacaccgtataagtgtccacaagctccgagcccacgacgcgcgcttccttggccggctcggcttcccgctcgggcccgaacgtgcgcgcggttgccatgttcgggtcttcgccgccaacgccgcccggcgcagactagcagcagcacggggcggggggtctatctgtgcccacctgtggctaagctctgctgctgccttccagagggtctgggtgcagaatgccagcgtggatgtggctgacctccttgccaccaacggtgtcctacacatcctcagccaggtcttactgcccccccgaggggatgtgcccggtgggcaggggttgctgcagcagctggacttggtgcctgccttcagcctcttccgggaattgctgcagcaccatgggttggtgccccagattgaggctgccactgcctacaccatctttgtgcccaccaaccgctccctaggaggcccagggcaacagcagtcacctggtgaggccgacgcagacacagtgcggcaccatgtggtcctgggggaggccctctccatggaaaccctgcggaagggtggacaccgcaactccctcctgggccctgcccactggatcgtcttctacaaccacagtggccagccaatgttccaggggagacaaatgaaacaagccaatgtcagctggtggctggtgctgccagacaacctgaagaagcgcatctccaacatcaaccgctacctgacctacagcctctacagcaacgtctgccgcagcctctttgagaagcacaagctgatgtttgccttcctgctgtgtgttcgcatcatgatgaacgagggcaaaatcaaccaggtgctggcagagacacccaggacagactgcctgaggggtggccctgtggcagggcctgagaacagggtggaaggaaagggaaagccaggcatgaaggcaccgcgagagcaaagtggcagaggaaacaattccttgattaaaagcagccagggccgggcacggtga

SEQ ID NO: 20169 - DNA, 372 bp, Homo sapiens
  SIMILAR (282)..(118): 921254mologous to Homo sapiens Homo sapiens clone CS278_1 secreted protein,accession number W29677,Smith-Waterman Score=259.
atggcggggccccggggcctcctcccactctgcctcctggccttctgcctggcaggcttcagcttcgtcagggggcaggactggccgtgccatagctggcacccacacccgggccgctacctcagcaatgctgctgtggaagagctcgatgatggcgctgccccgcaggctggcgacgtgccggagcgacgggcaggcaggcaagtgcgaggggatctgattctcctccgaggtggcctggatgaggtgctcactcggagcctctgctgggacctcctggggacgctggtcattgctgtatcccccgaaaaacaccatattaacagcggaccccaaatgaagattcacatcgcatgtgcagcttcagagtga

SEQ ID NO: 20170 - DNA, 5203 bp, Homo sapiens
  SIMILAR (1520)..(4609): 971254mologous to Homo sapiens I-1 receptor candidate protein,accession number AF082516,Smith-Waterman Score=5264.
gaactggcccagaatcactctcgccctgctccggcgtctgcgccgggcggcggtggcggcggagacccgaacatggcgaccgcgcgcaccttcgggcccgagcgggaagccgagccggccaaggaagcgcgcgtcgtgggctcggagcttgtggacacttatacggtttacatcatccaggtcactgatggcagccatgagtggacagtaaagcaccgctacagcgacttccatgacctgcatgaaaagctcgttgcagagagaaagattgataaaaacctgcttccgcccaaaaagataattgggaaaaactcaagaagcttggtggagaagagggagaaggatctggaggtctacctccagaagctcctggctgccttccctggcgtgacccccagagtactggcccacttcttgcattttcacttcatatgagacataagtcattcacgcggcatctggctgaagagctctttgagaaaggagaacagctcctgggggccggcgaggtctttgccattggacccctgcagctgtatgccgtcacggagcagctgcagcagggaaagcccacgtgcgccagtggggatgccaagaccgacctcgggcacatcctgggacttcacctgtcgccttaagtaccttaaggtttctggcacagaaggaccttttgggaccagcaacattcaggagcagctcctgccgttcgacctatcaatattcaagtccctgcatcaggtggagataagtcactgtgatgctaagcacatcagagggctggtcgcatcgaagcccaccttagccacgctgagtgtccgcttctcagcaacctcgatgaaggaagtccttgttcctgaagccttattaatttgatgagcgggagcctgaaggcacaaccctagaaggccctgtgactgccgtcatccccacttggcaggcattgaccacgcttgacctgagccacaacagcatcttccgagatcgacgagtctgttgaaattgattcccaaagatttgagttcctggacctgagtcacaatgggtttgctggttgtggacaatctgcagcacctgtataaccttgtgcatctggacctgtcctacaacaagctctcctccttggaagggcttcacaccaagctggggaacatcaagaccttaaacctgggcagggcaacctcctaggagagtctgagtgggcctgcacaagctcttactcactggttcaacctgggatctccggggacaacagggattcgaacagatgggagggaggttccggagcatagggcagcctcccgtgtctggagcacgtgtctctgctgaacaaccctctgagcatcatccccgactaccggaccaaggtgctggctcagttcggagagagggcctcagaggtctgtctggatgacacagtgaccacagagaaggagctggacactgtggaagtgctgaaagcaattcagaaagccaaggaggtcaagtccaaactgagcaacccagagaagaagggtggtgaagactcccggctctcagctgccccctgcatcagacccagcagctcccctcccactgtggctcccgcatctgcctccctgtccccagcccattcctctctaaccaaggaatcatgttcgttcaggaggaggccctggccagcagcctctcgtccactgacagtctgactcccgagcaccagcccattgcccagggatgttctgattccttggagtccatccctgcgggacaggcagcttccgatgatttaagggacgtgccaggagctgttggtggtgcaagcccagaacatgccgagccggaggtccaggtggtgccggggtctggccagatcatcttcctgcccttcacctgcattggctacacggccaccaatcaggacttcatccagcgcctgagcacactgatccggcaggccatcgagcggcagctgcctgcctggatcgaggctgccaaccagcgggaggagggccagggtgaacagggcgaggaggaggatgaggaggaggaagaagaggaggacgtggctgagaaccgctactttgaaatggggcccccagacgtggaggaggaggagggaggaggccagggggaggaagaggaggaggaagaggaggatgaagaggccgaggaggagcgcctggctctggaatgggccctgggcgcggacgaggacttcctgctggagcacatccgcatcctcaaggtgctgtggtgcttcctgatccatgtgcagggcagtatccgccagttcgccgcctgccttgtgctcaccgacttcggcatcgcagtcttcgagatcccgcaccaggagtctcggggcagcagccagcacatcctctcctccctgcgctttgtcttttgcttcccgcatggcgacctcaccgagtttggcttcctcatgccggagctgtgtctggtgctcaaggtacggcacagtgagaacacgctcttcattatctcggacgccgccaacctgcacgagttccacgcggacctgcgctcatgctttgcaccccagcacatggccatgctgtgtagccccatcctctacggcagccacaccagcctgcaggagttcctgcgccagctgctcaccttctacaaggtggctggcggctgccaggagcgcagccagggctgcttccccgtctacctggtctacagtgacaagcgcatggtgcagacggccgccggggactactcaggcaacatcgagtgggccagctgcacactctgttcagccgtgcggcgctcctgctgcgcgccctctgaggccgtcaagtccgccgccatcccctactggctgttgctcacgccccagcacctcaacgtcatcaaggccgacttcaaccccatgcccaaccgtggcacccacaactgtcgcaaccgcaacagcttcaagctcagccgtgtgccgctctccaccgtgctgctggaccccacacgcagctgtacccagcctcggggcgcctttgctgatggccacgtgctagagctgctcgtggggtaccgctttgtcactgccatcttcgtgctgccccacgagaagttccacttcctgcgcgtctacaaccagctgcgggcctcgctgcaggacctgaagactgtggtcatcgccaagacccccgggacgggaggcagcccccagggctcctttgcggatggccagcctgccgagcgcagggccagcaatgaccagcgtccccaggaggtcccagcagaggctctggccccggccccagtggaagtcccagctccagcccctgcagcagcctcagcctcaggcccagcgaagactccggccccagcagaggcctcaacttcagctttggtcccagaggagacgccagtggaagctccagccccacccccagccgaggcccctgcccagtacccgagtgagcacctcatccaggccacctcggaggagaatcagatcccctcgcacttgcctgcctgcccgtcgctccggcacgtcgccagcctgcggggcagcgccatcatcgagctcttccacagcagcattgctgaggttgaaaacgaggagctgaggcacctcatgtggtcctcggtggtgttctaccagaccccagggctggaggtgactgcctgcgtgctgctctccaccaaggctgtgtactttgtgctccacgacggcctccgccgctacttctcagagccactgcaggatttctggcatcagaaaaacaccgactacaacaacagccctttccacatctcccagtgcttcgtgctaaagcttagtgacctgcagtcagtcaatgtggggcttttcgaccagcatttccggctgacgggttccaccccgatgcaggtggtcacgtgcttgacgcgggacagctacctgacgcactgcttcctccagcacctcatggtcgtgctgtcctctctggaacgcacgccctcgccggagcctgttgacaaggacttctactccgagtttgggaacaagaccacagggaagatggagaactacgagctgatccactctagtcgcgtcaagtttacctaccccagtgaggaggagattggggacctgacgttcactgtggcccaaaagatggctgagccagagaaggccccagccctcagcatcctgctgtacgtgcaggccttccaggtgggcatgccaccccctgggtgctgcaggggccccctgcgccccaagacactcctgctcaccagctccgagatcttcctcctggatgaggactgtgtccactacccactgcccgagtttgccaaagagccgccgcagagagacaggtaccggctggacgatggccgccgcgtccgggacctggaccgagtgctcatgggctaccagacctacccgcaggccctcaccctcgtcttcgatgacgtgcaaggtcatgacctcatgggcagtgtcaccctggaccactttggggaggtgccaggtggcccggctagagccagccagggccgtgaagtccagtggcaggtgtttgtccccagtgctgagagcagagagaagctcatctcgctgttggctcgccagtgggaggccctgtgtggccgtgagctgcctgtcgagctcaccggctagcccaggccacagccagcctgtcgtgtccagcctgacgcctactggggcagggcagcaggcttttgtgttctctaaaaatgttttatcctccctttggtaccttaatttgactgtcctcgcagagaatgtgaacatgtgtgtgtgttgtgttaattctttctcatgttgggagtgagaatgccgggcccctcagggctgtcggtgtgctgtcagcctcccacaggtggtacagccgtgcacaccagtgtcgtgtctgctgttgtgggaccgttgttaacacgtgacactgtgggtctgactttctcttctacacgtcctttcctgaagtgtcgagtccagtcctttgttgctgttgctgttgctgttgctgttgctgttggcatcttgctgctaatcctgaggctggtagcagaatgcacattggaagctcccaccccatattgttcttcaaagtggaggtctcccctgatccagacaagtgggagagcccgtgggggcaggggacctggagctgccagcaccaagcgtgattcctgctgcctgtattctctattccaataaagcagagtttgacaccgtcttaaaaaaaaa

SEQ ID NO: 20171 - DNA, 4739 bp, Homo sapiens
  SIMILAR (88)..(2724): 961254mologous to Homo sapiens I-1 receptor candidate protein,accession number AF082516,Smith-Waterman Score=4383.
atggcggcgcagcgcgcggcgggggcgacgggcggcgggggccggggggcgtctgcgccgggcggcggtggcggcggagacccgaacatggcgaccgcgcgcaccttcgggcccgagcgggaagccgagccggccaaggaagcgcgcgtcgtgggctcggagcttgtggacacttatacggtttacatcatccaggtcactgatggcagccatgagtggacagtaaagcaccgctacagcgacttccatgacctgcatgaaaagctcgttgcagagagaaagattgataaaaatctgcttccgcccaaaaagataattgggaaaaactcaagaagcttggtggagaagagggagaaggatctggaggtctacctccagaagctcctggctgccttccctggcgtgacccccagagtactggcccacttcttgcattttcacttctatgagataaatggcatcaccgcggcactggctgaagagctctttgagaaaggagaacagctcctgggggccggcgaggtctttgccattggacccctgcagctgtatgccgtcacggagcagctgcagcagggaaagcccacgtgcgccagtggggatgccaagaccgacctcgggcacatcctggacttcacctgtcgccttaagtaccttaaggtttctggcacagaaggaccttttgggaccagcaacattcaggagcagctcctgccgttcgacctatcaatattcaagtccctgcatcaggtggagataagtcactgtgatgctaagcacatcagagggctggtcgcatcgaagcccaccttagccacgctgagtgtccgcttctcagcaacctcgatgaaggaagtccttgttcctgaagcctcagaatttgatgagtgggagcctgaaggcacaaccctagaaggccctgtgactgccgtcatccccacttggcaggcattgaccacgcttgacctgagccacaacagcgtctccgagatcgacgagtctgtgaaactgatcccaaagattgagttcctggacctgagtcacaatggattgctggttgtggacaatctgcagcacctgtataaccttgtgcatctggacctgtcctacaacaagctctcctccttggaagggcttcacaccaagctggggaacatcaagaccttaaacctggcaggcaacctcctagagagtctgagtggcctgcacaagctctactcactggtcaacctggatctccgggacaacaggatcgaacagatggaggaggtccggagcataggcagcctcccgtgtctggagcacgtgtctctgctgaacaaccctctgagcatcatccccgactaccggaccaaggtgctggctcagttcggagagagggcctcagaggtctgtctggatgacacagtgaccacagagaaggagctggacactgtggaagtgctgaaagcaattcagaaagccaaggaggtcaagtccaaactgagcaacccagagaagaagggggttcaagatgacccagactgtgcccctggggagcttggagccatgcgggaggatgagccatgtgctggaggagaacagggaatcatgttcgttcaggaggaggccctggccagcagcctctcgtccactgacagtctgactcccgagcaccagcccattgcccagggatgttctgattccttggagtccatccctgcgggacaggcagcttccgatgatttaagggacgtgccaggagctgttggtggtgcaagcccagaacatgccgagccggaggtccaggtggtgccggggtctggccagatcatcttcctgcccttcacctgcattggctacacggccaccaatcaggacttcatccagcgcctgagcacactgatccggcaggccatcgagcggcagctgcctgcctggatcgaggctgccaaccagcgggaggagggccagggtgaacagggcgaggaggaggatgaggaggaggaagaagaggaggacgtggctgagaaccgctactttgaaatggggcccccagacgtggaggaggaggagggaggaggccagggggaggaagaggaggaggaagaggaggatgaagaggccgaggaggagcgcctggctctggaatgggccctgggcgcggacgaggacttcctgctggagcacatccgcatcctcaaggtgctgtggtgcttcctgatccatgtgcagggcagtatccgccagttcgccgcctgccttgtgctcaccgacttcggcatcgcagtcttcgagatcccgcaccaggagtctcggggcagcagccagcacatcctctcctccctgcgctttgtcttttgcttcccgcatggcgacctcaccgagtttggcttcctcatgccggagctgtgtctggtgctcaaggtacggcacagtgagaacacgctcttcattatctcggacgccgccaacctgcacgagttccacgcggacctgcgctcatgctttgcaccccagcacatggccatgctgtgtagccccatcctctacggcagccacaccagcctgcaggagttcctgcgccagctgctcaccttctacaaggtggctggcggctgccaggagcgcagccagggctgcttccccgtctacctggtctacagtgacaagcgcatggtgcagacggccgccggggactactcaggcaacatcgagtgggccagctgcacactctgttcagcccgtgcggcgctcctgctgcgcgccctctgaggccgtcaagtccgccgccatcccctactggctgttggtcacgccccagcacctcaacgtcatcaagggcgacttcaaccccatgcccaaccgtggcacccacaactgtcgcaaccgcaacagctttaaagctcagccgtgtgccgctctccaccgtgctgctggaccccacacgcagctgtacccagcctcggggcgcctttgctgatggccacgtgctagagctgctcgtggggtaccgctttgtcactgccatcttcgtgctgccccacgagaagttccacttcctgcgcgtctacaaccagctgcgggcctcgctgcaggacctgaagactgtggtcatcgccaagacccccgggacgggaggcagcccccagggctcctttgcggatggccagcctgccgagcgcagggccagctgcacatgcgatgtgaatcttcatttggggtccgctgttaatatggtgtttttcgggggatacagcaatgaccagcgtccccaggaggtcccagcagaggctctggccccggccccagcggaagtcccagctccagcccctgcagcagcctcagcctcaggcccagcgaagactccggccccagcagaggcctcaacttcagctttggtcccagaggagacgccagtggaagctccagccccacccccagccgaggcccctgcccagtacccgagtgagcacctcatccaggccacctcggaggagaatcagatcccctcgcacttgcctgcctgcccgtcgctccggcacgtcgccagcctgcggggcagcgccagtcatcgagctcttccacagcagcattgctgagtgttgaaaacgaggagctgaggcacctcatgtggtcctcggtggtgttctaccagaccccagggctggaggtgactgcctgcgtgctgctctccaccaaggctgtgtactttgtgctccacgacggcctccgccgcttacttctcagagccactgcaggatttctggcatcagaaaaacaccgactacaacaacagccctttccacatctcccagtgcttcgtgctaaagcttagtgacctgcagtcagtcaatgtggggctttttcgaccagcatttccggctgacgggttccaccccgattgcaggtggtcacgtgcttgacgcgggacaagctaccttgaccgcactgcttcctccagcacctcatggtcgtgcttgtcctctcttggaacgcacgccctcgccggagcctgatgacaaggacttctactccgagtttgggaacaagaccacagggaagatggagaactacggagctgatccactctagtcgcgtcaagtttacctaccccagttaaggaggagattggggacctgacgttcacttgtggcccaaaaaattggctgagccagaaaagggccccagccctcagcatcctgctgtacgtgcaggccttccaggtgggcatgccaccccctgggtgcttgcaggggccccctgcggccccaaggacacttccttgcttcaccagcttccgagatctttcctcctgggatgaggactgtgtccacttacccacttgcccgagttttgccaaagagccgccgcagagaagacaggttaccggcttggacgatggccgccgcgtccggggacctggaccgagtgctcatgggctaccagacctacccgcaggccctcaccctcgtcttcgatgacgtgcaaggtcatgacctcatgggcagtgtcaccctggaccactttggggaggtgccaggtggcccggctagagccagccagggccgtgaagtccagtggcaggtgtttgtccccagtgctgagagcagagagaagctcatctcgctgttggctcgccagtgggaggccctgtgtggccgtgagctgcctgtcgagctcctcggttaatccatccccattccctctgtcgtgcctgcctgaccctacttgtcaggccccgcgcttcggactgttcc

SEQ ID NO: 20172 - DNA, 505 bp, Homo sapiens
  SIMILAR (116)..(226): 941254mologous to Homo sapiens Human oxidoreductase protein (HORP)-3 (clone 1942326),accession number Y59180,Smith-Waterman Score=194.
tgaaagattcagacctcccatagcccgagtgattgatgtatctaatgggaaagttcatgttgctgaaactgtttggaagaaacaggtggcctgggagtagatattgtcctagatgctggagttggatcctccagatagccactgccttttcctcaagggagcaacgttagctttcctgaatgatgaagtttggaatttgtcaaatgtacaacagggaagatatctttagtattccaagtgccttgcaagtattcatttaaacattaaaacagccttttgagatgtaagtactgttatcatacccatttcacaggtgaagaaacagaagcacagagatgttgatacagactcaaggacgcagcaagtggcggacgaagaatcacactcaggcagtctctctcctttctgaacagagatgagccctaagatacctggaagattttgtttttaacctcacattaaggaaagcacacatcaccttgaaaggttgcacacttactcctat

SEQ ID NO: 20173 - DNA, 487 bp, Homo sapiens
  SIMILAR (30)..(485): 991254mologous to Homo sapiens quinone oxidoreductase homolog -1,accession number AF029689,Smith-Waterman Score=775.
tgaaggtgcaggccgttggggcggctcagaggcagagttccacagatgaagaaataacatttgtatttcaagaaaaggaagatcttcctgttacagaggataactttgtgaaacttcaagttaaagcttgtgctctgagccagataaatacaaagcttctggcagaaatgaagatgaaaaaggatttatttcctgttgggagagaaattgctggaattgtattagatgttggaagcaaggtatcattctttcaaccagatgatgaagtagttggaattttgcccctggactctgaagaccctggactttgtgaagttgttagagtacatgagcattacttggttcataaaccagaaaaggtcacatggacggaagcagcaggaagcattcgggatggagtgcgtgcctatacagctctgcattatctttctcatctctctcctggaaaatcagtgctgataatggatggagcaagtgcatttggtac

SEQ ID NO: 20174 - DNA, 395 bp, Homo sapiens
  SIMILAR (14)..(220): 1001254mologous to Homo sapiens Human oxidoreductase protein (HORP)-3 (clone 1942326),accession number Y59180,Smith-Waterman Score=374.
cggacgcgtgggtgatgaaccagctgtaaaactacaactactaccacataaacatgatatcatcacacttcttggtgttggaggccactgggtaacaacagaagaaaaccttcagttggatcctccagatagccactgccttttcctcaagggagcaacgttagctttcctgaatgatgaagtttggaatttgtcaaatgtacaacagggaaaatatctttagtattccaagtgccttgcaagtattcatttaaacattaaaacagccttttgagatgtaagtactgttatcatccccatttcacaggtgaagaaacagaagcacagagatgttgatacagactcaaggacgcagcaagtggcggagcaagaatcacactcaggcagtctctctt

SEQ ID NO: 20175 - DNA, 395 bp, Homo sapiens
  SIMILAR (1)..(258): 871254mologous to Homo sapiens quinone oxidoreductase homolog -1,accession number AF029689,Smith-Waterman Score=364.
catctctctcctggaaaatcagtgcctgataatggatggagcaagtgccatttgsgtacaatagctattcagttagcacatcatagaggagccaaagtgatttcaacagcatgcagccttgaagataagcagtgccttgaaagattcagacctcccatagcccgagtgattgatgtatctaatgggaaagttcatgttgctgaaagctgtttggaagaaacaggtggcctgggagtagatattgtcctagatgctggaggttatatttttcagcattctagttacatatttacatgatggctgatatgcaaataccgtaattctcacctaccaatcttcactgattttccaacaccctcatgaagatggccagaaaagacacacacacaccccta

SEQ ID NO: 20176 - DNA, 712 bp, Homo sapiens
  SIMILAR (353)..(511): 921254mologous to Homo sapiens quinone oxidoreductase homolog -1,accession number AF029689,Smith-Waterman Score=236.
tatacgtgctaaaattgtttttaactaaaaatgccatatgtagtgtagaaatgaaaactagacactatttcattcgcatccattgagataatagtggtgagcacttaggataagcaccaggcttgacttgctgctcttgtcacttgtccttggaaatttaggctctattacaccaccaactctcaaatcatttccctgttgtagagctaaacttgacgtcctacagaatttctctaacttaacatgttgagtctctgagagtgcaaaacttgaaacaagagaaagtggcctgcctggcatcctctgcttattgaatggttttatttaattctcctttacattgccaccttaacaatccttccagctacgtatcttaaaggatgtgatggagaagttatcaactggtgttttcagacctcagttggatgaacccattccactgtatgaggcaaaagtttccatggaagctgttcagaaaaatcaaggaagaaaaaagcaagttgttcaattttaattttcttctttctcagacctcagtcggatgaacatattccagtatttgaagccagaattttctttggaaattgttgagaaaaaccaaggaagataaaacaagttgcatttttaagcacgtttctctgctaagacaagatgctcagttgacacatttgaaaagtggtttgaaaaattcttgtgcaaatgatcaagataa

SEQ ID NO: 20177 - DNA, 559 bp, Homo sapiens
  SIMILAR (2)..(340): 871254mologous to Homo sapiens Human oxidoreductase protein (HORP)-3 (clone 1942326),accession number Y59180,Smith-Waterman Score=506.
  misc_feature (1)...(559): n = a,t,c or g
agtgagattatatagtaaagatgatgaaccagctgtaaaactacaactactaccacataaacatgatatcatcacacttcttggtgttggaggccactgggtaacaacagaagaaaaccttcagttggatcctccagatagccactgccttttcctcaagggagcaacgttagctttcctgaatgatgaagtttggaatttgtcaaatgtacaacagggaaaatatctttnttaacaatccttccagctacgtatcttaaaggatgtgatggagaagttatcaactggtgttttcagacctcagtcggatgaacatattccagtatttgaagccagaattttctttggaaattgttgagaaaaaccaaggaagataaaacaagttgcatttttaagcacgtttctctgctaagacaagatgctcagttgacacatttgaaaagtgtttgaaaaaatccttgtgcaaatgatccagataattctataattaacatcttaagggaatttttctaaaaaccttttcattgtttctatatattttgcccctgctataaaattc

SEQ ID NO: 20178 - DNA, 1372 bp, Homo sapiens
  SIMILAR (601)..(930): 991254mologous to Homo sapiens quinone oxidoreductase homolog -1,accession number AF029689,Smith-Waterman Score=558.
  misc_feature (1)...(1372): n = a,t,c or g
atgccccgggcagccatcgcgcagacccccgcgccgacccccgcccccgctgcagccgcccgtggtccaggccgccgccttgcagccctctcctcacctcatctccgggcggcggaacatgacgggagatgtagttccgagaccggttgccatggcgttctggacagcctcgcgagtccgaccccgcccttcaggagtgacgagcggcctgaccaatgggagcagggggcgggctctctgacgaaggactggaaggtggcggtggtgaaggtgcaggccgttggggcggctcagaggcaggtgagccccgggaaacgcgtcctgtgtcttgggaaacgggcctttaagcgaaaggtggagagatgccccacagaaccgtgcagccctggggaggatggtggttcgcgtcgaaccctaacctgggacttgttcgggcccaggcctagcttagctgaggccgctgagggccacttctttcttcctcatcactttgctgttttcggaaagcagttagtagttattcgctgtatgtggcttttgagccagatcggccctcttcattatgctaaacggcggaatcatctggagcgagatgtgactatgaaaggcttatatttccaacagagttccacagatgaagaaataacatttgtatttcaagaaaaggaagatcttcctgttacagaggataactttgtgaaacttcaagttaaagcttgtgctctgagccagataaatacaaagcttctggcagaaatgaagatgaaaaaggatttatttcctgttgggagagaaattgctggaattgtattagatgttggaagcaaggtatcattctttcaaccagaagatgaagtagttggaattttgcccctggactctgaagaccctggactttgtgaagttgttagagtacatgagcattacttggcccgagtgattgatgtatctaatgggaaagttcatgttgctgaaagctgtttggaagaaacaggtggcctgggagtagatattgtcctagatgctggagtgagattatatagtaaagatgatgaaccagctgtaaaactacaactactaccacataaacatgatatcatcacacttcttggtgttggaggccactcgggtaacaacagaagaaaaccttcaggtgaagaaacagaagcacagagatgttgatacagactcaaggacgcagcaagtggcggagcaagaatcacactcaggcagtctctctcctttctgaacagagatgagccctaagatacctggaagattttgtttttaacctcacattaaggaaagcacacatcaccttgaaaggttgcacacttactcctactgatggtgccatntgcacacgaaaaca

SEQ ID NO: 20179 - DNA, 1696 bp, Homo sapiens
  SIMILAR (109)..(894): 701254mologous to Homo sapiens Human oxidoreductase protein (HORP)-3 (clone 1942326),accession number Y59180,Smith-Waterman Score=814.
cccacgcgtccggaccaatgggagcagggggcgggctctctgacaaaggactggaaggtggcggtggtgaaggtgcaggccgttggggcggctcaaaggcaggtgactatgaaaggcttatatttccaacagagttccacagatgaagaaataacatttgtatttcaagaaaaggaagatcttcctgttacagaggataactttgtgaaacttcaagttaaagcttgtgctctgagccagataaatacaaagcttctggcagaaatgaagatgaaaaaggatttatttcctgttgggagagaaattgcctggaattgtattagatgttggaagcaaggtatcattctttcaacccagatgatgaagtagttggaattttgccccctggactcctgaaagacccctggacttttgtgaaagtttgttaagagtacatgagccgttacttgggttcataaacccagaaaaggtcacatgggacggaagcagcaggaagcatttcggggatgggagtgcgtgcctattacagcttcttgcatttatctttcttcatcttctctcctgggggaaatcagtgctgataatgggtgggagccaagtgcatttggtacaatagctattcagttagcacatcatagaggagccaaagtgatttcaacagcatgcagccttgaagataagcagtgccttgaaagattcagacctcccatagcccgagtgattgatgtatctaatgggaaagttcatgttgctgaaagctgtttggaagaaacaggtggcctgggagtagatattgtcctagatgctggagtgagattatatagtaaagatgatgaaccagctgtaaaactacaactactaccacataaacatgatatcatcacacttcttgggtgttggaggccactgggtaacaacagaagaaaaccttcagttggatcctccagatagccactgccttttccctcaagggagcaacgttagctttcctgaatgatgaagtttggaatttgtcaaatgtacaacagggaaaatatctttgtatcttaaaggatgtgatggagaagttatcaactggtgttttcagacctcagttggatgaacccattccactgtatgaggcaaaagtttccatggaagctgttccagaaaaatcaaggaagaaaaaaaccaagttggttccaattttaattttccttcctttcctcagacctcagtcggatgaacatattcccagtatttgaagcccagaattttctttggaaattgttgagaaaaaccaaggaagataaaacaagttgcatttttaagcacgtttcccctgctaagacaagatgcctcagttgacacatttgaaaagtgtttgaaaaattccttgtgcaaatgatcaagataattctataattaacatcttaagggaatttttctaaaaaccttttcattgtttctatatattttgcccctgctataaaattccttccatgaagaaaactgcctctttcagcaaaagtcacactactcttgataaaagctgttgcaggcctttgctaagctatcaaagtaacgtattaattttgtattcaactcccgttctcaacaccttcattaagtctttgctgtcataatttaagcatttgagtatattttgaagtcttaaaagacttagcccataggcccttaaaaaaaaaaaaaaaaa

SEQ ID NO: 20180 - DNA, 506 bp, Homo sapiens
  SIMILAR (4)..(165): 351254mologous to Caenorhabditis elegans K02A6.1 gene product,accession number U29613,Smith-Waterman Score=67.
ttttttttaaattcagtttttttaatggatgctgaagcattaagagacaatcccaagggcaagcactggatagggatattatctgctttgtagatatttgtacaaaagactgttaagactacatggccagttcccactgcaggaaacagaatgattttcttttttttttattattattccctgccaatagcattttccatctaacacatttaaattctcacagcataattgcaaacatgtacatattggttcccacgagaaatctgcaggtgacatttcgggatgtttggagtcaatcagataaagcacattatgacagaaaccataagaggggagctgggacctgggactgtgcagaatgaaaagccacggctacgggaagcataagcttgtgctgcaacggcatgtgcacatgacctgaaagaaaccgctactgagggaaagactaagacttcaaaagaatttgcttttcccgccaactcggcactgtgaagcctgcctttcaa

SEQ ID NO: 20181 - DNA, 5344 bp, Homo sapiens
  SIMILAR (501)..(1397): 991254mologous to Homo sapiens expressed ubiquitously with strong expression in brain,accession number D83777,Smith-Waterman Score=1577.
  misc_feature (1)...(5344): n = a,t,c or g
atgaaagaggaggagttaaccaggcagattgttttggtacaggaagcagggaagggagtggtgaggacaaaggatggagcatgtgcagaggtctggcaggcactggaggagctagaaaaaggcctgtgtgccggcattgtgagagtggaggggatggctgcagctcctccaagttactgttttgttgccttccctccacgtgctaaggatggtctggtggtatttgggaaaaattcagcccggcccagagatgaagtgcaagaggttgtgtatttctcggctgctgatcacgaaccggagagcaaggttgagtgcacttacatttcaatcgaccaagttccaaggacctatgccataatgataagcagacccgcctggctctggggagcagaaatgggagccaatgaacatgggagtgtgcatagccaatgaagccatcaacaccagagagccagctgccgagatagaagccttgctggggatggatctggtcaggctttggtttagaaagaggggaaacagctaaagaagccttagatgtcattgtctccttgttggaagaacatggacaaggtgggaattactttgaagatgcaaactcctgccacagcttccaaagtgcatatctgattgtggatcgtgatgaagcctgggtgctcgagaccatagggaagtactgggctgccgagaaagtcacagagggagtgaggtgcatttgcagtcagctttcgctcaccactaagatggatgcagagcatccggaactcaggagttacgctcagagccaaggttggtggacgggagagggcgagttcaatttttccgaagtcttttctccagttgaggatcatctagactgcggtgctggcaaagacagcttagaaaaacaagaagaaagcatcacagtgcagactatgatgaacaccttacgggacaaagccagcggagtgtgcatagactctgagtttttcctcaccacagccagtggagtgtctgtcctgccgcagaatagaagctctccgtgcattcactacttcactggaacccctgatccttccaggtccatattcaagcctttcatctttgttgatgacgtaaaacttgtccccaaaacacagtctccctgttttggggatgacgaccctgccaaaaaggagcctcggttccaggagaaaccagaccgccggcatgagctgtacaaagcccacgagtgggcacgtgccatcatcgaaagtgaccaggagcaaggtcgcaagctgaggagcaccatgctggagctggagaagcaaggcctgtaagccatggaagaaatcctgaccagctccgagccactggaccctgcggaagtgggggaccttttctatgactgtgttgacacggagattaagttctttaagtgaagtaagcgttccctttccccttcttatttaagacttcccaccttactaaattaccagcaaaacaaaccactctcctgtttgagtaaaatgagaaagttaatatgtggcctccttttctgaagccagatcaaactgttacccttgtgttccaccttggaatctcacaagcgtccccttctgcaaatgtaggtctccttcctgtgcagtgtaacatggtatcccgttgcctgttgttcggttgtgtgactaattgtggattttaagctgctattattgtatttcagtggcaatggacacattagccttttacaagaggactagagttcatcaagccttgaaaggcaggcttcacagtgccgagttggcgggaaaagcaaattcttttgaagtcttagtctttccctcagtagcggtttctttcaggttaacaagaggcatttgtgcacacacacagggctcttgtgtgtgttgtcaaggggaccctccgtggcctcccgtgagtgcatgcctgtagtgcacagtgtctctacaggtgtcttctggggggcagaaccaattggaaggaagaaagggacccctctccagtcctggctccttcctacatcctgggctcctgaagaagctgtcttcccattttccatgcgctgtgcttatgtgtggtggactgcagagctgcttccacttacaggagagctgataatttgttagctggaacctattcacttccgagattcagacatagccatgctggtggccttctgaatcactgcatggatgtcccaggaggcagctctccccacacagcagcacagccatcacaggattccttgtgtagaaatgattcccagtctagttaccaacagctagtctaggagtaattgaatggccctatggcacagttccacccacagagtagtgaatctctcagccaaggagggaaagaaaaggaagaactcttgactatttagattctagttaaatatctggaatcttagcagtcactacattatctcagcagagagactttaattaaactgatttgttttccaatgtcgggttcacttaaaggatttgacttaccaccagagcatagaaaagcatgcaaggaagaccagatgggcttagcattgggaagacagagggcaaggaggtgatagatggatatagaagcatttctctgcaggataccagttcaggccccaccattcctgccaaggccattacatcccacaaacccaaatacaaagcagctgacttccctggatcttccccccactcctcacacctcacatgtcccaggagctgccttcattcaggcgggtagctgcactgggcatggggtggtggtgggagcttaccgccacctattcaagctctcagctactcctgaaacgggcagagatgatgaacagaagtgtatgtaaatacagcagctagtgggagagcaccagttgggcctaatcctgcctcatcattcttggcaggaatctgcaaatggaaacattgtgagtatcagcaatctgggaagtgacagggttaataactccttcccagaagctgtatcatgagattttgaggggaccgagccctgttacatggatgtgaacagtgaggatcagaggttttatcagaacacattctttttttctaccaactctccagagcgtgagtataggagtgccatgagctttttagtcagcagttttgtaaactctgtatataaaatcattaaccacacattgtgggtgatgggaagacgatttcagctgacagagttaatggcaacccaataatggtggcctgtagctgctaagagcttcacgcaggtttggcctgggctttcactgttggtgaatttagagtgtccttttaggtggggcggctattctaaaagtgtctttctatcactgttaagggggggggaaagtgaggttcgaggatgacgtaggtaactctcccctcccaagtccatgttccaagtggctatgtaaagcaagatgatacagaaagctgctctaaaatctcactgagtgatttcaccttcgcctactatgaaatgtctcatcagacctgacatgtctgagataaccaaggtgattcaggatttgatcaaaagaagtctagtaagaattaattacacagaagcctcctttcatttctatgggccaaacaaaggccatggataaccctacccgctttatgtcattacccattgggaaacacaatggctacttctgttagggtacattgaccttggtcaagcatcttaaagaaggcaaccctaattgagagctgtcttggctaatactctgcaccacaattgtgatgtcctagtcctaccactagagggcatggtanagccctggcaaaagttaaaaggggtgtggcagctcccatccaggtcatggaggtggtctataagcacagttgacagttgtgcattgggatgggtggagaaagacgacaagagagcagagaatctgcctggatgtggctgcccctttacttttagtgactttatgtacttatattaacagctggaaataggttgttgggttttgagcaggctgttatagtgaggaatgttcatttttaaatgttcctaacagattttgcttttgaaaaatgcttgttacatgaataatttgtggaccagggattgcttttctgaaggcagtatagggaacatgaatattcaagatgaaatacaaaaattatgtttaagggtcatagtgtataagtgggcttccctagggaaacccctttgtgtatcttttccagactggggtgggggctgagcatgcttgtgcagaaagaagccatagccagaaagggacagaattctctcccccacttcccttgccccataacccaaacataagctagctagtcttgtcctaatagatgggatttactataggtgaagatagccctcatattcaacggaccagaagctctggcacggagtaaatttagcaaagcagaaatagtaccctttcattcttggaggtgctttgaaattttaggtagaatataatcgaaattatggaggttccttagtgctcaataatataagacctgttgttattagaacgagtctttcttataaactaacagagcaggtatatgcctgttagatcttaagctgtggggttccttttactattggggtgaatcattaggtataaaaaataatcatcaaccagggcaaattactttgcttcctagctggatgtcatcccacattggtacaggtgttattcagtactgggtggttcagcaggggaagccagggtgggaccagtgtgtctgtcatggaaaccacttaactggcattcctgacttgaaggagccatctgtccatttattggggggaaggtctttcagttggagctctcagcccttaggtaaggggaaggcacttggaggagggacggaggaggtttcccttgctgggcatgcttcgtagaagggccaggagccagcaggtcatgtgcaacaatgcccgttgcaagcaccaaagctttattgcattccccggttagccggtggcttttcattctggcacagtcccaaggccccagctccccctcttatggtttctgtcataatgtgcctttatctgatttgactcccaaacatcccgaaatgtcacctgcagatttcttcgtggggaaccaatatgtacatgtttgcaaattatgctgtgagaatttaaaatggtgttagatggaaaatgctatttggcagggaataataataaaaaaaaaaagaaaatcattctgtttcctgcagtgggaactggccatgtagtcttaacagtcttttgtacaaatataaacaaagaagaataatatccctatccagtgcttgcccttggaattgtctctaaatgcatcaagcatacaataaaaaaaactgaaattaaaaaaaaaaaaaaaaaa

SEQ ID NO: 20182 - DNA, 356 bp, Homo sapiens
  SIMILAR (53)..(235): 1001254mologous to Homo sapiens lactate dehydrogenase B (AA 1 - 334),accession number Y00711,Smith-Waterman Score=307.
  misc_feature (1)...(356): n = a,t,c or g
cagacacctaaaattgtggcagataaagattattctgtgaccgccaattcttaagattgtagtggtaactgcaggagtccgtcagcaagaaggggagagtcggctcaatctggtgcagagaaatgttaatgtcttcaaattcattattcctcagatcgtcaagtacagtcctgattgcatcataattgtggtttccaacccagtggacattcttacgtatgttacctggaaactagatttcgctaccttatggctgaaaaacttggcattcatcccagcagctgccatggatggattttnggggcacatggcgactcaagtgtggctgtgtggagtggtgtgaatttggcaggtgt

SEQ ID NO: 20183 - DNA, 484 bp, Homo sapiens; identical to SEQ ID NO: 18889
  SIMILAR (1)..(219): 901254mologous to Anas platyrhynchos lactate dehydrogenase B- 4/epsilon crystallin,accession number J03869,Smith-Waterman Score= 360.

SEQ ID NO: 20184 - DNA, 1272 bp, Homo sapiens
  SIMILAR (85)..(1086): 1001254mologous to Homo sapiens lactate dehydrogenase B (AA 1 - 334),accession number Y00711,Smith-Waterman Score=1702.
gccggaggagacgcacgcagctgactttgtcttctccgcacgactgttacagaggtctccagagccttctctctcctgtgcaaaatggcaactcttaaggaaaaactcattgcaccagttgcggaagaagaggcaacagttccaaacaataagatcactgtagtgggtgttggacaagttggtatggcgtgtgctatcagcattctgggaaagtctctggctgatgaacttgctcttgtggatgttttggaagataagcttaaaggagaaatgatggatctgcagcatgggagcttatttcttcagacacctaaaattgtggcagataaagattattctgtgaccgccaattctaagattgtagtggtaactgcaggagtccgtcagcaagaaggggagagtcggctcaatctggtgcagagaaatgttaatgtcttcaaattcattattcctcagatcgtcaagtacagtcctgattgcatcataattgtggtttccaacccagtggacattcttacgtatgttacctggaaactaagtggattacccaaacaccgcgtgattggaagtggatgtaatctggattctgctagatttcgctaccttatggctgaaaaacttggcattcatcccagcagctgccatggatggattttgggggaacatggcgactcaagtgtggctgtgtggagtggtgtgaatgtggcaggtgtttctctccaggaattgaatccagaaatgggaactgacaatgatagtgaaaattggaaggaagtgcataagatggtggttgaaagtgcctatgaagtcatcaagctaaaaggatataccaactgggctattggattaagtgtggctgatcttattgaatccatgttgaaaaatctatccaggattcatcccgtgtcaacaatggtaaaggggatgtatggcattgagaatgaagtcttcctgagccttccatgtatcctcaatgcccggggattaaccagcgttatcaaccagaagctaaaggatgatgaggttgctcagctcaagaaaagtgcagataccctgtgggacatccagaaggacctaaaagacctgtgactagtgagctctaggctgtagaaatttaaaaactacaatgtgattaactcgagcctttagttttcatccatgtacatggatcacagtttgctttgatcttcttcaatatgtgaatttgggctcacagaatcaaagcctatgcttggtagctcttgaacaaataaaattaactattgtagtgtg

SEQ ID NO: 20185 - DNA, 867 bp, Homo sapiens; identical to SEQ ID NO: 19176
  SIMILAR (574)..(864): 761254mologous to Danio rerio lactate dehydrogenase B4,accession number AF067202,Smith-Waterman Score=393.

SEQ ID NO: 20186 - DNA, 529 bp, Homo sapiens
  SIMILAR (201)..(383): 311254mologous to Mus musculus SPR2F protein,accession number AJ005564,Smith-Waterman Score=64.
ctagtagcatgaaatcttatgtgcttcccacagaattcctggtggaaggaggaattcttcctcctctttctcgtctttctgggcaggtattgtgaggacggtatctgccctgtcagtatctacccaaacaatccagagcaaggacaagtagggcctggttttagctgcaaatgcacaaagtctctccgctgagccgcagctgctaccctctgccttctgctcctccgccagggcacggcccccgctgcgccccaaactgagcggcaaagtcagggcccgcggccggatgctcagagctaaaggccgcggaggacagatgtgcttcttcctccttcccgcgtctccccatacaagtaataccccgcacgtcccatcaggcttgtctgtgggccaggattcagggtcctgagccgaaacctaccaggagagacaaggctctggagccctctgtatcagtcgtaaaaagaaaacaaagtcagctgcgtgcgtctccacgaaatcgtcggcccgggtttcccgaaccgaatca

SEQ ID NO: 20187 - DNA, 1353 bp, Homo sapiens
  SIMILAR (765)..(1343): 771254mologous to Homo sapiens lactate dehydrogenase B (AA 1 - 334),accession number Y00711,Smith-Waterman Score=719.
atggagaaacctaagaggctgcggtggttgtggggccccgccccctcctccctccttgcagagccggcgccggaggagacgcacgcagctgactttgtcttctccgcacgactgttacagaggtctccagagccttctctctcctgggggggccgtgccctggcggaggagcagaaggcagagggtagcagctgcggctcagcggagagacttgttgcatttgcagctaaaaccaggccctacttgtccttgtgcaaaatggcaactcttaaggaaaaactcattgcaccagttgcggaagaagaggcaacagttccaaacaataagatcactgtagtgggtgttggacaagttggtatggcgtgtgctatcagcattctgggaaagagcagagcaatggagcacacaactgcaggggcaccatacacaccaaggcagcagacctgccagtgcaacatgatgtctctggctgatgaacttgctcttgtggatgttttggaagataagcttaaaggagaaatgatggatctgcagcatgggagcttatttcttcagacacctaaaattgtggcagataaagattattctgtgactgccaattctaagattgtagtggtaactgcaggagtccgtcagcaagaaggggagagtcggctcaatctggtgcagagaaatgttaatgtcttcaaattcattattcctcagatcgtcaagtacagtcctgattgcatcataaattgtggtttccaacccaagggacatttttaacgtatggtacctggaaactaagtggattacccaaacaccgcgtgattggaagtggatgtaatctggattctgctagatttcgctaccttatggctgaaaaacttggcattcatcccagcagctgccatggatggattttgggggaacatggcgactcaagtgtggctgtgtggagtggtgtgaatgtggcaggtgtttctctccaggaattgaatccagaaatgggaactgacaatgatagtgaaaattggaaggaagtgcataagatggtggttgaaagtgccctatgaagtccatccaagcctaaaagggatatacccacctgggctattggattaagtgtggctggatcttaaatgaatccatgttgaaaaatctatccagggattcatcccgtgtcaacaatggtaaaggggatgtatggcattgagaatgaagtcttcctgagccttccatggtatcttcaaatgccgggggattaaccagcgttatcaaccccagaagtaaaggatgatgaggttgctcagctcaagaaaagtgcagataccctgtgggacatcccagaaggacctaaaagacctgtga

SEQ ID NO: 20188 - DNA, 1723 bp, Homo sapiens
  SIMILAR (1409)..(1723): 881254mologous to Homo sapiens S164,accession number AF109907,Smith-Waterman Score=457.
ttttttttttttttttttcacactaccaatagttaattttattttgttcaagagcttcagatttgcaagccattaaaacccaagcataggcttttgaattctgtgagcccaaattcacaatatttgaagaagatcaaaggcaaacttgtgatccatgtaccatgggatcgaaaacttaaaggctcggagttaatcacattagtaatttttaaatttactacagactagagctcactagtcacaggtcttttaggccctttctggattgtcccacagggtatctgcacttttcttgaagctgagcaaccctcatcatccttttagctttctggttgataaccgctggtttaatccccggggcattgagggatacatgggaagggctcagggaaggactttcattctccaatggccatacatcccctgcctttaccattggttggacaaccgggatggaatcctgggataagattttttcaacatgggattccaataagattcagccagcacttaaatccaaatagccccagttgggtatatccttttaagcctgatgacttcatagggcacttttcaacccaccatccttatgcacttccttccaaattttcaacttatcatttgtcagttccccatttctggatttcaaattccctggagagaaacacctgccacattcacaccacttccacacagcaacacttggagtcggccatgttccccccaaaattccatccatgggcagctgcctggggatgaaaggcccaagtttttcaagcccataagggtagcggaaatctagcaggaatccacgattacatccaacttccaatcacggcggtgtttgggtaatcccacttagtttccccaggtaacatacggtaagaatgtccaactgggtgggaaaccaccaattatgatgcaaatcagggactgtacttggacgatcttgaggaataatggaatttggaagaccattaaccatttctctggcacccagatttgagccggattctcccccttcttggctggacgggactccctgccagttaccaacttacaaatctttaggaattggcgggtcacagaaataaatcttttatctgcccacaatttttaggtgtctgaaagaaaataagctccccatgctggaaggaaccatcattccctcctttaagcttatcttcccaaaacatcccacaagagcaaagttcatcaggccaggagactttccccagaatgctgatagcacactgccataccaacttgtccaacacccactacaggtgatcttattgtttggaactgttcgcctcgctcttccgcaactggtgcaatgagtttttccttaagagttgccattttgcacaggagagagaaggctctggagacctctgtaaccattggtcggaaaaagccaaagtcagctgcgtgcgtcattttccgcagatttccaggggccccactgatcccttatccactcatcactaaggaggatataaatgctatagaaatggaagaagacaaaagagacctgatatctcgagagatcagcatattcagagacacacataataaactggaagaagagaaaggcctaaaggacaaagaaagacaggaaattgagaaagaacggagagaaagagagagggagcgtgaaagggaacgagataggcgagaacgggaacgagaaagggaaagagaacgtgaacgagaaaaggag

SEQ ID NO: 20189 - DNA, 404 bp, Homo sapiens
  SIMILAR (20)..(190): 611254mologous to Homo sapiens Human secreted protein encoded by gene 51 clone HPRCA31,accession number W74940,Smith-Waterman Score=154.
acttgcagttctttaaagaatgctgctttttattctcctaaccctttcaagtgggtgcagacttctcgttagcagctggaagacattcctcccacacttttccctttctggttgtcacagagtttcattgagtccagctgcagccacgtggccatctggagctggtgctataggtgaccatctggtacattgaggggacctgtttgcctcctccactctataagcagtcatcttgggagaccgggaggagaaggtggtgggctagtcctgtgtcctcctccacttcccatgcctctatgttacccatctgtgtctcctgtgcagaaggagaggaaggggcattaagagatgaagggtgattatgtattacttatccatttctgaataaacatttgttattccta

SEQ ID NO: 20190 - DNA, 456 bp, Homo sapiens
  SIMILAR (58)..(297): 1001254mologous to Homo sapiens dJ222E13.3 (novel protein),accession number Z93241,Smith-Waterman Score=404.
caccaagatgactgtgaataatctgcaccctcgagtcactgaggaggacattgttggcagccgatgaagtgcaaccttcacatgaatgggaatgttatcacctcagaccagcccatcctgctgcggctgagtgacagcccatcaatgaaaaaggagagcgagctgcctcgcagggtgaactctgcctcctcctccaacccccctgccgaagtggaccctgacaccatcctgaaggcactcttcaagtcctcaggggcctctgtgaccacgcagcccacagaattcaaaatcaagctttgagcaggggagtgaggcagccagaagtgggggcagaggagggtggctctgtttccccaaggcaaagcttatgaccaatgggccatcggactggagacccctgattgtgggaagggttgccggggataaagagcttcctcactggaaaaaaaaaaaaaa

SEQ ID NO: 20191 - DNA, 499 bp, Homo sapiens
  SIMILAR (2)..(394): 991254mologous to Homo sapiens dJ222E13.3 (novel protein),accession number Z93241,Smith-Waterman Score=676.
  misc_feature (1)...(499): n = a,t,c or g
gaccnacatgtcccggacactggtgaacaaggaagaaccccccaaagagctgccagctgctgagcctgttctcagcccattggaaggcaccaagatgactgtgaataatctgcaccctcgagtcactgaggaggacattgttgagcttttctgtgtgtgtggggccctcaagcgagctcgactggtccatcctggggtagcggaggtggtgtttgtgaaaaaggacgatgccatcaccgcatataagaagtacaacaaccggtgtctggacgggcagccgatgaagtgcaaccttcacatgaatgggaatgttatcacctcagaccagcccatcctgctgcggctgagtgacagcccatcaatgaaaaaggagagcgagctgcctcgcagggtggctctgtttccccaaggcaaagcttatgaccaatgggccatcggactggagacccctgattgtgggaagggttgccagggataaagagcttcctcactggaaaaa

SEQ ID NO: 20192 - DNA, 423 bp, Homo sapiens
  SIMILAR (212)..(325): 461254mologous to Homo sapiens SEQ ID NO 462 from WO9922243,accession number Y19744,Smith-Waterman Score=75.
acgccaagcttggcacgaggatctcatcgccaaggtaggcttgtgtttttcagtgtgtgcctccccgagcctcagccccaagctgatttcttatctggaaatggtacactgaattctctgggtggctttcttgtggccccatgggatgcagcgtgggggctgtctgaaggaccctgctttttccaggggccgaggggctgcctttcctttgtgtgtattaagcttttccttgagttgtgctgaatgccccaccccagctctctttcccttctgggtgtctttgctgggagggggctgtgttgtgagccctcccggttctcacctcgcctgggcacttaaccacacccgggttttgtgtagccgccagctctcttctggttggggcctttgaaaggctcagccctccattgtgcagggcttggg

SEQ ID NO: 20193 - DNA, 885 bp, Homo sapiens
  SIMILAR (319)..(732): 861254mologous to Homo sapiens dJ222E13.3 (novel protein),accession number Z93241,Smith-Waterman Score=571.
ggcacaggcagaaagatgcccgatttcgaatcaaagggaaagtgcaggatgccagagagatgttgaactctcgcaagcagcagaccacggtgccccagaagccccgccaggttgctgatgcccgggagaagatcagcttgaagaggagttcccctgctgccttcataaacccacccattgggacagtgacccctgctctgaagctcaccaaaaccatccaggttccacagcagaaagccatggcaccacttcatccccatcctgccggaatgagaatcaatgttgtcaataaccaccaggccaaacagaatttatatggacctggatgaagatgatgatggtatagcttccgtttcctactaaacagatgaagtttgcagcctcaggcggctttcttccaccacatgggctgggctaagcagttccaagctttccatgtccaaggccctccctctcaccaaagtggttcagaatgatgcatacacagctcctgctctcccttcctctattcgaacaaaagccttgaccaacatgtcccggacactggtgaacaaggaagaaccccccaaagagctgccagctgctgagcctgttctcagcccattggaaggcaccaagatgactgtgaataatctgcaccctcgagtcactgaggaggacattgttgagcttttctgtgtgtgtggggccctcaagcgagctcgactggtccatcctggggtagcggaggtgggctagtcctgtgtcctcctccacttcccatgcctctatgttacccatctgtgtctcctgtgcagaaggagaggaaggggcattaagagatgaagggtgattatgtattacttatccatttctgaataaacatttgttattcctaaaaaaaaa

SEQ ID NO: 20194 - DNA, 3906 bp, Homo sapiens
  SIMILAR (464)..(883): 821254mologous to Homo sapiens dJ222E13.3 (novel protein),accession number Z93241,Smith-Waterman Score=534.
  misc_feature (1)...(3906): n = a,t,c or g
atggaaattgccagtttcgtgggtcccaacgtcaatactgtgggcaaccttagaccggctcaaagcgcagctggggacggtgatgaagtgcagagcgtccacagccagcgacaagactgccaagcaactggcagcctgagtaacggagaaaacaacgaaaaaaacgcattcaccacctaccaacaagaaacaaaaaacacgaccaccccacagtcagtctactttttaggcgtgaataagatgagcagccagcaccgcgaaggctcacggggaacgtccccgccccttccggttcttgcctgctttgagctggctgtcgcgagagttggtccgcggacgccggaagtagttcgtcgctccctagcggccgaaggggcgggctcgcggggtctcgactgctttcggcttgctcggcggatcaagatggcggacatctccctggacgaactcatcaggaagcgcggggcggtcggcgaaaggacggcttaatgccagaccgggagttggaggtgtccgatctcgagttgggatccagcaaggccttctcagccagtcaacacgcacagccaccttccagcagagatttgatgcccggcagaagattggcctctcagatgcccggctcaaactgggagtcaaggatgcccgggagaagcttttgcagaaagatgcccgatttcgaatcaaagggaaagtgcaggatgccaggagagatgtttgaacttttcgcaagcagcagaccaccggtgccccagaagccccgccaggtttgctgattgcccgggagaggattcagcttggaagagggaggtcccctgctgccttcttaaacccacccattgggacagggacccctgctctgaagctcaccaccaccatccagagaatgcatgtggaccctgtggggtggattctgaccactgagtgtttccaggttccacagcagaaagccatggcaccacttcatccccatcctgccggaatgagaatcaatgttgtcaataaccaccaggccaaacagaatttatatgacctggatgaagatgatgatggtatagcttccgttcctactaaacagatgaagtttgcagcctcaggcggctttctccaccacatggctgggctaagcagttccaagctttccatgtcccaaggccctccctctcaccaaagtggttcagaatgatgcatacacagctcctgctctcccttcctctattcgaacaaaagccttgaccaacatgtcccggacactggtgaacaaggaagaaccccccaaagagctgccagctgctgagcctgttctaagcccattggaaggcaacaagatgactgtggaataatctgcaccctcgagtcactgaggaggacattgttggaggttttctgtgtgtgtgggggccttcaaggcgagctcgactggttccttctgggggttagccgaaggttgtgttttgtgaaaaaagggacgatgccatcaccgcatataagaagtacaacaaccggtgtctggacgggcagccgatgaagtgcaaccttcaacatgaatgggaatgttatcacctcagaccagcccatcctgctgcggctgagtgacagccccatcaatgaaaaaggagagcgagctgcctcgcagggtgaactctgcctcctcctccaacccccctgctgaagtggaccctgacaccatcctgaaggcactcttcaagtcctcaggggcctctgtgaccacgcagcccacagaattcaaaatcaagctttgagcaggggagtgaggcagccagaagtgggggcagaggagggtggctctgtttccccaaggcaaagcttatgaccaatgggccatcggactggagacccctgattgtgggaagggttgccagggataaagagcttcctcactggatgggacccgcctttctgtgttgtgttctgccctgtgctcttctctctacgttaacgtttcctgtagtatgtttcttcatctcatcgccaaggtaggcttgtgtttttcagtgtgtgcctccccgagcctcagccccaagctgatttcttatctggaaatggtacactgaattctgtgggtggctttcttgtggccccatgggatgcagcgtgggggctgtctgaaggaccctgctttttccaggggccgaggggctgcctttcctttgtgtgtattaaagcttttcaaacaatgggaggggatggagagccctgggtgtcctgacgggagccagggtcggcctgagagctgtgcccgctcctctgtcttgttcagtggaggtgcctgggtggggagcaggtctcaggcctcttgtcctctccccagtggctccaggcctcactagtggcaagggcaggatgaggctgcaccgctgggaagaagtctatctaagttcttggcttggagtcccgtgtcgtctccgcccagaggaagttctccagagttcacctttcccttttccttgagttgtgctgaatgccccaccccagctctctttcccttctgggtgtctttgctgggagggggctgtgttgtgagccctcccggttctcacctcgcctggcacttaaccacaccctggttttgtgtaagccgccaagctctcttctggttggggcntttgaaaggctcaagcctcccattgtgcaagtgcttgggtttggaagcttatttgaatggaagaaggtcaagtttgttcctgggctctccaatttctggcctcagttgtctacaggaacaagtggtcagggatgcctggaggcatatatccagctgccaccaaggggcactgtttgttcccacttatgtgagtgaccccatccatccatgaccagaggattattttcctgccttggcagaggaggaggagtcaagggagcagggcagctctaccgggcaaggtgtttccccagcataggcgcagacagttgggacgaaacttcagagcccaggcagtccctgaatgaccaggccagtgttgtcactgagtggtcccctgctggttgggagtgaagagaatccaggctggcagagctggagccagttggggagcacggttctgggagctctgcaaaatcagtagcaagtgcctggaaaaggcacatgccgaagatactcaagagctcccaagattttgcttgaggctagcccagtgaagaaaaaccagagactcatgttttccaggggtcaatcttgtcaggcaggaagggcccagggttttgaacccagcttcagtgtgcaggctctgaggctgcccaggacgggaaagtccaaggaaggggcctggtggtgctccacttgcagttctttaaagaatgctgctttttattctcctaaccctttcaagtgggtgcagacttctcgttagcagctggaagacattcctcccacacttttcccttcctggcccaagagagcatccagaaggcagtaggacctggtttttccaggtacctgggacccgggggctcactgcttgcactgtgccttagggtagggatggtaaatatcctcccctgcaatggctttatcctccctctgtcatccccaaagcagggtatcttctggttgtcacagaagtttcattgagtccaagctgcagccacgtggccatctgggagctggtgctataggtgaccatctggtacattgaggggacctgtttgcctcctccactctataagcagtcatcttggggagaccgggaggagaaaggtgggtggggctagtccctgtgtcctcctccacgttcccgatgcctcctgatgttacccgatcgatgtgtcctccatgtgcaagaagcgagagaagggggcattaagagatgaaagggtgattatgtattacttatccgatttctgaataaacgatttgttattcctaaaaaaaaaaaaaaaaaa

SEQ ID NO: 20195 - DNA, 918 bp, Homo sapiens
  SIMILAR (496)..(759): 1001254mologous to Homo sapiens PXR2a,accession number AB032592,Smith-Waterman Score=476.
atgggtagcagcgaccacccagtctcagaccgtgcttctctacagtctcagcagcaaagtaaagctcaacaatgctttcaagaatggtattgtaagaattgtagaattcgagaaacccagtctgatactttgcagaattgcgtttcctatttacggatttcactgcctaccccacaccattgtgtccaagatcacactgttggtcacatcagacaagcaatgaaggcaagtcagaaggtgatacaccaaaaaaaggcagagatgagactctggccccagaaaaacaaggaaacggaggcagataaagagctcagagatgggaaaatcacagacaaatttggggcacttgacatgactccaaagagttatcatgtacctcttgcatcatacccagtactctatgatatccatgttgaatccattttagttcatgttgccaaagtggcttccatggacaagtaccagtccactcagcaaaccgttacagactacaatgagtcagatacagagttttgggataagatgcaagcagaatgggaagaaatggctcggaggaactggatatctgagaaccaagaagcccagaaccaagtaaccatctcggctagtgagaagggatattactttcacactgaaaaccccttcaaggactggcctggagcatttgaagaaggcttaaaaaggctgaaggaaggggatctgccagtcaccatcctgttcatggaagcagcaattcttcaggaccctggagatgcagagaattctgaaggtggactctatgtatgcatgaatacatttttggcctttggaagggaacatgttgaaagacattttcgaaaaactggacagagtgtatacatgcacctgaaaagacatgtgcgagaggtgagagcggcactttcagagaactggccttga

SEQ ID NO: 20196 - DNA, 3239 bp, Homo sapiens
  SIMILAR (213)..(1040): 781254mologous to Homo sapiens isopeptidase T-3,accession number U75362,Smith-Waterman Score=1094.
atctagatactgatgacgatttaaatagcgacgattatgaatatgaagatgaagccaaacttgttatattcccagatcactatgaaatagcactaccaaatattgaggagttaccagccctggtcagtgagtgtgcacggctgctagctagatgcgcatggctctgtgtcagcttaaaactctcaacgctactgaccgatgacactgggctactcacagtcaggaacaaggaagaagtcctggccagaagtgctaaggtaacaattgcttgtgatgcagttctcagctcaaaatctccatacagaaagcaggacccagacacgtgggaaaatgaattgccagtatctaaatatgccaacaacctcacccagctggacaatggagtcaggattcctccaagtggttggaagtgtgccagatgcgacctgcgagaaaacctctggttgaatctgactgacggctctgtcctgtgtggaaagtggttctttgacagctctgggggcaacgggcatgcgctggagcattacagagacatgggcctacccactagccgtgaaactgggaaccatcactcctgacggggcagatgtttattcttttcaagaagaagaaccctgttttggatcctcatttggccaagcacttagcgcatttttggaattgatatagcttcatatgcatgggacagagaatgggctccaaggacaaatgacatcaagctgagggtcagtgagtgggaagtgatccaggagtcgggcacgaaactgaagccaatgtatggtcctggctacacgggtctgaagaacctgggcaacagctgctatctcagctctgtcatgcaggccatcttcagcatcccagaattccagagagcgtatgtaggaaaccttcccagaatatttgactactcgcctttagatccaacacaagatttcaacacacagatgactaagttaggacatggccttctctcaggccagtattcaaagcctccggtgaaatctgaactcattgaacaggtgatgaaggaggagcacaaggtatgtgtccgagcgtttgccatgttgacatgtagcctttctagcagctgcagccagccacagcagaacgggatctctccgcgcatgtttaaggcctttgtaagcaagagccacccggaattctcctctaacaggcagcaagatgcccaggaattcttcttgcacctggtgaatctagtagagaggaaccgcatcggctcagaaaacccaagcgatgtttttcgttttttggtggaagaacgcattcagtgctgtcagacccggaaagtccgctacacggagagggtggattacctgatgcagttacctgtggccatggaggcggcaaccaacaaggtcgcaaaggggagcatgcaaaaagatgtaaatggcttgataccacctgttggtgcaactctaaagacagccccagaacagcctttcagcaggggcatctggctctgtaaagggcgacaaataagcaactctggcccagcgcagaagccttcagggaagactgtccaaagagggtgcttttcatttccacagggtaagagcgattgcaaggtctttgatttgctctttcacccagatgaactgatcgcttatgaactaacgagaagggaagcagaagcaaacagaagaccccttcctgagttggtacgtgccaagataccatttagtgcctgccttcaggccttctctgaaccagaaaatgttgatgatttctggagcagtgccctacaagcaaagtctgcgggtgtgaaaacatctcgctttgcttcattccctgaatacttggtagtgcagataaagaagttcacttttggtcttgactgggttcccaaaaaatttgatgtttctattgatatgccagacctacttgatatcaaccatctccgagccagggggttacagccaggagaggaagaacttccagacatcagcccccccatagtcattcctgatgactcaaaaggaagggcaaagcaggtgacattttatagaggatcaaacttcctagatctaggaagttttggagaccgaagacctgggaccagaactagggctaggagttaccttgcttctcatgccactagactatcctggcatgtgagaggtttgctggttgcgcctgatgctgtggagagctggcctgcaggatctcactccatgggaagtgatgggcatttggaattaactgtgccagaggagcctgcctctgacgcatcagacatcgatgagtcatcagtgatgcagctggccgagatgggtttcccgctggaagcatgtcgcaaggctgtgtacttcactggaaatatgggcgccgaggtggccttcaactggatcattgttcacatggaagagccagattttgctgagccgctgaccatgcctggttatggaggggcagcttctgctggagcctctgtttttggtgcttctggactggataaccaacctccagaggaaatcgtagctatcatcacctccatgggatttcagcgaaatcaggctattcaggcactacgagcaacgaataataacctggaaagagcactggattggatctttagccaccctgagtttgaagaagacagtgattttgtgattgagatggagaataatgccaatgcaaacattatttctgaggccaagcccgaaggacctagagtcaaggatggatctggaaggaggtattctgatgaggaagtggtgacaaagctaagtggtttgctagtggtagaaccaggagcccaactggctttgcctagtggatcctgtgccagggccgtgggtggagctgcccgccagttccgcgccacgcgcctgcactcctcagcccttgggcggtcgatgggactgggcactgcggagcagggggcggtgcccctcggggaggcttgggccatgcaggagcccaccacgaactcagtgctggctcgcgagcattgtgcgcagccccggttcctgcctgcgcctctccctccacctgcgcctctccctccacaccttgcaagcagagggagctggctccactctcagccagcccagagaggggctcccacagtgcagcggtgggctgaagggctcctcaagcgtggccagagcagatgtcacggtcgaggaggtgctgagagcgagcaagggctgccagcacgttgtcacctctcaccaccaggtcccacctccaacattgggggtcacatttcaacatga

SEQ ID NO: 20197 - DNA, 2770 bp, Homo sapiens
  SIMILAR (504)..(1754): 741254mologous to Homo sapiens isopeptidase T-3,accession number U75362,Smith-Waterman Score=1489.
cgcggaattccgcggaattccgcgccgccgccgccggcagaccccgcgctccggctccggctcggctcgctcggctccggtgcgcgccgaggccatgcagcgccggggcgccctgttcggcatgccgggcggcagcggaggcaggaagatggctgcaggagacatcggcgagctgctagtgccccacatgcccacgatccgcgtgcccaggtccggcgacagggtctacaagaacgagtgcgccttctcctacgactctcccaattctgaaggtggactctatgtatgcatgaatacatttttggcctttggaagggaacatgttgaaagacattttcgaaaaactggacagagtgtatacatgcacctgaaaagacatgcgcgagagaaggtaagaggggcgtctggtggagcgttaccaaaaaggaggaattccaagatttttttagatctagatactgatgacgatttaaatagcgacgattatgaatatgaagattatagcctttcttgttatattcccagatcactatgaaatagcactaccaaatattgaggagttaccagccctggtaacaattgcttgtgatgcagttctcagctcaaaatctccatacagaaagcaggacccacacacgtgggaaaatgaattgccagtatctaaatatgccaacaacctcacccagctggacaatggagtcaggattcctccaagtggttggaagagtgccagatgcgacctgcgagaaaacctctggttgaatctgactgacggctctgtcctgtgtggaaagtggttctttgacagctctgggggcaacgggcatgcgctggagcattacagagacatgggctacccactagccgtgaaactgggaaccatcactcctgacggggcagatgtttattcttttcaagaagaagaacctgttttggatcctcatttggccaagcacttagcgcattttggaattgatatgcttcatatgcatgggacagagaatgggctccaggacaatgacatcaagctgagggtcagtgagtgggaagtgatccaggagtcgggcacgaaactgaagccaatgtatggtcctggctacacgggtctgaagaacctgggcaacagctgctatctcagctctgtcatgcaggccatcttcagcatcccagaattccagagagcgtatgtaggaaaccttcccagaatatttgacctactcgcctttagatccaacacaagatttcaacacacagatgactaagttaggacatggccttctctcaggccagtattcaaagcctccggtgaaatctgaactcattgaacaggtgatgaaaggaggagcacaagccacagcagaacgggatctctccgcgcatgtttaaggcctttgtaagcaagagccacccggaattttcctcttaacaggcagcaagatgcccaggaattcttctttgcacctggtgaatcttagtagagaaggaacccgcatcgggttcagaaaacccaagcgatggtttttcgtttttttggtggaagaaccgcatttcagtgctgtcagacccggaaagtccgctacacggagagggtggattacctgatgcagttacctgtggccatggaaggcggcaccaaacaaggatgaactgatcgcttatgaactaaccgagaagggaagcagaagcaaaccagaagaccccttcctgagttggtacgtgccaagataccatttagtgcctgccttcaggcctttcttctgaaccagaaaatgttgatgatttctggagcagtgccctacaagcaaagtctgcgggtgtgaaaacatctcgctttgcttcattccctgaatacttggtagtgcagataaagaagttcacttttggtcttgactgggttcccaaaaaatttgatgtttctattgatatgccagacctacttgatatcaaccatctccgagccagggggttacagccagggagagggaaggaacttccaggacatcagcccccccatagtcattcctgatggacttcaaaaggttcgcctggatggaaccatttgataggacccttcaggacatcgatggggtcatcagtgatgcagctggccgagatgggtttcccgctggaagcatgtcgcaaggctgtgtacttcactggaaatatgggcgccgaggtggccttcaactggatcattgttcacatggaagagccagattttgctgagccgctgaccatgcctggttatggaggggcagcttctgctggagcctctgtttttggtgcttctggactggataaccaacctccagaggaaatcgtagctatcatcacctccatgggatttcagcgaaatcaggctattcaggcactacgagcaacgaataataacctggaaagagcactggattggatctttagcccaccctgagtttgaagaagaccagtgattttgtgattgagatggagaataatgccaatgcaaacattatttctgaggccaagcccgaaggacctagagtcaaggatggatctggaacatatgagctatttgcattcatcagtcacatgggaacatccacaatgagtggtcattacatttgccatatcaaaaaggaaggaagatgggtgatttacaatgaccacaaagtttgtgcctcagaaaggccccctaaagacctgggctacatgtacttttaccgcaggataccaagctaaacctcaaatataaaaattggcgaaaagaagccatacgcctttttaatttgcc

SEQ ID NO: 20198 - DNA, 450 bp, Homo sapiens
  SIMILAR (2)..(310): 981254mologous to Homo sapiens zinc finger protein (217 AA) (1 is 2nd base in codon),accession number X16282,Smith-Waterman Score=567.
ggaattcgggaaaaccttcagtgtgaagaggacactgctgcagcaccagaggatccacaccggggagaagccctacacgtgcagcgagtgtgggaaggccttcagcgaccgctcagtcctcattcagcaccacaacgtgcacaccggggagaagccctatgagtgcagtgagtgtgggaagaccttcagccaccgctccacactgatgaatcacgagcggatccacaccgaggaaaagccctatgcatgctacgaatgtgggaaggccttcgttcagcactcacacctgatccagcaccagaaagtgcacagaaagttgtgacccatggctgacacaagaatccattctcacagaaactgcatgtggaaccacaagcagccttcagcccaagagaagtctctgttaactctataggaagcttttctttggcgattcagtgtcacaaaata

SEQ ID NO: 20199 - DNA, 3721 bp, Homo sapiens
  SIMILAR (2471)..(2950): 581254mologous to Homo sapiens b34I8.1 (Kruppel related Zinc Finger protein 184),accession number AL021918,Smith-Waterman Score= 572.
ttttttttattattctttcaacctttatgaatgtatcaacatttgcaaaataaaaaagttgtggaggaggaagaaaaacaaaaaccaggatgcactgaggtctgaggtgaaggtcctaggagcatcagttctctgttgggatcaaggttgctgggacagagcttgatccctgtcaactgctaaaacaatccaggacaatccaatagtagagctgaattttgattaccttggtcctgagcttcacagccctttggcagaggaaatcctgtgacactgaggtgtaaccacaagactggcccaaactgaccctattctgttggtaacaggaggtatagcagagccaaaactgaaagtcatgtaacccggacatgcacaaaggaggaaaatcataactcggaaccaacgtttcctcccttcgggagtggggccaccagaaggtggaataggggtctgctttccggtcccctgacaccggtccaaatcagccccaccctccctgccgggggtgtcagttcctgggctgtgcccgaagcctccacacgggtgtggcccgggcccttgtgaaggcccgcccttctcccccaggtgggcggtgtagacacaccaaaaagcaaacaccagggccgagtgggggagggagacagttcgctgttcagtgacgccccctgtcgggagcacgccgggccggacacagcgaagagtgggtgggcctcggacctcgcagcactcagcctcctaagtgggaggaataacctcacgcaagtcatcaaacaagaggacttcagtgttgcaacgaaggaaagagaaagggcccctgagaaggcgacattcgcattgcagcggcgcagggaccagccaggcggctgagggcaaggtcgttcccagcagcgggaaccgcaagggcaaaaggctcggaggggggaacgagctcgagttccaggacggccgaagccagcgcaagtcgaggagggactgcggggccggcaggggtgtcctccacagggcgacggcggcaggagctcgggaaccgggactgcgagcgggtaaggctcggcgatgggctgtaacctccgcgcccggaagtgcggccggggagccggccgggcccattgcccagaggtgttcggcccctctagggatcgcggagggtctggctctcggtggctcctgagagctccctgcagtcggtcaccgagaaaggcttcgggcgggcaggcgggccaaatgacgtaaacatgcttgccctccaggattggcgaactcggctgtgggggcgggaactgaggggcaggagcccccagggattggcggctgcgcagacggggcggggcagccctttgtctgaaggtgctgtttgatgttcgttccttcccgcgtgaggctgcggctctgacgccccataggctccttcaatttccgagatcctcggagtccccaggagaccaaatgatggcagcagccagactcctgccagtgccggcaggaccccagcccctgtcgttccaggccaagctgaccttcgaggatgtggctgtgctcctctcccaggatgaatgggaccggctgtgccctgctcagaggggcctctacagaaatgtgatgatggaaacctatgggaatgtagtctcattgggacttccaggatgcaagcctgacataatcttccacttggagctgaggggaatatccctgggtcctgtaccggaatggggctaagaagagccagggcctgtggagtgactactcagaatgttgaaaccaagggagagagtcaaaatacagacttgagtccgaagccattaatttcagagcaaacagtgattctggggaaaacacccttggggaggattgatcaagaaaataatgaaacaaagtaaagcttctgtctgagtccaaactctgttgaccaccgtgaagttcaggtcttaagccaaagcatgccactcactccgcaccaggcagtgcctagtggagagaggccctacatgtgtgttgagtgtgggaagtgctttggccggagttcccacctccttcagcatcagcgtatccacactggagagaagccctatgtgtgcagtgtatgtgggaaggccttcagccagagctcagtccttagtaaacacaggagaattcacacaggtgagaagccctatgagcgcaatcgagcgtgcattagtctttacagtgagctcccatcttgctcacctttcactgatacatacaggagagaagcctcactaatgtcttgagtgtccgaaagccttcactcaactctcacatctcattcagcaccagcggatccacacgggagaaaggccatatgtgtgtccgttgtgtgggaaagccttcaaccatagcactgttctgcggagccaccagagggtacacactggggagaagcctcacaggtgcaatgagtgtgggaaaaccttcagtgtgaagaggacactgctgcagcaccagaggatcctacactcgggagaagccctacacgtgcagcgagtgtgggaaggccttcaacgaccgctcagtccttattcagcaccacaacgtgcacactcgggagaagccctatgagtgcagtgagtgtgggaagaccttcagccaccgctccacactgatgaatcacgagcggatccacaccgaggaaaagccctatgcatgctacgaatgtgggaaggccttcgttcagcactcacacctgatccagcaccagagagtccacactggggagaagccctatgtgtgtggtgaatgtgggcacgccttcagtgcacgccggtctctgatccagcatgagagaatccacacaggtgaaaagcccttccagtgcacagaatgtggcaaagccttcagcctgaaagcaactctgattgtgcacctgaggacccacacgggcgagaagccatatgagtgcaatagctgcgggaaggccttcagccagtactcagttgctcatccagcaccagcggatccacacaggcgagaagccctatgagtgcggggagtgtgggggtgccttcaaccagcatggccacctaatccagcaccagaaaagtgcacagaaaagttgtgacccatggctgacacaagaatcccattctcacagaaactgcatgtggaacccacaagcagccttcagcccaagagaagtctctgttaactctataggaagcttttctttggcgattcagtgtcacaaaataactccagaaagaagcacttagcgtgctgttcctgtggaaaaacttcagagactacctgttttattttcctcaaccatcttgaagttatgttggagagtaatcatacaattgtagagaattttggtaaaaaacagccataattctttaacattagtttatttgaactaagggaatttaaggcataagaaccgattatcccgaataaaatcttacattccaaataaagttctttttctaagaacattacatgcccttcctaaatatcaattaaccatactaattattgcacttaaaatttgaaagtcggactatttttcagtattctcttaaaagactaaagtattgtatggataaagtgatataaaaagatattttcatcaagcatcatgtaaaatggttggaaatcctaagtgtgtggatttccatcctaagtgtgtggagtcctgttttgtatgaaacaaggaaaaagcttatatattagtgagaaattacataaatttaaaaaaaaaaaaaaa

SEQ ID NO: 20200 - DNA, 319 bp, Homo sapiens
  SIMILAR (109)..(318): 451254mologous to Arabidopsis thaliana putative protein,accession number AL049481,Smith-Waterman Score=179.
ggcacgagaccatggctccgcgtcaatgcatatttaatccatgatactgctgattggaaggacctgaacctgaagtttgtgctgcaggctgtgatggaatctgaaatgaagtttgacaaggaccatgatggactcattgaaaatggaggctatgcagaccagacctatgatggatgggtgaccacaggccccagtgcttactgtggagggctgtggctggcagctgtggctgtgatggtccagatggctgctctgtgtggggcacaggacatccaggataagttttcttctatcctcagccggggccaagaagcctatg

SEQ ID NO: 20201 - DNA, 2436 bp, Homo sapiens
  SIMILAR (622)..(1539): 1001254mologous to Homo sapiens AD035,accession number AF258662,Smith-Waterman Score=1665.
atggtcctttcagcacgtcagacagaagctcctgatgttggaaataaagcagtggtggtggtgctagagaggtacctgcagtggtggtaccggaagacccatgtggaaaagaagacacctttcatcgacatgatcaattctgtacccctaagacagatttatggttgtcccttgggtggcatcgggggaggcactattacccgtggctggagaggccagttctgtcgttggcagcttaaccctggaatgtatcagcaccggacagtcatcgctgaccaattcacagtgtgcctgcgtcgggaagggcagactgtgtaccagcaagtcctgtccctggagcgcccaagtgtcctccgcagctggaactggggcctgtgtgggtactttgctttctaccatgccctctatccccgagcctggactgtctatcagcttcctggccagaatgtcaccctcacctgccgtcagatcacacccatcttgccccatgactaccaggacagcagcctgcctgtaggagtctttgtgtgggatgtggaaaatgaaggggacgaagctctagatgtgtccatcatgttctccatgcggaatggactgggtggtggagacgatgccccaggggcagctaccacggtaacccacatcacagcctttgaccctgacagcacggggcagcaggtgtggcaggatctacttcaggatggacagctggactctcccactggccaaagcacccctacgcagaaaggagtaggcattgctggagctgtgtgtgtttccagcaagttgcgacctcgaggccagtgccgcctggagttttcactggcttgggacatgcccaggatcatgtttggagctaaaggccaagtccactacaggcggtatacaaggttctttggccaggatggagatgcagcacctgccctcagccactatgcactgtgccgatacgcagagtgggaagagaggatctcagcttggcagagcccggtattggatgacagatcactgcctgcctggtacaaatctgcgctgttcaatgaactatacttcctggctgatggaggcacagtgtggctggaagttcttgaggactccctaccagaggagctgggcagaaacatgtgtcacctccgccccaccctacgggactacggtcgatttggctaccttgagggccaggagtaccgcatgtacaacacatatgatgtccacttttatgcttcctttgccctcatcatgctctggcccaaacttgagctcagcctacagtatgacatggctctggccactctcagggaggacctgacacggcgacggtacctgatgagtggggtgatggcacctgtgaaaaggaggaacgtcatcccccatgatattggggacccagatgatgaaccatggctccgcgtcaatgcatatttaatccatgatactgctgattggaaggacctgaacctgaagtttgtgctgcaggtttatcgggactattacctcacgggtgatcaaaacttcctgaaggacatgtggcctgtgtgtctagctgtgatggaatctgaaatgaagtttgacaaggaccatgatggactcattgaaaatggaggctatgcagaccagacctatgatggatgggtgaccacaggccccagtgcttactgtggagggctgtggctggcagctgtggctgtgatggtccagatggctgctctgtgtggggcacaggacatccaggataagttttcttctatcctcagccggggccaagaagcctatgagagactgctgtggaatggccgctattacaactatgacagcagctctcggcctcagtctcgtagtgttatgtctgaccagtgtgctggacagtggttcctgaaggcctgtggcctaggagaaggagacactgaggtgagagaggaggaggagcagccagagagaaaaatgggttttccctggaggtgggaagtgtttcctacccaacatgtggtccgtgctctccaaactatctttgagctgaacgtccaggcctttgcaggaggggccatgggggctgtgaatgggatgcagccccatggtgtccctgataaatccagtgtgcagtctgatgaagtctgggtgggtgtggtctacgggctggcagctaccatgatccaagagggcctgacttgggagggcttccagacagctgaaggctgctaccgtaccgtgtgggagcgcctgggtctggccttccagaccccagaggcatactgccagcagcgagtgttccgctcactggcctacatgcggccactgagcatatgggccatgcagctagccctgcaacagcagcagcacaaaaaggcctcctggccaaaagtcaaacagggcacaggactaaggacagggcctatgtttggaccaaaggaagccatggcaaacctgagcccagagtga

SEQ ID NO: 20202 - DNA, 443 bp, Homo sapiens
  SIMILAR (67)..(201): 821254mologous to Homo sapiens AD035,accession number AF258662,Smith-Waterman Score=188.
tggggagctagccgggacccagtgtactcgtggagcctgccctcacagtccctgaccccttcacaggcagctaccacggtaacccacatcacagcctttgaccctgacagcacggggcagcaggtgtggcaggatctacttcaggatggacagctggactctcccactggtgatggggggtctgactgggagatggtgggaagagaggttgtccctgtcttgggaccaggggtgggaggcctggtaataagtaggccttgtttccatgttagggatccctatccctggggctgaaggggctcctgtcctgaattctcttgtgtttctctcaggccaaagcacccctacgcagaaaggagtaggcattgctggagctgtgtgtgtttccagcaagttgcgacctcgaggccagtgccgcctggagttttcactggcttacgaaa

SEQ ID NO: 20203 - DNA, 573 bp, Homo sapiens
  SIMILAR (1)..(366): 371254mologous to Arabidopsis thaliana,accession number AB028621,Smith-Waterman Score=221.
gggggaggcactattacccgtggctggagaggccagttctgtcgttggcagcttaaccctggaatgtatcagcaccggacagtcatcgctgaccaaatgaggacactaagatccagagaggtttagtaacatgcgcaaggtcacaagttcacagtgtgcctgcgtcgggaagggcagactgtgtaccagcaagtcctgtccctggagcgcccaagtgtcctccgcagctggaactggggcctgtgtgggtactttgctttctaccatgccctctatccccgagcctggactgtctatcagcttcctggccagaatgtcaccctcacctgccgtcagatcacacccatcttgccccatgactaccaggtgaggcccccacatctgtatcttccattgccctcccttccccaggacctgcctctgctagaaactgcatggcctgcgaggcgcggtagtcacgcctgtaatcccaacactttgggaggcaaggcaggcggatcacgagatcaggagatcgagaccatcctggctaacacgtgaaacccatatctactagaaaaaagacaaaaagat

SEQ ID NO: 20204 - DNA, 384 bp, Homo sapiens
  SIMILAR (74)..(157): 501254mologous to Mus musculus SPR2A protein,accession number AJ005559,Smith-Waterman Score=70.
gaatgtatcagcaccggacagtcatcgctgaccaattcacagtgtgcctgcgtcgggaagggcagactgtgtaccagcaagtcctgtccctggagcgcccaagtgtcctccgcagctggaactggggcctgtgtgggtactttgctttctaccatgccctctatccctgagccatcaggacaatcataccccttcccttctctccacccaactgtgccagtaaatgggggttgagagtgacctaggcagcattagaatcacttatttatttctttcctcacctgttccctgactgcgtgaaatgttcagggaggtcagttgatttccccaggtacattcatggtgtgacagacacatgggtacaaataaaagacccagaaagcc

SEQ ID NO: 20205 - DNA, 1018 bp, Homo sapiens
  SIMILAR (824)..(1018): 1001254mologous to Homo sapiens KIAA1605 protein,accession number AB046825,Smith-Waterman Score=333.
tcacggtgatcaaaacttcctgaaggacatgtggcctgtgtgtctagtaagggatgcacatgcagtggccagtgtgccaggggtatggttggtgtctgggaagagcctagctggttgttgcctttcctcggtacctaggtcttcaacatcttggtccctctctaggctgtgatggaatctgaaatgaagtttgacaaggaccatgatggactcattgaaaatggaggctatgcagaccagacctatgatggatgggtgaccacaggccccaggttagcgggtaggggtttccaggaggcctgaggtgagaaactgggcaacaagggattgtagggctcaagaaagaatgactcattgtctattacacggcatgggacgagctggagctgccagtctgacccccaaacccatgtccctgatcagtgcttactgtggagggctgtggctggcagctgtggctgtgatggtccagatggctgctctgtgtgagggcacaggacaatctaggataagttttcttctatcctcagccggggccaagaagcctatgagagactgctgtggaatggtgagttcggggagcctaagtagtcttaaggcagctgagaggacaccaggagccttatttttctcttcctcgactccaggccgctattacaactatgacagcagctctcggcctcagtctcgtagtgttatgtctgaccaggtgtgctggacagtgggggttcctgaaggcctgtggccttaggagaagggagacactgaggtgagagaggaggaggagcagccagagagaaaaatgggttttccctggaggtgggaagtgtttcctacccaacatgtggtccgtgctctccaaactatctttgagctgaacgtccaggcctttgcaggaggggccatgggggctgtgaatgggatgcagccccatggtgtccctgataaatccagtgtgcagtctgatgaagtctgggtgggtgtggtctacgggctggcagctaccatgatccaagag

SEQ ID NO: 20206 - DNA, 985 bp, Homo sapiens
  SIMILAR (30)..(446): 481254mologous to Arabidopsis thaliana putative protein,accession number AL049481,Smith-Waterman Score=340.
  misc_feature (1)...(985): n = a,t,c or g
tgaccgtgcggtgtaattcccaagaagcctatgagagactgctgtggaatggccgctattacaactatgacagcagctctcggcctcagtctcgtagtgttatgtctgaccagtgtgctggacagtggttcctgaaggcctgtggcctaggagaaggagacactgaggtgtttcctacccaacatgtggtccgtgctctccaaactatctttgagctgaacgtccaggcctttgcaggaggggccatgggggctgtgaatgggatgcagccccatggtgtccctgataaatccagtgtgcagtctgatgaagtctgggtgggtgtggtctacgggctggcagctaccatgatccaagagggcctgacttgggagggcttccagacagctgaaggctgctaccgtaccgtgtgggagcgcctggggtctgggcctttccagaccccaggagggcatactgccaggcagcgagtgtttccgttcaattggcctacattgcgggccactgaggcattatggggccattgcagcttagccctgcaacagcaggcagcacaaaaaaggcctcctggccaaaaagttcaaacaggggcacagggattaagggacaggggcctatgttttnggacccaaagggaagccattggcaaaccttgagcccaagagtgagccgtcttgaacttgtgggaaggaagttctaacagcccagcctccagcctggcctttcctccttcccctctgaacctcctgcaaccctgagccatcaggacaatcataccccttcccttctctccacccaattgtgccagtaaatgggggttgagggtgacctaggcagcattagaatcacttatttatttctttcctcacctgttccctgactgcgtgaaatgttcagggaggtcagttgatttccccaggtacattcatggtgtgacagacacatgggtacaaataaaagacccagaaagccattaaaaaaaaaa

SEQ ID NO: 20207 - DNA, 3517 bp, Homo sapiens
  SIMILAR (2020)..(2847): 361254mologous to Arabidopsis thaliana,accession number AB028621,Smith-Waterman Score=378.
  misc_feature (1)...(3517): n = a,t,c or g
cggtgccgtggcccaggggccgggccgaggtcccgggggcggtgccttgcgggcccgtcccggggcggtgcctggtgggctggccccgcggttcctcccctctctgcgggcccagtcgccctttggccgggcgagctaatcgtcggctcaatgacgacgaggcccgacccttcccgtccaggacctacagagacaaccgaaggagagcccaaggcggcttctttgctgtcgccgcccccactgaagcaagagctccccggctccactgaaacaccagctcatttaagctttccccaacgaccggccctccgggacgatacctaacaacgaccggcgcccgcatctggaataggctggcgagatacttagtatccgagggctcgggacttggcgccatcgaggtcatggggacccaggatccagggaacatgggaaccggcgtcccagcctcggagcagataagctgtgccaaagaggatccacaagtttattgccctgaagagactggcggcaccaaggatgtgcaggttacagactgtaagagtcccgaagacagccgacccccaaaagagacggactgctgcaatccggaggactctgggcagctgatggtttcctatgagggtaaagctatgggctaccaggtgcctccctttggctggcgcatctgtctggctcatgagtttacagagaagaggaaaccctttcaagctaacaacgtctccctaagctacatgataaagcatataggcatgggcttgaggtacctgcagtggcgtgaccggaagacccatgtggaaaagaagacacctttcatcgacatgaacaaatctgtaccaccaatacagagttatttttgtgcccttgggtggccttcggggaggcactagtacccgtggctggagaggccagttctgtcgttggcagcttaaccctggaatgtatcagcaccggacagtcatcgctgaccaattcacagtgtgcctgcgttcgggaagggcagactgtgtaccagcaagtcctgtccctgggagcgcccaagtgtcctccgcagctggaactggggcctgtgtgggtactttgctttctaccatgccctctatccccgagcctggactgtctatcagcttcctggccagaatgtcaccctcacctgccgtcagatcacacccatcttgccccatgactaccaggacagcagcctgcctgtaggagtctttgtgtgggatgtggaaaatgaaggggacgaagctctagatgtgtccatcatgttctccatgcggaatggactgggtggtggagacgatgccccagggggtttgtgggaatgagcccttctgtctggagcgtaggggtgnaaactgtccgggggctgctcctgcattcatccaacccttccaaacccctacacgatgggctgtggctggcacggagttcacgggcagctaccacggtaaacccacattcacagcctttgaccctggacagcacgggggcagcaggtgtggcaggatctacttcaggatggacagctggactctcccactggccaaaggacccctacgcagaaaggagtaggcattgctggagctgtgtgtgtttccagcaagttgcgacctcgaggccagtgccgcctggagttttcactggcttgggacatgcccaggatcatgtttggagctaaaggccaagtccactacaggcggtatacaagggtctttggcgcgggatggagatgcaccacctgccctcagccactatgcactgtgccgatacgcagagtgggaagagaggatctcagcttggcagagccccggtattggatgacagatcactgcctgcctggtacaaatctgcgctgttcaatgaactatacttcctggctgatggaggcacagtgtggctggaagttcttgaggactccctaccagaggagctgggcagaaacatctgtcacctccgctcccaccctacgggactaccgacgatttggctaacttgaaggccaggagtacccgcatgtacaacacatatgatgtccacttttatgcttcctttgccctcatcatgctctggcccaaacttgagctcagcctacagtatgacatggctctggccactctcagggaggacctgacacggcgacggtacctgatgagtggggtgatgggcacctgtgaaaaggagggaacgttcatcccccatgatattgggggacccagatggatggaaccatgggcttccgcgttcaatgcatattttaatccatgatactgctgattgggaaggacctgaacctgaagtttgtggcttgcaggtttattcgggactatttacctcacgggtgattcaaaatttcctggaagggacatgtgggcctgtgtgtctagctgtgatggaatctgaaatgaagtttgacaaggaccatgatggactcattggaaaatggaaggctatgcagacccagacctatgatgggattgggtgaccacaggccccagtgcttactgtggagggctgtggctggcagctgtggctgtgatggtccagatggctgctctgtgtggggcacaggacatgcagaataagttttcttctatcctcagccggggccaagaagcctatgacaggctgctgtggaatggccgctattacaactatgacagcagctctcggcctcagtctcgtagtgttatgtctgaccagtgtgctggacagtggttcctgaaggcctgtggcctatgagaaggagacactgaggtgtttcctacccaacatgtggtccgtgctctccaaactatctttgagctgaacgtccaggcctttgcaggaggggccatgggggctcgtgaatgggatgcagccccatggtgtccataataaatccagtgtgcagtctgatgaagtctgggtgggtgtggtctacggggctggcagcttcccatgatccaagaggtaatgcactccttttcccatctctccaccatctgtatcctggcccagaaaacttcctcaaccaccaaatttcttcaaggcataacccaatgccatcttgtccgtctataaagcctcccatttttccctgggtatgcattccagctcctgccttcaggtttctgtctgtggggtcatagttatctcctccacttgctggggagctccttgaaggcaaagactctactgcctccatctattccagtgggaagtgggctctttcagaggggttgccaagttagtattgtatggacttgttcatctttcccaacaggggcctgaattggggaggggtttccagacagctgaaggctgctaccgtaccgtgtgggagcgcctgggtctggccttccagaccccagaggcattctgccagcagcgagtgttccgctcactggcctacatgcggccactgagcatatgggccatgcagctagccctgcaacagcagcagcacaaaaaggcctcctggccaaaagtcaaacagggcacaggactaaggacagggcctatgnttggacaa

SEQ ID NO: 20208 - DNA, 497 bp, Homo sapiens
  SIMILAR (18)..(305): 571254mologous to Arabidopsis thaliana Putative membrane protein,accession number AC011001,Smith-Waterman Score=298.
  misc_feature (1)...(497): n = a,t,c or g
ggcacgagtccncgttngagattgaaaatgttccctgtgaatttgtgcagaactttgacccccattaccccattatcctgggtggcttgggcaacagcgagggaaatgttggacacgtgcagatgcgtctgaagaaacatcgctggtataagaaaatcctcaagtcccaagatccaatcatattttctgtagggtggaggaggtttcagaccatcctgctctattatattgaagaccacaatggaagacaaanggcttctaaangtataccccacagcacatgcattgtggagcagcccttttgggcctggattttccggatagctgccacaaggagtttgtcccttgancttggataaaatcccataaaaattngtgaagaaatttaaaagctaacttgggtttttnccatataaaaattttccaaggaacacctttcatttttaatttaggattattngtccttccatggcngaaactttggggaatccctggtt

SEQ ID NO: 20209 - DNA, 499 bp, Homo sapiens
  SIMILAR (22)..(231): 521254mologous to Arabidopsis thaliana Putative membrane protein,accession number AC011001,Smith-Waterman Score=171.
  misc_feature (1)...(499): n = a,t,c or g
aaaccagtgggtgagaaagacacctggtcaggaatgcggaccacgggccaactcaggcntgcccatggcgtcagactaaaggcgaacaaggactctctgtataagccaatcctgaggcaaaagaaacattttaattcactgcacattccaaaagccttgcagaaggccctgccatttaagaacaagcccaagacccaagcaaaggcaggcaaggtgccaaaggacaggcggaggtagacagtttcaaacatcacagtttgaatgcctgtgaatgacacgtcagtgggaaagagctcaagagatgtctctactcaaactgtgcctgcaggaggaggaacagagaagcctgggctgctgggactgggttcattctcatgacttggggctgtcgagatttaaagtgatgtaagctgtggttatgtggattctcttactttcctctgcctgcctcagtttaattattttgtcctacagaaatatcattaaaatatttttttgt

SEQ ID NO: 20210 - DNA, 1969 bp, Homo sapiens
  SIMILAR (1657)..(524): 1001254mologous to Homo sapiens 27-APR-1995 Human geranylgeranyl transferase-1 beta subunit cDNA,accession number T38712_cd1,Smith-Waterman Score=2016.
cttaagaataagacaaaataagtcactcttctttaaaaaaaattatggtcatctgttttcaaagaataatcccagatacttaattaattaaagcaaattttctacgatcagcagtgagctttttaaatgatcactaagtgttcacctgaagattatcaatgctatatgaagtgtaaacttgaaaatttgtgtccattttataataagatacaatttgcactgaagagtttttaaaaagataacctacacacatacagttaatttgcctcaaacaacttcttagaaatacagtataaacatttaagaaccacgacaaagttgtggttcaaacttcaacaaagattttcttgaaacccagtataaagattactggctcaagaccatatcccaaagtgaaatcagcaggagatttgattgtaagactctaccttttaaaaaaagagcacacttggttatacatggcttttaaacttgagctacagttatgctacaaatcccccccaccctcccaatctaaaatcagtcatgtggagatatgtacattctctgagcattgtttagagtccttggttttccagctttgatggagatctagaaggcgttcagaagtccgtgtgcttacattcagagcaggatgaactttacaaattccactttcctccattagtgacaggccacagatcccaaagtatgcatgcaaagcatctggatgactgtctggccacttggcaaatccccctacaaggcgatcttgagttgataagatgtaatttctatttttctcaaagttagtgtattggaaaatttttagaagcttcagagttgctcccacccaaaaagaataacaggtgtctacaggcttattaggtcttccatgataaccattttgttgcctcattatacaccacctctttatcctgttcaattctttttctgaaaaaacttcttctagtttacccatcagacatagtgaggcaatgccacaaaaagttgatcctccatgagattcaagtccagctccctgtgccagtccattgtcataggacatactccttctaatataggtgatggcttttttcatatccatgcctgaccagttgttgagcatatagcaaatacaggaagcacagtacacaaatcgcatgtcattttcactgccttcaggtactgcacaaaaactcccatcttccagctgaagggctctcaagcccgctaagcaagcttctttatttactcggcttaagtcgtctccaagaataactaagcatgagaggccagtgtaggtcattgcaatgtggccactatcataaggatgagctgttccaggagcctttgatggattgaacggaatacccaggtatgaagagcctcggaaaccacagcgatttagatttgatctgtcttctgtgggaaggacctgcagggaataaatccactctattatatcatctttgttcaccacatctaaggaatccaacatatccagcccggagagtgcaaaaaatgcaattgtcaacctgcttgtctcgagtgaagaatagcgctccggcaaaacctggaggcagcgctggaaaaatcgcacgtgccgatcccgtaagaaatccagccgctctccctcaccgctccctgctagcctctcatcctcagtggccaccatgcccagccccttgccatccttttagggcaaggaaaccaggctcagagaggtagagtgatttatctaaggtctcaaagtgaatttgccgttgggtcaagactaattataataacaacaactactgacgtttatatgggcccggcattgtgctgaacactttcatggattttgtaacagaatccctagatcagcactgtccagtaactctgcagggatgggagtgtccggtacaggggccacgagccacatacggctgttgtgcatttgacacacagctcatgtgactgaggaactgaattgttcattttattc

SEQ ID NO: 20211 - DNA, 565 bp, Homo sapiens
  SIMILAR (182)..(304): 971254mologous to Homo sapiens KIAA0187,accession number D80009,Smith-Waterman Score=195.
caactttaaagttttggattgcttttgtcaagccactgggttgcaagttcagatggtctttcttgtttttcttagctaattgtaagtaaaattcactttggtaatttattgtgtcacatagaattgaagtttttctcttgctaatattattcctattttcaaattttggggttcctgctagcctgattttcggatagctgccacataagttgtccttgatctggataaatccataaaaattgtgaagaaattaaagctaactggttttccatataaaatttttaagaacacttcatttattaaggcctgtatatctatatattctcatatttataaatctccatattgtttgagaaaaggaatgaaatacctctaaaatatgggcctcatatttttagaaaagtgtttgaaatcttttataaacttcatattttgtttgctcctttatattctgtattacttaaatatgcctcagaaaagcagtggtaaacagctatttaggaattgaggctgttactcctgacttccatgtgagactgccacagaactcatattgaaaatatgt

SEQ ID NO: 20212 - DNA, 1698 bp, Homo sapiens
  SIMILAR (529)..(1026): 481254mologous to Arabidopsis thaliana Putative membrane protein,accession number AC011001,Smith-Waterman Score=437.
atggctgcaaacaggaaggattttattcaccgtcgatgcggccccgagttgtcccaaagcgaggcagtgccccaaggtctatgcagagcagaacgcagctccgccctcgcaatgctctccgggtctgtgccgaggagaacgcagctccgcccttgcaaaggcacacagcgccggtgccggcgtggcggagaagcggacagcggcggagaggcggtcggcggcggcgcggcggagaggcggtcggcggcggcgcggcggagaggcggtcggcggcggggcggcggagaggcggtcggcggcggcgcggcggagaggcggtcggcggcggcgcggcggaggcgaggcgggcggcggcggcgcggcggaggcgaggcgggcggcggcggcgcggcggaggcgaggcgggcggcggcggcgaggcgggcggcggcggcgaggcgggcggcggcggcgcggcgggcggcggcggcgcggcgggcggcggcggcgcggcggatagcggagagcggcggagaggcgcacagccgcggagaggcgcacagcggcggagaggcgcacagcggcggcgcaggcgcggagaggcgcaggcccaggctccactccccagctctgaaaactcatcctggtcagagttcagaaggacatgtggagtataagctgaatcacgtagaatttgaagatcaagatgatgaagccagagttcagtatgagggttttcgacctgggatgtatgtccgcgttgagattgaaaatgttccctgtgaatttgtgcagaactttgaccccctttaccccattatcctgggtggcttgggcaacagtgagggaaatgttggacatgtgcagatgcgtctgaagaaacatctctggtataagaaaatcctcaagtcccaagatccaatcatattttctgtagggtggaggaggtttcagaccatcctgctctattatatcgaagaccacaatggaagacaaaggcttctaaagtatacgccacagcatatccattgtggagccgccttttgggatattgtcttcatgcgaactttggtatcttgtttccatcccagccttctataacccagtaacatctttgttgaaaccagtgggtgagaaagacacctggtcaggaatgtggaccacgggccaactcaggctcgcccatggtgtcagactaaagacaacgaaggactctctgtataagaacatacatatgatagttgagacagacacatattctgatcatgaagaaataaacacaagttaaatatgactaagcagaaagatggaaggaccaggaatggtgatgctaacttggaaccacgatgcaggctctaaactcctctacaatcatcctcccttgtgagaaaaatacataagatctaaggcacatgagatgatatgctttctgtttgagtttctcctttatgttacgcatactgataaaattgttgatgccagttgatctgaaggtcccagcaaggagccgactcacagaagaatgaagttttcacatcatgatgatttaatcttccttgacctgagcaattgacaaccccaattctccagaacctcacccgccacaatccccttaaaaaccctggcccagaacccctcaagcagacagatgtgaagcttgaggattccttcatctctttgcccaatggcattgtgattattaaactctttttctgctgc

SEQ ID NO: 20213 - DNA, 1604 bp, Homo sapiens
  SIMILAR (924)..(1367): 501254mologous to Arabidopsis thaliana Putative membrane protein,accession number AC011001,Smith-Waterman Score=365.
  misc_feature (1)...(1604): n = a,t,c or g
gcgctgcaggaattcggcacgaggcacagcgaggcgccggcccagactccactccccagctgtgaaaggaggagctctacggtgactttgaagacttggaaacaggggacgtgcacaagggaaaatcgggccccgatactcagaatgaagatgtagagaaacaaggaagaaattgaccctgacgaagaagaaagtgccaagaaaaagcatttggataagaagagaaaattgaaggagatgtttgatgtggaatatgatgaaggagaaagcacatattttgatgatcttaaaggagaaatgcagaaacaagcacaggtaaacagcatacaaggtttcccccccgcgcaccacgtcatgtacagctgaatcatgcagaatttgaagatcaagatgatgaagccagagttcagtatgagggttttcgacctgggatgtacgtctgcgttgagattgaaaatgttccctgtgaatttgtgtagaaccttgacccccgttaccccattatcctgggtggcttgggcaacagcgagggaaatgttggatacgtgcaggtgggtccctttgctgcatatttggtgcctgaggctctgtggatttcccctccatcaatcatcttaccctctcatccccctcagatgcgtctgaagaaacatcgctggtataagaaaatcctcaagtcccgagatccaatcatattttctgtagggtggaggaggtttcagaccatcccgctctgttatatcgaagaccacaatggaagacaaaggcttctaaagtataccccacagcatgtgcatcgcggagcagccttttgnnnnnnnnnnnnnnnnnnnnnnnnnnnnnnnnnnnnnnnnnnnnnnnnnnnnnnnnnnnnnnnnnnnnnnnnnnnnnnnnnnnnnnnnnnnnnnnnnnnnnnnnnnnnncggatagctgccacaggagttgtccttgatctggataaatccataaaagttgtgaagaaattaaagctaactgggtttccatataaaattttcaagaacacttcatttattaagggaatgtttaattctgccttggaagtggccaaatttgaagatgctgtgattcgaactgtcagtgggataagggggcagatcaagagagcactctgagctccagaaggagctttccaggatagcttggaggataagctgcggatgagcgatattgtcttcatgcgaacttggtatcctgtttccatcccagccttctataacccagtaacatctttgttgaaaccagtgggtgagaaagacacctggtcaggaatgtggaccacgggccaactcaggctcgcccatggtgtcagactaaagacaaacaaggactctctgtataaggtactggtcgtgtgtgtgttagtggagatgaagcctgtgctctacagacagtgagtcacacagacacttttctataatttcttacatactttgaatgttcaagtataaagtctaatgttaaatttgattgaacaattgtatatttgtgggatattttggaatggaacaccaaaaaatggtaatagtggttctttctggattgaagaaaaactcctcttttttaaaataaattttatttttatt

SEQ ID NO: 20214 - DNA, 5142 bp, Homo sapiens
  SIMILAR (2561)..(1725): 291254mologous to Arabidopsis thaliana Putative membrane protein,accession number AC011001,Smith-Waterman Score=217.
taacaaaaaaatattttaatgatatttctgtcaggaccaaaataattaaactgaggcaggcagaggaaaagtaagagaatcacacataaccacagcattacatcactttaaatcatcagacagccccaagtcatgagaatgaacccagtcacagcagcacaggcattcatctgttccatccatcctgcaggcacagtttgagtagagacatcatcattgagcatcatttcccactgacgtgtcattcacaggcattcaaactgtgatgtttgaaactgtctacctccgcagatccagggacagtccctccaagtccaaagggctcactggcaattgggccctcagccccctttcaaactgggacttctggtttcttctttccttctgcccctggaattctgaagagcttcttcctggaggtccttctggccgcttcagcttctcctcctcctccttctgcttggcctctgaagtgctctttattgtgcaggtgccgctgctccttggccttcttcatcttctgactatgcaccgtactcagagcatccagcagtgcaaggatctttctttcatgaaggctcgcgtaatgacggccggtctccgcgctgtcctcttggcacctttgcctgcacttggcttggtacttgggcttgttcttaaatggcagggccttctgcaaggcttttggaatgtgcagtgaattaaaatgtttcttttgcctcaggattggcttatacagagagtccttgttcgcctttagtctgacgccatgggcgagcctgagttggcccgtggtccgcattcctgaccaggtgtctttctcacccactggtttcaacaaagatgttactgggttatagaacgctgggatggaaacaggataccaagttcgcatgaagacaatatcgctcatcagcagcttatcctcaaagctggccctgaaaactccttctggagctcggagtgctttcttgatctgccccccttatcccactgactgttcgaatcacagcaccttcaaatttggccacttacaaggcagaattaaacattcccttaataaatgaagtgttcttgaaaattttatatggaaaaccagttagctttaatttcttcacaatttttatggatttatccagatcaaggacaactcctgtagcagctatccgaaaatcaggcattatgccacttgacagactgtattgccaagaaaccagttccctgtggagtgatagggccccaaaaggctgctccgcaatgcatgtgctgtggggtatactttagaagcctttgtcttccattgtggtcttcgatataatacagtgggatggtctgaaacctcctccaccctacagaaaatatgattggatctcgggacttgaggattttcttataccagcgatgtttcttcagacgcatctgcacgtagccaacatttccctcactgttgcccaagccacccaggataatggggtaatgggggtcaaagttctgcacaaaattcacagggaacattttcaatctcaatgcggacgtacatcccaggtcgaaaaccctcatactgaactctggcttcatcatcttgatcttcaaattctacgtgaattcagctgtgcttcttttctgcatttctcctttaagatcatcaaaaatatgtgctttctccttcatcatattctgcatcaaacatctccttcaattttctcttcttatccaaatgctttttcttggcactttcttcttcggtcagggtcaatttcttccttaacttctttctctatatcttcattctgagtattggggcctgattttcccttgtgcacgtcccctgtttccaagtcttcaaagtcaccgtagagctcctcatcttctgctaagaccttggctgcatctttatcatcttcccactttccagtcacgaagcaatctctgatactgttcataacctcctctaaatcccagtcatggggggcctccacaagaaatctggagcagtccaaagagtcagccttgtgcttacactctctgtcaggctggttgacacgaaacaaccctccaagctcttctagagtatcatcatcttcttcttcattatcttctgtcactgtcccataaataagctttcggaggtttggagctgcttgctgctgcctcagaaaggcctcagctgcctttctggaaaggtcttccttccacttgagggcacctgacgtttctttggaatcattattttcttccttgtaatcttcttcctctttgagtaaattttctatatcactggtctcatcaatgaagttctgtggccccagtttctgaccactgctcacttgagaaggctttgaaagcttttttctaatagcctcttcattttctgagtcttcttcctctgcactgagtgaggagctttcttcagattcatcttcagatgcaaacacctcttcagctgtgcaatgcccagaatcgaaagtggggagagctgctttcttcatcagcaaagacttctccagattcacacggtcactctggcaattagctggtgacagccctgctttactaccttctccagcagcctttgatcctgaaatgcccttctctcctgcagtgcagtcctcttcttcactgctttcatcagcttcctccgcttccccttcttccgctgagctcctctcaaggtcatcgtcactgtcagcaaatgctggcaaatccatttcactgtcttcttccaactcaagtttccgtcgtttgatgcccttaacagccatatactgatcagtcatctcagcattttcctcctcttctgcttcctcatcactagagccgttttccaacccgtcatcttcagacatttcatcatcttcttcatcatcactatctccagattcatcttcatctccgaaaatggctttccgacgcattcgaccagtgttcaagtccatttgtttttcctcctttggcatcattagcccttgattatctatatcctctgacccaagtggcttggaatcagaaaacagcgtcactcgacttgaagccatcttggcatcaatggtggagtgggtagagatgagactctggaccagctcatgggtgggccccacttcatccgatacctgaaaaacgtggctgccaccaaggtcaacatagacagcgtctttgtcatacagcacacccccaactccagaaagaggcgcataaaccagcttctccttctcatttaaacagcgcttcttttgttgttcaggaagagcgcaagggtctgggaggaaactgatgtcactcacggcaaaatctcctacccctggcatgtgaatttggcttttatctttgaagtgtgctcctcttaaataaccataaagtgacacctgcaggtcacatttgatgtttgtttggatatcctccgggtttgtcaaatcttccatccttttaactgtctgccaggatataagggtgagaagtttgccatgtgagaggcctaaacttcataactgtaataaaatggcccagattgtggatttcttggttttgatattctccatgcaccattccagaaaggtagaacagcttggcacccgggtaaacttccgtccagaacctgtgttttaatcgcttctttgtcttcttcagttgcttattatgcttgaaggagtcgaggtgggtgagaactcccataattttaggaaagccatgtacttgacagatgtttagaaactcaaacgtttccatttcaaacccaaagctggcatctataagcatcagtaccagatctgctacttcaaccaagatcaatcatcatgttaatgtcacacccacaatcaataatggttgagtcggagctttttacctgacacaatcgtcacagggcctctgaatctcggtcaacttctgccgggtgaagttccgaaatgaggcattatatcaaagtgctctttccaacttttggaggccccatcaccactaccacttattggtgggggctctagtggagttcgaatcaaccactggaatatgatgcttttttgtcttcaaatcctgagtcctgtgaaaggatcgagccatccacacagcagactgaaatgcaaaaagctttgggatttctcttccaggcatcttcttcggtctcctagctggagatcctgcagaagccgcttctttttctttgcagctttgggtccactgtttttctttctgtgtttcttctggtccttagcctaccatagtggctatttaccaataacaagtaactctaacccaactaccccaggacacctccgccagatgagaaatatgccgctcctcgggagcaaagatgacccggaggaccgggggaggaccttcccacgcgcacgactcgcgatcttcccagtgccccagagccagggaccccaccgccgcctaccccagcccgcggcaccaccgaacctgctcacagctgcaactcctcagaatctgttacaaaacctagagaaatgtgactcctacgagccactgttatgcaaaggtcgaggccgacgtcgcttccggagcagcatggcggccactgaggaggagaggctagcagggagcgcgctgcctcgaggttttgccggagcgctgttcttcactcgagacaagcaggtctttcccacagaagacagatcaaatctaaatcgctgtggtttccgaggctcttcatacctgggtattctgttcaatccatcaaaggctcctggaacagctcatccttatgatagtggccacattgcaatgacctacactggcctttcatgcttacttattcttggagacgacttaagccgagtaaataaagaagcttgcttagcaggcttgagagcccttcagctggaagatgggagtttttgtgcagtacctgaaggcagtgaaaatgacatgcgatttttgtactgtacttcctgtatttgctatatgctcaacaaccggtcaggcatggatatgaaaaaagccatctcctatattagaagaagtatgtcctatgacaatggactggcacagggagctggacttgaatctcatggaggatctactttttgtgccattgcctcactatgtctgatgggtaaactagaagaagttttttcagaaaaagaattgaacaggataaagaggtggtgtatgaggcaataa

SEQ ID NO: 20215 - DNA, 467 bp, Homo sapiens
  SIMILAR (161)..(466): 511254mologous to Pyrococcus abyssi PLANT-TYPE L-ASPARAGINASE (EC 3.5.1.1) (L-ASPARAGINE AMIDOHYDROLASE),accession number AJ248283,Smith-Waterman Score=241.
  misc_feature (1)...(467): n = a,t,c or g
cgccttccggcntnttattgaacctagaggctagacaccngcccgaancccggncgacccacgcgtccgcggacgcgtgggcggggctggctcgacccagctggaggtctcggcgtccgcgtcctgcggtgccctgggacccgccgacatgaatcccatcgtagtggtccacggcggcggagccggtcccatctccaaggatcggaaggagcgagtgcaccagggcatggtcagagccgccaccgtgggctacggcatcctccgggagggcgggagcgccgtggatgccgtagagggagctgtcgtcgccctggaagacgatcccgagttcaacgcaggttgtgggtctgtcttgaacacaaatggtgaggttgaaatggatgctagtatcatggatggaaaagacctgtctgcaggagcagtgtccgcagtccagcgtatagcaaatcccattaaacttgctcggg

SEQ ID NO: 20216 - DNA, 452 bp, Homo sapiens
  SIMILAR (149)..(343): 461254mologous to Pyrococcus abyssi PLANT-TYPE L-ASPARAGINASE (EC 3.5.1.1) (L-ASPARAGINE AMIDOHYDROLASE),accession number AJ248283,Smith-Waterman Score=121.
tttcgtcccagcttgaggtctcggcgtccgcgtcctgcggtgccctggggtctcccgaggaccttgtacccgcgcggtttccttgggctggctttggacgacgctttcgccttcctgctgcctaggatccgccgacatgaatcccatcgtagtggtccacggcggcggagccggtcccatctccaaggatcggaaggagcgagtgcaccacggcatggtcagagccgccaccgtgggctacggcatcctccgggagggcgggagcgccgtggatgccgtagagggagctgtcgtcgccctggaagacgatcccgagttcaacgcagacacctcattgctttctgactgaccaaggcgcagcgcagtttgcagcagctatgggggttccagagattcctggagaaaaactggtgacagagagaaacaaaaagcgcctggaaaaagagaagcat

SEQ ID NO: 20217 - DNA, 1359 bp, Homo sapiens
  SIMILAR (982)..(1170): 1001254mologous to Homo sapiens Clara cells 10 kda secretory protein,accession number U01102,Smith-Waterman Score=313.
atggaggatgaggccatgagccaaggatacaggcagcttgtagaagcaagaaaagacagattctcttctggagcttcccgaaggaactcaaccctgcagacccagtttgaatttctgaccaccagaactgcgcagaaccgttgtgaccagagcggtggcgggctgagcggtttcgagccggcgtcggggagcggcggtaccgggcggctgcggggctggctcgacccagctggaggtctcggcgtccgcgtcctgcggtgccctggggtctcccgaggaccttgtacccgcgcggtttccttgggctggctttggacgacgctttcgccttcctgctgcctaggacccgccgacatgaatcccatcgtagtggtccacggcggcggagccggtcccatctccaaggatcggaaggagcgagtgcaccagggcatggtcagagccgccaccgtgggctacggcatcctccgggagggcgggagcgccgtggatgccgtagagggagctgtcgtcgccctggaagacgatcccgagttcaacgcagaggccttccttctcaacgtctgccctctcatctttcaaatgtcctctattccgcatattgaggaagaaaagagtagagctgaaaagagggaaagcaaagattatggggggaaaggtgggacttttaacagcgtactgtggaccttggcttttcccagccaaggttgtgggtctgtcttgaacacaaatggtgaggttgaaatggatgctagtatcatggatggaaaagacctgtctgcaggagcagtgtccgcagtccagtgtatagcaaatcccattaaacttgctcggcttgtcatggaaaagacacctcattgctttctgactgaccaaggcgcagcgcagtttgcagcagctatgggggttccagagattcctggagaaaaactggtgacagagagaaacaaaaagcgcctggaaaaagagaagcatgaaaaagcttctgcagagatctgcccgagctttcagcgtgtcatcgaaaccctcctcatggacacaccctccagttatgaggctgccatggaacttttcagccctgatcaagacatgagggaggcaggggctcagctgaagaagctggtggacaccctcccccaaaagcccagagaaagcatcattaagctcatgagctcaagccccctccccttatatcagaccatctactcaacatcacagactctactcaacatcacagactccacttgtccaacagaaccagtgatcctgccccagtctgttcctatctcagtcatcctaaagcacatacctttgcgctggtgggccatccgcctggatgagtattgtttcatcggataa

SEQ ID NO: 20218 - DNA, 1467 bp, Homo sapiens
  SIMILAR (212)..(646): 391254mologous to Lupinus albus L-asparaginase,accession number L19141,Smith-Waterman Score=258.
tggcgggctgagcgggttcgagccggcgttggggagcggcggtaccgggcggatgcggggctggctcgacccatcttgaggtctcggcgttcgcgtcctgcggtgccctggggtctaccgaggaccttgcacccgcgcggcttacttgggctggctttggacgacgctttcaccttactgctgcctaagatccgccgacatgaatcccatcgtattggtccacgggggcggagccggtcccatctccaaggatcggaaagagcgagtgcaccatggcatggtcagagccaccaccgtgggctacggcatcctccgggagggcgggagcgccgtggatgccgtacagggagctgtcgtcgccctggaagacgatcccgagttcaacgcaggttgtgggtctgtcttgaacacaaatggtgaggttgaaatggatgctagtatcatggatggaaaagacctgtctgcaggagcagtgtccgcagtccagtgtatagcaaatcccattaaacttgctcggcttgtcatggaaaattttcctcattgctttttgactgaccaaggcgcagcgcactttgcgggagctatgggggttccagagattcctggaaaaaaactggtgacagagagaaacaaaaagcgcctggaaaaagagaagcatgaaaaaggtgctcacaaaacagattgtcaaaaaaacttgggaaccgtgggtgctgttgccttggactgcaaagggaatgtagcctacgcaacctccacaggcggaatcgttaataaaatggtcggccgcgttggggactcaccgagtctaggagctggaggttatgccgaccatgacttctgagccgtctcaaccacagggcatggggaaaggcttcttgaaggtgaacctggctagactcaccctgttccacatagaacaaggaaagacgttagaagaggctgcggaccctatcggttgggttaaatgaagtcaagggttaaaggtttaggtggcctcatcgtggttagcaaaacaggagactgggtggcaaagtggacctccacctccatgccctgggcagccgccaaggacggcaagctgccacttcggaattgatcctgacgatactactatcaccgaccttccctaagccgctggaagattgtattccagatgctagcttagaggtcaagtacagtctcctcatgagacatagcctaatcaattagatctagaattggaaaaattgtcccgtctgtcacttgttttgttgccttaataagcatctgaatgtttggttgtgggggcgggttctgaagcgatgaggagaaatgcccgtattagggaggattacttgagccctgggaggttcaaagcttgaggtgagcccatgatttactccacttgcacttccagcctgggccaacagtagccaggccctgtatcaagaaaaaaaaaaaaaaaaaaaaaaaaaaagggcggccgct

SEQ ID NO: 20219 - DNA, 1419 bp, Homo sapiens
  SIMILAR (646)..(1212): 921254mologous to Homo sapiens KHS1,accession number U77129,Smith-Waterman Score=900.
atggccccagaagttgcagcagtagagaagaatggtggctacaaccaactctgtgatatctgggcagtaggaataacagcaattgaacttggagaacttcagccacctatgtttgatctccacccaatgagcccacaagaaaatgggtcacaccacacttttgttgcacagccaggtctctctagagccctagcagttgaactgttagacaaagtgaacaatccagataaccacgcacattacactgaagcagatgacgatgactttgaggcgaattactattctgatctctgttacataaactggcttttacctgatcttgaccttcagggattgtcatcagacccaaatttcatgttacagtggaatccttttgttgatggtgcaaatactggcaaatcaacctcaaaacgtgcaataccacctcccctacctcctaagccaaggataagcagttaccctgaagacaactttccggatgaagaaaaagcatcaaccataaaacattgtcctgattcagaaagcagagctccccaaattctcagaagacagagtagcccaagttgtgggcctgtggcagagacttcttctattggaaatggtgatggtatttcaaaactgatgagtgaaaatacagaaggatcagcacaagcaccacagttaccacgaaaaaaggacaaacgagacttccctgtagtcagaaacccttacacgggacataaatacctctgtggagctttacagtctggaattgttttacttcagtggtatgagccaatgcagaaattcatgttgataaagcactttgattttcctttgccaagtcctttgaatgtttttgaaatgctggtgatacctgaacaggaataccctatggtctgtgtagctattagcaaaggcactgaatcgaatcaggtagttcagtttgagacaatcaatttgaactctgcatcttcatggtttacagaaattggtgcaggcagccagcagttagattccattcatgtaacacagttggagagagataccgttttagtgtgtttagacaaatttgtgaaaattgtaaatctacaaggaaaattaaaatcaagtaagaaactggcctctgagttaagttttgattttcgcattgaatctgtagtatgccttcaagacagtgtgttggctttctggaaacatgggatgcagggtaaaagcttcaagtcagatgagagtaatttcccgccttgtgactctcgtgtctccaaagaagaagcccaactccctttcccaacacctagcagctacggtgcagactcctccaaccagacttacgcacacaagtctcagtctgaaagagagcagcacaaggaagtacgtgctgtcctgaaccattgttctggcttggatggtggagaggagtctggcctttgtgggtag

SEQ ID NO: 20220 - DNA, 278 bp, Homo sapiens
  SIMILAR (3)..(71): 1001254mologous to Mus musculus Similar to mitogen-activated protein kinase kinase kinase kinase 5,accession number BC002309,Smith-Waterman Score=127.
tatgccttcaagacagtgtgttggctttctggaaacatgggatgcagggtaaaagcttcaagtcagatgagagtaatttcccgccttgtgactctcgtgtctccaaagaagaagcccaactccctttcccaacacctagcagctacggtgcagactcctccaaccagacttacgcacacaagtctcagtctgaaagagagcagcacaaggaagtacgtgctgtcctgaaccattgttctggcttggatggtggagaggagtctggcctttgtgggtag

SEQ ID NO: 20221 - DNA, 3092 bp, Homo sapiens
  SIMILAR (962)..(1405): 781254mologous to Homo sapiens KHS1,accession number U77129,Smith-Waterman Score=545.
gcggctgagtggcggcggcggcgacggcaaacccggagctgccggccggcgcgcgggaggaggacgcgggtgcggtctaggaagtaggtcccgggctccgcgctcaacaaagacggggccgcccccattagacggagctgcgggcggaggctccatgttgggaagcggcgccgttcgtgcttgttagcgggaatccgggagccgcggggtgagctggcgggggccgggccctaagtgaagatggaggccccgctgcggcctgccgcggacatcctgaggcggaacccgcagcaggactacgaactcgtccagagggtcggcagcggcacctacggggacgtctataaggccagaaatgtacacacaggagagctggctgcagtaaaaatcattaaattggagcctggagatgatttttctttgattcaacaagaaatatttatggttaaagaatgtaaacattgtaacatcgttgcctactttgggagttatcttagtcgggaaaaactatggatttgtatggaatactgtggtggcggatcacttcaagatatttaccatgttactggaccattatcagaattgcaaatagcctatgtatgcagagaaaccttacagggtcttgcctatttgcatactaaaggcaaaatgcatagagatatcaaaggtgctaatattttattgacagaccatggcgatgtaaaattagctgactttggtgtggctgcaaaaataacagctaccattgcaaaacgaaaatctttcattggcaccccttactggatggccccagaagttgcagcagtagagaagaatggtggctacaaccaactctgtgatatctgggcagtaggaataacagcaattgaacttggagaacttcagccacctatgtttgatctccacccaatgagggctctcttcttaatgtcaaaaagtaattttcagcctccaaaactaaaggacaaaacaaaatggtcatcaacattccataattttgtcaaaatagcactaaccaaaaacccaaaaaaaagaccaacatgcttgaaagacttctgacatcacaccttttgttgcacagccaggtctctctagagccctagcagttgaactgttagacaaagtgaacaatccagataaccacgcacattacactgaagcagatgacgatgactttgagccccatgcaatcattcgtcataccattagatctacaaacaggaatgccagagctgaacggacagcttcagaaataaattttgacaaattacaatttgaacctcctctgagaaaagaaacagaagcacgagatgaaatgggattgtcatcagacccaaatttcatgttacagtggaatccttttgtttgatggtggcaaattactggcaaatcaacctcaaaacgtgtcaataccacctcccctacctcctaagccaaggataagcagttaccctgaagacaactttccggatgaagaaaaagcatcaaccataaaacattgtcctgattcagaaagcagagctccccaaattctcagaagacagagtagcccaagttgtgggcctgtggcagagacttcttctattggaaatggtgatggtatttcaaaactgatgagtgaaaatacagaaggatcagcacaagcaccacagttaccacgaaaaaacgacaaacgagacttccctaaaccagccatcaatggccttccacccaccccaaaagttctgatgggagcatgcttttcaaaagtttttgatggctgtcctttgaaaattaattgtgcaacatcctggatacatcctgatacaaaagatcagtacattatttttggaactgaagatggtatttacacactgaatctcaatgagctacatgaggcaacgatggaacagttatttccacggaagtgtacttggctgtatgttatcaataatactttaatgtcattatcagaaggaaaaacctttcagctctactctcacaatcttatagctttgtttgaacatgccaaaaaaccagggttaggctgccccatatttcaaactcacaggtttccagaccgaatactaccaagaaaattcgctttaacaacaaagattcctgatacaaaaggctgccacaaattgttgcatagtcagaaacccttacacgggacataaatacctctgtggagctttacagtctggaattgttttacttcagtggtatgagccaatgcagaaattcatgttgataaagcactttgattttcctttgccaagtcctttgaatgtttttgaaatgctggtgatacctgaacaggaataccctatggtctgtgtagctattagcaaaggcactgaatcgaatcaggtagttcagtttgagacaatcaatttgaactctgcatcttcatggtttacagaaattggtgcaggcagccagcagttagattccatttcatgtaaccaccagttgggagagagataccgttttagtgtgtttagacaatttggtgaaaattgtaaatcttacaaggaaaattaaaatccaagtaagaaactggcctctgagttaagttttgattttcgcattgaatctgtagtatgccttcaagacagtgtgttggctttctggaaacatgggatgcagggtaaaagcttccaagtccagatggaggttacccccagggggatttccagatggaaaccaggagttttcccgcttattaggatcagaccagggttgtcggttttggaaagtaggccaacagaaaatccttactgcacacagcaatctctacatcttggctggacatgaaaatagttactaagcaacagaaactgatctcaaatgacaggaaaatgaatatactccattgaaaggaaaaataaggaaattcaatacaaactgcactatgatttgctttaactattatgggttatattggcaaatggatctgtactttaggggtaggaattcaatattttctggcagctgggaaacagctaagtctatcctccttggccactggtgtggtggggttatatccaagttttgccttaattaaaagctatgagacaaatagtcctctagttccaggaaaaaaaaaa

SEQ ID NO: 20222 - DNA, 389 bp, Homo sapiens
  SIMILAR (334)..(375): 421254mologous to Canis familiaris tumor necrosis factor alpha, TNF-alpha,accession number S74068,Smith-Waterman Score=35.
  misc_feature (1)...(389): n = a,t,c or g
nnnnnnnnnnnnnnnnnnnnnnnnnnnnnnnnnnnnnnnnnnnnnnnnnnnnnnnnnnnnnnnnnnnnnnnnnnnnnnnnnnnnnnnnnnnnnnnnnnnnnnnnnnnnnnngaactactatcttttattgtcttcttcactatcccccactaaagcaggttcctggtgggcaggaactcctccnnnnnnnnnnnnnnnnnnnnnnnnnnnnnnnnnnnnnnnnnnnnnnnnnnnnnnnnnnnnnnnnnnnnnnnnnnnnnnnnnnnnnnnnnnnnnnnnnnnnnnnnnnnnnnnnnnnnnnnncaaggtgctcaataaatagatctagctacagtagtgttccccactggtcccctgtaccttgatgccggacaaagcgtacgcgtggt

SEQ ID NO: 20223 - DNA, 489 bp, Homo sapiens
  SIMILAR (234)..(350): 1001254mologous to Homo sapiens 13-MAR-1987 cDNA encoding human pre-transforming growth factor-beta-1 (pre-TGF-beta- 1),accession number Q03301_cd1,Smith-Waterman Score=208.
tttgatgtcaccgagttgtgcggccagtggttgagccgtggaggggaaattgagggctttcgccttagcgcccactgctcctgtgacagcagggataacacactgcaagtggacatcaacgggttcactaccggccgccgaggtgacctggccaccattcatggcatgaaccggcctttcctgcttctcatggccaccccgctggagagggcccagcatctgcaaagctcccggcgccgtgctgcgtgccgcaggcgctggagccgctgcccatcgtgtactacgtgggccgcaagcccaaggtggagcagctgtccaacatgatcgtgcgctcctgcaagtgcagctgaggtcccgccccgccccgccccgccccggcaggcccggccccaccccgccccgcccccgctgccttgcccatgggggctgtatttaaggacacccgtgccccaagcccacctggggccccattaaagatggagagaggaa

SEQ ID NO: 20224 - DNA, 711 bp, Homo sapiens
  SIMILAR (1)..(339): 981254mologous to Homo sapiens 13-MAR-1987 cDNA encoding human pre-transforming growth factor-beta-1 (pre-TGF-beta- 1),accession number Q03301_cd1,Smith-Waterman Score=564.
atgcggctgctgccgctgctgctaccgctgctgtggctactggtgctgacgcctggccggccggccgcgggactatccacctgcaagactatcgacatggagctggtgaagcggaagcgcatcgaggccatccgcggccagatcctgtccaagctgcggctcgccagccccccgagccagggggaggtgccgcccggcccgctgcccgaggccgtgctcgccctgtacaacagcacccgcgaccgggtggccggggagagtgcagaaccggagcccgagcctgaggccgactactacgccaaggaggtcacccgcgtgctaatggtggaaacccacaacggtgagctcggaggggcaggggagccgggaggggggcccccagggggcgccggagtgccggggccacgggtaggaagtgactggcagaagaaactggctggaggaagaggacaccccggggcaaagggaacctccacggagaagaactgctgcgtgcggcagctgtacattgacttccgcaaggacctcggctggaagtggatccacgagcccaagggctaccatgccaacttctgcctcgggccctgcccctacatttggagcctggacacgcagtacagcaagccgctgcccatcgtgtactacgtgggccgcaagcccaaggtggagcagctgtccaacatgatcgtgcgctcctgcaagtgcagctga

SEQ ID NO: 20225 - DNA, 2773 bp, Homo sapiens
  SIMILAR (1708)..(2067): 321254mologous to Homo sapiens Human transforming growth factor-beta cDNA,accession number R03750,Smith-Waterman Score=88.
ctgcagccttgacctcccaggatcaagtgatcctcccaccttagcctccagagtagctgggaccacaggtgtacattttttaaaagtgttttgtagagatagggtctcactatgttacccaggctggtctcaaatgcctggattcaagtatcctcccatctctgcctcccaaaagtgctaggattacaggcgtgagcaccccgcctggcctgaactactatcttttattgtcttcttcactatcccccactaaagcaggttcctggtgggcaggaactcctcccttaacctctctgggcttgtttcctcaacctttaaaatgggtgttatcagagtccctgccatctcagagtgttgctatggtgactgaatgagttcattaatgtaaggcacttcaacagtgcccaaggtgctcaataaatagatctaactacagtagtgttccccactggtcccctgtgccttgatgccgggcaaaggaatagtgcagacaggcaggaggaggcagagagggagagagagggagtgggagtgggggaacgtcagggatggagaccccaggcaggcgcccaatgacacagagatccgcagtcctctctccatctttaatggggccccaggtgggcttggggcacgggtgtccttaaatacagcccccatgggcaaggcagcgggggcggggcggggtggggccgggcctgccggggcggggcggggcggggcgggacctcagctgcacttgcaggagcgcacgatcatgttggacagctgctccaccttgggcttgcggcccacggtagtacacgatgggcagggggttccagcgtctgcggcaacgcaaaagggcgccgccgagccggcggtgtattattctggtttatacaggggccaagaccttgtctatatctgcgtgtcacagtctccaatatataaggggcagggcccgagggcagaagttggcatggtagcccttgggcctcgtggatccactttccagccgagagtccttgcggaagtcaatgtacagctgccgcacggcagcagttcttctccgtggaagctgaagcaatagttggtgtccagggctcggcggtgccgggagctttgcagatgctgggccctctccagcgggggtgggccatgagaagcaggaaagggccgggttcatgccatgaatggtggccaggtcacctcgggcggccggtagtgaacccgttgatgtccacttgcagtgggttatccctgctgtcacaggagcagtggggcgctaaggcgaaagccctcaatttcccctccacggctcaaccactgccgcacaactccggtgacatcaaaagataacccactcttgcgagtccgctggtgccagccagccggtttgctgaggtatcgccaggaattgttgctgtatttctggtacagctccacgtgctgctccacttttaacttgagcctcctcagcagacgcagctctgcccgggagagcaacacgggttcaggtaccgcttctcggagctctgatgtgttgaagaacatatatatgctgtgtgtactctgcttgaacttgtcatagatttcgttgtgggtttccaccattagcacgcgggtgacctccttggcgtagtagtcggcctcaggctcgggctccggttctgcactctccccggccacccggtcgcgggtgctgttgtacagggcgagcacggcctcgggcagcgggccgggcggcacctccccctggctcggggggctggcgagccgcagcttggacaggatctggccgcggatggcctcgatgcgcttccgcttcaccagctccatgtcgatagtcttgcaggtggatagtcccgcggccggcgggccaggcgtcagcaccagtagccacagcagcggtagcagcagcggcagcagccgcagcccggagggcggcatgggggaggcggcgccccccggcactgccgagagcgcgaacagggctggtgtggtggggaggccccgaacctgcaggggctgggggtctcccggcaaaaggtaggagggcctcgagggaaagctgaggctcctcagggagaagggcgcagtggtggaggggaggcttggaccgggggtgtctcagtatcccacggaaataacctagatgggcgcgatctggtaccagaaggtgggtggtcttgaataggggatctgtggcaggtcggagagagatccgtctcctggaggagaaagggtctaggatgcgcgggggctcaggagacaggccggggatgaaggcggcgtgcagggggtgcgcccgaggtctggggaaaagtctttgcgggaggccgggtcggcgactcccgagggctggtccggaatgggggcgcctgagggacgccgtgtagggggcagggagggagcaagcgtccccggcggcaaagggaggcggtctggggtccccaagtcctgcctcctcgcggggcagcgtcgcgccaagaggtccccgcgcctccggctcccagcggcaacggaaaagtctcaaaagtttttttcctcttctcccgaccagctcgtccctcctcccgctcctcctccccctcctccccgcagtggcgggggcggcggcggctcgtctcagactctggggcctcaggctgctcctcggcgactccttcctccgctccgggccgaggccggccccgcgggcggctcagagccggggggggtgccccggacggggcgtcccccctgcccccggccggggccctcgctgtctggctgctccgcggagggaggt

SEQ ID NO: 20226 - DNA, 418 bp, Homo sapiens
  SIMILAR (33)..(416): 981254mologous to Homo sapiens similar to GenBank Accession Number AC021163,accession number AF283769,Smith-Waterman Score=663.
  misc_feature (1)...(418): n = a,t,c or g
gatggtccagttccatttcaccaacaaggtgtctggtgtctctcaaaggcctctaccgcatcatgggcaacggcttcgcgggctgcgtgcacttcccccacacggcgccctgtgaggtgcgcgtgctcatgctcctgtactcgtccaagaagaagatcttcatgggcctcatcccctacgaccagagcggcttcgtcaacggcatccggcaggtcatcaccaaccacaagcaggtccagcagcagaagctggagcagcagcagcgaggaatggggggacagcaggcacccccagggctggggcccattctggaggaccaagccaggccctcacagaatctgctccagctccgcccaccgcagccccagcctcagggtaccgtaggggcctctggggccacggngcagccccagcccca

SEQ ID NO: 20227 - DNA, 382 bp, Homo sapiens
  SIMILAR (1)..(315): 981254mologous to Homo sapiens PTOV1,accession number AF238381,Smith-Waterman Score=551.
ttcgcgggctgcatgctgttcccccacatctccccctgtgaggtgcgcgtgctcatgctcctgtactcgtccaagaagaagatcttcatgggcctcatcccctacgaccagagcggcttcgtcagtgccatccggcaggtcatcaccacccgcaagcaggcagtgggacctggtggtgtcaactcaggcccagtccagatcgtcaacaacaagtttctggcatggagtggtgtcatggagtggcaggagcccaggcctgagcccaacagtcggtccaagaggtggctgccatcccacgtctacgtgaaaccagggggagatcctgaggaccgagcagtggccaaggaagctgtacatgcagcttcatcccgcagcagctgct

SEQ ID NO: 20228 - DNA, 2370 bp, Homo sapiens
  SIMILAR (1208)..(963): 351254mologous to Homo sapiens similar to GenBank Accession Number AC021163,accession number AF283769,Smith-Waterman Score=113.
tttttttttttttttatcatcaaatcggatctttactcaactatggtgaatgccatggaacataatacaaacatggatgttactggagtttatatttttaaattcaaaattgaaaaaaatacaaattgaaaaatagaaatatttaattattaaaattttctctttcataattctttttgcgcctttgagttgaagccaaaaggctgggcgtcttctttttccacaccgaggatgtcagtgtcagggcctcgggtgggcacggtgggggacggggcagtttaggaattcagccttgaatccttcaactgggaaccgatgtttaatttgattcaggttccgtaacgggaaaacagctgtttcacaagcgtgggggtactccccaaaccacagatattccagggaccaactaactgggagataggttgtagggatcttcaccatctttcacacagacttgtatttagggacccggcgccgtattgcactgtaggttcaattacctatttatgggtctgcattcacacaaggaaaccatctgcccaaccaagggcaaactggacaatgtctgttccttctcatgagtctggattccgagagcctttgggggaatttggtcttcaaccccaggacgtaggtgaatacagtccgggccacctctttcatttctgaaagccgactgcagcacaggaaagagctaaaggttttttttccttgccggtggattccccaggaccaagcatacaccatcatacattcaagtagctgtttgtggacatccacctccaggagagaccaccctgcgtccaagcctgtctggatccccctgccctcgggacgtctctgaggacatcttcaggtccctcaccttgccacgtcccaaacctgttccctgctgggtatctatcctggcagtggagcccgagggggaagttgtgcgggccggactgggcaggtggtggatgcaggagtgggggccccaactggggctgcccaggccctggtgcggcggaggcagcagcgcaggagcccctggtggcggtggtgggttgaggaggaggcttgcagctgagggttggccccagggttctggggccgaaggatgggtccagggggggtgggccagaagctgctccaggagggccttgaggggcacctggcgggggctgggcagtaccttggggctggggctgccccgtggccccagaggcccctacggtaccttgaggctggggctgcggtgggcggagctgaagcagattctgtgagggcctggcttggtcctccagaatgggccccagccctgggggtgcctgctgtccccccattcctcgctgctgctgctccagcttctgctgctggacctgcttgtggttggtgatgacctgccggatgccgttgacgaagccgctctggtcgtaggggatgaggcccatgaagatcttcttcttggacgagtacaggagcatgagcacgcgcacctcacagggcgccgtgtgggggaagtgcacgcagcccgcccctcggccccccatgccctggatcacgaagccgttgcccatgatgcggtagaggcctttgagagactccagtccttgttggtgaaatggaactggaccatccttgagttccggaacaaaggcccagggtggtctacagttctcgccatgattcacgtagacctggcagggcagtgaccgcgtcagcttggtgttggcatccactgaggcaggtttgggtttcatggacggtgccccggctgtgccgtgggagccaggccggagccaggggccacagtggagaccagatgggctgggaagcaggtggtggcttgggggcgccagggggtcctgggggagttggggagctggggcctggctgaaggggggacccactccgggagcagttgttggagaggggtgatgggcgagaagcgagggcccagcccagccttctggttttggcagcctccactgcattctgcgcggccacctgagctgcactcaggtcccgggaaccaggcagcacgagtccccgaaccagcacatgtgcctcgggtcctggctcacatctgtcggaggctgcagcggctccacaaggccgggggggctgccttctcaaacagaagccgaagcgcaggcagctccggggagacacaatggagaagtggatcccccgcacaactgctgtgtggctggacggcaccagccctccccaatctgctgcacaaattctcagttgtgcatccagagtacgtggtgctctcaacagcaggcaacagtatgggggtgagttgcagatgaggaggcagacccggtgcgtctggccctgcaggggcagagcggtcagcccccaggttgccatcatccccat

SEQ ID NO: 20229 - DNA, 1515 bp, Homo sapiens
  SIMILAR (883)..(1509): 981254mologous to Homo sapiens neutral sphingomyelinase,accession number AJ222801,Smith-Waterman Score= 1106.
atgagtttcagtcaagattcttggtgccagcattaccaagctcctctgattgatcgaaggcgaaaagacggagcccgcccggccaggacacgccagccccttcctcggccggtggggcctcgacccccgccgcctcgaggaggcgcggcgcctgcagtccacgcggccgagagcgggttagcggggagggccgtccacgacggaggtttctctgtggttacctcagcggcgctcttcgcaatattgaagttggggcagctgaagagccccaccaccttcacctgcagcggccgctccggcagcgacggcgagccgcacctagcgtgcgggggcccgcacggctgcggccttgccatggccgcgcccggggacgcccggggcattccgtacttgagcaagcaccgggccgaccgcatgaggcgcctgggagactttctgaaccaggagagcttcgacctggctttgctggaggagggcttggctttcagcggaatcattggcagtggcctctgtgtcttctccaaacatccaatccaggagcttacccagcacatctacactctcaatggctacccctacatgatccatcatggtgactggttcagtgggaaggctgtggggctgctggtgctccatctaagtggcatggtgctcaacgcctatgtgacccatctccatgccgaatacaatcgacagaaggacatctacctagcacatcgtgtggcccaagcttgggaattggcccagttcatccagtgtgtgagcctgggcttgaaatgggaagtgggatgggacccaggggctgagggtgaacaaggccccagtcatggggaagagctggtgatggaagaactcccgcctcaccaacctggttcccccagccacacatccaagaaggcagacgtggttctgttgtgtggagacctcaacatgcacccagaagacctgggctgctgcctgctgaaggagtggacagggcttcatgatgcctatcttgaaactcgggacttcaagggctctgaggaaggcaacacaatggtacccaagaactgctacgtcagccagcaggagctgaagccatttccctttggtgtccgcattgactacgtgctttacaaggcagtttctgggttttacatctcctgtaagagttttgaaaccactacaggctttgaccctcacaggggcacccccctctctgatcatgaagccctgatggctactctgtttgtgaggcacagccccccacagcagaaccccagctctacccacggaccagcagagaggtcgccgttgatgtgtgtgctaaaggaggcctggacggagctgggtctgggcatggctcaggctcgctggtgggccaccttcgctagctatgtgattggcctggggctgcttctcctggcactgctgtgtgtcctggcggctggaggaggggccggggaagctgccatactgctctggacccccagtgtagggctggtgctgtgggcaggaggtcaatggcttatatag

SEQ ID NO: 20230 - DNA, 1696 bp, Homo sapiens
  SIMILAR (364)..(837): 811254mologous to Homo sapiens neutral sphingomyelinase,accession number AJ222801,Smith-Waterman Score= 646.
agcggccgcgaccgccggggacgagcttggaggaaaaggaaccgggagccgcccacccgggggcgctctccggacccccagggtcctagcgcgcggcccttaccgagcctgggcgcccggatttcggcagcggatcgcctttccgggttggcggcccgcctgattgggaacagccggccggttgccggcgcgaacgcgggagtcgggcccgacctgagccacgcgggcttggtgcccacctgtgcgcgccgcctgcgaagaaagaacggtctagggagaaggcgccgccggccgcccccgtccccaccgcggccgtcgctggagagttcgagccgcctaacgacccttggaacttcccaaccattgaagttcaactttttcccttgcgacttgcggatttttcaaaccttcaactgcttggggcatttccggtactttgagcaaagcaccggggccgaccgcatgaggcgctttgggagacctttctgaacccaggagagcttcgacctggctttgctggaggaggtgtggagtgagcacgacttccagtacctgagacagaagctgtcacctacctacccagctgcacaccacttccggagcggaatcattggcagtggcctctgtgtcttctccaaacatccaatccaggagcttacccagcacatctacactctcaatggctacccctacatgatccatcatggtgactggttcagtgggaaggctgtggggctgctggtgctccatctaaatggcatggagctcaacgcctatgtgacccatctccatgccgaatacaatcgacagaaggacatctacctaacacatttggtggggccaagcttgggaattggcccagttcatccaccacacatccaagaaggcagacgtggttctgttgtgtggagacctcaacatgcacccagaagacctgggctgctgcctgctgaaggagtggacagggcttcatgatgcctatcttgaaactcgggacttcaagggctctgaggaaggcaacacaatggtacccaagaactgctacgtcagccagcaggagctgaagccatttccctttggtgtccgcattgactacgtgctttacaaggcagtttctgggttttacatctcctgtaagagttttgaaaccactacaggctttgaccctcacagtggcacccccctctctgatcatgaagccctgatggctactctgtttgtgaggcacagccccccacagcagaaccccagctctacccacggacccagcagagaggtcgccgttgattgtgtgtgcttaaaggaggccttggacgggagcttgggtctgggcatggcttcaggctcgctggtgggccaaccttcgcatagctatgtgattggcctggggctgcattctcctggcactgctgtgtgtcctggcggctggaggaggggccggggaagctgccatactgctctggacccccagtgtagggctggtgctgtgggcaggtgcattctacctcttccacgtacaggaggtcaatggcttatatagggcccaggctgagctccagcatgtgctaggaagggcaagggaggcccaggatctgggcccagagcctcagctctatgccctactctctggggcagcaggagggggacagaactaaagaacaataaagcttggccctttaaaaaaaaaaaaaaaaaa

SEQ ID NO: 20231 - DNA, 544 bp, Homo sapiens
  SIMILAR (348)..(386): 761254mologous to Halocynthia roretzi HrPET-1,accession number AB029333,Smith-Waterman Score=60.
  misc_feature (1)...(544): n = a,t,c or g
gcgcgcccggccggggaaagcctgtcgggaacccgggagagcctggcccagggcccgacgccgcaaccaccgacgaactcagctctctcgggtctgactcggaggccaacggttcgcnatgcgccgcatcgacaagttcggcttcatcgtgggctcgcaggggccgagcnntntcgtctgcggtgccaaaagggcatcccgccttctctgcggggccgtgcttggcagtacctgtcaggaggcaaggtgaagttacagcagaaccctggaaagtttgacnaagctggacatgtcccctggggacccaangtggctggacgtgattgagcgtgacctgcaccggcagtttcccattccatgagatgtttgtgtcccggggggccacggcagcaggacctattccgtgtgctgaangcctacacgctgtaccggcccgaaggaggntactgcaaggcncaggcgcccattgccgctgtcttgctcatgcatatgncttgctgaacaagccttctggtgcctggtacagatctgtgagaagtacttg

SEQ ID NO: 20232 - DNA, 434 bp, Homo sapiens
  SIMILAR (117)..(326): 391254mologous to Homo sapiens Human secreted protein, SEQ ID NO: 7541,accession number G03460,Smith-Waterman Score=117.
tgcgctgcaggaattcggcacgagctcaggcggcgcgcgcggctgggatggcgaacagcaacggagagaatgggccgtgcgtgcccgcggccggggaaagcctgtcgggaacccggcagagcctgagccagggccctgacgccgcaaccaccgacgaactcagctctctcgggtctgactcggaggccaacggcttcgccgagcgccgcatcgacaagttcggcttgatcgtgggctcgcagggcgccaagggcgcgctggaggaagtacccctggaggtgctgaggcagagggagtccaagtggctggacatgctcaagccatggtggtggccgctgcaagagatgcatgtcccccacagcatgtgcccccgaaggactcagcccccaaggactcagcccctcaggatttggctccccaggtctcagcccacc

SEQ ID NO: 20233 - DNA, 510 bp, Homo sapiens
  SIMILAR (132)..(494): 451254mologous to Halocynthia roretzi HrPET-1,accession number AB029333,Smith-Waterman Score=273.
cccacgcgtccgggcggctgacgtggccgctggaagctcatgcggcggccgcggttgggatggctaagagcaacggagagaatgggccgcgcgcgcccgcggccggggaaagcctgtcgggaacccgggagagcctggcccagggccccgacgccgcaaccaccgacgaactcagctctctcgggtctgactcggaggccaacggcttcgccgagcgccgcatcgacaagttcggcttcatcgtgggctcgcagggcgccgagggcgcgctggaggaagtccccctggaggtgctgaggcagagggagtccaagtggctggacatgctcaacaactgggacaaatggatggccaagaagcacaaaaagattcgtctgcggtgccaaaagggcatcccgccttctctgcggggccgtgctttggagtacctggcaggagggcaggtgaagttacagcagaaccctggaaagtttgacgagctggacatgtcccctggggaccccaagtggg

SEQ ID NO: 20234 - DNA, 2086 bp, Homo sapiens
  SIMILAR (277)..(1305): 541254mologous to Halocynthia roretzi HrPET-1,accession number AB029333,Smith-Waterman Score=974.
  misc_feature (1)...(2086): n = a,t,c or g
atggcgaagagcaacggagagaatgggccgcgcgcgcccgcggccggggaaagcctgtcgggaacccgggagagcctggcccagggccccgacgccgcaaccaccgacgaactcagctctctcgggtctgactcggaggccaacggcttcgccgagcgccgcatcgacaagttcggcttcatcgtgggctcgcagggcgccgagggcgcctccatcctgggacagacagtcccttctcctcatggaagggtcggagaagggccccctatccgctcatacacagcttcctccactggcactggcaacaggctggaggaagtacccctggaggtgctgaggcagagggagtccaagtggctggacatgctcaacaactgggacaaatggatggccaagaagcacaaaaagattcgtctgcggtgccaaaagggcatcccgccttctctgcggggccgtgcttggcagtacctgtcaggaggcaaggtgaagttacagcagaaccctggaaagtttgacgagctggacatgtcccctggggaccccaagtggctggacgtgattgagcgtgacctgcaccggcagttcccattccatgaaatgtttgtgtcccgggggggccacgggcagcaggacctattccgtgtgctgaaggcctacacgctgtaccggcccgaggagggctactgccaggcccaggcgcccattgccgctgtcttgctcatgcatatgcctgctgagcaagccttctggtgcctggtacagatctgtgagaagtacctgcccggctactacagcgagaaactggaggcgatccagctggacggggagatccttttctcgctgttgcagaaggtgtcgccggtggcccacaagcacctcagccgtcagaagatcgacccgctcctctatatgacagaatggttcatgtgcgccttctcccgaaccttgccctggagctctgtgctgcgtgtctgggacatgttcttctgtgaagagaaaccccaaaaagcttccttgtacttactgcccatcccccatgcaggggtcaagatcatcttccgggtggggctggtgctgctgaagcacgcgctgggctcccctgagaaggtcaaagcctgccagggccagtacgagaccatcgagcgactgcggagcctcagccccaagatcatgcaggaggcctttctggtccaggaggtggtggagttgcccgtgacagagcgccagattgagcgcgaacacctcattcagctgcggcgctggcaggagacccggggtgagctgcagtgccgctccccgcccaggctgcatggtggccaaagctatcttggatgcagaacctggtccccggcctgccctacaaccttcaccatccatccgcctgcccctagatgcccccctccctggctgcaaagccaagcccaagccacccaagcaggcccagatagagcagcggatacagatgaaggggagagggcagctggagaagcccccagccccaaatcaagccatggtggtggccgctgcagggagatgcatgtcccccacagcatgtgcccccgaaggacttcaggcccccaaggacttcaggcccttcaggatttgggttccccagggtcttcagcccaccaccgcttcccagggagagctttgacgtcccaagagagttgagggacacctacttgtaaccctggcagctaaggcctccagggcggggtctcccataataactaccacggttccatgaactgacattccacatcctgccccaccctctgagggccaagctgccctggccactgggctgggctggagtctggctggtccaacacagattctgcctggtccaacacagatatctgcctgagcctccttatttattttctttacaagtggcaactncaaggctggcccagccagggcaggcagaagctaggccctggggggtggggcctccttcagccccctcctcctgggggatgctccccagggttagggtgctggtgtgaggggaaagggtggggtgttctttgtgtaaaatagaaacatggttttgtacagaaataaacagccttgtatagagaaa

SEQ ID NO: 20235 - DNA, 246 bp, Homo sapiens
  SIMILAR (127)..(246): 1001254mologous to Homo sapiens 11-JUN-1997 Human PxTE cDNA,accession number X77452_cd1,Smith-Waterman Score=202.
atgacggtccataataagctcatgaaggggcatttggagcagccacgacactcagtgcacccttgtgtggggcagccctgccctgggccagaccctttgcaagaagtccacttggaggttgggcatggtggctctcgggggctggtccatgggcggctgtggcgtcaggatggagtcctagctgtgacctgtgcccaggagggcgtgatccgagtgaagccccaggtctcagagagcaagctgtag

SEQ ID NO: 20236 - DNA, 382 bp, Homo sapiens
  SIMILAR (70)..(381): 911254mologous to Homo sapiens thioesterase II,accession number X86032,Smith-Waterman Score=512.
agtcaggttctgtgtatgtctccgcgttttacgctgagcgggtgggcccggcctgcagcattgaactaaatgtcttcccctctggccccaaaaaatgggcagggctgtggcgaccgcggcgatccccctggggacctccgttgcggcttggtcacgaccgtgctcaaccttgagccgatggacgaggatctcttcaaaggaaggcattactgggtaccgggcaagaggctgtttggtggtcatatcgtgggccaagccctggtggctgcagccaagtctgtgagtgaagacgtccacgtgcactccctgcactgctactttgttcgggcaggggacccgaagctgccagtactgtaccaagtggagcggacacgaacagggt

SEQ ID NO: 20237 - DNA, 438 bp, Homo sapiens
  SIMILAR (17)..(205): 1001254mologous to Homo sapiens HIV-Nef associated acyl CoA thioesterase,accession number AF014404,Smith-Waterman Score=332.
agaagatgggcagggctgtgagaccctcattgaccagtatttaagggaccctaacctccaaaagaggtacccattggcgctcaaccgaattgctgctcaggaggtccccattgagatcaagccagtaaacccatcccccctgagccagctgcagagaatggagcccaaacagatgttctgggtgcgagcccggggctatattggtggctctcgggggctggtccatgggcggctgtggcgtcaggatggagtcctagctgtgacctgtgcccaggagggcgtgatccgagtgaagccccaggtctcagagagcaagctgtagccagaggtaccagcttcgcctggggcttcaagaacctcccatctatccccattcctgagacaggagttacagtcccttttggccctcacatccaataaagagactgataccactgg

SEQ ID NO: 20238 - DNA, 406 bp, Homo sapiens
  SIMILAR (58)..(156): 961254mologous to Homo sapiens Human protein b which interacts with HIV nef protein,accession number R88641,Smith- Waterman Score=193.
ggcaatctgccggaagagtcaggttctgtgtatgtctccgcgtcttccgcggagcgggtgtgcagggcctgcagcattgaactagatgtcgtccccgcaggccccaaaagatgggcagggctgtggcgaccgcggcgatccccctggggacctccgtagcgtcttggtcacgaccgtgctcaacctcgagccgctggacgaggatctcttcaggtagccggcagctcctgcccagcatcccctcctttagggcagaaacttgatcttgactgccgccgcccggggcccctggctccgggactagtatggctctgcgtgggatgcaccctctgccacgattaggagagaactcgcccccaacagagctggcctctctgctctggcttcctcccttcctctccgagct

SEQ ID NO: 20239 - DNA, 742 bp, Homo sapiens
  SIMILAR (653)..(366): 371254mologous to Ichthyomyzon unicuspis vitellogenin,accession number M88749,Smith-Waterman Score=136.
atgagtgaggccacgtcagtggttgatgtcgaccctggccctaggcccattgatatgactggtcatgtgtctgcagaacggagccccccacctgatgggcagtggggcagtcagctcctggcgcggcagctgcaagatttctggaagaagtcccggaacaccttggcaccccagcggctgctcttcgaagtgaccagcgctaacgttgtcaaggacccgccctccaatacgtggtttgtcgatagcaccgtaatgttgaataccacagacgatcgtttaaggagcaatcttagactcaagtacagaagccatctgacaggaaatagactacagtcgcagaagtgtgaccgccgggggcgatggcgctcccggctcctgcaccggctgcggcacgccttggccggcgacggccccggggaggcggcggccagtccagaggccgagcagtttccggagagctcagagctggaggacgacgacgccgagggcctgtcctcccgactcagcggcaccctcagcttcaccagcgccgaggacgacgaggacgacgaggacgaggacgacgaggaggctggccctgaccagctgcccctcggggatgggacgtcaggagaagacgcagaacggagccccccacctgatgggcagtggggcagtcagctcctggcgcggcagctgcaggatttctggaagaagtcccggaacaccttggcaccccagcggctgctcttcgaagtgaccc

SEQ ID NO: 20240 - DNA, 2807 bp, Homo sapiens
  SIMILAR (335)..(1099): 461254mologous to Homo sapiens thioesterase II,accession number X86032,Smith-Waterman Score=370.
  misc_feature (1)...(2807): n = a,t,c or g
cttcccgggtcgacgatttcgagtcaggttctgtgtatgtctccgcgtcttccgcggagcgggtgtgcagggcctgcagcaattgaactagatgtcgtccccgcaagccccagaagatgggcagggctgtggcgaccgcggcgcttccccctggggacctccgtagcgtcttggtcacgaccgtgctcaacctcgagccgctggacgaggatctcttcagaggaaggcattactgggtaccggccaagaggctgtttggtggtcaagatcgtgggccaggccatgggtggctgcagcaacgtctgtgaagtgaagacgtccacgttgcactcccctgcactgctacttttgttccgggcaggggacccgaaagcttgccagtactgtaccaagtggagcggacacgaacaggggtcgaagcttcttcggttgcgctctgtgaaaggcccgtgaaacatgggaaagcccatcttcaatctgccaaggcctccttccagcaggccccagccaagccccattgcagcaccagttctccatgcccaantgttgccaacaacagaagagctggtttgaattgtgagaaccttatttgaccagtatttaagggaccctaacctccaaaagaggtacccattggcgctcaaccgaatttgctgctcaggaggtccccattgagatcaagccagtaaacccatcccccctgaggccagctgcagaggaatgggagcccaaacagatgttctggggtgcgagcccggggttattattggtaagagtaccccatggaagatggcattgctggcgtgggccgcctatatctccgaactatgccttcttgggcactgcacttgctgccctcacccagtggccaagcacaaggtgccacttccatggtcctccactggacccaatcccatgtgggttccacgcccccttccgagctgacccactggatgctctatgaatgcgagagcccctgggccgggggtttctcgggggttgggtccatgggcggctgtggcgtcaggatggagtcctagctgtgacctgtgcccaggagggcgtgatccgagtgaagccccaggtctcagagagcaagctgtagccagaggtnaccacgtctcgcctggggcttcaagaacctcccctctatccccattcctgagacaggagttacaatcccttttggccctcacatccaataaagagactgataccactggagtggctggcttttaattcccctgggccagacctgcagccttgccttcatcccttaactccaggactccaggggcagagtccctggccttcagccaagaggccttgccagcttgggggcccaccaacaagggaacattgcccccaacctgtgccacagccccccggctgtttataggctggagaggctgtgtcagacttccctgtactacacaagggcaaccccagccaaagctcaccctgagcctagctcaacagaagtttccttgatctgcttcacattctcttttggaacttctaggggctcccagcaccctctgcagcctcccagctattctgttctcatcaggtccttcccctgccttctggggcaacccctctcctcacagtggccttaaatctaggcaagggttagtccagcacctccttgatgagcaattctttgagactggggggtggtgtgggggtaaggcctgcctcctgcagggcttggagccgagcctctgattgacgtttgtccaggcccaggcgccaggagagccggacatgggcctccagaaagggtgccagcaaagggtggaggctcttgtccccaagcagctgcagggccttctcacagcatgcccgggcctctccagggtcttccagctcctggtggcacacggccagcccagccagggtcagcagggggcggtctgggccagagggggtgcccagctgggcttgcagctgccaggcattggcccagagtgccagagcctcacgatagaggccagtacaggtgaggctctgtgcccgccgcagctccggcagcacgaaagaagtcctgcaggtccggggcatggcgcagctcaggcactgcctgcaggtgacccaaaaactgctcaaaggcccggctacggcgggcaatggtctctgcagtaaaattccggcgcagccgcttacgggggaaggagatggcagccattgggccccggaattgccgctgcaggtttcggtgcagccgctcaaagtccgagtaacggcgagagatctgggctggctggcaatctggcggtcctgggccgatcacggcgagggtgtagagctgcagggagggtgggtgtcagggcaaatgcaagttgtccacgggcccgttccctccccatcctggtgccaaggtgttccgggacttcttccagaaatcctgcagctgccgcgccaggagctgactgccccactgcccatcaggtggggggctccgttctgcagacacatgaccagtcatatcaatgggcctagggccagggtcgacatcaaccactgacgtggcctcactcatcctcccagtgtgaggcaggacgtcgtcctcggcgctggtgaagctgagggtgccgctgagtcgggaggacaggccctcggcgtcgtcgtcctccagctctgagctctccggaaactgctcggcctctggactggccgccgcctccccggggccgtcgccggccaaggcgtgccgcagccggtgcaggagccgggaggccatggcaccctggggggagcgcgcgacgctgtgtaccggatcccggaggaggggtaccccagcccgg

SEQ ID NO: 20241 - DNA, 1704 bp, Homo sapiens
  SIMILAR (380)..(868): 401254mologous to Homo sapiens KDEL receptor,accession number X63745,Smith-Waterman Score=142.
  misc_feature (1)...(1704): n = a,t,c or g
agctccgccgccagctccagcctttgctccccctcccaaagtcccctccccggagcggagcgcacctagggtccctcttccggtccccccagcccagctacccggtgagaccaccaggctcggcgggcacccccccgccagcctgcctccctcccgctcagccctgccagggttccccagccatgaatctcttccgattcctgggagacctctcccacctcctcgccatcatcttgctactgctcaaaatctggaagtcccgctcgtgcgccggaatttcagggaagagccaggtcctgtttgctgtggtgttcactgcccgatatctggaacctcttcaccaactacatctcactctacaacacgtgtatgaacgtgggtctacatagcctgctccttcaccacggtctggttgatttatagcaaagttcaaaagctacttacgatggggaaccatggacacgttcaggagtgggagttccngggtcgtttcccacaggccattctgggcgtgtcctggtcaaatcatgacttcacccctctgggagatcctctgggaccttctccatctacctgggagtcagtgggccatctttgccgcagctgtttcatgggtgaggcaagaccgggcgagggcgggagacccattcaccagccacttacttgttttgcgctaaggcgtttaacccgcacgctctatctctttcaaactggaatctggcggctaccatttcggagggcttcttcgaccctcatcgccattgtggcaggccctggtccaagacagtcctcttactgcgatttcttcttacctctattattcaccaaagttcctaaaaggggaaaggaagtttgagttttgccggcataggccccggttcctctccatctcctctcctcgggcagcagcggggagggcaggagggaaggcgggcagaaagatgaagagcttttcccatcccaggggtgacttttttaaaaaccccacctctttgtgctcccccatcccgccctcctgcccgggtttaaaggggaacagtgcgaggatcccaggtctttggggagctcagagacttggggctgtttgtagttttttggccttttagacaaaaaaaaaaaaaatcttttccacctctttagtttttggattctgaatgactcggttttttttctacctctggtggcccccaatttttttataaagtggtttttgagtgtccctatggggcccggggcaagggtcccaagatctttttcccttcccccagggccccctcgggctcccctccccaagatccccaccccccagccccccactgggttgcccaaacacctaaatctgccggacaccccatctgcccccacctccctgcccatgggccattgaacccgcgaccccccactaaaattttttaggattcggggatatggggagaaaagggagggccaaggaaagggctccccctgattttttttcatagtaattttttttccccagagtttgaattttttgggtcttctcctgggttttttggcaaattatgggggggccgggggctcaagtgcgggaagggggctggcccgaaggatcccatggctctcacaccatgtttttgtacagaactgatggttgaatctttggttctcttgaaataaacagaagagaaatgaaacctttaaaaaaaaaaaacaagggcggccgct

SEQ ID NO: 20242 - DNA, 1359 bp, Homo sapiens
  SIMILAR (391)..(1353): 441254mologous to Homo sapiens beta-1,3-N- acetylglucosaminyltransferase bGnT-3,accession number AB049585,Smith-Waterman Score=724.
atgcccccgcgcgcgccgccggcctcagtttcccgggggcggatgggcgggcgggcgcggcggcggcggcgggagatgttcgcggtacgcggccccggacccgtgggggacgtcgaggggtctcggggcgccgcgctcagctccccggccccgcggccctggacaccgctccaggaccctggcggctgggaccccaggaagaaaaccgtctaccggagtctgtgcctggccctggccctgctcgtggccgtgacggtgttccaacgcagtctcacccctggtcagtttctgcaggagcctccgccacccaccctggagccacagaaggcccagaagccaaatggacagctggtgaaccccaacaacttctggaagaacccgaaagatgtggcccaggcctgggacgtgaccaccactaactgctcagccaatatcaacttgacccaccagccctggttccaggtcctggagccgcagttccggcagtttctcttctaccgccactgccgctacttccccatgctgctgaaccacccggagaagtgcaggggcgatgtctacctgctggtggttgtcaagtcggtcatcacgcagcacgaccgccgcgaggccatccgccagacctgggcgcgagcggcagtccgcgggtgggggccgagcgccgtgcgcaccctcttcctgctgggcacggcctccaagcaggaggagcgcacgcactaccagcagctgctggcctacgaagacgccctctacggcgacatcctgcagtggggctttctcgacaccttcttcaacctgaccctcaaggagatccacttcctcaagtggctggacatctactgcccccacgtccccttcattttcaaaggcgacgatgacgtcttcgtcaaccccaccaacctgctagaatttctggctgaccggcagccacaggaaaacctgttcgtgggcgatgtcctgcagcacgctcggcccattcgcaggaaagacaacaaatactacatcccgggggccctgtacggcaaggccagctatccgccgtatgcaggcggcggtggcttcctcatggccggcagcctggcccggcgcctgcaccatgcctgcgacaccctggagctctacccgatcgacgacgtctttctgggcatgtgcctggaggtgctgggcgtgcagcccacggcccacgagggcttcaagactttcggcatctcccggaaccgcaacagccgcatgaacaaggagccgtgctttttccgcgccatgctcgtggtgcacaagctgctgccccctgagctgctcgccatgtgggggctggtgcacagcaatctcacctgctcccgcaagctccaggtgctctga

SEQ ID NO: 20243 - DNA, 1826 bp, Homo sapiens
  SIMILAR (221)..(1771): 721254mologous to Homo sapiens Human flavin-containing mono- oxygenase 2,accession number W49699,Smith-Waterman Score=1745.
gaaatacattgggcttaaagtaaataagttactcctgttgacaacctgttcttgttcccactttaaagtaagactcggctattccctaaaagtacatccaattctatgaaattttagcaaatcattccaaggaaggtcagtctcatagttgtttgcagaatgaggatgagaaatatccatttcataaaaagactttcactctaaggtctaatttaagtagtgctgtgtggatgagggacttgagcccacttgctttgagagaactgaagatattggaggagtgtggaggttcaaagtaagtgagattttcttgggtcttgaacaggttgtgttgttatttcagggtgaatcacagttaatgtcctgtttcagtgactttccaatgcctgaagattttccaaacttcctgcataattctaaacttctggaatatttcaggatttttgctaaaaaatttgatctgctaaaatatattcagttccaggtattgtatttttggggaaatgggtttctctgcattagttcagctcatatttagatagaaaacactcagagcaacggcaaggagcagagtgctgtctttgacgcagttatggtttgcagtggccaccacattctacctcatatcccactgaagtcatttccaggtgagacccgctgggattcccagctttttggagtaggtttccaggtactttatatgtagtttgagggaaaacgcatcctggtgattggaatgggaaactcaggctcagatattgctgttgagctgagtaagaatgctgctcaggtgtgatgctctctgcttaccatgtacctggaggggaggaagtggggatgccatactggagattgggactcagtgttccacacccggtttcgttctatgctccgcaatgtactgccacgaacagctgtaaaatggatgatagaacaacagatgaatcggtggttcaaccatgaaaattatggccttgagcctcaaaacaagtagagttattttgcttttttaatggtatactcgttggtgagcaaagttgtctgaaggtgtctcaaggtgaaatctacagtgaaagagctcacagaaacttctgccatctttgaggatggaacagtggaggagaacattgatgtcatcatttttgcaacaggatatagtttctcttttcccttccttgaagattcactcgttaaagtagagaataatatggtctcactgtataaatacatattccccgctcacctggacaagtcaaccctcgcgtgcattggtctcatccagcccctaggttccattttcccaactgctgaacttcaagctcgttgggtgacaagagttttcaaaggcttgtgtagcctgccctcagagagaactatgatgatggacattatcaaaaggaatgaaaaaagaattgacctgtttggagaaagccagagccagacgttgcagaccaattatgttgactacttggacgagctcgccttagagataggtgcgaagccagatttctgctctctcttgttcaaagatcctaaactggctgtgagactctatttcggacccctgcaactcctattagtatcgccttgttgggcctgggcaatgggaaggagccaggaatgccatcttcacccagaaacaaagaatactgaagccactcaagactcgggccctgaaggattcatctaatttctcagtttcttttctgttgaaaaatcctggcccttcttgctgttgttgtggccttttttttgccaacttcaatggtcctagtcagcataatgctttgggctttattatcttgtcagtcactacctcctaaaaa

SEQ ID NO: 20244 - DNA, 200 bp, Homo sapiens
  SIMILAR (87)..(200): 1001254mologous to Homo sapiens meningioma-expressed antigen 11,accession number U73682,Smith-Waterman Score=193.
gacgagagaaaaagcttgctctaatgctttctggactaattgaagaaaaaagtaaactacttgaaaaatttagccttgttcaaaaagaggcaacctgtgaaaagctgaacaggtccaattctgaacttgaggatgaaatactctgtctagaaaaagagttaaaagaagagaaatccaaacattctgaacaagatgaattg

SEQ ID NO: 20245 - DNA, 1845 bp, Homo sapiens
  SIMILAR (1218)..(790): 971254mologous to Cloning vector pZC320 SopB,accession number U26464,Smith-Waterman Score=683.
ctagtcccaagcctctccactaccagggctgggtggcttcgccaggtagagcgccggcccctttaagagcaaacgacccggacacgtctgcgaagcttgcgcgaagaaggggaagtttgcggctgtccgcgcctccccgccttctcgcggctgcccggccgaaaccaaaccgaggggtggggtggcgaggacagggtacgtcgcaggcttgtgcgggtcgggctcggacctgcgctgcctcgggatgtaaagtataacaagagggtcgggatgggcagcgtaggcctgtgaggcctgcgggtgcccctgtcccccagctccccccgcagccggctccgcagtggtccactccggttgccgggtgcggattcgggttccggacccgaagctgtgtgttctccgccgtttattgtggcccccacaggccggggttactgtggcgaccacgaaagcagctttggcgcctgtcgtgccagctgcattaatgaatcggccaacgcgcggggagaggcggtttgcgtattgggcgccagggtggtttttcttttcaccagtgagacgggcaacagctgattgcccttcaccgcctggccctgagagagttgcagcaagcggtccacgctggtttgccccagcaggcgaaaatcctgtttgatggtggttccgaaatcggcaaaatccctttataatcaaaagaatagcccgagaataggttgagtgttgttcccatttggaacaaaagtccactattaaagacgtggactcccacgtcaaagggccgaaaaaccctctgtccaggttaagcaccattttatcgcccttatacaatactgtcgctccaggagcaaactgatgtcgtgagcttaaactagttcttgatgcagatgacgttttaagcacagaagttaaaagagtgataacttcttcagcttcaaatatcaccccagcttttttctgctcatgaaggttagatgcctgctgcttaagtaattcctctttatctgtaaaggctttttgaagagcatcacctgaccgggcagatagttcaccggggtgagaaaaaagagcaacaactgatttaggcaatttggcggtgttgatacagcgggtaataatcttacgtgaaatattttccgcatcagccagcgcagaaatatttccagcaaattctttctgcaatcgggttgcataacgctgacccacttcataagcactcgtcctttggatttgaggctggattggggggactctaaaggcttcccttgttattggtctgttcaggacatctaattcttcctgatttacgctaggagggttgtacttttccaggaatttatccatctcttctaggttttctagtttacgtgcataaaggtgttcatagtagctttgaatgctcttttgtattttagtggtgtctgttgaaatatctgctgtttcatttcttaatgaggttattgggtggattttctctcctcttttcttggttaagcttgttaatgctctatcaattttatttatcttttcaaataaccagctttttgtttcatttagcttttgtaatttttttgtttcaatttcatttagttctgctctgatcttgatcatttcctttcttctgctgggtttgggtttggtttgttcttgtttctctagtttcttgaggtatgaccttagaatgtcagtttgtgcttgttcagtctttttgatgtaagcttttaggctatgaactttcctcttagcactgcctttgcctaatggaaaaggaccaacggagaaggggacgaggacgacaagagggggagaggggttcgtattggaaatagagttgaaattaggagacat

SEQ ID NO: 20246 - DNA, 511 bp, Homo sapiens
  SIMILAR (92)..(202): 971254mologous to Homo sapiens meningioma-expressed antigen 11,accession number U73682,Smith-Waterman Score=196.
ccggctccgcagtggtccactccggttgccgggtgcggattcgggttccggaccgaaggctgtgtgttctccgccgtttattgtggccccgacaggccggggttactgtggcgaccacgagagcagctttggcgctatggaggagcccggggttacccctcaaccgtatttggggctgctcctggaggagctacgcagggtgagcccaggcgcgatgagtgttacgtggcccaggggtcgcgggagccgccgggggaaggaagcagtagaccggctttggggtctaagccgccgtggtcagaggtcccgaagccagtcctcgtctgctgcccggctcccgcccgtgttcgaggcagtagttaggctcgtagggcgcttgagtggtttttgtgtgatggaggaggacctggggctctgggaaggacgagagaaaaagcttgctctaatgctttctggactaattgaagaaaaaagtaaactacttgaaaaatttagccttgttcaaaaagag

SEQ ID NO: 20247 - DNA, 3263 bp, Homo sapiens
  SIMILAR (1056)..(3254): 851254mologous to Homo sapiens Human cytoskeletal protein (HCYT) (clone 3768043),accession number Y77574,Smith-Waterman Score =3198.
gttcctttcagacctggaagagaactttgagaacaatatcttctccttccaagtatgtgacgtagtcctgaaccacgccccagacttccgccgggtctacctgccttatgtcaccaaccagacctatcaggaacgcaccttccagagcctgatgaatagcaacagcaatttccgggaggtcttggagaagctggagagcgaccccgtctgccagcgcctttccctcaagtcctttctgattctgcccttccaacgcatcacccgcctcaaactgctgctccagaacattctgaagagaacacagcctggctcctcggaggaggcagaggccacgaaggcacaccacgccctggagcagctgatccgggactgcaataacaatgtccagagtatgcgacggacagaggagctaatctacctgagccagaagattgagtttgagtgcaaaatattcccgctcatttctcagtcacgctggctggtgaaaagtggggagctgacagccttggagttcagtgcttccccagggctacgaaggaagctgaacacgcgtccagtccacctgcacctcttcaatgactgtctgctgctgtctcggccccgagagtcagtgactggagtggcaggccagggcacaagaggggaaggggatgaggaaagaggggggtctgaaagggagagagaaggaagtgaaaagcttcggtggatctcagccttggccatgccaagagaggagttggaccttctggagtgttacactgctgagcatggttcaggtgggctggctacatgtgggaattatgcaagctacaattcaagatgggatctgcgtaaggacacagccaaaccatatcagcaggcattgaagaacattgttgtagcaagtcagtgttactgcggtgaccgccagagcagcctcgacgctatggaggagcctggtgctacccctcagccctacctggggctggtcctggaggagctacgcagagttgtggcagcactacctgagagtatgagaccagatgagaatccttatggttttccatcggaactggtggtatgtgcagctgttattggattttttgttgttctcctttttttgtggagaagttttagatcggttaggagtcggctttacgtgggaagagagaaaaaaacttggtgaaatgctttctggactaattgaagaaaaatgtaaactacttgaaaaatttagccttattccaaaagagtatgaaggctatgaagtacagtcatctttagaggatgccagctttgagaaggcggcagcagaagaagcacgaagtttggaggcaacctgtgaaaagctgaacaggtccaattctgaacttgaggatgaaatcctctgtctagaaaaagacttaaaacaagagaaatctaaacattctcaacaagatgaattgatggcggatatttcaaaaagtatacagtctctagaagatgagtcaaaatccctcaaatccacaaataagcttgaagccaaaatcatctgcaagacatttaaaatgagtgaagaacgacgggctatagcaataaaagatgctttgaatgaaaattctcaacttcagacaagccataaacagctttttcagcaagaagctgaagtatggaaaggacaagtgagtgaacttaataaacagaaaataacatttgaagactccaaagtacacgcagaacaagttctgaatgataaagaaaatcacatcaagaccctgactggacacttgccaatgatgaaagatcaggctgctgtgcttgaagaagacacaacggatgatgataacctggaattagaagtgaacagtcaatgggaaaatggtgctaacttagatgatcctctgaaaggagctttgaagaaactgattcatgctgctaagttaaatgtttctttaaaaagcttagaaggagaaagaaaccacattattattcagttatctgaagtggacaaaacaaaggaagagcttacagagcatattaaaaatcttcagactcaacaagcatctttgcaatcagaaaacatatattttgaaagtgagaatcagaagcttcaacagaaacttaaaataatgactgaattctatcaagaaaatgaaatgaaactctacaggaaattaacagtggaggaaaattaccgaatagaggaagaagagaagctttctagagtggaagaaaagatcagccgtgccactgaagggctggagacctatagaaagctagccaaagatcttgaagaagaattggagagaactgttcatttttatcaaaagcaggttatttcctacgagaaaagaggacatgataattggttggcagctcggactgctgaaagaaacctcagtgatttaaggaaagaaaatgctcacaacaaacaaaaattaactgaaacagagttgaaatttgaacttttagaaaaagatcctaatgcactcgatgtttcaaatacagcatttggcagagagcattccccatgtagtccctcaccattgggtcggccttcatctgaaacgagagcttttccctctcctcaaactttgttggaggatccactcagactctcacctgtgcttccagggggaggaggaagaggcccaagcagcccagggaatcccctggaccatcagattaccaatgaaagaggagaaccaagctatgacaggttaatcgatcctcacagggctccttctgacactgggtccctgtcatctccggtggaacaggaccgtaggatgatgtttcctccaccagggcaatcatatcctgattcaactcttcctccacaaagggaagacagattttattctaattctgaaagactgtctggaccagcagaacccagaagttttaaaatgacttctttggataaaatggataggtcaatgccttcagaaatggaatccagtagaaatgatgccaaagatgatcttggtaatttaaatgtgcctgattcatctctccctgctgaaaatgaagcaactggccctggccttattcctccacctcttgctccaatcagcggtccattgtttccagtggatacaaggggcccgttcatgagaagaggacctcctttccccccacctcctccaggaaccatgtttggagcttctcgaggttattttccaccaagggatttcccaggtccaccacatgctccatttgcaatgagaaacatctatccaccgaggggtttacctccttaccttcatccgagacctggattttaccccaaccccacattctga

SEQ ID NO: 20248 - DNA, 2775 bp, Homo sapiens
  SIMILAR (107)..(2245): 891254mologous to Homo sapiens Human secreted protein am728_60,accession number Y24788,Smith-Waterman Score=3218.
gacaggccggggttactgtggcgaccacgagagcagctttggcgctatggaggagcccggggctacccctcaaccgtatttggggctgctcctggaggagctacgcagggttgtggcagcactgcctgaaggtatgagaccagattctaatctttatggttttccatgggaattggtgatatgtgcagctgttgttggattttttgctgttctcttttttttgtggagaagttttagatcggttaggagtcggctttatgtgggacgagagaaaaagcttgctctaatgctttctggactaattgaagaaaaaagtaaactacttgaaaaatttagccttgttcaaaaagagtatgaaggctatgaagtagagtcatctttaaaggatgccagctttgagaaggaggcaacagaagcacaaagtttggaggcaacctgtgaaaagctgaacaggtccaattctgaacttgaggatgaaatactctgtctagaaaaagagttaaaagaagagaaatccaaacattctgaacaagatgaattgatggcggatatttcaaaaaggatacagtctctagaagatgagtcaaaatccctcaaatcacaagtagctgaagccaaaatgaccttccagatatttcaaatgaatgaagaacgactgaagatagcaataaaagatgctttgaatgaaaattctcaacttcaggaaagccagaaacagcttttgcaagaagctgaagtatggaaagaacaagtgagtgaacttaataaacagaaagtaacatttgaagactccaaagtacatgcagaacaagttctaaatgataaagaaagtcacatcaagactctgactgaacgcttgttaaagatgaaagattgggctgctatgcttggagaagacataacggatgatgataacttggaattagaaatgaacagtgaatcggaaaatggtgcttacttagataatcctccaaaaggagctttgaagaaactgattcatgctgctaagttaaatgcttctttaaaaaccttagaaggagaaagaaaccaaatttatattcagttgtctgaagttgataaaacaaaggaagagcttacagagcatattaaaaatcttcagactcaacaagcatctttgcagtcagaaaacacacattttgaaaatgagaatcagaagcttcaacagaaacttaaagtaatgactgaattatatcaagaaaatgaaatgaaactccacaggaaattaacagtagaggaaaattatcggttagagaaagaagagaaactttctaaagtagatgaaaagatcagccatgccactgaagagctggagacctatagaaagcgagccaaagatcttgaagaagaattggagagaactattcattcttatcaagggcagattatttcccatgagaaaaaagcacatgataattggttggcagctcggaatgctgaaagaaacctcaatgatttaaggaaagaaaatgctcacaacagacaaaaattaactgaaacagagcttaaatttgaacttttagaaaaagatccttatgcactcgatgttccaaatacagcatttggcagaggctcacgaggcccagggaatcctctggaccatcagattaccaatgaaagaggagaatcaagctgtgataggttaaccgatcctcatagggctccctctgacactgggtctctgtcacctccatgggaccaggaccgtaggatgatgtttcctccgccaggacaatcatatcctgattcagcccttcctccacaaaggcaagacagattttgttctaattctggtagactgtctggaccagcagaactcagaagttttaatatgccttctttggataaaatggatgggtcaatgccttcagaaatggaatccagtagaaatgataccaaagatgatcttggtaatttaaatgtgcctgattcatcttttccttgctaaaaaagaagccactggccctggctttgttcctccacctcttgctccagtcagaggtccattgtttccagtggatgcaagaggcccattcttgagaagaggacctcctttccccccacctcctccaggagccatgtttggagcttctcgagattattttccaccaagggatttccccaggtccaccacctgctccatttgcaatgagaaatgtctatcccaccgaggggttttccctccttaccttcccccccaagacctgattttttccgccccacccccacattctgaaggtagaagtgagttcccctcaggtttgattccaccttcaaatgagcctgctactgaacatccagaaccacagcaagaaacctgacaatatttttgctctcttcaaaagtaattttgactgatctcattttcagtttaagtaactgctgttaccttaaagtgattacactttttgctccaaattgaagcttaatggaattataattctcaggatagtattttgtaaataaagatgatttaaatatgaatcttatgagtaaattatttcaattttattttagacggtataactatttcaatttggattaatccactattatataaccaatagtgggagttttatatatgtaatctttcaggtggggaggctttaaattttgaagtctgtgtctttatgccaagaactgtatttactgtggttgtggacaaatgtgaaagtaactttatgcttaaataaattatagttgatttaaagatttgtttggcattgataataataaaatcagtagtttttctataaa

SEQ ID NO: 20249 - DNA, 3915 bp, Homo sapiens
  SIMILAR (334)..(1833): 991254mologous to Homo sapiens MEA6,accession number U94780,Smith-Waterman Score=2503.
  misc_feature (1)...(3915): n = a,t,c or g
tttcgtgccttctcgcggctgcccggccgaaaccaaaccgaggggtggggtggcgaggacagggtacgtcgcaggcttgtgcgggtcgggctcggacctgcgctgcctcgggatgtaaagtataacaagagggtcgggatgggcagcgtaggcctgtgaggcctgcgggtgcccctgtcccccagctccccccgcagccggctccgcagtggtccactccggttgccgggtgcggattcgggttccggaccgaaggctgtgtgttctccgccgtttattgtggccccgacaggccggggttactgtggcgaccacgagagcagctttggcgctatggaggagcccggggctacccctcaaccgtatttggggctgctcctggaggagctacgcagggttgtggcagcactgcctgaaggtatgagaccagattctaatctttatggttttccatgggaattggtgatatgtgcagctgttgttggattttttgctgttctcttttttttgtggagaagttttagatcggttaggagtcggctttatgtgggacgagagaaaaagcttgctctaatgctttctggactaattgaagaaaaaagtaaactacttgaaaaatttagccttgttcaaaaagagtatgaaggctatgaagtagagtcatctttaaaggatgccagctttgagaaggaggctacagaagcacaaagtttggaggcaacctgtgaaaagctgaacaggtccaattctgaacttgaggatgaaatactctgtctagaaaaagagttaaaagaagagaaatccaaacattctgaacaagatgaattgatggcggatatttcaaaaaggatacagtctctagaagatgagtcaaaatccctcaaatcacaagtagctgaagccaaaatgaccttccagatatttccaatgaatgaagaacgactgaagatagcaataaaagatgctttgaatgaaaattctcaacttcaggaaagccagaaacagcttttgcaagaagctgaagtatggaaagaacaagtgagtgaacttaataaacagaaagtaacatttgaagactccaaagtacatgcagaacaagttctaaatgataaagaaagtcacatcaagactctgactgaacgcttgttaaagatgaaagattgggctgctatgcttggagaagacataacggatgatgataacttggaattagaaatgaacagtgaatcggaaaatggtgcttacttagataatcctccaaaaggagctttgaagaaactgattcatgctgctaagttaaatgcttctttaaaaaccttagaaggagaaagaaaccaaatttatattcagttgtctgaagttgataaaacaaaggaagagcttacagagcatattaaaaatcttcagactgaacaagcatctttgcagtcagaaaacacacattttgaaaatgagaatcagaagcttcaacagaaacttaaagtaatgactgaattatatcaagaaaatgaaatgaaactccacaggaaattaacagtagaggaaaattatcggttagagaaagaagagaaactttctaaagtagatgaaaagatcagccatgccactgaagagctggagacctatagaaagcgagccaaagatcttgaagaagaattggagagaactattcattcttatcaagggcagattatttcccatgagaaaaaagcacatgataattggttggcagctcggaatgctgaaagaaacctcaatgatttaaggaaagaaaatgctcacaacagacaaaaattaactgaaacagagcttaaatttgaactgtgtagaagaagatccttatgcactcgatgttccaaatacagcatttggcagagagcattccccatatggtccctcaccattgggttggccttcatctgaaacaagagcttttctctctcctccaactttgttggagggtccactcacactctcacctttgcttccagggggaggaggaagaggctcacgaggcccagggaatcctttggaccatcagattaccaatgaaagaggagaatcaagctgtgataggttaaccgatcctcatagggctctctctgacactgggtttctgtcacctccatgggaccaggaccgtaggatgatgtttcctccgccaggacaatcatatcctgattcagcccttcctccacaaaggcaagacagattttgttctaattctggtagactgtctggaccagcagaactcagaagttttaatatgccttctttggataaaatggatgggtcaatgccttcagaaatggaatccagtagaaatgataccaaagatgatcttggtaatttaaatgtgcctgattcatctctccctgctgaaaatgaagccactggccctggctttgttcctccacctcttgctccagtcagaggtccattgtttccagtggatgcaagcggccccattccttgggaagagaccccctttccccccaacctcctccaggaagccatgtttggagcttctcgagattatttttccaccagggggatttcccagggtccaccaccttgctccatttggcaatgaggaaatgtcttatcccaccgagggggtttttccttccttaacctttcccccaagaactgggggttttttccccccacccccacatttttgaaggtaggaagtgaatttcccttaggttttgattccaacttcaaatgagcctgctactgaacatccagaaccacagcaagaaaacctgacaatatttttggctctcttcaaaagtaattttgactgatctcattttcagtttaagtaactgctgttacttaagtgattacacttttggctcaaattgaagtttaatggaataatagttctcaggatagtattttggtaaataaagatgatttaaatatgaatcttatgagtaaattatttcaattctaattttagacggtataactatttcaatttgattaatccactattatataaacaatagtgggagttttatatatgtaatcttgcaggtggggaggctttaaattctgaagtctgtgtctttatgccaagaactgtatttactgtggttgtggacaaatgtgaaagtaactttatgcttaaataaattatagttgatttaaagatttgtttggcattgataataataaaatcagtagtttttctataactatggctctattaattaacttttttccttttaccaataactttgaggtgcaaaactcaaacttatgtgggtcttttgtgttcaattatgttatgacaaatgtgctctctttcttgtaaatagacatgagtggcccaaagcaacaaattaatacacttttaaaagtcaaaattgattatattttaaagataaccaggggtattatcctaatggggggaattgtagaattttgatcttcttattcactgagtttcttgcacggtttctttattgcttttttttccccgcctgttcttttgtaaggtatttagtattttctgtggaggatattgagatgtactacaggataactgtagtgaatgatgtgtcatcattttgagctttggactcaatatctttagtgtttccctaaatcagatttgtagggtccatgttaagccnccttgcacattaatatgattatggaaggaaaggcagtgaagcataactaataaacatcataatacttaacgttgccccagttggttgttttagtattagacttttttttcaatgccaaaagatagaagattaaatattcttagaataaagcagtgatatatattggaacaattcaccccagcatttccccaggtgttgtttagaacaatagaatactaatgaagtatttttgaacccataatattctaaccctcacctcaaaaaaaaa

SEQ ID NO: 20250 - DNA, 461 bp, Homo sapiens
  SIMILAR (390)..(461): 951254mologous to Homo sapiens gamma-glutmyl transpeptidase- related protein,accession number M64099,Smith-Waterman Score=115.
aggccaatgagacctgaggacgtgcggaggaattcgtcctctttgtctagctatctggcctatctgtcgatccatcttcgtgtctgtcttcagcccccacctgtttgtccatctgtccaattacctgtgactctgtgcatcttcttgtccattcatctgcccacccatccgtccctccgtctgcccaccagccgcccctctcctcctgggctgcagagccatggcccggggctacggggccacggtcagcctagtcctgctgggtctggggctggcgctggctgtcattgtgctggctgtggtcctctctcgacaccaggccccatgtggcccccaggcctttgcccacgctgctgttgccgccgactccaaggtctgctcggatattggacgggagccagctgacgctgcaggacctggccaagttccagcccgaggtggtggatgccctggaggtgcct

SEQ ID NO: 20251 - DNA, 1764 bp, Homo sapiens
  SIMILAR (176)..(1222): 991254mologous to Homo sapiens gamma-glutmyl transpeptidase- related protein,accession number M64099,Smith-Waterman Score=1797.
atggcccggggctacggggccacggtcagcctagtcctgctgggtctggggctggcgctggctgtcattgtgctggctgtggtcctctctcgacaccaggccccatgtggcccccaggcctttgcccacgctgctgttgccgccgactccaaggtctgctcggatattggacgatgccatcctccagcagcagggctcacccgtggatgcctccatcgcggctctggtctgcaccagcgtcgtcaaccctcagagcatgggcctgggcggaggggtcatcttcaccatctacaatgtgacaacagggaaggtggaggtcatcaatgcccgggagacggtgccggccagccacgccccgagcctgctggaccagtgtgcacaggctctgccactgggcacaggggcccagtggatcggggtgcccggggagctccgtggctatgccgaggcccaccgccgccatggccgcctgccctgggcgcagctgttccagcccaccatcgcgctgctccgaggggggcatgtggaggcccctgtcctcagccgtttcctgcacaacagcatcctgcggccttccttgcaggcgtcaaccctgcgccagctcttcttcaacgggacagaacccctgaggcctcaggacccactcccatggcctgcactggccaccaccctggagaccgtggccacagagggcgtggaggtcttctacacggggaggctgggccagatgctggtggaggacattgccaaggaagggagccagctgacgctgcaggacctggccaagttccagcccgaggtggtggatgccctggaggtgcccctgggggactataccctgtactcaccaccgccgcctgcagggggtgccattctcagctttatcctcaacgtgctaagagggttcaacttctcaacagagtctatggccaggcctgaagggagggtgaacgtgtaccaccaccttgtagagacgctcaagtttgccagggggcagaggtggaggctgggggaccctcgaagccacccgaagctccagaatgcctcccgggacctgctgggggagaccctggcccagctcatccgccaacagatcgatggccggggggaccaccagctcagccactacagcttggccgaggcctggggccacgggacaggcacgtcccatgtgtctgtgctgggggaggatggcagcgccgtggctgccaccagcaccattcaacacaccctttggagcgatggtgtatttcaccacggacaggcatcatcctcaacaacgagctcctggacttatgcgagcgatgcccccggggttccggcaccaccccctcaactgtgagtggagacagggtgggtggagctcccggaaggtgctggcccccagttccaggcgagccgtccccatcctccatggagccctccatcttgatcaacaaagcccaggggtccaatcttgtgattggctgtgctggcggggagctcatcatctctgctgtggcccaggccatcatgagcaagctgtggcttggctttgacctgagagcggccattgcagcccccatcctgcatgtcaacaacaagggctgtgtggagtacgagcccaacttcagccaggaggtgcagaggggactccaagaccgtggccagaaccagacccagaggcccttcttcctgaacgtggtccaggctgtgtcccaggagggggcctgtgtgtacgccgtctcggacctgaggaagagtggggaggccgcaggctactaa

SEQ ID NO: 20252 - DNA, 2537 bp, Homo sapiens
  SIMILAR (2040)..(2189): 521254mologous to Homo sapiens gamma-glutmyl transpeptidase- related protein,accession number M64099,Smith-Waterman Score=86.
acgctttgctgcctggcctcctgccagcttcaagcaggagctgaaaaccagaagttgaggcgtgagtttggccactccgtagtgtgcacttggtgagggcagcagctcgccacagctggccagccggactgatccatttacccatctgtccatctggcagcccgctgttcagacccgtctgtctgtccgcccatttgtaagccgatctctgtcccgattgtctatctgaccatctttctcttactgtcctctttgtctagctatctggcctatctgtcgatccatcttcgtgtctgtcttcagcccccacctgtttgtccatctgtccaattacctgtgactctgtgcatcttcttgtccattcatctgcccacccatccgtccctccgtctgcccaccagccgcccctctcctcctgggctgcagagccatggcccggggctacggggccacggtcagcctagtcctgctgggtctggggctggcgctggctgtcattgtgctggctgtggtcctctctcgacaccaggccccatgtggcccccaggcctttgcccacgctgctgttgccgccgactccaaggtctgctcggatattggacgagccatcctccagcagcagggctcacccgtggatgccaccatcgcggctctggtctgcaccagcgtcgtcaaccctcagagcatgggcctgggcggaggggtcatcttcaccatctacaatgtgacaacaggggcccagtggatcggggtgcccggggagctccgtggctatgccgaggcccaccgccgccatggccgcctgccctgggcgcagctgttccagcccaccatcgcgctgctccgaggggggcatgtggtggcccctgtcctcagccgtttcctgcacaacagcatcctgcggccttccttgcaggcgtcaaccctgcgccagctcttcttcaacgggacagaacccctgaggcctcaggacccactcccatggcctgcactggccaccaccctggagaccgtggccacagagggcgtggaggtcttctacacggggaggctgggccagatgctggtggaggacattgccaaggaagggagccagctgacgctgcaggacctggccaagttccagcccgaggtggtggatgccctggaggtgcccctgggggactataccctgtactcaccaccgccgcctgcagggggtgccattctcagctttatcctcaacgtgctaagagggttcaacttctcaacagagtctatggccaggcctgaagggagggtgaacgtgtaccaccaccttgtagagacgctcaagtttgccaaggggcagaggtggaggctgggggaccctcgaagccacccgaagctccagaatgcctcccgggacctgctgggggagaccctggcccagctcatccgccaacagatcgatggccggggggaccaccagctcagccactacagcttggccgaggcctggggccacgggacaggcacgtcccatgtgtcagtgctgggggaggatggcagcgccgtggctgccaccagcaccatctacacaccctttggagcgatggtgtattcaccacggacaggcatcatcctcaacaacgagctcctggacttatgcgagcgatgcccccggggttccggcaccaccccctcacctgtgagggagacagggtgggtggagctcccggaaggtgctggcccccagttccaggcgagcgttccccatcctccatggtgccctccatcttgatcaacaaagcccaggggtcgaagctagtgattggcggggctggcggggagctcatcatctctgctgtggcccaggccatcatgagcaagctgtggcttggctttgacctgagagcggccattgcagcccccatcctgcatgtcaacagcaagggctgtgtggagtacgagcccaacttcagccagagacggtgtcttgctttgttgccctggctgttctcaaactcctggcctcaagtgatcctgccaccttggctcccaagtggctaagactgtaggaggtgcagaggggactccaagacccgtggccagaacccagacccagaaggccctttcttcctggacgtggttccagcctgtgtccccaggagggggcctgtgtgtaacgcccgtctcggacctgaaggaagagtggggaggccgcaggcttactaaagacactgctctgcccagaacttgaagtcttggccccaccatgagtcctgttgtccaggccggacattgcttgggggaccaactacttctggcaggatctggacccctggcaggggagtccagcttgagagtggaagaggtggcggggaccagctgggcagatgagaggctgagcctcatcccctaaccccctttcccagagcccctggtggtcctgaaccggcccctctatccctccgcaggcctcttgcctggggccactctcccaccctctcgatctgtatatcctccagtccaagattaaagaagaggcggactatgaaaaaaaaaaaaaaaaaaac

SEQ ID NO: 20253 - DNA, 3420 bp, Homo sapiens
  SIMILAR (305)..(1798): 991254mologous to Homo sapiens ferroportin1,accession number AF226614,Smith-Waterman Score=2535.
agctggctcagggcgtccgctaggctcggacgacctgctgagcctcccaaaccgcttccataaggctttgctttccaacttcagctacagtgttagctaagtttggaaagaaggaaaaaagaaaatccctgggccccttttcttttgttctttgccaaagtcgtcgttgtagtctttttgcccaaggctgttgtgtttttagaggtgctatctccagttccttgcactcctgttaacaagcacctcagcgagagcagcagcagcgatagcagccgcagaagagccagcggggtcgcctagtgtcatgaccagggcgggagatcacaaccgccagagaggatgctgtggatccttggccgactacctgagctctgcaaaattccatctctaacttggtcattctctctctacttggggagatcggatgtggcactttgcggtgtctgtgtttctggtagagctctatggaaacagcctccttttgacagcagtctacgggctggtggtggcagggtctgttctggtcctgggagccatcatcggtgactgggtggacaagaatgctagacttaaagtggcccagacctcgctggtggtacagaatgtttcagtcatcctgtgtggaatcatcctgatgatggttttcttacataaacatgagcttctgaccatgtaccatggatgggttctcacttcctgctatatcctgatcatcactattgcaaatattgcaaatttggccagtactgctactgcaatcacaatccaaagggattggattgttgttgttgcaggagaagacagaagcaaactagcaaatatgaatgccacaatacgaaggattgaccagttaaccaacatcttagcccccatggctgttggccagattatgacatttggctccccagtcatcggctgtggctttatttcgggatggaacttggtatccatgtgcgtggagtacgttctgctctggaaggtttaccagaaaaccccagctctagctgtgaaagctggtcttaaagaagaggaaactgaattgaaacagctgaatttacacaaagatactgagccaaaacccctggagggaactcatctaatgggtgtgaaagactctaacatccatgagcttgaacatgagcaagagcctacttgtgcctcccagatggctgagcccttccgtaccttccgagatggatgggtctcctactacaaccagcctgtgtttctggctggcatgggtcttgctttcctttatatgactgtcctgggctttgactgcatcaccacagggtacgcctacactcagggactgagtggttccatcctcagtattttgatgggagcatcagctataactggaataatgggaactgtagcttttacttggctacgtcgaaaatgtggtttggttcggacaggtctgatctcaggattggcacagctttcctgtttgatcttgtgtgtgatctctgtattcatgcctggaagccccctggacttgtccgtttctccttttgaagatatccgatcaaggttcattcaaggagagtcaattacacctaccaagatacctgaaattacaactgaaatatacatgtctaatgggtctaattctgctaatattgtcccggagacaagtcctgaatctgtgcccataatctctgtcagtctgctgtttgcaggcgtcattgctgctagaatcggtctttggtcctttgatttaactgtgacacagttgctgcaagaaaatgtaattgaatctgaaagaggcattataaatggtgtacagaactcccatgaactatcttcttgatcttctgcatttcatcatggtcatcctggctccaaatccctgaagccttttgggccttgcctccgtattgatttccagtcctcccttttgtggcaatgggcccacattatgtatttcccgatttgccccaaaatactctgggaaacaagctctttgcttgcggtcctgatgcaaaagaagttaggaaggaaaatcaagcaaatacatctgttgtttgagacagtttaactgttgctatcctgttactagattatatagagcacatgtgcttattttggtactgcagaatttccaataaatggctggggtgttttgctctgtttttaccacagctgtgccttgagaactaaaaagctgtttaaggaaacctaagtcagcaggaaattaactggattaatttcccttatgttgagggccatgggaaaaaaattgggaaaaggaaaaactcagttttaaatacgggagactataatgataacactgaattcccctatttctcatgagtagatacaatcttacgtaaaagagtggttagtcacgtgaattcagttatcatttgacagattcttatctgtactagaattcagatatgtcagttttctgcaaaactcactcttgttcaagactagctaatttatttttttgcatcttagttatttttaaaaacaaattcttcaagtatgaagactaaattttgataactaatattatccttattgatcctattgatcttaaggtatttacatgtatgtggaaaaacaaaacaccttaactagaattctctaataagggtttatggtttagcttaaagagcacctttgtatttttattatcagatgggggccaccatattggtatggaaggcatatgtaggcacttcacagccatggttatccatgtaaggctgcaggtaggaggcaaagctgttaaagtaggattttattcacacatggactgcatacagacttcaaatatgttcattagtttggtcatagaacctagaagccaaaagcccacacagaagggccaaggaatccccaatttaactccatggttatccatcattagtgatctggtgttgtagaaccatgagggtgtaaggccttccagcctggccaggttaccatgtaggaaagcccccacacctggtggaagggttttggttttaccaaatccacttggatttaaccaccactccaggtagaatatttttatttttactggttttataccccaggaagttatttctaccattgttcctacagcaagaatattcataaaaggtatccctttcaaaatgccttttgagaagaatagaagaaaaaaaagtttggtatatattttaaaaaattgttttaaaaaaagtccagtttgcaacatgtctggtacccaagatgggtactttggcccttaaccggtttatatggcacttttcatgggagactgcaataccgttgctatgagcactttctttatcccttggagtttaatcctttgcttcatctttctacagtatcacataatgatttagctatgttgtaaaatctttgtaaaaaatttctatataaaaatattttgaaaatcttaaaaaaaaaaccccaagg

SEQ ID NO: 20254 - DNA, 611 bp, Homo sapiens
  SIMILAR (136)..(498): 1001254mologous to Homo sapiens 07-JUN-1995 Human placenta short form adenosine kinase DNA,accession number T48844_cd1,Smith- Waterman Score=613.
gctgcatgcatcactggtgacaacaggtccctcatagctaatcttgctgctgccaattgttataaaaaggaaaaacatcttgatctggagaaaaactggatgttggtagaaaaggcaagagtttgttatatagcagaagctgccacttttgctagagagcaaggctttgagactaaagacattaaagagatagccaaaaagacacaagccctgccaaagatgaactcaaagaggcagcgaatcgtgatcttcacccaagggagagatgacactataatggctacagaaagtgaagtcactgcttttgctgtcttggatcaagaccagaaagaaattattgataccaatggagctggagatgcatttgttggaggttttctgtctcaactggtctctgacaagcctctgactgaatgtatccgtgctggccactatgcagcaagcatcataattagacggactggctgcacctttcctgagaagccagacttccactgatggaagagctgaaaacacaagcccaggagtgcagacactgccctaattgcttcctgagaattcccatattaataaagaagaaaattatctgccattttttcctactataaaaa

SEQ ID NO: 20255 - DNA, 1578 bp, Homo sapiens; identical to SEQ ID NO: 9384
  SIMILAR (697)..(1575): 861254mologous to Homo sapiens laminin-binding protein,accession number J03799,Smith-Waterman Score=1310.

SEQ ID NO: 20256 - DNA, 2223 bp, Homo sapiens
  SIMILAR (311)..(1351): 831254mologous to Homo sapiens 07-JUN-1995 Human placenta long form adenosine kinase coding sequence,accession number X01103_cd1,Smith-Waterman Score=1442.
ggcagaggtgggctgtaaagccaaagtggggtgggagcgcgaagatggcagctgctgaggaggagccgaagcccaaaaagctgaaggtggaggcgccgcaagcgctgaggcttgctactcagcctggcccacagaccagaagcaattagtgagacctgggaacataaagaaatgcaaaattttggtcactgatacctgcagtgccaaacctgcattttaacaagatccacgagatttgtatgcatgttaaagtttgaaaagcactgatggtgtgaaatgtggattatctatcaacattttccacaagagaagagaaaatattctctttggaatgggaaatcctctgcttgacatctctgctgtagtggacaaagatttccttgataagtattctctgaaaccaaatgaccaaatcttggctgaagacaaacacaaggaactgtttgatgaacttgtgaaaaaattcaaagtcgaatatcatgctggtggctctacccagaattcaattaaagtggctcagtggatgattcaacagccacacaaagcagcaacattttttggatgcattgggatagataaatttggggagatcctgaagagaaaagctgctgaagcccatgtggatgctcattactacgagcagaatgagcagccaacaggaacttgtgctgcatgcatcactggtgacaacaggtccctcatagctaatcttgctgctgccaattgttataaaaaggaaaaacatcttgatctggagaaaaactggatgttggtagaaaaagcaagagtttgttatatagcaggcttttttcttcacgtttccccagagtcagtattaaaggtggctcaccatgcttctgaaaacaacaggattttcactttgaatctatctgcaccgtttattagccagttctacaaggaatcattgatgaaagttatgccttatgttgatatactttttggaaaatgagacagaagctggcccacttttgctagagagcaaggctttgagactaaagacattaaagagatagcccaaaaagacacaagcccctgcccaaagatgaactcaaaggggcagcgaatccgtgatcttcaccccaaggggagagatgacacctataatggctacagaaagtgaagtcactgcttttgctggtcttgggatcaagacccagaaagaaatttattgataccaatgaagctggagatgcatttgttggaggttttctgtctcaactgggtctctgacaagcctctgactgaatgtatccgtgctggccactatgcagcaagcatcataattagacggactggctgcacctttcctgagaagccagacttccactgatggaagagctgaaaacacaagcccaggagtgcagacactgccctaattgcttcctgacaattcccatattaataaagaagaaaattatctgccattttttcctactataataatgctgaatcttaatttagagggtacaagggtatggtaatgcttgtagaatctttattatctcaacaatctaaaaaaatgatgtttatttcccatagtttgatagtgcccacttaaatgcccaattaaacaagaatataacatttcaatagaaatttttatttcattttcaattactttgtaaattcggtgtgtatttagtacactgatttgtttttttacatttctgctttgaatgcagatgcaatttaatataatagattttttaaatgaattaatcttaacatagtaatctttagctttttatacaaatatatttaatttaggagtatatgtgtgtctatacacacacatacataaatataccacatatacacctgatagtcaaataaggtacagaaattttatcttgtcaattatgccaaataatctctttaatgtgcactcaaacatgtaataaactttggataatcaaataatgtgccaaatttaagttgtaccacaatattcaaatcatagtcttatggaactctgtacttggatacaaacaaaaacttgtcatataggaatttttttctgtcttttccctgtgtacagcaaactgaggcagaaagatcattatttaatactgggccctgaaatgacacccaatttgttaatggaattatgaagaacagcaatataatacactgaagaataacttagtatcagagaccaataaatcacttttttaaggatgacaaaatggtataaaaaaaaaa

SEQ ID NO: 20257 - DNA, 381 bp, Homo sapiens
  SIMILAR (1)..(201): 981254mologous to Homo sapiens CGI-114 protein,accession number AF151872,Smith-Waterman Score=365.
acattgcagcaggcagagtatgaatttctgtcctttgtacgacagcagactcctccagggctctgtccacttgcaggaaattcagttcatgaagataagaagtttcttgacaaatacatgccccagttcatgaaacatcttcattatagaataattgatgtgagcactgttaaagaactgtgcagacgctggtatccagattgattactcaagcagacagcacacgaaatactatttttctcctaatatgctgtttccattatgacacagcagctcctttgtaagtaccaggtcatgtccatcccttggtacatatatgcatttgcttttaaaccatttcttttgtttaaataaataaataagtaaataaagctaaaaaaa

SEQ ID NO: 20258 - DNA, 377 bp, Homo sapiens
  SIMILAR (162)..(299): 1001254mologous to Homo sapiens CGI-114 protein,accession number AF151872,Smith-Waterman Score=230.
cggcacgaggctgatgttggagcggccggctgcgagactggggccgtggctgctggtcccgggtgatgctaggcggctccctgggctccaggctgttgcggggtgtaggtgggagtcacggacggttcggggcccgaggtgtccgcgaaggtggcgcagccatggcggcaggggagagcatggctcagcggatggtctgggtggacctggagatgacaggattggacattgagaaggaccagattattgagatggcctgtctgataactgactctgatctcaacattttggctgaaggcacttgatgacattagtgaaagcatcaaagagcttcagttttaccgaaataacatcttcaagaaaaaaaaaaaaaaaaa

SEQ ID NO: 20259 - DNA, 379 bp, Homo sapiens
  SIMILAR (133)..(201): 821254mologous to Homo sapiens Human secreted protein, SEQ ID NO: 5271,accession number G01190,Smith-Waterman Score=95.
gcctagggattacaagctgaccatgtttgagggaatcccctgttaaataaacctgggtaaaagaggcccagaatgatggcctttgtgtgtgttatatatttatttttaattgccagatgacaggattggacattgagaaggacccagattattgagatggcctgtctgataactgactctgatctcaacattttggctgaagtacgtgatgcccatgtaatacagtcatactttttaaagggcactggaaatataaccatcattttttccagcttctttatttaaaaaataagaaagttgaggtctatatgggttaaggtaatgtgctaggtcatggtaggggtggtactagaaccaaagtaatccatctcacagccta

SEQ ID NO: 20260 - DNA, 520 bp, Homo sapiens
  SIMILAR (280)..(513): 1001254mologous to Homo sapiens CGI-114 protein,accession number AF151872,Smith-Waterman Score=418.
ccagcgccggctgcgagactggggccgtggctgctggtcccgggtgatgctaggcggctccctgggctccaggctgttgcggggtgtaggtgggagtcacggacggttcggggcccgaggtgtccgcgaaggtggcgcagccatggcggcaggggagagcatggctcagcggatggtctgggtggacctggagatgacaggattggacattgagaaggaccagattattgagatggcctgtctgataactgactctgatctcaacattttggctgaagaaattcagttcatgaagataagaagtttcttgacaaatacatgccccagttcatgaaacatcttcattatagaataattgatgtgagcactgttaaagaactgtgcagacgctggtatccagaagaatatgaatttgcaccaaagaaggctgcttctcatagggcacttgatgacattagtgaaagcatcaaagagcttcagttttaccgaaataacatcttcaaaaaaaaaatctcgtgcc

SEQ ID NO: 20261 - DNA, 502 bp, Homo sapiens
  SIMILAR (23)..(172): 541254mologous to Homo sapiens SEQ ID NO 402 from WO9922243,accession number Y19684,Smith-Waterman Score=130.
agaattcggcacgaggagacatgtgccaccatgcctgataaatttttttaaagaccagggttcaccataattggccaggctggtctcgaactcctggcctcaagtgatccacccaccttggccccccacagtgctgggattacgaggtgtgggccactgcccctggcctagactgggcaattctagctgggtttggggaggccattgaggaggctggcattggaaacctgagccagggaagggcccggaggctggagtccagtatgtttagtaggtagaatcctcagaatgcggtgcctggcgcttagtactgagcgtgagtccagaggagcacacgaaatactatttttctcctaatatgctgtttccattatgacacagcagctcctttgtaagtaccaggtcatgtccatcccttggtacatatatgcatttgcttttaaaccatttcttttgtttaaataaataaataagtaaataaagctagttctattgaaatgca

SEQ ID NO: 20262 - DNA, 1732 bp, Homo sapiens
  SIMILAR (747)..(1397): 521254mologous to Homo sapiens CGI-114 protein,accession number AF151872,Smith-Waterman Score=387.
atgaggtctcaaaagacgtcattgtatttctcactagaagcaaaattctactgcagcttgagaaacgagagaattgcaagttgtgatatcatcaatgatgctggtatacaaacaaagacgctaatgaagcgaagccatgtggcttatgctttgaaaaagcctgtggaacaaggagacagctttgagttagaaagcaagggctttatggccataaccatagctgtgtgtatagaacaaaacctaaggcattcgtcttccctcttcatttgcatgtcaagtacaggacagtctggaactaccaataatgccagctccctgataccatcatatgttttcaccccacctcattttaatctactggacaagcaaggaaggactgcaggaaagtcccactgtggggaggataggaaagagcataacaatgcctgccaccaggaggaagaggccccagatgtcaacccattgcatggtttgcaggcatcgggatcaccgggaaagactcaaagaatcaagtcacaggcactggagggaacaaggctttactcacatagcgaagagacaagatcaggcttaatacgactattgcgcctgcgccagcgccggctgcgagactggggccgtggctgctggtcccgggatatgctaggcggctccctgggctccaggcatgttgcggggtgtaggtgggagtcacggacggttcggggcccgaggtgtccgcaagcgtggcgcagccatggcggccaggggagagcatggctcagcgcatggtctgggtggacctggagatcacaggattggacatttagaaggtccagattattgagatggcctgtctgataactgactctgatctcatcattttggctgaaggtcctaacctgattataaacacaaccagatgagttgctggacagcatgtccagattggtgtaaaggagcatcacgggaagtctggccttaccaaggcagtgaaggagagtaccaattaccattgccagcaggcagagtaatgaatttcctgccctttggtacgaccagccagactccctcccagggctctgtcccacttgccaggaaattaagttccatgaaagataagaagtttccttgacaaaatacatgcccccagttcatgaaacatcttcattatagaataattggatgtgagccactgttaaaaggaactgtgccagaccgctgggtatccagaagaatatgaatttgccaccaaagaaggctgccttctcaatagggccacttgatgacacttagtgaaaacctccaaaaaggttccgttttttcccgaaaataaccatcttccaagaaaaaaaattaggatgaaaaggaaggagggaaaattatagaaaatgggggaaaatgagaagaccgtgagttgatgcccagttatcatgctgccactacatcggttatctggaggcaacttctggtggttttttttttctcacgctgatgggcttggcagaggcaccttcggttaacttgcatctcccagattgattactcaagcagacagcacacggaaatactatttttctcctaatatgctgtttcccattatgacacaacagctcctttggaagtaccaggtcatgtccatcccttggtacatatatgcatttgcttttaaaccatttcttttggttaaataaaataaactaagtaaataaagctagttctattgaaatgcaaaaaaaaaaaaaaaaaaaaa

SEQ ID NO: 20263 - DNA, 364 bp, Homo sapiens
  SIMILAR (304)..(167): 361254mologous to Rattus norvegicus CDK5 activator-binding protein,accession number AF177478,Smith-Waterman Score=67.
  misc_feature (1)...(364): n = a,t,c or g
ggggccgggggtttttnnnnnnnnnngtgttttaaannnnnnnnnnnnnnnnnaaaaaaatcccccccccnnnnnnnnnnnnggggggcggccccnnnnnnnnnnnncnnnnnnnnnnnnnnnnnnnnnnnnnnnnnnnnnnnnnnnnngcggtaacagtgtttattgatgttgggctgatgaggtctggttcctctagcttcaccttccagagccgattcctgagtcaggtagtgcagtggttgtaaagtgcagcatattcatttccaagctagagggttttgtgtccggattcaaaggcccaggcttgagctgggtagcaccatttctttcatgttgtgggttctgggagcccagagggcag

SEQ ID NO: 20264 - DNA, 2356 bp, Homo sapiens
  SIMILAR (180)..(7): 981254mologous to Homo sapiens PRO1900,accession number AF118081,Smith-Waterman Score=334.
  misc_feature (1)...(2356): n = a,t,c or g
tttcgtggaaccgaggggcaaccaggggaagatggggtgctggaggagagcttgtgggagccaaggagcaccttggacatctggagtctggcaggagtgatgacgggtggaggggctagctcgaggcagggctggtggggcctgaggccagtgaggagtgtggagtaggtgcccaggcatcgtgcagacagggcgacatcagctggggacgatgggcctgagctagggctggaaagaagggggagccaggcattcatcccggtcacttttggttacaggacgtggcagctggttggacgaggggagctggtgggcagggtttgatcccagggcctgggcaacggaggtgtagctggcagcagcggtggcaggtgagttccccatctgccgggcaggtgagtcccttccctccccaggcctcgcttccccagccttctgaaagaaggaggtttaggggatcgagggctggcggggagaagcagacaccctcccagcagaggggcaggatgggggcaggagagttagcaaaggtgacatcttctcggggggagccgagactgcgcaaggctggggggttatgggcccgttccaggcagcaccgagcaagagggcagggagggagcacaggggtggccagcgtagggtccagcacgtggggtggtaccccaggcctgggtcagacaaaggacatggcaagggaacacaggacagtagggttccccagcttccacctcacccaccgccaattcatttagttagcaggcacaggggcaagctccggcacggctttctcaggcctatgccggagcctcgagggctggagagcgggaagacaggcaattgcttcggggagttgcagcatgtacgtcaccatgagggcgaagcggcccacgggaggggggcccacggaacattgcacagcaaggaggctgcaggggctcagcctgcgggcgccggtcccacggaggcactgcggcccagggtctggtgcggagagggcccacagtggacttggtgacgctgtatgccctcaaccgctcagcccctggggctggcttggcagacagtacagcatccaggggagtcaagggcatggggcgagaccagactaggcgaggcgggcggggcggagtgaatgagctctcaggagggaggatggtgcaggcaggggtgaggtagtgcatcgggcggcgagcgtttatgcactgggcctccagaagcccgtggccaaggcgggcctcgcgggcggcgacggagccgggatcggcgccttatcgttcgggctggagactaggcctggtctccagctggggtggacgtgcccaccagacttccgaaggccaaggacgcccaggtccggtggacgtgacaagcaggacatgacatggtccgggtgttacggtcgaggacagaggaggcgcgtccggcccttccctgaaaaaccttaaggctggtggggctgcggcaagaaagcgggtctgtttcttttacttcctccacggagtcggtcacactatggcttgnccctcttggttccccaagaaccccacaacatgaaagaaatggtgctacccagctcaagcctggggcctttgaaattccggacacaaaaccctctagccttgggaaatgaatatgcttggcacttttacaaccacttgcacttaccttgacttcaggaattcggctcttgggaaggttgaagcttaggaggaaccagaccttcattcagccccaaccatcaaaggacaccattcgggaacaggcaggcgcccgcaggcaccccacccccgcacccggcgacttcccatctttcatggggccaccccctggcgggcgggacggtttgaaccaccaggccaccacattcattccccaggaggttgaggtttctttcaggcggggattgacggccgttcccccaccacctccctcttttttctttttttcatccttcttgtctctttggttttctggaggctctgagctttcctgtctttccttttttcttgaggaggatttcaaaggctttccaaggattttgtttttcccccgttccctttttggaattttaaattttggcattaagttcattttgcaatgggtttgggagtttgtgggagaagggccttgaagttttcagtaaggagtgtgcgaggcgggcggggcggagtgaatgagctctcaggagggaggatggtgcaggcaggggtgaggagcgccggancggcgagcgggaggcactggcctcgagagcccgagcgcaaggcgggcctcgcgggcggcgacggagccgggatcggtgcctcagcgttcgggctggagacgaggccaggtctccagctggggtggacgt

SEQ ID NO: 20265 - DNA, 448 bp, Homo sapiens
  SIMILAR (329)..(3): 981254mologous to Homo sapiens megakaryocyte stimulating factor; MSF,accession number U70136,Smith-Waterman Score=571.
actttaacttcattatgaaggacacctttgtcttgataagccagtctggcaggtgaatattgaattctgatggtgtgtgtttgagaaggtcctatagcacgttcaaagcgacgtctcctaacctgtgtcgtttctccatacgctggataatttagagcaggccttcttccagggcacttctgtacaggttcctgtttataaatatactgctgaatgctgccacctctcttgaaaaaatacacagattcaggccagttcttatatttagctgttgaaagcgctgccactatttgtccagttagtcctccaaatcctttgaaaattggtttgttcataatctcagtggtagtaattgtcttttttgttgtagatactttgggtgcaagagtagttgttttaagagtagtaatttgaatggtgtggtatcttctcgtgccgaatacagcag

SEQ ID NO: 20266 - DNA, 455 bp, Homo sapiens
  SIMILAR (2)..(238): 741254mologous to Mus musculus This gene is isolated by means of differential display method using ttw, an excellent mouse model for ectopic ossification.~similar to megakaryocyte stimulating factor prec,accession number AB034730,Smith-Waterman Score=371.
cacctgcaactgtgattataactgtcaacactacatggagtgctgccctgatttcaagagagtctgcactgcggagctttcctgtaaaggccgctgctttgagtccttccagagagggagggagtgtgactgcgacgcccaatgtaagaagtatgacaagtgctgtcccgattatgagagtttctgtgcagaagtaaaagataaccagaagaacagaactaacaagaaacctacccccaaaccaccagttgtagatgaagctggaagtggattggacaatggtgacttcaagggcacaacttctgacacggctaccacccaacacaataaaggcagcacattttccaagatcacaacaggccaaccaataaataccagacccagtcttccacctaattctgatacatctaaagagacggcttttgccgggaaataagagacaacccgttggacct

SEQ ID NO: 20267 - DNA, 1572 bp, Homo sapiens
  SIMILAR (1)..(1569): 1001254mologous to Homo sapiens tpr-met fusion protein,accession number U19348,Smith-Waterman Score=2720.
atggcggcggtgttgcagcaagtcctggagcgcacggagctgaacaagctgcccaagtctgtccagaacaaacttgaaaagttccttgctgatcagcaatccgagatcgatggcctgaaggggcggcatgagaaatttaaggtggagagcgaacaacagtattttgaaatagaaaagaggttgtcccacagtcaggagagacttgtgaatgaaacccgagagtgtcaaagcttgcggcttgagctagagaaactcaacaatcaactgaaggcactaactgagaaaaacaaagaacttgaaattgctcaggatcgcaatattgccattcagagccaatttacaagaacaaaggaagaattagaagctgagaaaagagacttaattagaaccaatgagagactatctcaagaacttgaatacttaacagatcagtttcctaattcatctcagaacggttcatgccgacaagtgcagtatcctctgacagacatgtcccccatcctaactagtggggactctgatatatccagtccattactgcaaaatactgtccacattgacctcagtgctctaaatccagagctggtccaggcagtgcagcatgtagtgattgggcccagtagcctgattgtgcatttcaatgaagtcataggaagagggcattttggttgtgtatatcatgggactttgttggacaatgatggcaagaaaattcactgtgctgtgaaatccttgaacagaatcactgacataggagaagtttcccaatttctgaccgagggaatcatcatgaaagattttagtcatcccaatgtcctctcgctcctgggaatctgcctgcgaagtgaagggtctccgctggtggtcctaccatacatgaaacatggagatcttcgaaatttcattcgaaatgagactcataatccaactgtaaaagatcttattggctttggtcttcaagtagccaaaggcatgaaatatcttgcaagcaaaaagtttgtccacagagacttggctgcaagaaactgtatgctggatgaaaaattcacagtcaaggttgctgattttggtcttgccagagacatgtatgataaagaatactatagtgtacacaacaaaacaggtgcaaagctgccagtgaagtggatggctttggaaagtctgcaaactcaaaagtttaccaccaagtcagatgtgtggtcctttggcgtgctcctctgggagctgatgacaagaggagccccaccttatcctgacgtaaacacctttgatataactgtttacttgttgcaagggagaagactcctacaacccgaatactgcccagaccccttatatgaagtaatgctaaaatgctggcaccctaaagccgaaatgcgcccatccttttctgaactggtgtcccggatatcagcgatcttctctactttcattggggagcactatgtccatgtgaacgctacttatgtgaacgtaaaatgtgtcgctccgtatccttctctgttgccatcagaagataacgctgatgatgaggtggacacacgaccagcctccttctgggagacatcatag

SEQ ID NO: 20268 - DNA, 1746 bp, Homo sapiens
  SIMILAR (15)..(1523): 1001254mologous to Homo sapiens 55 kd protein,accession number X62947,Smith-Waterman Score=2601.
ctggccccaccgacatggcggcggtgttgcagcaagtcctggagcgcacggagctgaacaagctgcccaagtctgtccagaacaaacttgaaaagttccttgctgatcggcaatccgagatcgatggcctgaaggggcggcatgagaaatttaaggtggagagcgaacaacagtattttgaaatagaaaagaggttgtcccacagtcaggagagacttgtgaatgaaacccgagagtgtcaaagcttgcggcttgagctagagaaactcaacaatcaactgaaggcactaactgagaaaaacaaagaacttgaaattgctcaggatcgcaatattgccattcagagccaatttacaagaacaaaggaagaattagaagctgagaaaagagacttaattagaaccaatgagagactatctcaagaacttgaatacttaacagaggatgttaaacgtctgaatgaaaaacttaaagaaagcaatacaacaaagggtgaacttcagttaaaattggatgaacttcaagcttctgatgtttctgttaagtatcgagaaaaacgcttggagcaagaaaaggaattgctacataggctccaaggccacatcatcgagaacccacaatacttcagtgatgcctgtgttcaccacatcaagcgccgggacatcgtgctcaagtgggagctgggggagggcgcctttgggaaggtcttccttgctgagtgccacaacctcctgcctgagcaggacaagatgctggtggctgtcaaggcactgaaggaggcgtccgagagtgctcggcaggacttccaacgtgaggctgagctgctcaccatgctgcagcaccagcacatcgtgcgcttcttcggcgtctgcaccgagggccgccccctgctcatggtcttcgagtatatgcggcacggggacctcaaccgcttcctccgatcccatggacccgatgccaagctgctggctggtggggaggatgtggctccaggccccctgggtctggggcagctgctggccgtggctagccaggtcgctgcggggatggtgtacctggcgggtctgcattttgtgcaccgggacctggccacacgcaactgtctagtgggccagggactggtggtcaagattggtgattttggcatgagcagggatatctacagcaccgactattaccgtgtgggaggccgcaccatgctgcccattcgctggatgccgcccgagagcatcctgtaccgtaagttcaccaccgagagcgacgtgtggagcttcggcgtggtgctctgggagatcttcacctacggcaagcagccctggtaccagctctccaacacggaggcaatcgactgcatcacgcagggacgtgagttggagcggccacgtgcctgcccaccagaggtctacgccatcatgcggggctgctggcagcgggagccccagcaacgccacagcatcaaggatgtgcacgcccggctgcaagccctggcccaggcacctcctgtctacctggatgtcctgggctagggggccggcccaggggctgggagtggttagccggaatactggggcctgccctcagcatcccccatagctcccagcagccccagggtgatctcgaagtatctaattcgccctcagcatgtgggaagggacaggtgggggctgggagtagaggatgttcctgcttctctaggcaaggtcccgtcatagcaattatatttattatcccttgaaaaaaaaaaaa

SEQ ID NO: 20269 - DNA, 7782 bp, Homo sapiens
  SIMILAR (89)..(6478): 981254mologous to Homo sapiens Tpr,accession number U69668,Smith-Waterman Score=10230.
ccaggcgtctgggtcctgctggtcttcgcctttcttctccgcttctaccccgtcggccgctgccactggggtccctggccccaccgacatggcggcggtgttgcagcaagtcctggagcgcacggagctgaacaagctgcccaagtctgtccagaacaaacttgaaaagttccttgctgatcagcaatccgagatcgatggcctgaaggggcggcatgagaaatttaaggtggagagcgaacaacagtattttgaaatagaaaagaggttgtcccacagtcaggagagacttgtgaatgaaacccgagagtgtcaaagcttgcggcttgagctagagaaactcaacaatcaactgaaggcactaactgagaaaaacaaagaacttgaaattgctcaggatcgcaatattgccattcagagccaatttacaagaacaaaggaagaattagaagctgagaaaagagacttaattagaaccaatgagagactatctcaagaacttgaatacttaacagaggatgttaaacgtctgaatgaaaaacttaaagaaagcaatacaacaaagggtgaacttcagttaaaattggatgaacttcaagcttctgatgtttctgttaagtatcgagaaaaacgcttggagcaagaaaaggaattgctacatagtcagaatacatggctgaatacagagttgaaaaccaaaactgatgaacttctggctcttggaagagaaaaagggaatgagattctagagcttaaatgtaatcttgaaaataaaaaagaagaggtttctagactggaagaacaaatgaatggcttaaaaacatcaaatgaacatcttcaaaagcatgtggaggatctgttgaccaaattaaaagaggccaaggaacaacaggccagtatggaagagaaattccacaatgaattaaatgcccacataaaactttctaatttgtacaagagtgccgctgatgactcagaagcaaagagcaatgaactaacccgggcagtagaggaactacacaaacttttgaaagaagctggtgaagccaacaaagcaatacaagatcatcttctagaggtggagcaatccaaagatcaaatggaaaaagaaatgcttgagaaaatagggagattggagaaggaattagagaatgcaaatgaccttctttctgccacaaaacgtaaaggagccatattgtctgaagaagagcttgccgccatgtctcctactgcagcagctgtagctaagatagtgaaacctgggatgaaactaactgagctctataatgcttatgtggaaactcaggatcagttgcttttggagaaactagagaacaaaagaattaataagtacctagatgaaatagtgaaagaagtggaagccaaagcaccaattttgaaacgccagcgtgaggaatatgaacgtgcacagaaagctgtagcaagtttatctgttaagcttgaacaagctatgaaggagattcagcgattgcaggaggacactgataaagccaacaagcaatcatctgtacttgagagagataatcgaagaatggaaatacaagtaaaagatctttcacaacagattagagtgcttttgatggaacttgaagaagcaaggggtaaccacgtaattcgtgatgaggaagtaagctctgctgatataagtagttcatctgaggtaatatcacagcatctagtatcttacagaaatattgaagagcttcaacaacaaaatcaacgtctcttagtggcccttagagagcttggggaaaccagagaaagagaagaacaagaaacaacttcatccaaaatcactgagcttcagctcaaacttgagagtgcccttactgaactagaacaactccgcaaatcacgacagcatcaaatgcagcttgttgattccatagttcgtcagcgtgatatgtaccgtattttattgtcacaaacaacaggagttgccattccattacatgcttcaagcttagatgatgtttctcttgcatcaactccaaaacgtccaagtacatcacagactgtttccactcctgctccagtacctgttattgaatcaacagaggctatagaggctaaggctgcccttaaacagttgcaggaaatttttgagaactacaaaaaagaaaaagcagaaaatgaaaaaatacaaaatgagcagcttgagaaacttcaagaacaagttacagatttgcgatcacaaaataccaaaatttctacccagctagattttgcttctaaacgttatgaaatgctgcaagataatgttgaaggatatcgtcgagaaataacatcacttcatgagagaaatcagaaactcactgccacaactcaaaagcaagaacagattatcaatacgatgactcaagatttgagaggagcaaatgagaagctagctgtcgcagaaataagagcagaaaatttgaagaaggaaaaggaaatgcttaaattgtctgaagttcgtctttctcagcaaagagagtctttgttagctgaacaaagggggcaaaacttactgctaactaatctgcaaacaattcagggaatactggagcgatctgaaacagaaaccaaacaaaggcttagtagccagatagaaaaactggaacatgagatctctcatctaaagaagaagttggaaaatgaggtggaacaaaggcatacacttactagaaatctagatgttcaacttttagatacaaagagacaactggatacagagacaaatcttcatcttaacacaaaagaactattaaaaaatgctcaaaaagaaattgccacattgaaacggcacctcagtaatatggaagtccaagttgcttctcagtcttcacagagaactggtaaaggtcagcctagcaacaaagaagatgtggatgatcttgtgagtcagctaagacagacagaagagcaggtgaatgacttaaaggagagactcaaaacaagtacgagcaatgtggaacaatatcaagcaatggttactagtttagaagaatccctgaacaaggaaaaacaggtgacagaagaagtgcgtaagaatattgaagttcgtttaaaagagtcagctgaatttcagacacagttggaaaagaagttgatggaagtagagaaggaaaaacaagaacttcaggatgataaaagaagagccatagagagcatggaacaacagttatctgaattgaagaaaacactttctagtgttcagaatgaagtacaagaagctcttcagagagcaagcacagctttaagtaatgagcagcaagccagacgtgactgtcaggaacaagctaaaatagctgtggaagctcagaataagtatgagagagaattgatgctgcatgctgctgatgttgaagctctacaagctgcgaaggagcaggtttcaaaaatggcatcagtccgtcagcatttggaagaaacaacacagaaagcagaatcacagttgttggagtgtaaagcatcttgggaggaaagagagagaatgttaaaggatgaagtttccaaatgtgtatgtcgctgtgaagatctggagaaacaaaacagattacttcatgatcagatcgaaaaattaagtgacaaggtcgttgcctctgtgaaggaaggtgtacaaggtccactgaatgtatctctcagtgaagaaggaaaatctcaagaacaaattttggaaattctcagatttatacgacgagaaaaagaaattgctgaaactaggtttgaggtggctcaggttgagagtctgcgttatcgacaaagggttgaacttttagaaagagagctgcaggaactgcaagatagtctaaatgctgaaagggagaaagtccaggtaactgcaaaaacaatggctcagcatgaagaactgatgaagaaaactgaaacaatgaatgtagttatggagaccaataaaatgctaagagaagagaaggagagactagaacaggatctacagcaaatgcaagcaaaggtgaggaaactggagttagatattttacccttacaagaagcaaatgctgagctgagtgagaaaagcggtatgttgcaggcagagaagaagctcttagaagaggatgtcaaacgttggaaagcacgtaaccagcatctagtaagtcaacagaaagatccagatacagaagaatatcggaagctcctttctgaaaaggaagttcatactaagcgtattcaacaattgacagaagaaattggtagacttaaagctgaaattgcaagatcaaatgcatctttgactaacaaccagaacttaattcagagtctgaaggaagatctaaataaagtaagaactgaaaaggaaaccatccagaaggacttagatgccaaaataattgatatccaagaaaaagtcaaaactattactcaagttaagaaaattggacgtaggtacaagactcaatatgaagaacttaaagcacaacaggataaggttatggagacatcggctcagtcctctggagaccatcaggagcagcatgtttcagtccaggaaatgcaggaactcaaagaaacgctcaaccaagctgaaacaaaatcaaaatcacttgaaagtcaagtagagaatctgcagaagacattatctgaaaaagagacagaagcaagaaatctccaggaacagactgtgcaacttcagtctgaactttcacgacttcgtcaggatcttcaagatagaaccacacaggaggagcagctccgacaacagataactgaaaaggaagaaaaaaccagaaaggctattgtagcagcaaagtcaaaaattgcacacttagctggtgtaaaagatcagctaactaaagaaaatgaggagcttaaacaaaggaatggagccttagatcagcagaaagatgaattggatgttcgcattactgcgctaaagtcccaatatgaaggtcgaattagtcgcttggaaagagaactcagggagcatcaagagagacaccttgagcagagagatgagcctcaagaaccttctaataaggtccctgaacagcagagacagatcacattgaaaacaactccagcttctggtgaaagaggaattgccagcacatcagacccaccaacagccaatatcaagccaactcctgttgtgtctactccaagtaaagtgacagctgcagctatggctggaaataagtcaacacccagggctagtatccgcccaatggttacacctgcaactgttacaaatcccactactaccccaacagctacagtgatgcccactacacaagtggaatcacaggaagctatgcagtcagaagggcctgtggaacatgttccagtttttggaagcacaagtggatccgttcgttctactagtcctaatgtccagccttctatctctcaacctattttaactgttcagcaacaaacacaggctacagcttttgtgcaacccactcaacagagtcatcctcagattgagcctgccaatcaagagttatcttcaaacatagtagaggttgttcagagttcaccagttgagcggccttctacttccacagcagtatttggcacagtttcggctacccccagttcttctttgccaaagcgtacacgtgaagaggaagaggatagcaccatagaagcatcagaccaagtctctgatgatacagtggaaatgcctcttccaaagaagttgaaaagtgtcacacctgtgggaactgaggaagaagttatggcagaagaaagtactgatggagaggtagagactcaggtatacaaccaggattctcaagattccattggagaaggagttacccagggagattatacacctatggaagacagtgaagaaacctctcagtctctacaaatagatcttgggccacttcaatcagatcagcagacgacaacttcatcccaggatggtcaaggcaaaggagatgatgtcattgtaattgacagtgatgatgaagaagaggatgatgatgaaaatgatggagaacatgaggattatgaagaggatgaggaagatgatgatgatgatgaagatgacacagggatgggagatgagggtgaagatagtaatgaaggaactggtagtgccgatggcaatgatggttatgaagctgatgatgctgagggtggtgatgggactgatccaggtacagaaacagaagaaagtatgggtggaggtgaaggtaatcacagagctgctgattctcaaaacagtggtgaaggaaatacaggtgctgcagaatcttctttttctcaggaggtttctagagaacaacagccatcatcagcatctgaaagacaggccccatcagagcacctcagtcaccgagacgcccaccacatccacttcccccaagactgaccattcatgccccacctcaggagttgggaccaccagttcagagaattcagatgacccgaaggcagtctgtaggacgtgggccttcagttgactccagggaatagggtgggcatgcaacagcatttttttgatggatgaagacagaacagttccaaagtacttccaaactcttgtggtgccacatcgtactgatggatttgctgaagcaattcattcgccgcaggttgctggtgtccctagattccggtttgggccaccctgaagatatgccacaaacaagttctagtcactctgatcttggccagcttgcttctcaaggagaattgtctttaggtttaggaatgtatgaaacacccctgttcctagctcatgaagaagagtcaggtggccgaagtgttcccactactccactacaagtagcagccccagtgactgtatttactgagagcaccacctctgatgcttcggaacatgcctctcaatctgttccaatggtgactacatccactggcactttatctacaacaaatgaaacagcaacaggtgatgatggagatgaagtatttgtggaggcagaatctgaaggtattagttcagaagcaggcctagaaattgatagccagcaggaagaagagccggttcaagcatttgattgagtcagatcttccccccccccacagccagatcttccctttagtcatctgtagatactagtagtagtcaaccaaaaaccttcagacgaggtagacttccagcaacattttaacaaggtgtccgtggtcgtcagtttaacagacagagaggtgtgagccatccaatgggagggagaggaggaataaacagaggaaatattaattaaatggtctgtaaacaataacaactgtgaataagattatcaaatctgttttagtgtaatgattgtcaagtttaaaaacatttttatatataaactggtatactcatgtcaatattctttattaataaaatgtttttcagtgtcaaaatttattattcatttcttcattagttgactcctcctttgctcatcagtctaaggacagttgtaccagactttggataaggtctgcccagaacgagtagtaattgctcttgctgttctactaggcacatcaatgttatagtattgatctaaatggaagagaaaacatttttttagttaaaaagaaaacaatgcccaaactaaaaaataacttatgttgactattatgctcaaagacaatgtttatcattttaatagagatgtttttactaattaatttgaactttataacaaaaagaaaaacaattgcctagacttttcagcttttttgatgtttcacaagattgacatttcaccatctttttgtaaaatcaggttcagctctcctttatgaagtaaacattaaagagtaaccaagtttgaaaaataatttact

SEQ ID NO: 20270 - DNA, 11835 bp, Homo sapiens
  SIMILAR (328)..(6945): 901254mologous to Homo sapiens Tpr,accession number U69668,Smith-Waterman Score=9673.
gcgcaagaggatcagggatagcctctgagctcgggttcccagggttcgtagcttccaacggctgcgcgcgcacttcggtcgcgggcggtgaggtgctgttgctgaaacgctgccgctgagggtggactcgatttcccagggtcccgccgcgggagtctccggcgggcgggcgcgcgcgagccaccgagcgaggtgatagaggcggcggcccaggcgtctgggtcctgctggtcttcgcctttcttctccgcttctaccccgtcggccgctgccactggggtccctgggccccaccgacatgggcggcggtgttgcagcaagtcctgggagcgcacggagctgaacaagctggcccaagtctgtccagaacaaacttgaaaagttccttgctgatcagcaattccgagatcgatgggccttgaaggggcgggcatggagaaatttaaaggtgggagagcgaacaacagtattttgaaatagaaaagaggttgtcccacagtcaggagagacttgtgaatgaaacccgagagtgtcaaagcttgcggcttgagctagagaaactcaacaatcaactgaaggcccctacctgagaaaaacaaagaacttgaaattgcctcaggatcgcaatattgcccattcagagccaatttacaagaacaaaggaagaattagaagctgagaaaagagacttaattagaacccaatgagagactatctcaagaacttgaatacttaacagaggatgttaaacgtctgaatgaaaaacttaaagaaagcaatacaacaaagggtgaacttcagttaaaattggatgaacttcaagcttctgatgtttctgttaagtatcgagaaaaacgcttggagcaagaaaaggaattgctacatagtcagaatacatggctgaatacagagttgaaaaccaaaactgatgaacttctggctcttggaagagaaaaagggaatgagattctagagcttaaatgtaatcttgaaaataaaaaagaagaggtttctagactggaagaacaaatgaatggcttaaaaacatcaaatgaacatcttcaaaagcatgtggaggatctgttgaccaaattaaaagaggccaaggaacaacaggccagtatggaagagaaattccacaatgaattaaatgcccacataaaactttctaatttgtacaagagtgccgctgatgactcagaagcaaagagcaatgaactaacccgggcagtagaggaactacacaaacttttgaaagaagctggtgaagccaacaaagcaatacaagatcatcttctagaggtggagcaatccaaagatcaaatggaaaaagaaatgcttgagaaaatagggagattggagaaggaattagagaatgcaaatgaccttctttctgccacaaaacgtaaaggagccatattgtctgaagaagagcttgccgccatgtctcctactgcagcagctgtagctaagatagtgaaacctgggatgaaactaactgagctctataatgcttatgtggaaactcaggatcagttgcttttggagaaactagagaacaaaagaattaataagtacctagatgaaatagtgaaagaagtggaagccaaagcaccaattttgaaacgccagcgtgaggaatatgaacgtgcacagaaagctgtagcaagtttatctgttaagcttgaacaagctatgaaggagattcagcgattgcaggaggacactgataaagccaacaagcaatcatctgtacttgagagagataatcgaagaatggaaatacaagtaaaagatctttcacaacagattagagtgcttttgatggaacttgaagaagcaaggggtaaccacgtaattcgtgatgaggaagtaagctctgctgatataagtagttcatctgaggtaatatcacagcatctagtatcttacagaaatattgaagagcttcaacaacaaaatcaacgtctcttagtggcccttagagagcttggggaaaccagagaaagagaagaacaagaaacaacttcatccaaaatcactgagcttcagctcaaacttgagagtgcccttactgaactagaacaactccgcaaatcacgacagcatcaaatgcagcttgttgattccatagttcgtcagcgtgatatgtaccgtattttattgtcacaaacaacaggagttgccattccattacatgcttcaagcttagatgatgtttctcttgcatcaactccaaaacgtccaagtacatcacagactgtttccactcctgctccagtacctgttattgaatcaacagaggctatagaggctaaggctgcccttaaacagttgcaggaaatttttgagaactacaaaaaagaaaaagcagaaaatgaaaaaatacaaaatgagcagcttgagaaacttcaagaacaagttacagatttgcgatcacaaaataccaaaatttctacccagctagattttgcttctaaacgttatgaaatgctgcaagataatgttgaaggatatcgtcgagaaataacatcacttcatgagagaaatcagaaactcactgccacaactcaaaagcaagaacagattatcaatacgatgactcaagatttgagaggagcaaatgagaagctagctgtcgcagaagtaagagcagaaaatttgaagaaggaaaaggaaatgcttaaattgtctgaagttcgtctttctcagcaaagagagtctttgttagctgaacaaagggggcaaaacttactgctaactaatctgcaaacaattcagggaatactggagcgatctgaaacagaaaccaaacaaaggcttagtagccagatagaaaaactggaacatgagatctctcatctaaagaagaagttggaaaatgaggtggaacaaaggcatacacttactagaaatctagatgttcaacttttagatacaaagagacaactggatacagagacaaatcttcatcttaacacaaaagaactattaaaaaatgctcaaaaagaaattgccacattgaaacagcacctcagtaatatggaagtccaagttgcttctcagtcttcacagagaactggtaaaggtcagcctagcaacaaagaagatgtggatgatcttgtgagtcagctaagacagacagaagagcaggtgaatgacttaaaggagagactcaaaacaagtacgagcaatgtggaacaatatcaagcaatggttactagtttagaagaatccctgaacaaggaaaaacaggtgacagaagaagtgcgtaagaatattgaagttcgtttaaaagagtcagctgaatttcagacacagttggaaaagaagttgatggaagtagagaaggaaaaacaagaacttcaggatgataaaagaagagccatagagagcatggaacaacagttatctgaattgaagaaaacactttctagtgttcagaatgaagtacaagaagctcttcagagagcaagcacagctttaagtaatgagcagcaagccagacgtgactgtcaggaacaagctaaaatagctgtggaagctcagaataagtatgagagagaattgatgctgcatgctgctgatgttgaagctctacaagctgcgaaggagcaggtttcaaaaatggcatcagtccgtcagcatttggaagaaacaacacagaaagcagaatcacagttgttggagtgtaaagcatcttgggaggaaagagagagaatgttaaaggatgaagtttccaaatgtgtatgtcgctgtgaagatctggagaaacaaaacagattacttcatgatcagatcgaaaaattaagtgacaaggtcgttgcctctgtgaaggaaggtgtacaaggtccactgaatgtatctctcagtgaagaaggaaaatctcaagaacaaattttggaaattctcagatttatacgacgagaaaaagaaattgctgaaactaggtttgaggtggctcaggttgagagtctgcgttatcgacaaagggttgaacttttagaaagagagctgcaggaactcgaagatagtctaaatgctgaaagggagaaagtccaggtaactgcaaaaacaatggctcagcatgaagaactgatgaagaaaactgaaacaatgaatgtagttatggagaccaataaaatgctaagagaagagaaggagagactagaacaggatctacagcaaatgcaagcaaaggtgaggaaactggagttagatattttacccttacaagaagcaaatgctgagctgagtgagaaaagcggtatgttgcaggcagagaagaagctcttagaagaggatgtcaaacgttggaaagcacgtaaccagcatctagtaagtcaacagaaagatccagatacagaagaatatcggaagctcctttctgaaaaggaagttcatactaagcgtattcaacaattgacagaagaaattggtagacttaaagctgaaattgcaagatcaaatgcatctttgactaacaaccagaacttaattcagagtctgaaggaagatctaaataaagtaagaactgaaaaggaaaccatccagaaggacttagatgccaaaataattgatatccaagaaaaagtcaaaactattactcaagttaagaaaattggacgtaggtacaagactcaatatgaagaacttaaagcacaacaggataaggttatggagacatcggctcagtcctctggagaccatcaggagcagcatgtttcagtccaggaaatgcaggaactcaaagaaacgctcaaccaagctgaaacaaaatcaaaatcacttgaaagtcaagtagagaatctgcagaagacattatctgaaaaagagacagaagcaagaaatctccaggaacagactgtgcaacttcagtctgaactttcacgacttcgtcaggatcttcaagatagaaccacacaggaggagcagctccgacaacagataactgaaaaggaagaaaaaaccagaaaggctattgtagcagcaaagtcaaaaattgcacacttagctggtgtaaaagatcagctaactaaagaaaatgaggagcttaaacaaaggaatggagccttagatcagcagaaagatgaattggatgttcgcattactgcgctaaagtcccaatatgaaggtcgaattagtcgcttggaaagagaactcagggagcatcaagagagacaccttgagcagagagatgagcctcaagaaccttctaataaggtccctgaacagcagagacagatcacattgaaaacaactccagcttctggtgaaagaggaattgccagcacatcagacccaccaacagccaatatcaagccaactcctgttgtgtctactccaagtaaagtgacagctgcagctatggctggaaataagtcaacacccagggctagtatccgcccaatggttacacctgcaactgttacaaatcccactactaccccaacagctacagtgatgcccactacacaagtggaatcacaggaagctatgcagtcagaagggcctgtggaacatgttccagtttttggaagcacaagtggatccgttcgttctactagtcctaatgtccagccttctatctctcaacctattttaactgttcagcaacaaacacaggctacagcttttgtgcaacccactcaacagagtcatcctcagattgagcctgccaatcaagagttatcttcaaacatagtagaggttgttcagagttcaccagttgagcggccttctacttccacagcagtatttggcacagtttcggctacccccagttcttctttgccaaagcgtacacgtgaagaggaagaggatagcaccatagaagcatcagaccaagtctctgatgatacagtggaaatgcctcttccaaagaagttgaaaagtgtcacacctgtaggaactgaggaagaagttatggcagaagaaagtactgatggagaggtagagactcaggtatacaaccaggattctcaagattccattggagaaggagttacccagggagattatacacctatggaagacagtgaagaaacctctcagtctctacaaatagatcttgggccacttcaatcagatcagcagacgacaacttcatcccaggatggtcaaggcaaaggagatgatgtcattgtaattgacagtgatgatgaagaagaggatgaggaagatgatgatgatgatgaagatgacacagggatgggagatgagggtgaagatagtaatgaaggaactggtagtgccgatggcaatgatggttatgaagctgatgatgctgagggtggtgatgggactgatccaggtacagaaacagaagaaagtatgggtggaggtgaaggtaatcacagagctgctgattctcaaaacagtggtgaaggaaatacaggtgctgcagaatcttctttttctcaggaggtttctagagaacaacagccatcatcagcatctgaaagacaggcccctcgagcacctcagtcaccgagacgcccaccacatccacttcccccttgactgtctcattcatgccccacctcaggagttgggaccaccagttcatagaattcagatgacccgaaggcagtctgtaggacgtggccttcaattgactccaggaataggtggcatgcattacagcatttttttgatgatgaagacaggacagttccaagtttctccaacttcttgtggtgccacatcgtactgatggatttgctgaagcaaattcattcgcccgcaggttgctggtgtccctagattccggtttgggccacctggaagatatgccacaaacaagttctagtccactctgatcttgggccagcggctttgctcaaggaggtttaggaatgtatgaaacacccctgttcctagctcatgtaagaagagtcaggtggccgaagtgttcccactactccactacaagtagcagccccaagtgactgtatttactgagagcacccacctctgatgcttcggaacatgccctcctcaatctgttcccaatggtgacctacatcccactggcactttatcctacaacaaatgaaacagcaacaggtgatgatggagatgaagtatttgtggaggcagaatctgaaggtattagttcagaaggcaggccttagaaattgatagccagcaggaagaagagccggttcaagcatctgatgagtcagatctcccctccaccagccaggatcctccttctagctcatctgtagatactagtagtagtcaaccaaagcctttcagacgagtaagacttcagacaacattgagacaaggtgtccgtggtcgtcagtttaacagacagagaggtgtgagccatgcaatgggagggagaggaggaataaacagaggaaatattaattaaatggtctgtaaacaataacaactgtgaataagattatcaaatctgttttagtgtaatgattgtcaagtttaaaaacatttttatatataaactggtatactcatgtcaatattctttattaataaaatgtttttcagtgtcaaaatttattattcatttcttcattagttgactcctcctttgctcatcagtctaaggacagttgtaccagactttggataaggtctgcccagaacgagtagtaattgctcttgctgttctactaggcacatcaatgttatagtattgatctttagaaaaggcatagtaatcatagccgtcaggttttctggatggttggggcagtggatatagccggagggtaaccacatttgggaaggtcctctccacaggtatactcactttaacttcattatggagggacacctttgtcttgataagccagtctggcagggtgaatattgaattctgatgggtgtgtgtttgaggagggtcctataggcacgttcaaagcgacgtcttcctaacctgtgtcggtttctccatacactggataatttagagcaggccttcttccagggcacttctgtacaggttcctgtttataaatatactgctgaatgctgccacctctcttgaaaaaatacacagattcaggccagttcttatatttagctgttgaaagcgctgccactatttgtccagttagtcctccaaatcctttgaaaattggtttggggtaccctgcatcttttatatcattggtaaaacgccagtactgaagaatccctttaaagaagaaagtttttccttccacagttgccacctagtaaaaacagtatccaatgggggaaggaataccccaaacttcagtaattctgcgagctggagatggtggactgaatggacttagcatccagaaataatgacctcggaaatgccaactaaatgtccccattggcgcaaagtaagtcaagtcccatcctactggcttacccattgcatatattggtcctccatcggaaaagcatgggattgaatgaataatgcccttgaattgggtactctcggtaagtaatcccatgtcgggagtaacttcaggcatgaacacatggggcctgagaagcatatgaggtgtttctccttcagcaccacctgcatcttcactctttggatttacttcaactagtttggagtttggagtttggttaggtctggtggtggtttggagcatggcttctgctattcttgaggtagggttcaattctggcattgttgatgtcatcttgcggggagttggtgtcgtctttggttttctcactctaggcattgtttttggctttttggtagaagtgggttttttgggtgctttggttggcttttgaggtttaggagttgtcgctttagaattagtagctctgtcttttggtttagctgtttcttcaggtttgttcataatctcagtggtagtaattgtcttttttgttgtagttactttgggtgcaagagtagttgttttaagagtagtaattttgaatggtgtggtatcttgagttgtggtagatgttacttgtgtggttgtagctgttattttggattcggtagttttttctgttgtagttgctgtctcttttgtcatcttaggtgcagcagttgtagtttcaggtgtagtacgtaagtctctttctgttgtcttgtctttagctgttgtagtcatttcaggtttagtcgctgcaggagtcttagttgtaggtacaccaggttccttgggactgttttcaagagcttttggtgtgggttctgcagaaagctcaggagttgattcatcagggcttttgtggatagtggtaggctccttggtggtagttggagtagagacctctgaagtggttggaggaggtgtctcaggagtagttggagcaggcttcttgggggtagtgggtgcaggctccttgggggtagttggagcagtctccttaggtgtagttggagcaggcttgtcagaggtggtggatgtgggccccttggtggtggtgggtgcaagctccttgggggcaggcttcttgggagtagtgggtgcaggttccttgagggtagttggagcagtccccttaggggtagttggagcaggctccttaggggtagttggagcaggctccttaggggtagttggagcagtccccttaggggtagttggagcgggcttgtcagaggtggtggatgtgggctccttggtggtggtgggtgcaagctccttgggggcaggcttcttgggagtagtgggtgcaggttccttgagggtagttggagcagtccctttaggggtagttggagcagtctccttaggggtagttggagcaggctccttaggggtagttggagcaggctccttaggggtagttggagcaggctccttaggggtgttgggagccgctgccttgggagtggtgggagcaggctcctcaggggtggtgggtgtgggctcctcaggggtggtgggtgcgagctcctcaggggtggtgggtgcgggcttctcaggggtggtgggtgcgagcttctcgggggtggtgggcgtgagcttcttgggggtggtgggtgcagtctccttgggggtagttggggcaggctctttgggagcggtgggtgcaggcttcttggtggtggtgggtgcaggttccttgggagtggtgggtgcaggctccttgggggtagttggggcaggcttcttgggggtggtgggtgcaggctccttgggagtggtgggtgcaggctccttggtggtggtgggtgaaggctccttgggagtggtgggtgcagacttggtagtggtgggtgcaggctccttggtagtggtgggtgcagacttggtggtggtgggtgcaggctccttgggagtggtgggtgaaggctccttggtggtggtgggtgcaggctccttgggagtggtgggtgcaggctccttgggggtagttggggcaggcttcttgggggcagtgggtgcaggctctttgggagtggtgggtgcaggctccttggtggtgggtgcaggctccttgggagtggtgggtgtaggctccttgggagtggtgggtgcaggctccttgggggtagttggggcaggcttcttgggggtggtgggtgcaggctccttgggagtggtgggtgcagacttggtggtggtgggtgcaggctccttggtggtggtgggtgcaggctccttgggagtggtgggtgcaggctccttggtggtggtgggtgcaggctccttgggagtggtgggtgcagacttggtggtggtgggtgcaggctccttgggggtggtgggtgcagacttgatggtggtaggtgtgggctctttgggtgtggtagatgcaggctccttgggagtggtgggcgtgggctccttgggagtggtgagagcagggcctttggttgtaagtttcagctttgggtgtaggtttagccagcactttagatgttgggtcgctaaatctttaagcagatgttttctctatactttgtgtctctttagcggaagtagtcttctcttttccatcagttgaagtctgtttatttgttgtagtagtttctttagtttcaactgttgtctctttattcactgtcaaagacgtctctttagatgtatcagaattaggtggaagactgggtctgggatttattggttttgctgttgtgatcttgggagatgtgctgactttattgtgttgggtggtagacgtgtcaggagttgtgaccttgaagtcaccattgtccaatccacttccagcttcatctacaactggtggtttgggggtaggtttctttttagttctgttcttcttgttatcttttactttgagtttcttctgtaattctctattagcagctgaatttttggaagacttgattttccaaattgttgaagaagaagaggaagaggaggaggaggaggaggactcttgattttcagaaacagaatgttcttctgttatttcctctgattctataactttcttagtcttcttcttgtttggtggtttgggtgaacgtttggttgttgatttgatggtttgagatgctcctgaaggtggaggtgctttctttgaagatggtggtgatgtgggattatgcacttctgcacagaaactctcataatcgggacagcacttgtcatacttcttacattgggcgtcgcagtcacactccctccctctctcgaaggactcaaagcagcggcctttacaggaaagctccgcagtgcagactctcttgaaatcagggcagcactccatgtagtgttgacagttataatcacagttgcaggtggcatctctagaatacccttccccacatctccctgcacagcttgataaatcttgagatgaaacttgctgaatcacgaaaacagacagcagcaacaacaggtaaatgggaagtgttttccatgccat

SEQ ID NO: 20271 - DNA, 433 bp, Homo sapiens
  SIMILAR (62)..(352): 721254mologous to Mus musculus putative hepatic transcription factor,accession number AF156604,Smith-Waterman Score=338.
ccagcgtggtggaattcggggcaatggggaccctttcccctgggtcggtctttctgtgggtctgtctgtccctaccacaggcagtgaacggcggctgtcaggggacctcagctccatgccaggccctgggactctgagcgtccgtgtctctcccccgcaacccatcctcagccggggccgtccagacagcaacaagaccgagaaccggcgtatcacacacatctccgcggagcagaagcggcgcttcaacatcaagctggggtttgacacccttcatgggctcgtgagcacactcagtgcccagcccagcctcaaggagcgtgcgggcttgcaggaggaggcccagcagctgcgggatgagattgaggagctcaatgccgccattaacctgtgccagcagcagctgcccgccacaggggtacccatcacacac

SEQ ID NO: 20272 - DNA, 417 bp, Homo sapiens
  SIMILAR (198)..(266): 471254mologous to Homo sapiens putative hepatic transcription factor,accession number AF156603,Smith-Waterman Score=55.
aggatttcgcagggtgtcacttgagttctagtttcctggggtgaggtgggggatgaggaagctgggtgcccctgacctggcccccttctctcagatgtgaagcggaggaagagccccgtgtgtggcttcgtgacccccctgcaggggcctgaggctgatgcgcaccggaagccggaggtagctgggttctggaccgcctgcccacctgcccacctgcccacccaccaagaccagcccctgcctcctgtagccttgcgctgagcaaacagggatggggtgaagggtgggagatgggtgtgcggtgctcccctctttactgatccccctcccccggcccctaccccaggcctgggtcctggaggggaactacttggagcggtgcatcgggtggtgatgcgggaataccacaagtggcct

SEQ ID NO: 20273 - DNA, 3157 bp, Homo sapiens
  SIMILAR (766)..(1641): 811254mologous to Homo sapiens putative hepatic transcription factor,accession number AF156603,Smith-Waterman Score=1202.
atggccggcgcgctggcaggtctggccgcgggcttgcaggtcccgcgggtcgcgcccagcccagactcggactcggacacagactcggaggacccgagtctccggcgcagcgcgggcggcttgctccgctcgcaggtcatccacagcggtcacttcatggtgtcgtcgccgcacagcgactcgctgccccggcggcgcgaccaggaggggtccgtggggccctccgacttcgggccgcgcagtatcgaccccacactcacacgcctcttcgagtgcttgagcctggcctacagtggcaagctggtgtctcccaagtggaagaatttcaaaggcctcaagctgctctgcagagacaagatccgcctgaacaacgccatctggagggcctggtatatccagtatgtgaagcggaggaagagccccgtgtgtggcttcgtgacccccctgcaggggcctgaggctgatgcgcaccggaagccggaggccgtggtcctggaggggaactactggaagcggcgcatcgaggtggtgatgcgggaataccacaagtggcgcatctactacaagaagcgggtcagtgggggagggccagggaggccccagagctttcctcctgcggctgccggctaccgcccgcctcggaagatccctggaaaggggatcctgacccccgagcttgcgcccctcgggccctccattcagtcccgggccgacagcgccaccgtgtggccacagcgtctcctagcggcctccttacctaggggtcggctccgtaagcccagcagggaagatgacctcctggcccctaagcaggcggaaggcaggtggccgccgccggagcaatggtgcaaacagctcttctccagtgtggtccccgtgctgctgggggacccagaggaggagccgggtgggcggcagctcctggacctcaattgctttttgtccgacatctcagacactctcttcaccatgactcagtccggcccttcgcccctgcagctgccgcctgaggatgcctacgtcggcaatgctgacatgatccagccggacctgacgccactgcagccaagcctggatgacttcatggacatctcagatttctttaccaactcccgcctcccacagccgcccatgccttcaaacttcccagagccccccagcttcagccccgtggttgactccctcttcagcagtgggaccctgggcccagaggtgcccccggcttcctcggccatgacccacctctctggacacagccgtctgcaggctcggaacagctgccctggccccttggactccagcgccttcctgagttctgatttcctccttcctgaagaccccaagccccggctcccaccccctcctgtacccccacctctgctgcattaccctccccctgccaagcaggagacagtccctgaattcccctgcacattccttcccccgaccccggcccctacaccgccccggccacctccaggcccggccacattggccccttccaggcccctgcttgtccccaaagcggagcggctctcacccccagcgcccagcggcagtgaacggcggctgtcaggggacctcagctccatgccaggccctgggactctgagcgtccgtgtctctcccccgcaacccatcctcagccggggccgtccagacagcaacaaggccctcctgggctccttcctaggctcacccaactctctgctccccgagaccgagaaccggcgtatcacacacatctccgcggagcaggaagcggcgcttcaacatcaagctggggtttgacacccttcatgggctcgtgagcacactcagtgcccagcccagcctcaaggtgagcaaagctaccacgctgcagaagacagctgagtacatccttatgctaccagcaggagcgtgcgggcttgcaggaggaggcccagcagctgcggggatgagattgaggagcttcaatgccgccattaacctgtgccagcagcagctgcccgccacaggggtacccattcacacaccagcgttttgaccagatgcgagacatgtttgatggactacgtccgaacccgtacgctgcacaactgggaagttctgggtggtatcctccctcaagcccatggctggggggctgcaggggctgtggcagggcagctccttgacctgggcccagttcagcatcctcatccggcctctgtttgagtccttcaacgggatggtgtccacggcaagtgtgcacaccctccgccagacctcactggcctggctggaccagtactgctctctgcccgctctccggccaactgtcctgaaactccctacgtcagctgggcacatcttaccagtatcctgaaccgacccgggccgcattccctgaggcaagccacacgggcagtcacagagggcacccttggcaaacctttatagtcctgggccagaccctggctgctcactcagctgccctgggggctgctttccctggggcacgggctccagggatcatctttggggcactcctttccttgccccaggccctggctctgccctttccctgggggggttggaagcagggtccaggtttcacacttgccacctcctggaggtcaagaagagcagagtccccgtccctgctctgccactgtgctccagcaccgtgaccttgggtgactcgtccgctgtctttggaaccgctgtgtttcaatctgcaaaatgggggatggggaaaggttcaaatcaaacagatgaccccccaggccttggcagctgtgaacattgggggcctaggctggcaactccgggggctcaacggtggaaagaggaggatgctgtttctctgtcaacctcccacttgctccccgacaggtggggcacagactctctgttcctgagcagagaagcagaaaaggaggttccctctctctgctccttcactgctgacccagaggggctgcaggatggtttcccctgggagaggccaggagggcctgatcccaggagacaccagggccagagtgaccacagcagggcaggcatcatcgtgtgtgtgtgtgtgtgtggatgtgtgtgtgtgggttttgtaaagaattcttgaccaataaaagcaaaaactgtctgcgcaaaaaaaaaaaaaaaaaaaaaaaaaaaaaagtcgtatcgatgt

SEQ ID NO: 20274 - DNA, 466 bp, Homo sapiens
gtcttcatccttagcaccacagacttctgaggtcctgtgccctttacttgctggtgaggtgtcataggtagaaaagggctggcccttcagatctgggggtgtggtgagtggcaagtaagggcagaattttaggagaaccagagtcacccgctggctctactgagattgttacacccagaagccttttggttaccgcctcatgaagaatatgcttcccgcattgtcctagtcccagttgtattctcacaggtgttatgtgcaggacacaatccaaatcataaacctgctcatgcccaacacatttctgctaatagggagagggacccaccacacacccacacatgccagaggtccctcctcacagaggagagggcctgtgtctgtagaaggttaaagctgacaacatgtgaaacatcccagaattatgactcttcccaagtttaaaatacattctcctcatgagagc

SEQ ID NO: 20275 - DNA, 1020 bp, Homo sapiens
  SIMILAR (649)..(870): 941254mologous to Homo sapiens sigma 3 protein,accession number X99459,Smith-Waterman Score=364.
atgcccttggtccagcccgcctttggtggcttagcacaggcccctgcagccacctggctgcccacagccctgcgcacaggagctctgcacctgctctttctccctggggcagaaggtgttgacttgggaaccagggatgcaaatgttagttttaaaggagacattaaattgagtcttccagtttacataatgaagatcaaaccacctaagcctgttacaggcaccacattcaaaagccccctggaagtctttgcaaagatcaaggactgctacggactgggctccgggcagaatcatttcatcaaggacagtcagtgggagcagcaagctgagatcttcaacgcttcctacaagaagtacctagatagggagtgggaggaagagccactcagctgcctatttgcaatgccaccggaagtcaagggcccctcagaccccgagggtgtgtggccctgtgctgcgcccattgcagtctctcagctcagctgctcctcctcctacctggtgctggcctgcgaggatggtgtgctcacgctgtgggacctggccaaagggtgctcattgcttgattttgccttcacatcctacaagtccctcacacacttgctggtcacagcccctgtgcccatggcctcctcccctaccccgttttctgaccggcttccagaagaaattcaacagcagattgttcgagagactttccatctagtcctcaagcgggatgacaacatctgtaacttcttggagggtggaagtttgattggtggctctgactacaaactgatctaccggcactatgctaccctctactttgtattttgtgtggattcctcagagagtgaacttggaatcttggacctcatccagctggagcagttcaagaaggacaacgaggaaacaggcttcggctcaggcacccgggccctggagcaagccctggagaagacgaaagccaacatcaagtgggtgaaggagaacaaggaggtggtgctccagtggttcacagaaaacagcaaatag

SEQ ID NO: 20276 - DNA, 1131 bp, Homo sapiens
  SIMILAR (329)..(484): 1001254mologous to Homo sapiens Human secreted protein encoded by gene 67,accession number Y36290,Smith-Waterman Score= 293.
atggcccagcccctgtgcccgccgctctccgagtcctggatgctctctgcggcctggggcccaactcggcggccgccgccctccgacaaggactgcggccgctccctcgtctcgtccccagactcatggggcagcaccccagccgacagccccgtggcgagccccgcgcggccaggcaccctccgggaccccgcgccccctccgcagaagctgacgcacagggaactcgaggaactttccataaggctagtgtgcagcccctggggacgggccaactgtgggctggtggttggtgaagcctgtctttgcaagagccctggcagcaaggtgctcatcttttccaagaatggctctgtgtgccttatggatgtggccaagcgtgaaatcatctgtgcctttgcccctccgggagcctttcctctggaggtcccctggaagccagtgtttgctgtgtctccagaccatccatgtttcctgctccgaggagactattcacatgaaactgcgtccaccgacgatgctggaatccaatattctgttttctattttaattttgaggcctgcccactcctggaaaatatctcaaaaaattgtaccattcctcaaagggacttggataacatggccttcccccaagcactgccactggagaagagatgtgagcgtttcctccagaagaggttgcccgttgcctctgacacgccctgtggcatcaggcaagtcactctttctgagcttcagttttcacagttcctaaaggaggaactatcttgggtggtgctgaggtaccttcttcctctaaccttccagaagtgctctggttctgcccttagggccctgctgtcccgaggggctgtcagccacagctggaaggatgagaaaaatccaggcaaggtgcactacatcctccaggaggtggtgatgggtgggatggtgttggaaacaaacatgaatgaaatcgtggctcagattgaggctcaaaacaggctggagaaatccgagggtggcctttcagcagcccctgcgcgggctgtgtctgctgtgaaaaacatcaacctgccagagattcctcggaacatcaacattggcgatctcaacatcaaagttcccaacctgtcccagtttgtctga

SEQ ID NO: 20277 - DNA, 452 bp, Homo sapiens
  SIMILAR (62)..(130): 1001254mologous to Homo sapiens sigma 3 protein,accession number X99459,Smith-Waterman Score=121.
tttcgtggaaggaggagctttctgggagtagccggtgctgagagaaccgtggctggcaaagatgattcaggcgattctggttttcaacaaccatgggaagccacggctagtccgcttctaccagcgtttcgtgagtgcggcccggcttcaccacgccccttcagggcgcccactatgtcttccctcctctttggcctctcggcgcccgggggcaccgctcttcggtcagctggctgctcctgcaccgagcatgaccctcgccctacttaagcatttaatctaggcgcaggctggtgccaggccttctgtctcccgccctactgccccgctctcgctgacccttttcttgatcctggcatttctgtgccattttgtgacattttcccgtgggtctctgggaacgagatagaagcgacagtggggagtgtgcctcgatgagaacttgagtgatt

SEQ ID NO: 20278 - DNA, 2711 bp, Homo sapiens
  SIMILAR (120)..(716): 571254mologous to Homo sapiens sigma 3 protein,accession number X99459,Smith-Waterman Score=443.
gtgtttgtctcgtgtgatcatgtacgtcgtgttatcgagctctgtccctcatgatgcacgagcggaaggaggagctttctgggagtagccggtgctgagagaaccgtggctggcaaagtatgattcaggcgattctggttgtcaacaaccatgggaagccacggctagtccgctttctaccagcgtttcccagaagaaaattcaacagcagattgttcgagagactttccatctagtcctcaagcgggatgacaacatcctgtaacttcttggagggtggaagttttgattgggtggctctgactacaaacctgatctaccggcactatgctaccctctactttgtattttgtgtggattcctcagagagtgaacttggaatctttggacctcatccaggtttttgttggaaactcctggataagttgtttcgaaaatgttgtgtgaatttggatttgaaccttccataatggataaaggtgcactacatcctccaggaggtggtgatgggtggggatggtgttggaaacaaacatgaatgaaatcgtggctcagattgaggctccaaacaggctggagaaatccgaggggtggcctttcagcagccccctgcgcgggctgtgtctgctgtgaaaaacatcaacctgccagagattcctcggaacatcaacattggcgatctcaacatcaaagttcccaacctgtcccagtttgtctgaggatcaagtattggcctgaaatagagtccttaagacaagcaaagacaagtcaaggcaagcacgtctggaaacagaacccttttggagcctttagaagagtcaagcctcaggacctggaaaggggtgcgtctggggaagactgtttggcatggaatagggaagggattcctattgacactgctcgggtgcacccagttctccacatgtgcagtcatgccgttctctgatgcatacggccactgcagatgtgaggggccctgccttcctcagtagggagtcaacatgcccaagtcatttgcacctttacctctcacatggatgctcccaagggttagggactgcattgagcaggcccacctgcttcccagaacctcctcactagggctgagcaccttctctgagtagagtcttcatccttagcaccacagacttctgaggtcctgtgccctttacttgctggtgaggtgtcataggtagaaaagggctggcccttcagatctgggggtgtggtgagtggcaagtaagggcagaattttaggagaaccagagtcacccgctggctctactgagattgttacacccagaatccttttgtgtttttttgtggttttttttttttgaggtggagtcttgctctgtcacccaggctggagtgctgtggtgcaatctcggctcactgcaacctctgcttcccgggttcaagcaatttctccgtgtctcagccgtccccacgtagcgtgggattacaggcacccaccaccatgcccagctaattgttgtatgtttagtagagacaggggtttcacccatgttgggccaggctgggctcgaactccgtggacctcaagtgatctaccccgccttggcctccccaaagtgcctggcattacaggtgtgaagccacccgtgcccggcccacccagaatcctttggtataagccaagccttttggttacccgccctcatgaaagaatatgcttcccgcattgtcctagtccccagttggtattctcacagggtgttatgtggcagggacacaattccaaattcataaaccggggttcatggcccaacacatttctgctaattaggggagaggggacccaccacacacccacacatggccagaggtccctccttcacagtggagaggggcctgtgtctgtagtaaggtttaaagtttgacaacatgttgaaacatcccagaattatgactcttcccaagtttaaaatacattctcctcatgagagcagaaggtttgttgctgtgttgtgaatgatgagctgcctccatagggaacccactgccacctgggccagcttctggagcatgagaacctgagccagggtcacccttgtggggcctggacatgacgcacgctggctgcgactaggagcagggctgcctcttctccctccccaaggtctgcttgtgggcacgctctgttccctcaggtgccattctcccagggcttaggcgcccataaatgttctttctgtggtggagtagggcctcctgcttccatactgtcgcatgggctagatctcaggtgtggtgttgagccaccttaagatgagggctgcttcgcagtaaagtttccagcctgggcccctcttgggccttctggctggggaccctcagcctcctgatgctgttgcagggcaggtctgagagggtgcccagcagcacccggtgtcagggccaccttgttttccatttttgaacagcgctccctgtggtttgtgcccactgctcaatacagcctccgatcctcactcttgaaagctccatgataagcacagagatgggcagtgtgggtcagaaggtgggccgcttcctgtggaagagggaagtgtaggtgaatagatatcaaaacccctgatgtcattcttttgaggggttggattttcttttttctggcagacatttcagtacattcacatttctctcacatttgctgaatgtgagatcagaataaaggagatcggcgt

SEQ ID NO: 20279 - DNA, 370 bp, Homo sapiens
  SIMILAR (3)..(368): 481254mologous to Homo sapiens thyroid receptor interactor,accession number L40407,Smith-Waterman Score=201.
acagcctgcacctggcagccatcctgggggagacatccacggtggagaagctgtcgcagcaggcgccgggctgtgtgtggcggagcgtaggggccacacggcgtgcacctggcctgccgtgtgggggcacacgcctgtgcccgtgccctgctcagccccgcccccggcgccccagggaagcccccgacacctacctcgctcgggccctgaccgtactcccgacaccaaccatacccctgtcgccttgtacccgattccgacttggagaaggaagaagaggagagccacaccccactccacgtggccgttatccacaaagtgtggagatggtccggctgctccgagatgctggagctgaccttgacaaacg

SEQ ID NO: 20280 - DNA, 1266 bp, Homo sapiens
  SIMILAR (369)..(1055): 701254mologous to Homo sapiens Human I kappa B-beta polypeptide,accession number W97349,Smith-Waterman Score=752.
  misc_feature (1)...(1266): n = a,t,c or g
ttcccggcaaagcccagctacaggcgggcgactgcggtgggcccctgatgcggcgttggccatggctgtagtcgcgtgcttgggacaagctgccgactcagataaatggggcgacagccgcctgagctccctgggtccggacgcagcggcccccggaggacctgggttgggcgcggagttgggcccggggctgtcgtgggctcccctcgtcttcggctacgtcactgaggatggggacacgcttctcggccggcactgagtacatggacctgcagaatgacctangccaggtgagccacgagggatggtgtagggcttggggtccagggttcccagtgtgactccctaccgcctgtcctctgcttctgcagacagccctgcacctggcagccatcctgggggagacatccacggtggagaagctgtacgcagcaggcgccgggctgtgtgtggcggagcgtaggggccacacggcgctgcacctggcctgccgtgtgggggcacacgcctgtgcccgtgccctgcttcagccccgcccccggcgccccagggaagcccccgacacctacctcgctcagggccctgaccgtactcccgacaccaaccatacccctgtcgccttgtaccccgattccgacttggagaaggaagaagaggagagtgaggaggactggaagctgcagttggaggttgaaaattacgagggccacaccccactccacgtggccgttatccacaaagatgtggagatggtccggctgctccgagatgctggagcctgaccttgacaaaccggagcccacgtgcggccggagcccccttcatttggcagtggaaggccccaggcaagccgatgtgctggagcttctccctgagggcaggcgcgaacccctgctgccccgcatgtacggtggccgcacccccactcggcagtgccatgctccggcccaacccccatcctcgcccgctctcctccgtgcacaacggagcccctgagcccgagggcgaggacgagaaatccggccccctgcagcagcagtagcgacagtgacagccgcctgagcccctctgcctggtcccctttgcccccaggatgaatacgacgacattgtggttcacagcagccgcagccaaacccggctgcctcccaccccagcctcaaaacctcttcctgacgacccccgccccgtgtgatttgtttcattgttaatataatttccagtttaataaacaaaaccctagttctgacaaccaaaaaaaaaaaaa

SEQ ID NO: 20281 - DNA, 801 bp, Homo sapiens
  SIMILAR (346)..(531): 311254mologous to Crithidia fasciculata NADH dehydrogenase subunit 5,accession number U30221,Smith-Waterman Score=72.
cccggcgaccacgcgtcgaagacagacaggatggtgaggaggctgacttcggctgcggaaactgaaggcaataatgttggcttttggaaggggcaagacgagaaactctgaagaaagctctgactctcaggaagttatctggaaagatacctggatgtttactgccttgggacactgtgggatctccatgtttggactatgggacagagaattgaccctaactaactatgaactatttatttcctcctcccctacccctagttaagtgccacaaagactgtgttatgtagtcagtacttttctcatgtatctttctctagaccatttatatacgggtgaaatgaaagcttttttgcatgtacttgatactcagtctgtaaactcagacttcgctttttttgtgagactatcctttcaatatttttataaacttttgtgtgtgctgtggcagggaacagttaacaaggagtttatttagaggggtttttttcattttttgtttttcttgttttgttttgttttgttttgttcttcttggtgtgctttttggatgggaccagaacttaacattttcctgaggactaggaagctcatcagacactgggaatgcagtgattcttctaatgatggtcaactgcaaggagaaactgtttacatccttcccactacacagttgctatgatatgtaacaagtcacacatgtatatatcacacaagtcttaccaattctgcgtcactaggaagctatagcatggtcgtgaaagctctcctaatacttacttacttaaatagccatggaag

SEQ ID NO: 20282 - DNA, 1995 bp, Homo sapiens
  SIMILAR (874)..(1143): 521254mologous to Homo sapiens ras activator RasGRP,accession number AF106071,Smith-Waterman Score=225.
atggagacttttgtgatcggatggcagccagccgtcactgtgtggaccattggcgtggctccacctccaacactggaaattacatctcaacatgagatttgggtggcacaacatccaaactacatcataagtgtaaagcaggagtccccagcccccatgccatggacagctgtggcattagattcccataggagcatgaacactattgtgaactgtgcacgcgagggatctacactgcatgctccttatgagagtctaatgcctgatgatctgaggtggaacagtttcatcctgaaatcatctccatcccctcattcccggtccatggaaaaattgtcttccatgaaactggtccctggtgccaaatacattagggaccactgtttagtaaaggaggccctgaccatccataaaagccccatcctgctggcagctattgatctactagggaatctcagtgggttcactgattaccaaagctatgtcatccatggctgcctggagaataatccaaccttggaaagatcgattgctttatttaatggaatctctaagtgggtccagttgatggttcttagcaaaccaaccccccagcaaagggcagaagtcatcacaaagtttatcaatgttgcaaagggtgctactgcagagttaaacctttggcaacacccaaaaatcattatgctatctcaggtggtgccaggggtattttcccaagaacactccctaattcgatccctacatgctaatctccatttcacagtctgctttccagaagacccacttgcaatggtggcaggaatggtccaagaaagcacgtgcccatgtgagattctgcagctgccaaccaccggccagctagcaaactggaatgaaatgacagagttggtctcctccaacggcaattactgcaattaccgcaagccctttccgacctgcgatgggctcaaaatccccatccttggagtacacttgaaagactggatagctgtccatgtcaatttcccagactggacagaggagatcaaagtgaacattgtgaaaatgcaccagctctccgttaccctgagtgaactagtctccctgcagaatgcgtctcaccacttagaacccaacatggatttgatcaacctgctcacggtggtgggctgcaaccggcagatcttatgcacgccatttcccttttcagaacttctcatcggccccagggattgttcctgtgaattaagggcacttctccagcagagcacagtgatagaagctgccaacacttcagagtatgaaaatgcagctcttgggaaagttggcatggtggttgttatccttggaagaataaatgtcaagtttcttactgagatccttctaaaagatttatgctccagaaaaaatgttgcatgccagactcgtgctgtttgcactaaccttgatgctttgctgtcaagcagtcagatgtcaaataatcaccaccctttttcacttccagcgcaggatgaggtgtttgagttccctggagtcactgctggacacagggatttagacagcagagccatcacactggttacaggctcttctcgcaagatctctgtgaggctacagagggccaccaccagccaggccacccagactgaacctgtctggtcagaggctggctggggggactcggggtcccacaccttccctaaaatgaaatccaagttccatgacaaagcagcaaaggacaaaggctttgccaaatgggaaaatgagaagcccagggtgcatgctggtgtggatgttgtagaccggggcacggagtttgaacttgaccaggatgaaggagaagagaccagacaggatggtgagcctgcagaggctgtttccgtgggtgctgtagctgcccctggaatgtcagaaaaagagcttctccaggtagatggtaggacgcctaccagagtgctcaggatggccgaccttgtgggcatctctgaattcagaggagaacctgcttttgtttaa

SEQ ID NO: 20283 - DNA, 420 bp, Homo sapiens
  SIMILAR (1)..(177): 741254mologous to Homo sapiens Human secreted protein, SEQ ID NO: 8172,accession number G04091,Smith-Waterman Score=228.
atgggcaaagacttcatgactaaaacaccaaaagcaattgcaacaaaagccaaaattaacaaatgggatctaattaacctaaggagcttctgcacagcaaaagaaattagcattggaatgaacaggcaacctgcagaaggggagaaaatttttgcaatctacccatctgacaaaggacaagaattccggcaaaggcgccactggccacagaggtttccaggaagaaaattgacaccccaaagatctcgtaacagtaccccacaattatgtacgatctcaggagatgtgtatgagttcaagttgacaaggggtggacttgagatggttaatactgagtgtgaacttgatcggattgaaggatgcaaagtattgattctgggtgtgtctgtgagggtgttgccaaaggagattaacatttga

SEQ ID NO: 20284 - DNA, 906 bp, Homo sapiens; identical to SEQ ID NO: 12842
  SIMILAR (2)..(79): 801254mologous to Homo sapiens Peptide sequence derived from a human secreted protein,accession number Y40039,Smith-Waterman Score=108.

SEQ ID NO: 20285 - DNA, 3835 bp, Homo sapiens
  SIMILAR (910)..(1470): 851254mologous to Homo sapiens putative p150,accession number U93565,Smith-Waterman Score=848.
gagcccaggagctggcggagggcgttcgtcctgggactgcacttgctcccgtcgggtcgcccggcttcaccggacccgcaggctcccggggcagggccggggccagagctcgcgtgtcggcgggacatgcgctgcgtcgcctctaacctcgggctgtgctctttttccaggtggcccgccggtttctgagccttctgccctgcggggacacggtctgcaccctgcccgcggccacggaccatgaccatgaccctccacaccaaagcatccgggatggccctactgcatcagatccaagggaacgagctggagcccctgaaccgtccgcagctcaagatccccctggagcggcccctgggcgaggtgtacctggacagcagcaagcccgccgtgtacaactaccccgagggcgccgcctacgagttcaacgccgcggccgccgccaacgcgcaggtctacggtcagaccggcctcccctacggccccgggtctgaggctgcggcgttcggctccaacggcctggggggtttccccccactcaacagcgtgtctccgagcccgctgatgctactgcacccgccgccgcagctgtcgcctttcctgcagccccacggccagcaggtgccctactacctggagaacgagcccagcggctacacggtgcgcgaggccggcccgccggcattctacaggccaaattcagataatcgacgccagggtggcagagaaagattggccagtaccaatgacaagggaagtatggctatggaatctgccaaggagactcgctactgtgcagtgtgcaatgactatgcttcaggctaccattatggagtctggtcctgtgagggctgcaaggccttcttcaagagaagtattcaagaacttccaacactatgttgaataggatggtactggtaccaaaacagagatatagaccaatggaacagaacagagccctcagaaataataccacacatctacaaccatctgatctttgacaaacgtgacaaaaacaagaaatggggaaaggattccctatttaataaatagtgctgggaaaactggctagccatatgtagaaagctgaaactggatcacttccttacaccttatacaaaaattaattcaagatggattaaagacttaaatgttagaactaaaaccataaaaaccctagaagaaaacctaggcaataccattcaggacataggcatgggcaaggacttcatgtctaaaacaccaaaagcaatggcaacaaaagccaaaattgacaaatgggatctaattaaactaaagagcttctgttctttgctggggtatctgaagactgaaaacacagcaaaagaaactaccatcagactgaacaggcaacctacagaatgggagaaaatttttgcaatctactcatctgacaaagggctaatatccagaatctacaaagaactcaaacaaatttacaagaaaaaaggaaccccatcaacaagtgggtgaaggatatgaacagacacttctcaaaagaagacatttatgcagccaacagacacatgaaaaaatgctcatcatcattggccatcagagaaatgcaaatcaaaaccacaatgagataccatctcacaccagttagaatggtgatcattagaaagtcaggaaacgacaggtgctggagaggatgtggagaaataggaacacttttacactgttggtgggactgtaaactggttcaaccattgtggaagacagtgtggcgattcctcagggatctacaactagaaataccatttgacccagccatcccattactgggtatatacccaaaggattataaatcatgctgctataaagacacatgcacacgtatgtttattgcggcactattcacaatagcaaagacttggaaccaacctaaatatccaacaacaataggctagattaagaaaatgtggcacatatacaccatggaatactatgcagccataaaaaaggatgagttcatatacttgtagggacatggatgaagctggaaaccatcattctcagcaaactaacacaggaacagaaaaccaaacaccacatgttctcattcataactgggagtcgaacaatgagaacacatggatgcagggaggggaacatcacacactggggtctgttgagggattctgtaaacatggtgactcaagcacactgagtatacaggagccactgcgtaacattgaatgtgtttcccaaacatggaaggggaaagaaagagaagaagaggcagccacacctaatggaaatgaaccagatggttatcaaaagcatacagcactttcaagaggcagaaaaagagaaaatacagaagaggatcagtgggagggaagatgggtgctaaagctgagcaagggaactgcttgttacaatggcttaaacccattttggccgctgcaagatggagtggcactaatgagagccagtttagcagggaaatatgatccattacaagattcacagtgtcctgctggtgacataaaacaaaaacaggtgctcaagagcacagcttttattgatactgagaccagaggaaaagttctcctaagaggatcatctcctggtatgatgtgcaagtctgtgggtgcgatggttaatactaagtgtcaacttgattggactgaaggacgcaaagtattgttcctgggtgtgtctgtgagggtgttgccaaaggagattaacattttgagtcagtggactgggagaggcagaccaacccttaatcagctgccagcactatctaatcagctgccagggtggctaggataaaagcaggaggaggaaagtggaaggactagactggcttagtcttctggcctccatctttctcctgtactggatgtttcctgcccttgaacatcagattccagggtcttcagcttttggactcttggacttacaccagttggtttgccaggggcttttgggcctttggccacagactgaaggctgcactgtcagcttccctacttttgaggttttgggactcagactggctctccttgctcctcaagcttgcagacagcctattgtgggaccttgtgatcgtgacacattttctagcaaaggatgtgtgtcagcgagaagggtatgtgactgtaacatccgtgtatcctaccataaaccacctcacccagaagcagcagatctgatagaatgtttgaacagactattaaaacattcgaataagatgtccgtccagagacaaaaccctctaggttggagagctctctcggatgcaccgaaccaaccactgatacacggtgctgcatctaccatcgctaaaatacacagtgtgatggttaatattgagtgtcaacttgattggattgaaggatgcaaagtattgttcctgcgtgtgtctgggcagggaggagcatgcctggaactcaggaaattcactgaggtgtctcttggtgtttccattgctaatgataatggtgaaccagaaattgcagcaatcatggcctcacaagggcatgatctctgtaaaagacatgtgagaaatacaggcaagagagaaagactagaggtagtgacccagggcagagctggtgatggcctgtactgtggtggccgtgaaatgaatgcagatcggtgtcgctctgggagtgaacagaaacagatggggcctttatgcaaagcacagatagcacagcgtgggggccctgagcaacggagggattcaggttaccacagcatccccatcctacactcaagcacaagaggagagaaaaagggagcctgcggaggcagagaaggaccagcccgcagcatcaccattgctcagggccctgactga

SEQ ID NO: 20286 - DNA, 908 bp, Homo sapiens
  SIMILAR (14)..(346): 991254mologous to Homo sapiens CGI-91 protein,accession number AF151849,Smith-Waterman Score=569.
ccgcgtcccagccatggcgacatcctcgttcgcgctgccccgaatactcggcgcgggtgcccgggccccgtcgcgctggttgggctttctcgggaaggcgaccccccggcctgctcggccgagccgcaggacgcttggaagcgcgacggcccttatgatccgcgagtcggaggacagcaccgatttcaacgacaagattttgaatgagcccctcaagcactctgacttcttcaatgtcaaggaactgttttccgtgagaagcctcttcgatgcccgagtccatctgggacacaaagctggctgtcggcacaggtttatggagccgtacatctttgggagccgcctgggaccacgacatcatcgacctgggaacagacagccacgcacctccagctggccttgaacttcaccgcccacatggcctaccgtaagggcatcatcttgtttataagccgcaaccggcagttctcgtacctgattgagaacatggcccgtgactgtggcgaagtacgcccacactcgctacttcatgggcggcatgctgaccaacgcgcgcctactctatggccccacggtccgcctgccggaccttcatcatcttcctgcacacgctcaacaacatctttgagccacacgtggccgtgagagacgcagccaagatgaacatccccacagtgggcatcgtggacaccaactgcaacccctgcctcatcacctaccctgtacccggcaatgacgactctccgctggctgtgcacctctactgcaggctcttccagacggccatcacccgggccaaggagaagcggcagcaggttgaggctctctatcgcctgcagggccagaaggagcccggggaccaggggccagcccaccctcctggggctgacatgagccattccctgtga

SEQ ID NO: 20287 - DNA, 1569 bp, Homo sapiens
  SIMILAR (619)..(981): 921254mologous to Homo sapiens CGI-91 protein,accession number AF151849,Smith-Waterman Score=580.
atggcgacggaaggggaggccgctcggcctggcctggagggagacctcgctctgccccgcgtcccagccatggcgacatcctcggccgcgctgccccgaatactcggcgcgggtgcccgggccccgtcgcgctggttgggctttctcgggaaggcgacccccccggcctgctcggccgagccgcaggacgcttggaagcgcgacggcccttatgatccgcgagtcggaggacagcaccggtctttcctggggctgctgggctcccggctccccacctcggtgtcacagaaggcacttgggagcagggatttcaacgacaagattttgaatgagcccctcaagcactctgacttcttcaatgtcaaggaactgttttccgtgagaagcctcttcgatgcccgagtccatctgggacacaaagctggctgtcggcacaggtatgaaccctttgctgccccagtggagaggtcacacggttaccaggagggatgggcctgggcccagggagccatcagcatcgggggctggcaggtgtttccagagcatcggaaaaggaggtccaaggtggagccctgggtgctccagtgtttggagtcagtgaagagggacagccgggggtttatggagccgtacatctttgggagccgcctggaccacgacatcatcgacctggaacagacagccacgcacctccagctggccttgaacttcaccgcccacatggcctaccgcaagggcatcatcttgtttataagccgcaaccggcagttctcgtacctgattgagaacatggcccgtgactgtggcgagtacgcccacactcgctacttcaggggcggcatgctgaccaacgcgcgcctcctctttggccccacggtccgcctgccggacctcatcatcttcctgcacacgctcaacaacatctttgagccacacgtggccgtgaggagacgcagccaagatgaacatccccacagtgggcatcgtggacaccaactgcaacccctgcctcatcacctaccctgtacccggcaatgacggactctccgctggctgtgcacctctactgcaggctcttccagacggccatcacccgggccaaggagaagcggcacatggtttgaggctctcctaatcgcctgcagggccagaaggagcccggggaccagtgggccaggccaccctcctggggctgacatgagccattccctgagatgttcactctcctaccaaagcaaaccacagccaagcctgtctggagctgggagtcccctttccccagccctggggtcagcgggcatcctcagtcgttggttacttaattcaggtggatgtcacagtgcagacatccaccgttccaccacagaaccagtgggctgagcggaccaacgttgccatgtgcgattgctctgtggggaacaagagcacaagaagggtgaacgacatgtgcaagaacggccccttggcttgcaattaaggacctcagtggctggtatgggccgaggttgttagaaggttgttgctgttccctgttgattccaagcaagccctccctttcaccgtgacccc

SEQ ID NO: 20288 - DNA, 688 bp, Homo sapiens
  SIMILAR (316)..(573): 461254mologous to Homo sapiens ribosomal protein S20,accession number L06498,Smith-Waterman Score=98.
ggagcgataccatttcacacgggaacagctttgacatgttccgaattaatccgactcctctaggaatcttggccttcgagcccaagattcggcacgagcgcggtcgtgaagggctgaggattttttggttccgcaacgctcctgcttcctgagctcacccgctgcttcgctcatcgcccgaggaaacaagtcggtccaggaagccccgctgcgcaacaaccaatggctttctaaggataccggaaaaaacaactccgtggagcccggaggtcgcaattcaccgaaatcgcaatcacccctaacaagccgccaacggtaaaatccttggaaaaagttttttgctgacttgataaggaggcgcaaaaagaaaaggaatctcaaaagtgaaagggaccagttcgaatgcctaccaagacttttgagaatcactacaaagaaaaactcctttgtggtgaaaggttctaaagaccgttgggatcgttttccagattgagatttcacaaagccgactccattgactttgcacaagtcctttctgagatttgtttaagcagattactttccatcagtatttgagcccaggagtttgaggtgagaagtcaccatttgcagatgctttaagtcaaatatctatacatacaattgatgaccagtttgttaaaaaaaaaaaaaaaaaaaaaaaatggtt

SEQ ID NO: 20289 - DNA, 683 bp, Homo sapiens
  SIMILAR (35)..(601): 481254mologous to Homo sapiens ribosomal protein L18a,accession number L05093,Smith-Waterman Score=308.
  misc_feature (1)...(683): n = a,t,c or g
cgaacgcggaagagcacgccactgaaggcctcggggcacgctacgagagtacaaggtagtgggtcgctgccctgcccattcccataaatgccacacgccgccccttttaccggcatgcgaaactttgcgccctaatcaatgtcgtcgccaagtccccgctttctggtactttgtatctcagttaaagaaagatgaagaaagtcttccaggggagattgtctactgtgggcaaggtgtttgagaaagctccccctgcgggtcgaagaacttcgggatctggctgcgctactgactcccggagcgggcacccacaacattgtaccgggaataaccgggaccctgaccaaccgcaggcggctgttcacccagttgctacccgagacatggggttgcccggcacgncggccccgaagcccacttccatttcagattcattgaaaggttggaggaaattcgccggccagcaaaattgccgccggccgggttgttcaaagcagtttccacgaatttcaagattcaagtttcccgcttgccccaccgggttccttgcgccgtcaagacaagccacgctttcacgaccaagaggcccaacaccttcttctaggtgcagtggccctcgctccggggtgtgcccccaaaataaaactcaggaaacgcccccggtaaaaaaaaaaaaaaaaaaa

SEQ ID NO: 20290 - DNA, 418 bp, Homo sapiens
  SIMILAR (185)..(418): 1001254mologous to Homo sapiens rac protein kinase- beta,accession number M77198,Smith-Waterman Score=426.
tttcgtgtagctcccgacctgctgtccgcaaataaccccatgctgggaaaggcaaaggcgccttggtctctgtggaccctggccaggccccaggctccagactgtgccctgtccacggtgcctcctgcatgtcctgctgccctgagctgtcccgagctaggtgacagcgtaccacgctgccaccatgaatgaggtgtctgtcatcaaagaaggctggctccacaagcgtggtgaatacatcaagacctggaggccacggtacttcctgctgaagagcgacggctccttcattgggtacaaggagaggcccgaggcccctgatcagactctaccccccttaaacaacttctccgtagcagaatgccagctgatgaagaccgagaggccgcgacccaacacctttgtcatacgctgcctg

SEQ ID NO: 20291 - DNA, 2583 bp, Homo sapiens
  SIMILAR (601)..(1515): 731254mologous to Mus musculus protein kinase B gamma,accession number AF124142,Smith-Waterman Score=1209.
atggggtttcaccatgttggccaggctggtcttgaactcctgacctcaggtgaatacatcaagacctggaggccacggtacttcctgctgaagagcgacggctccttcattgggtacaaggagaggcccgaggcccctgatcagactctaccccccttaaacaacttctccgtagcagggcttagttcagagaagctgcttcctctgggaagccccccaaccccccaggctgggttggatgctacctctgagcttctgcacacctctaggcttgtccccatcgcggccctgtctatggagccatcactctctgaatgccagctgatgaagaccgagaggccgcgacccaacacctttgtcatacgctgcctgcagtggaccacagtcatcgagaggaccttccacgtggattctccagacgagagggaggagtggatgcgggccatccagatggtcgccaacagcctcaagcagcgggccccaggcgaggaccccatggactacaagtgtggctcccccagtgactcctccacgactgaggagatggaagtggcggtcagcaaggcacgggctaaagtgaccatgaatgacttcgactatctcaaactccttggcaagggaacctttggcaaagtcatcctggtgcgggagaaggccactggccgctactacgccatgaagatcctgcggaaggaagtcatcattgccaaggcgctgaagtatgccttccagacccacgaccgcctgtgctttgtgatggagtatgccaacgggggtgagctgttcttccacctgtcccgggagcgtgtcttcacagaggagcgggcccggttttatggtgcagagattgtctcggctcttgagtacttgcactcgcgggacgtggtataccgcgacatcaagctggaaaacctcatgctggacaaagatggccacatcaagatcactgactttggcctctgcaaagagggcatcagtgacggggccaccatgaaaaccttctgtgggaccccggagtacctggcgcctgaggtgctggaggacaatgactatggccgggccgtggactggtgggggctgggtgtggtcatgtacgagatgatgtgcggccgcctgcccttctacaaccaggaccacgagcgcctcttcgagctcatcctcatggaagagatccgcttcccgcgcacgctcagccccgaggccaagtccctgcttgctgggctgcttaagaaggaccccaagcagaggcttggtggggggcccagcgatgccaaggaggtcatggagcacaggttcttcctcagcatcaactggcaggacgtggtccagaagaagctcctgccacccttcaaacctcaggtcacgtccgaggtcgacacaaggtacttcgatgatgaatttaccgcccagtccatcacaatcacaccccctgaccgctatgacagcctgggcttactggagctggaccagcggacccacttcccccagttctcctactcggccagcatccgcgaggccccacgttctgcagccttaaggttgaacatgagtgcacgtccatgtcagtgctgtgggactcctgtgcgtgcctcggactgcgtgtgtcggcgggacgcaggcacacgtggctgcaagggtcggtgcttggcctcgcccgcaacaccctcctggaggatgctgagtctcgctgcctccctcgacgcagagccttcaagcgccgcagtccccgacggcttccccgcgggccccactgtctccccaagacgcctggcgaggccgccggggctggaggaggcgctgagcgcgctggggctgcagggagaacgcgagtacgccggggacatcttcgccgaagtcatggtgtgccgcgtgctgcccctgagagccctgccccgcgctgtgaccccggagatgcgcgccctggtggtagactggctggtccaggtgcacgagtacctgggtctggctggtgacacactttatctggcggttcacctgcttgattcctacctgagcgctggccgcgtgcgtctacatcgcctgcagctgctgggcgtggcttgcctgtttgtggcgtgcaaaatggaagagtgcgtgcttcccgagcccgccttcctctgcctcctgagcgcggactccttctcacgggcggagctgctgcgcgccgagcgtcgcatcctgagccgcctggatttccggctgcaccaccccggcccgctgctgtgcctcgggctgctggccgcgctggcagggagcagcccccaggtgatgttacttgccacctacttcctggagctgtctttgctggaggccgaggcggcgggatgggagccgggtcgtcgtgcggctgcggctctgagcctggcgcaccgcttgctcgacggggcgggctccaggctccagccagaactttacagccccgaggaactgggcaccctcgagccgtgcatggcccgcgctgcgctccgaggtcccgcgccgggtcgcgccgcagtcttcctcaagtatgcgcggccccagcgccaggggaccagccttgccgccgcctgcctgctccgccgcctccagtctgagcctccctga

SEQ ID NO: 20292 - DNA, 264 bp, Homo sapiens
  SIMILAR (3)..(128): 1001254mologous to Homo sapiens protein serine/threonine kinase,accession number M95936,Smith-Waterman Score=229.
gtgaatacatcaagacctggaggccacggtacttcctgctgaagagcgacggctccttcattgggtacaaggagaggcccgaggcccctgatcagactctaccccccttaaacaacttctccgtagcagggcttagttcagagaagctgcttcctctgggaagccccccaaccccccaggctgggttggatgctacctctgagcttctgcacacctctaggcttgtccccatcgcggccctgtctatggagccatcactctctg

SEQ ID NO: 20293 - DNA, 687 bp, Homo sapiens
  SIMILAR (47)..(685): 291254mologous to Homo sapiens subunit of RNA polymerase II transcription factor TFIID,accession number Y11354,Smith-Waterman Score=161.
atgcactcgcactcctcagcccttgggtggtcgatgggactaggcaccgtggagcagggggcggcgctcatccgggaggctcgggccgcacaggagcccaccgagggggtgggaggctcaggcatggcgggctgcaggtcccgagccctgccccgcgggaaggcagctaaggcccggcgagaaatcgagcacagcgccgggcagttgacagaacacaatgagaatgttccagcaaagaagtgtatacctaaaggctggtcccaccgcccccgcttggccactcccactcatctcctgaatgaggggctctatggccgcggtccccccgccgggcacgggtggtacagcccatcgctgcaccgcggggggcccgtacgcgaccatcgtggggggggcgttcggggacacgcgctgtgcgcactcacctgtcaccggcagccgcccagcctctccggcggggctctacccccgcccatggccacgctgcgctggttccctttccttgtgtttcccggcagcggcaacggcgccggcagcggcagcggcggcggcgacgcctcctccgaggcaggcccaacggctagcacggcgcggccccccccgccccctccccccagcccccgcttaccgccccctcccaccctctggacggaaataccgccctctcgcgccacaaacaggaagtga

SEQ ID NO: 20294 - DNA, 513 bp, Homo sapiens
  SIMILAR (5)..(199): 1001254mologous to Homo sapiens protein serine/threonine kinase,accession number M95936,Smith-Waterman Score=335.
ggaccgcctgcccttctacaaccaggaccacgagcgcctcttcgagctcatcctcatggaagagatccgcttcccgcgcacgctcagccccgaggccaagtccctgcttgctgggctgcttaagaaggaccccaagcagaggcttggtggggggcccagcgatgccaaggaggtcatggagcacaggttcttcctcagcagccttaaggttgaacatgagtgcacgtccatgtcagtgctgtgggactcctgtgcgtgcctcggactgcgtgtgtcggcgggacgcaggcacacgtgggctgtgtgtgcatgtgtgttctgtgtgagggcagcgtgtcctccagtgtgcatggtgtgtgggcttgggccccatccctggcccgagcatttcatccctgtgggggaggggtgctgacctagtgggaggagccccactgtgatccatgagctgccctgcccacgcctcccctccctgtagcaaccctctgggtgtttggagtttagcttttgtgg

SEQ ID NO: 20295 - DNA, 1230 bp, Homo sapiens
  SIMILAR (1095)..(952): 431254mologous to Daucus carota glycine rich protein (AA 1 - 96),accession number X15706,Smith-Waterman Score=100.
atggctcgcgccaccggcacagctttccaggaggagccagcgtgggagaaagaatctggcgggcaaaagcggcctcttaccacgcttgtggagccagccttctttgatgacagacacctcattcatggtggcagcgtggtacgctgtcacctagctcgggacagctcagggcagcaggacatgcaggaggcaccgtggacagggcacagtctgcaagacaagagaggagctgatgacagagaaaagacaggtctcagacaatccgggatcttgaacaagaaagcaacctactgcgtatgcacggtctggggcctagaagccagtcctgggggcttgaccgaggccctgatccctaccccaagaccttcacttctgtcctcagggaccagcaaccaacagactgagggacgccgaggccactgcttcgtctcaggttcccagaacggaggggaggagggcgcgaggcagcgccagctgggcccctacctggagcctggggcctggccagggtccacagagaccaaggcgcctttgcctttcccagcctggggttatttgcggacagcaggtcgggagctacggtggcgcccagagaagtggcagctggctctagggacaccatgggcatcagctttctctcgtgccccaggggagctggtgggccggacacgctactgcctggcatgtgacagtggcaggctgcccaggtcccggcagaaagaagggagaacctttgtggctccctggtgttcccagcaaaaaagccaaactcctcagctgaggatccaaggcccttcaggacctcgcctctgctgccctgcgttccagcggcccagggacatcgcctctcagggcccttgtaatgcagcagcactaaagtacccactgtgggcccagggctcggcctactgcctagcgcccagtgaacagccaaacacatggctgccattattccagagagaagcaaaggcagccagggctcgggacctgcggcccgccgtgcctgagcctcccaccccctcggtgggctcctgtgcggcccgagcctcccggatgagcgccgccccctgctccacggtgcctagtcccatcgaccacccaagggctgaggagtgcgagtgcatggcgcgggactggcaggcagctccacctgcagccccagtgcgggatccactgggtgaagccagttgggctcctgaggctggtggggatgtgaacctttatgtctag

SEQ ID NO: 20296 - DNA, 2073 bp, Homo sapiens
  SIMILAR (765)..(1481): 481254mologous to Mus musculus protein kinase,accession number M94335,Smith-Waterman Score=415.
cgctcagcttggcacgaggtagccgttgggcctgcctcggaggaggcgtcgccgccgccgctgccgttgccggcgccgttgccgctgccgggaaacacaaggaaagggaaccagcgcagcgtggcgatgggcgggggtagagccccgccggagaggctgggcggctgccggtgacagactgtgccctgtccacggtgcctcctgcatgtcctgctgccctgagctgtcccgagctaggtgacagcgtaccacgctgccaccatgaatgaggtgtctgtcatcaaagaaggctggctccacaagcgtggtgaatacatcaagacctggaggccacggtacttcctgctgaagagcgacggctccttcattgggtacaaggagaggcccgaggcccctgatcagactctaccccccttaaacaacttctccgtagcagaatgccagctgattgaagaccgagaggccgcgacccaaacacctttgtcataccctgccctcaattgaccaacatcatacgagggacccttcaaccttggtttctccaaaccaaagggaaggagtggaatccgccctatcaagttgttccccaacaaccctcaagaggcgggcccaaggcgaggaccccttggaacaacaagtgtggctcccccaagtaactctcccacgactgagagaatggaagtggcggttcagcaagccacgggctaaagttaccatgaatgactcgacttatctcaacctcttgggcaagggaacctttggcaaagtcaatcttgttccggaagaaggccactggccggtaattcgcccatgaaggatcttccgaaagaaagtcatcaatgccaaggattaagtcgctcacaacattcaaccgagagccggggtccttccagaacacccaggcaacccgttccttcaactgcgctgaaagtatgccttcccagaccccacgacccgccctgtgcctttgtgaatggagtatgcccaacgggggtgagctgttcttcccacctgtccccgggagcgtgtcgttcacagaggagcgggccccgtttttatggtgcagagattgtttcggcttctgaggttacttggcactcgcggggacgtggtaatacccgcgacaatcaaagctggaaaaccctcatgctggaacaaaagatggcccacatcaaagatcactgactttggccttctgcaaaagaggggcatcaagtgacggggccaccattgaaaaccttctgtgagaccccgagagtacctggcgcatgagatgactggaggacaatgactatggccgggccgtggactggtgggggctgggtgtggtcatgtacgagatgatgtgcggccgcctgcccttctacaaccaggaccacgagcgcctcttcgagctcatcctcatggaagagatccgcttcccgcgcacgctcagccccgaggccaagtccctgcttgctgggctgctataagaaggaccccaagcagaggcttggtgcgggggcccagcgatgccaaggaggtcatggagcacaggttcttcctcagcatcaactggcaggacgtggtccagaagaagctcctgccacccttcaaacctcaggtcacgtccgaggtcgacacaaggtacttcgatgatgaatttaccgcccagtccatcacaatcacaccccctgaccgctatgacagcctgggcttactggaggctggaccagcggacccagcttccccgcagttctcatactcggccagcatccgcgagtgagcagtctgcccacgcagaggacgcacgctcgctgccatcaccgctgggtggttttttccccctaactttttacttagcctttttggtttgtgtccccacccccacctcctcaccccctttccagttcttcttcaggcccctcccagacgcaccccagcggcccctgcagcccctgcctccagcctccagcctcacctttgtgcccagactcgcatttggaagactccacctcccgcccaggcctgggctgttgggctggtggagattcagggtttaatccacacaagccccagtgaggggtgaagcat

SEQ ID NO: 20297 - DNA, 868 bp, Homo sapiens
  SIMILAR (640)..(687): 621254mologous to Mus musculus anagen-specific protein mKAP13,accession number D85925,Smith-Waterman Score=48.
tcgggattttaactcgggccggctggctccggaatgcaccgtcttaaccatttttaggttctgctgcctcaaagacgtaagaatagcacactctccttgttgtaaggaagggcttggttggttttggagtccaggttctaactcgccctgtgaccttgggcaaggcattttccctctctggccgacgttaacttagctgtagaatgaggatgttggtgctggggcagaacccaacacttgactctattgataggtctggggtgaggtccaagtgccgcatttttaacaaactcagagaatcttttcactataactcagctgaactcaccatctccgtcaacatgtcctacaactgctgctctggaaacttctcctcccgctcctgtggtgactacctgcgctacccagcatcctcacgtggcttttcctaccccagcaatctggtctacagcactgacctctgctctcccagcacctgccagctgggttcctctctctataggggctgtcaggagatctgctgggagcccaccagctgccagacgtcctatgtggaagtccaagcccctgccaagacctcctgctaccgccccaagaacctcccttgctctgcaagtccttgcaagacgacttactcttgggtctctaggctttggatccagcagctgccgctccctgggctatggatcgaggaagctgctactcagtgggctgtgggtccagtggcttcagatccctgggttatggaggctgtggcttcccttccctgggctatggcgttggattctgccgcccaacctacttggcttctaggagctgccagtcttcttgctacagaccaacttgtggatcaggcttctactattga

SEQ ID NO: 20298 - DNA, 1497 bp, Homo sapiens
  SIMILAR (140)..(478): 971254mologous to Homo sapiens Human PRO1557 (UNQ765) amino acid sequence SEQ ID NO:142,accession number Y99382,Smith-Waterman Score=650.
aactccagctccttacaaagaaaaccttctgatggttaggaatggcccatgagctcctgtttcctggaggcgtgtgtcaggcaggggctgcacgccagcccagcccccagtgctgagagggaattcctgcactgaatgcccagacatgttctgcctttttcatgggaagagatactcccccggcgagagctggcacccctacttggagccacaaggcctgatgtactgcctgcgctgtacctgctcagagggcgcccatgtgagttgttaccgcctccactgtccgcctgtccactgtccccagcctgtgacggagccacagcaatgctgtcccaagtgtgtggaacctcacactccctctggactccgggccccaccaaagtcctgccagcacaacgggaccatgtaccaacacggagagatcttcagtgcccatgagctgttcccctcccgcctgcccaacccagtgtgtcctctgcagctgcacagagggccagatctactgcggcctcacaacctgccccgaaccaggctgcccagcacccctcccgctgccagactcctgctgccaagcctgcaaagatgaggcaagtgagcaatcggatgaagaggacagtgtgcagccgctccatgtggtgagacatcctcaggatccatgttccagtgatgctgggagaaaaagaggcccgggcaccccagcccccactggcctcagcgcccctctgagcttcatccctcgccacttcagacccaagggagcaggcagcacaactgtcaagatcgtcctgaaggagaaacataagaaagcctgtgtgcatggcgggaagacgtactcccacggggaggtgtggcacccggccttccgtgccttcggccccttgccctgcatcctatgcacctgtgaggatggccgccaggactgccagcgtgtgacctgtcccaccgagtaccccctgcccgtcacccccgagaaaagtggcctgggaagtgctgcaagatttgcccagaggacaaagcagaccctggccacagtgagatcagttctaccaggtgtcccaaggcaccgggccgggtcctcgtccacacatcggtatccccaagcccagacaacctgcgtcgctttgccctggaacacgaggcctcggacttggtggagatctacctctggaagctggtaaaagatgaggaaacttgaggctcaggagaggtgaagtacctggcccaaggccacacagccagaatcttccacttgactcagatcaagaaagtcaggaagcaagacttcccagaaagaggcacagcacttccgactgctcgctggcccccacgaaggtcactggaacgtcttcctagcccagaccctggagctgaaggtcacggccagtccagacaaagtgaccaagacataacaaagacctaacagttgcagatatgagctgtataattgttgttattatatattaataaataagaagttgcattaccctcaaaaaaaaa

SEQ ID NO: 20299 - DNA, 1055 bp, Homo sapiens
  SIMILAR (98)..(589): 381254mologous to Monodelphis domestica ribosomal protein S4 Y isoform,accession number AF051137,Smith-Waterman Score=155.
ctgggcggacagctgaaaatccggcgcgcgcagtctccagccccaatttctacgcgcaccggaagacggaggtcctctttccttgcctaacgcagccatggctcgtggtcccaagaagcatctgaagcgggtggcagctcactaagcattggatgctggataaattgaccggtgtgtttgctcctcgtccatccaccggtccccacaagttagagagagtgtctccccctcatcatttttcctgaaggaccagactttaagtaatgccctgacaggagactgaagtaaagaagattttgcatgcagcggttcattaaaatccgatggcaaggtccgaactgatataacctacccctgctggattcatggatgtcatcaagcattgacaagaccgggagagaatttcccgtcttgatctaattgacacccaaggggtccgcttttgcctgtaacatcgtatttacaccttgagggagggccaaagtacaagtttgtgcaaagtgagaaagattcttttgtgggcaccaaaaggaatcccttcatctgggtgactcatgaatgcccgcaaccatccggtaaccccgatccccctcatccaaggtgaaatgaatacccattccagattgatttaaaagactggcaaagattacttgatttccatcaaagttcgaccacttggtaacctgtgtaatggtgacctggaggtgcctaacctaggaagaaattgggtgttgatcacccaacagagacgaagcaccctgggatctttttgaccgttggttcacgtgaaaagatgccaatggcaacaagcttttggccacttcggacttttccaacattttttggttattggcaagggcaacaaaccatgggatttctctttccccgaggaaagggtattccgcctcaccatttgcttgaagagagagacaaaagactggcggccaaacagagcagttgggtgaaatggggtccctgggtgacatggtcagatcttttggtaccgtaattaaaaaatattggtggcagattaatagcaaaaaaaaaaaaaaaaa

SEQ ID NO: 20300 - DNA, 1380 bp, Homo sapiens
  SIMILAR (598)..(1377): 861254mologous to Escherichia coli Tail fiber protein GP37,accession number D90774,Smith-Waterman Score=1058.
atgcgtaatgtgtgtattgccgttgctgtctttgccgcacttgcggtgacagtcactccggcccgtgcggaaggtggacatggtacgtttacggtgggctattttcaagtgaaaccgggtacattgccgtcgttgtcgggcggggataccggtgtgagtcatctgaaagggattaacgtgaagtaccgttatgagctgacggacagtgtgggggtgatggcttccctggggttcgccgcgtcgaaaaagagcagcacagtgatgaccggggaggatacgtttcactatgagagcctgcgtggacgttatgtgagcgtgatggccggaccggttttacaaatcagtaagcaggtcagtgcgtacgccatggccggagtggctcacagtcggtggtccggcagtacaatggattaccgtaagacggaaatcactcccgggtatatgaaagagacgaccactgccagggacgaaagtgcaatgcggcatacctcagtggcgtggagtgcaggtatacagattaatccggcagcgtccgtcgttgttgatattgcttatgaaggctccggcagtggcgactggcgtactgacggattcatcgttgggatttcaggagtcctgaaagacggcacaggaaaaccggtacagaactgcaccattcagctgaaagccagacgtaacagcaccacggtggtggtgaacacggtgggctcagagaatccggatgaagccgggcgttacagcatggatgtggagtacggtcagtacagtgtcatcctgcaggttgacggttttccaccatcgcacgccgggaccatcaccgtgtatgaagattcacaaccggggacgctgaatgattttctctgtgccatgacggaggatgatgcccggccggaggtgctgcgtcgtcttgaactgatggtggaagaggtggcgcgtaacgcgtccgtggtggcacagagtacggcagacgcgaagaaatcagccggcgatgccagtgcatcagctgctcaggtcgcggcccttgtgactgatgcaactgactcagcacgcgccgccagcacgtccgccggacaggctgcatcgtcagctcaggaagcgtcctccggcgcagaagcggcatcagcaaaggccactgaagcggaaaaaagtgccgcagccgcagagtcctcaaaaaacgcggcggccaccagtgccggtgcggcgaaaacgtcagaaacgaatgctgcagcgtcacaacaatcagccgccacgtctgcctccaccgcggccacgaaagcgtcagaggccgccacttcagcacgagatgcggtggcctcaaaagaggcagcaaaatcatcagaaacgaacgcatcatcaagtgccgattatgcagcatcatag

SEQ ID NO: 20301 - DNA, 2181 bp, Homo sapiens
  SIMILAR (586)..(1296): 991254mologous to Escherichia coli Tail fiber protein GP37,accession number D90774,Smith-Waterman Score=1236.
atgcaaatgactaagcaaccaccaatcgcaaaagccgatctgcaaaaaactcagggaaaccgtgcaccagcagcagttaaaaatagcgacgtgattagttttattaaccagccatcaatgaaagagcaactggcagcagctcttccacgccatatgacggctgaacgtatgatccgtatcgccaccacagaaattcgtaaagttccggcgttaggaaactgtgacactatgagttttgtcagtgcgatcgtacagtgttcacagctcggacttgagccaggtagcgccctcggtcatgcatatttactgccttttggtaataaaaacgaaaagagcggtaaaaagaacgttcagctaatcattggctatcgcggcatgattgatttagagacatcgcaattaaaacaagggcaacggatacatatgccgatgcggatggtggcgttccatgaaatgccgaatctggcgcttacaatgtcacccgctctggcgacagctatattctggttaacttctataccgatgcggaatgtgccggaccctgcagatgaaggcgcattacagaaatggtggtctgttctaccagacggttatggttttgaggaagactgggcagaagtttatacctcgaaaaatcttccaccagaaagctacccagtcggcgcaccaatcccgtggccatcagataccgttccgtctggttatgccctgatgcaggggcaggcttttgacaaatctgcttacccgaaacttgcagccgcttatccgtcaggcgtgatccctgatatgcgtggctggacgattaagggcaaacctgccagtggtcgggccgtattgtctcaggaacaggacggcattaaatcgcatacccacagcgccagcgcatccagtacagatttggggacgaaaaccacatcgtcgtttgattacggcactaaatccacgaataacaccggggcacatacacacagtgtgagcggctctacaaactcggctggagcacacacacactcactagccaacgtgaacacggctagtgctaactccggtgctggtagtgcatcaacaagattgtctgttgtgcataatcaaaactatgcaacatcatctgctggcgcacatacccactcactgtccggcactgctgcaagcgcaggtgcacacgcgcatactgtcggtattggtgctcatacgcactccgttgcgattggttcacatggacacaccatcaccgttaacgctgctggtaacgcggaaaacaccgtcaaaaacatcgcatttaactatatttaccgatattgcaccgccagatattccggctggcttcgtggctgttttaacagtgatgagtcatcgtggcatctcgttgaagatcatcgggaacttataaccgacacccacgatgaaaccgtcagtgcgccagtcgccactgccggggccttcataagcaatatcaatggccacggattcggtcgggttaaactgcacgccagctccccacgccagagacgtgttgctgtggcgaccgtcatcacttccggtcagcacgtcgtgcgttttccccttgggaagaatatgaccgctgtcatcgagccgttttatcccaaggcgggcaatggccgacggccctatccgctggagaccatgctgcgtattcactgcatgcagcattggtacaacctgagcgacggtgccatggaagatgccctgtacgaaatcgcctccatgcgcctgtttgcccgattatccctggatagcgccctgccggatcgcaccaccatcatgaatttccgccacctgctcgagcagcatcaactggcccgtcaattgttcaagaccatcaatcgctggctggccgaagcaggcgtcatgatgacccaaggcactttggtggatgccaccatcattgaggcacccagctctaccaagaacaaagagcagcaacgcgatccggagatgcatcagaccaagaaaggcaatcagtggcactttggcatgaaggcccacattggtgtcgatgccaagagtggcctgacccacagcctggtcaccaccgcggccaacgagcatgacctcaatcagctgggtaatctgcttcatggagagaagcaatttgtctcagccgatgccggctaccaaggagcgccacagcgcgaggagctggccgaggtggatgcttag

SEQ ID NO: 20302 - DNA, 669 bp, Homo sapiens
  SIMILAR (172)..(71): 1001254mologous to Mus musculus beta-tropomyosin,accession number M87635,Smith-Waterman Score=166.
ggctagtaacatcagttttattgggttggggtggcaaccatagcctggctgggggtggggctggccctcacaggttgttgagttccagcagggtctggtccaaggtctggtgaatctcgacgttctcctccttggcactggccaaggtctcttctaggtcatcgatggttttcctccaactttgccacagacctctcggcaaactctgctcgggtctcagcctccttcagcttctcctccaacagtttgatctcctcttcatatttatcttctttggtggaatacttttggggacacacacacgccatcagtacagcgctaccacagatccttcatttctccattgtaccccgtaggctcctggtcatcttgcctccgttgaacacccagcccctccctgccttgggcccctcacctccctcccctgtgggaccccatcctcactgcccctctgctcccctctaccttgtccgcctgggcctccagggatttcaagttgttggtaacaattttcagctcctcctctaggtccccacatttactgcagggggtgtgtggcggggggggcagggtgtgagggcacagcgaagccagacagtggagatggcacagcaggggacgggtggaggagagaaaagaagagcaaagttgtgagagtgacagacagca

SEQ ID NO: 20303 - DNA, 1382 bp, Homo sapiens
  SIMILAR (1065)..(1163): 451254mologous to Escherichia coli O157:H7 putative tail fiber protein of prophage CP-933U,accession number AE005419,Smith- Waterman Score=54.
  misc_feature (1)...(1382): n = a,t,c or g
atggaccagaccgtcaagtccctgatggcctcagaggaggagtattccaccaaagaagagaaatatgaaaaggagatgaaactgctggaggagaaactgaaggaggctgagaccagagcagagtttgtcgaaaggtctgtggcaaagttggagaaaaccaccgatgacctagaagagacgttggccagtgccaaggaggaaacgtggagattcatcagacctgggaccagaccctactggaactcagcaacctgtttcttacttcctggtcacaaaatggctgccgaagtccataagctaaatcctaatgtgagtgaacatgatcaagaaagatggcatgatgcttttgggaacggtggtgcagataatcactcaaagctccaagcaagcaccagaagaggaggacccttgagtcaggagctgctgcaatccctggcagctagcctagcagcaggaggtctgacggcgcttagtgctgaattcactatcggcaaaggtgagttgatggctcatgatgtcctctggggatgcgctccggatgaatatgatgatctcatatcaggaacttgttcgcaccttcccaaggggaaaacgcacgacgtgctgaccggaagtgatgacggtcgccacagcaacacgtctctggcgtggggagctggcgtgcagtttaacccgaccgaatccgtggccattgatattgcttatgaaggccccggcagtggcgactggcgcactgacggtttcatcgtgggcgggcttttttgtggggtgaatatggcagtaaagatttcagagagtcctgaaagacggaacaggaaaaccggtccagaactgaacaatccagctgaaagcaaaacgtaacagcaccacggtggtggtgaacacgctggcctcagaaaatccggatgaagccgggcgttacagcatggacgttgagtacggtcagtacagcgttattctgttggtggaaggattcccgccgtcacatgccgggaccattaccgtgtatgaagattcacaaccggggacgctgaatgattttctctgtgccatgacggagggntgatgcccgtccggaggcactgggccgttttggactttattggtggaaggaggtggcgcgtaacgcgtcccgcggtgggacagaacacggcagccgcgaagaagtcagccagtgatgccagcacatcagcccgtgaggcggcaacccatgcggttgatgctgggggcttcaagaacgcgcaggccaggacgtcaagcccggacaaggccgggtcggccgggttcaagcaagggtttcccaggggagggaacgggatcaacaaaagggccacttgaaggatcaaaaaagttgnttgccgttgaggngtccncaaaaaccc

SEQ ID NO: 20304 - DNA, 1070 bp, Homo sapiens
  SIMILAR (839)..(588): 591254mologous to Xenopus laevis smooth muscle beta- tropomyosin,accession number M92304,Smith-Waterman Score=200.
tttttttgagaggctagtaacatcaagttttattgggttggggtggcaaccatagcctggctgggggtggggctggccctcacaggttgttgagttccagcagggtctggtccaaggtctggtgaatctcgacgttctccatccttggcactggccaaggtctcttctaggtcatcgatggttttctccaactttgccacagcacctctcggcaaactctgctcgggtctcagcctccttcagcttctcctccaacaagtttgatctcctcttcatatttatcttctttggtggaatactcctcctctgaggccatcagggacttgagggcctggtccatgggttcgaagttcctcctccagctgtctggctcggctctcgggcacctcagccctctcctccgaggggctccagctctccttccaggatcaccagcttcctggccacctcttcatatttggcggtctgaatcctcatcgatgtgctttgcctccttcagctgcatctccctgcagttccatcttctcctcatcctttcatggccacggttatcgatgaccttcgattctctctcgctctcatcaacccgcttctcggggctcctccagcttctgcaaggctgtagccaggcgctcctggggcccggtccagctccatcctcaaaccagctgaatgcggcgggtcagggaaggcaacatctgcctcagcatcaatgggctttcttctcgggcctgttcaagttcctccggggcctccttcacggattcagaatacttttccacctcatcctctgtccccttcagcttcttctggagggcctgctgctcctcctccagcttggcttgcagcggtcctcagcttgcttcttgtcggcttcggcctgctcggcgcggtcgatggcgttctccttgtccagcttcagcatctgcatcttcttcttgatggcgtccatggcctgcggtggggggtgggccggccggcaggcggtgaggaccggacggactgggctgggtgagcggactgggtgcaccggtggcaggcgaggaggacggagcgggaggagagcagca

SEQ ID NO: 20305 - DNA, 400 bp, Homo sapiens
  SIMILAR (169)..(396): 321254mologous to Homo sapiens 40S Ribosomal Protein S27 homolog; 97-14417236dentical to P42677 (PID:g1171014),accession number AC002075,Smith-Waterman Score=66.
atatttatataaatgtttagattttgtactattttttaatataaatatgtgggggcttgcttgatggaaacttgtcttgtgtctgttgagactttaagggagaaatgtcggaatttcatagtcgcctgacgacaggttatcaccacgttatatattccctaccgaaggagacacctttccccccctgacccagaacagcctttaaatcacaagcaaaataggaaagttaaccacggaggcaccgagtttcaggtagtggttttgcctttcccaaaaatgaaaataaactgttaccgaaggaatcagtttttcctcttctttttttcaactgtgaaggtccccgtggggtggagcatggtgcccttacaagccgcaacggctggtgcccggctaacaagaa

SEQ ID NO: 20306 - DNA, 426 bp, Homo sapiens
  SIMILAR (13)..(57): 931254mologous to Homo sapiens dJ718J7.1 (PMEPA1 protein (an androgen induced type 1b transmembrane protein).),accession number AL035541,Smith-Waterman Score=79.
  misc_feature (1)...(426): n = a,t,c or g
cccacgcgtccggccatctggagcaaagagaaggataaacataaaggacaccctctctagggtccccaggggggccgggctggggctgcgtaggtgaaaaggcagaacactccgcgcttcttataaaaggagtgagaggaaggcggggggcgcaccaacgcatcgtgtggccctcccctcccacctccctgtgtataaatatttacatgtgatgtctggtctgaatgcacaagctaagagagcttgcataataaaaaataaaaatataaaaaataggggggggcccctttaaaaagaataattttttcccccnnnnnnnnnnnnntaaaannnnnnnnnngggggccccaaaaaatatatctcgggggcgggttttaaaaannnnnnnnnnnnnaaaacccggggggaccccaaatatttcgtctc

SEQ ID NO: 20307 - DNA, 1879 bp, Homo sapiens
  SIMILAR (473)..(835): 321254mologous to Homo sapiens dJ718J7.1 (PMEPA1 protein (an androgen induced type 1b transmembrane protein).),accession number AL035541,Smith-Waterman Score=95.
cgctggaactgaaagtggacagcagcgggccgtgcagcctggcctgccgtgtaaaggacctggggctcgggctgagcttgttgaggccccagggggctggtcagcatggctggtgggagtgtggaggtgacacccagcacattcacatgctacctgagacctccctcggcctcccctccaacacccccatcccaccctgggctgctcccgcgcagcccagctctctgctctctgcacacgggagcacggacgctgccactgtttggaggagggcggtgcagctctgcagtgctgccccccaggccagggcccccgcgggatcaggctctgggcagcgggagcgcttccaccgcttccagcccacctatccgtacctgcagcacgagatcgacctgccacccaccatctcgctgtcagacggggaggagcccccaccctgacaagtgccctgccacctacaagttaggggaccccaagcagcagcttggaactgaaccgggagttcggtgggcgcacccccaaacagaaccatcttcgacagtgacctgatggatagtgccaggctgggcggcccctgcccccccagcagtaactcgggcattcagcgcccacgtgctacggccagcggcgggcgcatggaggggccgccgccccacctacagcgaggtcatcggccacttacccgggggtccttccttccagcacccaggcagagcagtgggccgccctccttgctggaggggacccgggctccacccacacacacattcgcgcccttagagaagcgcagccatctggagcaaagagaaggataaacagaaaggacacccctctctagggtccccaggggggcccgggctggggctgcgtaggtgaaaaggcagaacactccgcgcttcttagaagaggagtgagaggaaggcggggggcgcagcaatcgcatgcgtgtggccctcccctcccacctccctgtgtataaatatttacatgtgatgtctggtctgaatgcccaagctaagagagctttgcaaaaaaaaaaagaaaaaagaaaaaaaaaaaaccacgtttctttgttgagctgtgtcttgaaggcaaaagaaaaaaaatttctacagtagtctttcttgtttctagttgagctgcgtgcgtgaatgcttattttcttttgtttatgataatttcacttaactttaaagacatatttgcaccaaaccctttggtttaaaagatcctgccaatattaatatatataaaatatatataaggataagagaaacctgtaatgtgcgagggcagggagtatttttgtattagaagacggcctattaaaaaaaaaagttgttttctgaactagaagaggaaaaaaatggcaatttttgagtgccaagctcagaaagtgggtattacccttgtaaagaaaaaaaattacaaagcagggggttagagttattgatataaatgttgagattttgcactattttttaatataaatatgtccagtgcttgcttgatggaaacttctcttgtgtctgttgagacttttaagggagaaatgtcgggaattgtcagcagtcgcctgacggcaagagggtgagcccccgtggagtctgcagagaggccttggcagggagcggcgggctttcccgaggggccactgtccctgcagagtggatgcttctgcctagtgacaggttatcaccacgttatatattccctaccgaagtagacaccttttcccccctgacccagaacagcctttaaatcacaagcaaaataggaaagttaaccacggaggcaacgagttccaggtagtggttttgcctttcccaaaaatgaaaataaactgttaccgaagaataaaaaaaaaaaaaagtcgacg

SEQ ID NO: 20308 - DNA, 250 bp, Homo sapiens
  SIMILAR (3)..(89): 931254mologous to Homo sapiens bridging integrator- 2,accession number AF146531,Smith-Waterman Score=126.
gtgaatctgtctcagcaactgaagatctggcacctgatgcagcccaaggggaagacaattctgagatcaaggagctcttatagagagaatgagcctctaccagcctgcaatggccccgcccaggcccagccctctcctaccactgaaagggccaagtcccaggaggaagttctccccagctccacaactccatcaccaggcggagccctgagcccttcagggcagccttcatcatctgtcgacgcggccg

SEQ ID NO: 20309 - DNA, 393 bp, Homo sapiens
  SIMILAR (14)..(391): 851254mologous to Homo sapiens bridging integrator- 2,accession number AF146531,Smith-Waterman Score=545.
gatggcagagggcaaggcaggcggcgcggccgttctcttttccaagcaggtgcagaaaaagttgagcagggcccaggagaaggcagaaggccacaagctgtacaaggacctgaagaacttccttagtgcagtcaaagtgatgcatgaaagttcaaaaagagtgtcagaaaccctgcaggagatctacagcagcgagtgggacggtcatgaggagctgaaggccatcgtatggaataatgatctcctttgggaagactacgaggagaaactggctgaccaggctgtaaggaccatggaaatctatgttgcccagttcagtgaaattaaggagagaattgccaagcggggtcggaaactcgtggactatgacagtgcccgacaccacctggaggt

SEQ ID NO: 20310 - DNA, 1827 bp, Homo sapiens
  SIMILAR (7)..(1116): 931254mologous to Cloning vector pSacBII SacB,accession number U09128,Smith-Waterman Score=1799.
  misc_feature (1)...(1827): n = a,t,c or g
atgaacatgaacatcaaaaaaattgtaaaacaagccacagttctgacttttacgactgcacttctggcaggaggagcgactcaagccttcgcgaaagaaaataaccaaaaagcatacaaagaaacgtacggcgtctctcatattacacgccatgatatgctgcagatccctaaacagcagcaaaacgaaaaataccaagtgcctcaattcgatcaatcaacgattaaaaatattgagtctgcaaaaggacttgatgtgtgggacagctggccgctgcaaaacgctgacggaacagtagctgaatacaacggctatcacgttgtgtttgctcttgcgggaagcccgaaagacgctgatgacacatcaatctacatgttttatcaaaaggtcggcgacaactcaatcgacagctggaaaaacgcgggccgtgtctttaaagacagcgataagttcgacgccaacgatccgatcctgaaagatcagacgcaagaatggtccggttctgcaacctttacatctgacggaaaaatccgtttattctacactgactattccggtaaacattacggcaaacaaagcctgacaacagcgcaggtaaatgtgtcaaaatctgatgacacactcaaaatcaacggagtggaagatcacaaaacgatttttgacggagacggaaaaacatatcagaacgttcagcagtttatcgatgaaggcaattatacatccggcgacaaccatacgctgagagaccctcactacgttgaagacaaaggccataaataccttgtattcgaagccaacacgggaacagaaaacggataccaaggcgaagaatctttatttaacaaagcgtactacggcggcggcacgaacttcttccgtaaagaaagccagaagcttcagcagagcgctaaaaaacgcgatgctgagttagcgaacggcgccctcggtatcatagagttaaataatgattacacattgaaaaaagtaatgaagccgctgatcacttcaaacacggtaactgatgaaaatcgagcgcgcgaatgttttcaaaatgaacggcaanatgtgccgcaagccaaaggcaacaatgtggttatcacaagctacatgacaaacagaggcttcttcgaggataaaaaggcaacatttgcgccaagcttcttaatgaacatcaaaggcaataaaacatccgttgtcaaaaacagcatcctggagcaaggacagctgacatggctccaagtagcgaagcgagcaggactgggcggcggccaaagcggtcggacagtgctccgagaacgggtgcgcatagaaattgcatcaacgcatatagcgctacagcacgccatagtgactggcgatgctgtcggaatggacgatatcccgcaagaggcccggcagtaccggcataaccaagcctatgcctacagcatccagggtgacggtgccgaggatgacgatgagcgcattgcttttgctagtcatacaatccaagaatgtcgttctcaaggacctggaggctatccctttaaaatatattcatcaagaaaagacagaatccctatctcccagtctttgttggagagtcacttcactgttcatgaagagactgccccggacttagagaccacaggtttcctaactctcctaagtatccttggaaagaataatgatctcctttgggaagactacgaggagaaactggctgaccaggctgtaaggaccatggaaatctatgttgcccagttcagtgaaattaaggtactcaatgtacagaatcaaggctgggttgtggatgacccatccaggttagagaacatattgggttaa

SEQ ID NO: 20311 - DNA, 902 bp, Homo sapiens
  SIMILAR (102)..(770): 981254mologous to Cloning vector pZC320 SopA,accession number U26464,Smith-Waterman Score=1158.
tgatgcatgaaagttcaaaaagagtgtcagaaaccctgcaggagatctacagcagcgagtgggacggtcatgaggagctgaaggccatcgtatgggtattcagaaatcccaagaaacaagggcgactaccgcacccggatatggaaattcgaggacgggttgagcaacgtgttggttatacaattgaacaaattaatcatatgcgtgatgtgtttggtacgcgattgcgacgtgctgaagacgtatttccaccggtgatcggggttgctgcccataaaggtggcgtttacaaaacctcagtttctgttcatcttgctcaggatctggctctgaaggggctacgtgttttgctcgtggaaggtaacgacccccagggaacagcctcaatgtatcacggatgggtaccagatcttcatattcatgcagaagacactctcctgcctttctatcttggggaaaaggacgatgtcacttatgcaataaagcccacttgctggccggggcttgacattattccttcctgtctggctctgcaccgtattgaaactgagttaatgggcaaatttgatgaaggtaaactgcccaccgatccacacctgatgctccgactggccattgaaactgttgctcatgactatgatgtcatagttattgacagcgcgcctaacctgggtatcggcacgattaatgtcgtatgtgctgctgatgtgctgattgttcccacgcctgctgagttgtttgactacacctccgcactgcagtttttcgataggaactcctttcccatgccttactcgtatgtgtttgtggttttgcttcctaatagtcgtattggctgctatgtgaccatcttccaaaacatttccaacttgagggatgtcttctacagggaaatgagcaag

SEQ ID NO: 20312 - DNA, 2166 bp, Homo sapiens
  SIMILAR (1459)..(2163): 991254mologous to Cloning vector pBACe3.6 levansucrase,accession number U80929,Smith-Waterman Score=1217.
atgagcaaactgaaccacaatctctccgaggtgatgagcaaactggagaagcaacattccagtaaagtctttgtggtgaagagactatcaagcagcagcaggcgctctttagtcatttctcccccagttcgaacatctacagtctccagtccacttacctcacctactagtccctctacactttcctcgaagagtaagagtgaatctgtctcagcaactgaagatctggcacctgatgcagcccagggggaagacaattctgagatcaaggagctcttagaagatgaggaaatagggaaggaaggatctgaagcaagctcctctgaggaagaagagcctctactaacctgcaacggcccctcccaggcccagccctctcctatcattgagagtgccaggtcccaggaagaagttccccccagctcccctgctctatcaccaggtggagccctaagcccttcaggacaccctttatcatctgccgcagaagtagtcctccgaacccgcaccgcaggtgatgcacttcaaaaagcctttacagataaagaggaattacttaagcagcaggcatctaaccttcatgagcagaaaaaagctggggtgatatttgaagctgaagaagttatcactcttttaacttctgtgcttaaaacgtcatctgcatcaagaactagtttaagctcacgacatcagtttgctcctggagcgacagtattgtataagggcgataaaagggtgcttaacctggacagtccctcttcgcgcctgcgcacgcaccgccctctcccgaagccccgccccggtcaccgccccgaggctgtcccggacggttgggtccagaggagcctttccttcactggcccgcctgctatgacgatcatgtacagctgcattgctaatggccgagcggtcctagcggagctgacactgactggaggttcttaccaggtacctccggatccacgccaccgcccccacgggttccgcccctcgagggtggtgccccccgagcccgcccctaaggacgcggcgctgcgaggtggtccggaacctgctcgggggacacaagctcccgccccgcgagagatcccgcccccacgagagaccccgcccccgcaagaggccccgccccagcgagaggctggcgtcccggcggctgccgcacttcgaacatctacagtctccagtccacttacctcacctactagtccctctacactttcctcgaagagtaagagtgaatctgtctcagcaactgaagatctggcgcctgatgcagcccagggggaagacaattctgagatcaaggagctcttagaagatgaggaaatagggaaggaaggatctgaagcaagctcctctgaggaagaagagcctctactaacctgcaacggcccctcccaggcccagccctctcctatcattgagagtgccaggagtttatcgatgaagaaaaccacctccggcgacaaccatacgctgagagaccctcactacgttgaagacaaaggccataaataccttgtattcgaagccaacacgggaacagaaaacggataccaaggcgaagaatctttatttaacaaagcgtactacggcggcggcacgaacttggtgcgtaaagaaagccagaagcttcagcagagcgctaaaaaacgcgatgctgagttagcgaacggcgccctcggtatcatagagttaaataatgattacacattgaaaaaagtaatgaagccgctgatcacttcaaacacggtaactgatgaaatcgagcgcgcgaatgttttcaaaatgaacggcaaatggtacttgttcactgattcacgcggttcaaaaatgacgatcgatggtattaactcaaacgatatttacatgcttggttatgtatcaaactctttaaccggcccttacaagccgctgaacaaaacagggcttgtgctgcaaatgggtcttgatccaaacgatgtgacattcacttactctcacttcgcagtgccgcaagccaaaggcaacaatgtggttatcacaagctacatgacaaacagaggcttcttcgaggataaaaaggcaacatttgcgccaagcttcttaatgaacatcaaaggcaataaaacatccgttgtcaaaaacagcatcctggagcaaggacagctgacagtcaactaa

SEQ ID NO: 20313 - DNA, 1893 bp, Homo sapiens
  SIMILAR (1)..(753): 881254mologous to Escherichia coli O157:H7 ATP-binding component of D-ribose high-affinity transport system,accession number AE005606,Smith-Waterman Score=1103.
atgttgggtcgcaagctgaaagatcaatatccgcacttggacaaagcgccgggagatatccgcctgaaagtcgataatctctgcggacctggcgttaacgatgtctcttttactttacgcaaaggcgaaattcttggcgtctctggtttgatgggcgcaggtcgtaccgaactgatgaaagtgctctacggcgcactaccgcgcaccagcggttacgtcaccctggatgggcatgaagtcgttacccgttcaccgcaggatggcctggcaaacggcattgtgtatatctccgaagaccgtaaacgtgacggtttagtgttgggcatgtcagtaaaagagaacatgtcgctgacagcgctgcgctacttcagccgcgctggcggcagtttgaagcatgccgatgaacagcaggctgtgagtgatttcattcgtctgtttaatgtgaaaactccgtcgatggaacaggcaattggtctgctttccggtggcaatcagcaaaaagtggcgattgcccgcggtctgatgacacgccccaaagtgttgatccttgatgaacctacccgtggcgtagatgtcggcgcgaaaaaagagatctatcaactgattaaccagttcaaagccgatggcttgagcatcattctggtgtcatcggagatgccagtgctgcagaaattggggaaagctgtagaaaccaaagatgaacgatttgaacaaagcgctagcaacttctaccaacaacagggtgaaaaggagaacgcttgctttgtccgctggcttggttggccactattatgtcgagtaggtccgttaatcatttcgattgcaactggcttcttcctgaaatcccttctcagcccccggtcagcgggatgcattgggcgtccactaaactggttccccaggggcctaaatggttgtctggtgttccctggaagcctgggtccactttctcagaccaaaagtgaggcagatgccagcccttgttcagagaaagtcagctcaggcagccctgtggataatgtggtggagtgggtggctcccatcggtggggctgagggcgtgagagaaggatcaagggtgtatgcccaacaaatggatgcagagggcacgaccaggagccagaagcccccagcatggcctgaaactagaggggcccccagaaaaacttttgccgcatttttaaatattccccggaaaggggggggggcccgagggtttcccggaattgccccccctgtggccacacaaaggaggggtgctccttggtgtccaaagaagaggccgccacattcttccagagctgcaattccacagctccattgccggtttgtttcccagtgtctaggattccctgtctcccaggctcttcacgggaagcagacatgtgaagacacagtgcgacagggaaaacaccatatgaggatggagaattggagtgctgcctgcacaggccaaggaacacaaaaaattgccagccagccaccaggcgccaggaagagaaccctttttggaagccagaatgtcctcttaatgggccccagccttgcagggcctcacctggtcccctttgtgcttccaattggcaagagcacagagccagaggccagggggatgtcaccactgcatcccaagcctctcatgaataaaacatacgactactttacatttgaaaaagcaaacatcaccaagcgatggagcatcccttcctgctggccccagaagcatctacacaccccttatcaatgccacactccaggtggccactaccaagcaatcagtagcaattggcagatttccctccagtaccggtctggaggttcccggtatcacacctgtggagggacccttatcagacagaactgggtgatgacagctgctcactgcgtggattag

SEQ ID NO: 20314 - DNA, 2884 bp, Homo sapiens
  SIMILAR (1649)..(2881): 981254mologous to Homo sapiens UDP-GalNAc:polypeptide N- acetylgalactosaminyltransferase,accession number Y08565,Smith- Waterman Score=2168.
atgaagcaacaacttcctgtatcctaccttcaagttatcttcaatcactgggcgtcgaggatctccggggcgcggggcgcgggctggggcccagtgaggcttggcaggctgtgcgcggaccgcgccctggacggcgaaagcaggcccggagggggcggccagtccggcgtcccagcgtccgaggcgagccagaaggcggcccacggccgtcgcctcccggtcccggcccggctactgcgctgcgcccactccgctctggagcctgggcgcggatctgcctcttctccaagaaactcaaccactagtgacaatgaccagcctcctgactactccttctccaagagatgtgactctcatagtcttgggttctcgcttgtctgggagtcaagaaacttgactttaccaccaactagcaagttactccacttctctgccttccatttcttcatctataaatgcagggcagaaggccacaagctgtacaaggacctgaagaacttccttagtgcagtcaaagtgatgcatgaaagttcaaaaagagtgtcagaaaccctgcagtttatctactattagcgagtggtacggccatgaggagctgaaggccatcgtatggaataatgatctcctttgggaagactacgaggagaaactggctgaccaggctgtaaggaccatggaaatctatgttgcccagttcagtgaaattaaggagagaattgccaagcggggtcggaaactcgtggactatgacagtgcccgacaccacctggaggcagtgcagaatgccacgaagaaagatgaggccaagactgccaaggcagaggaagagttcaacaaagcccagactgtgtttgaagatctgaaccaagaactactagaggagctgcctattctttataatagtcgtattggctgctatgtgaccatcttccaaaacatttccaacttgagggatgtcttctacagggaaatgagcaagctgaaccacaatctctacgaggtgatgagcaaactggagaagcaacattccaataaagtctttgtggtgaagggactgtcaagtccctctacactttccttgaagagtgagagtgaatctgtctcagcaactgaagatctggcacctgatgcagcccaaggggaagacaattctgagatcaaggagctcttagaagaggaggaaatagagaaggaaggatctgaagcaagctcctctgaggaagatgagcctctaccagcctgcaatggccccgcccaggcccagccctctcctaccactgaaagggccaagtcccaggaggaagttctccccagctccacaactccatcaccaggcggagccctgagcccttcagggcagccttcatcatctgccacagaagtagtcctccgaacccgcaccgcaagtgaaggatctgaacaaccaaagaagagagcctctatccagaggacctcagcaccccctaaaccaccagagaagccagtaagaactcctgaggccaaagaaaatgaaaacatccacaatcagaaccctgaagaactttgtacttcccccaccttaatgacatctcaggtcacgctgatgcaagaggtgggctcccgtagccttggacgtgggggttctaaactgttaacttttcaccctaaactttgtgactctgtgagctgcaagtgcccagagcacctaaaggagaagctggagcagtacgtgaagcagctgcaggtggtgagggtggtgcggcaggaggagcggaaggggctgatcaccgcccggctgctgggggccagcgtggcacaggcggaggtgctcacgttcctggatgcccactgtgagtgcttccacggctggctggagcccctcctggctcgaatcgctgaggacaagacagtggtggtgagcccagacatcgtcaccatcgaccttaatacttttgagttcgccaagcccgtccagaggggcagagtccatagccgaggcaactttgactggagcctgaccttcggctgggaaacacttcctccacatgagaagcagaggcgcaaggatgaaacctaccccatcaaatccccgacgtttgctggtggcctcttctccatctccaagtcctactttgagcacatcggtacctatgataatcagatggagatctggggaggggagaacgtggaaatgtccttccgggtgtggcagtgtgggggccagctggagatcatcccctgctctgtcgtaggccatgtgttccggaccaagagcccccacaccttccccaagggcactagtgtcattgctcgcaatcaagtgcgcctggcagaggtctggatggacagctacaagaagattttctataggagaaatctgcaggcagcaaagatggcccaagagaaatccttcggtgacatttcggaacgactgcagctgagggaacaactgcactgtcacaacttttcctggtacctgcacaatgtctacccagagatgtttgttcctgacctgacgcccaccttctatggtgccatcaagaacctcggcaccaaccaatgcctggatgtgggtgagaacaaccgcggggggaagcccctcatcatgtactcctgccacggccttggcggcaaccagtactttgagtacacaactcagagggaccttcgccacaacatcgcaaagcagctgtgtctacatgtcagcaagggtgctctgggccttgggagctgtcacttcactggcaagaatagccaggtccccaaggacgaggaatgggaattggcccaggatcagctcatcaggaactcaggatctggtacctgcctgacatcccaggacaaaaagccagccatggccccctgcaatcccagtgacccccatcagttgtggctctttgtctag

SEQ ID NO: 20315 - DNA, 2258 bp, Homo sapiens
  SIMILAR (1289)..(1789): 831254mologous to Homo sapiens breast cancer associated protein BRAP1,accession number AB032698,Smith-Waterman Score=686.
atgccgggagcccgcacttcctcctcgggggcctcagaaaaccacagggcgcggggccagggcggcggcccccagggagttggcaggatggcagagggcaaggcaggcggcgcggccggcctcttcgccaagcaggtgcagaagaagtttagcagggcccaggagaaggtgctgcagaaattggggaaagctgtagaaaccaaagatgaacgatttgaacaaagcgctaacaacttctaccaacaacaggcagaaggccacaagctgtacaaggacctgaagaacttccttagtgcagtcaaagtgatgcatgaaagttcaaaaagagtgtcagaaaccctgcaggagatctacagcagcgagtgggatggtcatgaggagctgaaggccatcgtatggaataatgatctcctttgggaagactacgaggagaaacttgtctgaccaggctgtaaggaccatggaaatctatgttgcccagttcagtgaaattaaggagaagaattgccaagcggggtcggaaactcgtggactatgacagtgcccgacaccacctggaggcagtgcagaatgccaagaagaaagatgaggccaagactgccaaggcagaggaagagttcaacaaagcccagactgtgtttgaagatctgaaccaagaactactagaggagctgcctattctttataatagtcgtattggctgctatgtgaccatcttccaaaacatttccaacttgagggatgtcttctacagggaaatgagcaagctgaaccacaatctctacgaggtgatgagcaaactggagaagcaacattccaataaagtctttgtggtgaagggactgtcaagcagcagcaggcgctctttagtcatttctcccccagttcgaacagctacagtctccagtcctcttacctcacctactagtccctctacactttccttgaagagtgagagtgaatctgtctcagcaactgaagatctggcacctgatgcagcccaaggggaagacaattctgagatcaaggagctcttagaagaggaggaaatagagaaggaaggatctgaagcaagctcctctgaggaagatgagcctctaccagcctgcaatggccccgcccaggcccagccctctcctaccactgaaagggccaagttcccaggaggaagttctccccagctccacaactccatcaccaggcggagccctgagcccttcagggcagctttcatcatctgccacagaagtagtcctccgaacccgcaccgcaagtgaaggatctgaggcgaccaaaaaagacagcctctatccagaggacctcagcaccccctaggaggcctcctccacccagagccactgcaagccccaggccctgctcagggaacataccttccagccctacagcctctggaggggggtcagcgcaccagccctagggcctccttggggactgggactgcaagtcctaggacctccctagagatctatacctaatccagaacgcaccagagaagccagtaagaactcctgaggccaaagaaaatgaaaacatccacaatcagaaccctgaagaactttgtacttcccccaccttaatgacatctcaggttgcttcagagcctggagaggcaaagaagatggaagacaaggaaaaggataataagcttatctcagctgactcctcggagggccaagaccagcttcaagtctccatggtaccagaaaacaacaacctcacagcacctgaacctcaagaagaggtatccacaagtgaaaatccacaactctgaagagaaactaccaagactcctcctgccccaaacctcgccagagaagctcttcaaccagaggggtataggtcagagggatataagagccagcatccatccctgggttctcagtaggaatgctggtgctgtctaaagacctggcattaatggaggccggaggagcagccttacgggagggatggagggaggcaggctggggagaagagaacattagacctcagggaaatatttaattctggttttagcattattagaataagactttatacattaactaaagtggagctttaatcactataaaaagcaaaagtatctatagacacagacacttgcctatacagagacataacccacacacactcagaggatagtgaacaaatctgtctttgacttacgaccccattttgcaagacttaaagccggaagaacacattttcagattgttaaataaagtctgattctgact

SEQ ID NO: 20316 - DNA, 1908 bp, Homo sapiens
  SIMILAR (616)..(1764): 441254mologous to Sus scrofa alpha-amylase,accession number AF064742,Smith-Waterman Score=612.
  misc_feature (1)...(1908): n = a,t,c or g
tgtcggtctgtcagggttggaaagtccaagccataggacccagtttcctttcttagcttacgttatctaccagagcaccgtgggctgttacttgccttgagttggaagcggttcgcatttataccggaatataaatagtttctggaaaggacactgacaacttcaaagcaaaatgaagctcttttggttgcttttcaccattgggttctgctgggctcagtattcctcaaatacacaaccaagggacgaacatctattgttcatctgtttgaatggcgatgggttgatattgctcttgaatgtgagcgatatttagctcccaagggatttggaggggttcaggtctctccaccaaatgaaaatgttgcaatttacaaccctttcagaccttggtgggaaagataccaaccacgttagctataaattatgcacaagatctgggaaatgaagatgaatttagaaacatggtgactagatgtaacaatgtttggggttcgtattttatgtggatgctgtaattaatcatatgtgtgggtaacgctgtgagtgcaggaacaagcagtacctgtggaagttacttcaacccctggaaattaaggactttcccagcaatccccatatcctggatgggatttcaatgatggtaaatgttaaaactggaagtggagatatcgagaactacaatgatgctactcaggtcagagattgtccgtctgactggtcttcttgatcttgcactggagaaggattaccgtgcgttctaagattgcccgaatatatgaaccatctccattgacattggtgttgcagggttcagacttgatgcttccaagcacatgttggcctggagacataaaggccattttgggacaaactgcataatcctaaacagtaactggttccctgcaggaagtaaacctttcattttaccaggaggtaattgatcttngggtgggtgagcccaatttaaaagccagtgactactttggaaatggccgggtgacagaattcaagtatggtgcaaaactcggcacagttattcgccaagtgggatggagagaagatgtcttacctaaagaaatggggaagaagggtgggggtttcatgccttctgacagagcgcttgtctttgtggataaccatgacaatcaacgaggaccatggcgctggaggagcctctatacttaccttctggggatgctaggctgtacaaaatggcaagttggatttatgcttgctcatccttatggttttacccgagttatgttccagctaccgttggccaagcacagtttcaaaaagggaaacgatgttaatgattggggttgggcccacccaaataaataatggcagtaattaaagaagttactattaatcccagacactaacttgtgggcaatgacctgggtcttgtgaacatccgatggcgcccaaataaggaacatgggttaatttccgcaatggaagtgggatggcccagccctttttacaaaattggtatgataatgggagcaaccaagtggctttttgggagaggaaacagaaggattcattgttttcaacaaatgatggccggtcatctttatttaactttgcaaacctggtcttcctgctggctcatactgtgatgtcatttctggagataaagttattggcaattgctcagccattaaaatccccgtgtctgttgatggcaaggctcatttttctatgagtaactctgctgaagatccatttcttgcaattcatgctgaatctaaaattgtaaaatttaaaattaaatgcaaatccgcaaagcaaaaaaaaaaaaaaaaaaagggccgcccgttttaaagaatcaaagttaacgtccccgggcatgcaaggaaatactttttttatggggcccccaaaatcaaattcccggcc

SEQ ID NO: 20317 - DNA, 383 bp, Homo sapiens
  SIMILAR (105)..(305): 1001254mologous to Homo sapiens Human secreted protein encoded by gene 135 clone HPTVC60,accession number W74863,Smith- Waterman Score=345.
gctacgtgctggagctcctgcagacccgtcgcttctgccgcctgcgtgtggtgggcaccatctttgacagcgctcctggtgacagcaacctggctacaggacgcgggtctcgctggcccgagctctacctctactcgagggctgacgaagtagtcctggccagagacatagaacgcatggtggaggcacgcctggcacgccgggtcctggcgcgttctgtggatttcgtgtcatctgcacacgtcagccacctccgtgactaccctacttactacacaagcctctgtgtcgacttcatgcgcaactggtccgctgctgaggccattgctccatctcacctctgctccagaaataaatgcctgacacctccccacaaaaaaaaa

SEQ ID NO: 20318 - DNA, 512 bp, Homo sapiens
  SIMILAR (236)..(508): 661254mologous to Homo sapiens Human secreted protein encoded by gene 135 clone HPTVC60,accession number W74863,Smith-Waterman Score=235.
tgcgcaagcgggagttccggctggagacccgtgctctgggccggcgccttcaccatggcctcggcagagctggactacaccatcgagatcccggatcagccctgctggagccagaagaacagccccagcccaggtgggaaggaggcagaaactcggcagcctgtggtgattctcttgggctggggtggctagcaaggacaagaaccttgtcaagtacagtgccatctaccacaaaaggaagctgctcgagctgctctttgattatgagattgagaaggagccccctgctttttcattgtcttcagcaacggtggcgtcatgctgtaccgctacgtgctggagctcctgcagacccgtcgcttctgccgcctgcgtgtaggtgggcaccatctttgacagcgctcctggtgacagcaacctggtaggggctctgcgggccctggcagccatcctggagcgccgggccgccatgctgcgcctgttgctgctgggggcctttgccctggtggacg

SEQ ID NO: 20319 - DNA, 589 bp, Homo sapiens
  SIMILAR (55)..(573): 801254mologous to Homo sapiens Human secreted protein encoded by gene 135 clone HPTVC60,accession number W74863,Smith-Waterman Score=691.
  misc_feature (1)...(589): n = a,t,c or g
tgcgcaagcgggagttccggctggagacccgtgctctgggccggcgccttcaccatggcctcggcagagctggactacaccatcgagatcccggatcagccctgctggagccagaagaacagccccagcccaggtgggaaggaggcagaaactcggcagcctgtggtgattctcttgggctggggtggctgcaaggacaagaaccttgccaagtacagtgccatctaccacaaaaggggctgcatcgtaatccgatacacagccccgtggcacatggtcttcttctccgagtcactgggtatcccttcacttcgtgttttggcccagaagctgctcgagctgctctttgattatgagattgagaaggagcccctgctcttccatgtcttcagcaacggtggcgtcatgctgtaccgcttacgtgctgggagctcctgcagacccgtcgcttctgccgcctgcgtgtggtgggcaccatctttgacagcgctcctggtgacagcaacctggtagggggctctgcgggcctgggcagccatcctggagcgcggggccgncatgctgcgcctgttgnttgctggtgggattt

SEQ ID NO: 20320 - DNA, 1585 bp, Homo sapiens
  SIMILAR (766)..(1158): 751254mologous to Homo sapiens Human transmembrane protein HTMPN-30,accession number Y57906,Smith-Waterman Score=424.
  misc_feature (1)...(1585): n = a,t,c or g
atggcttcccaagtgggctttaccgttcaacagacacatggacgtgtcatggaacagctcttctggaatggccctagtgctggagccacagcgacacctactggccacggacacctaggccaccccctccaggacgcccgggccctgtggtccatctggcccagccagtcctgcaccctgaagctggcattcctgagttctgggaatctggctccccgggacagactaggggagcagctctggtgttgacagtccacatctgtgtttcagagaacagccccagcccaggtgggaaggaggcagaaactcggcagcctgtggtgattctcttgggctggggtggctgcaaggacaagaaccttgccaagtacagtgccatctaccacaaaaggaatacagcaactcttcagccgcctctcacctacatgagagggtggggactcttcctgaccggcgccccggctgaccaatacctgatccagatcaagcgaattagccaatggctgcggggctgcatcgtaatccgatacacagccccgtggcacatggtcttcttctccgagtcactgggtatcccttcacttcgtgttttggcccagaagctgctcgagctgctctttgattatgagattgagaaggagcccctgctcttccatgtcttcagcaacggtggcgtcatgctgtaccgctacgtgctggagctcctgcagacccgtcgcttctgccgcctgcgtgtggtgggcaccatctttgacagcgctcctgggtgacagcaacctgggtaggggctctgcgggccctgggcagccatcctgggagcgccgggcccgcccaatgctgcgcctgttgctgctggtggcctttgccctgggtggttcgtcctgtttccacgtcctgcttgctcccatcacagccctcttccacacccacttctatggacaggcttacaggacgcgggctctcgcttggcccgagctctacctctactcgagggctgacgaagtagtcctggccagagacatagaacgcatggtggaggcacgcctggcacgccgggtcctggcgcgttctgtggatttcgtgtcatctgcacacgtcagccacctccgtgactaccctacttactacacaagccttctgtgtcgaacttcaatgcgcaaactgcgtccgctgctgaaggccattgctccatctcacctctgctcccagaaaataaatgccctgaaaccctccccccanaacctgcaatctgtcgggcactccttcctcgttcaactcccctgtagccctttgggactttgcggtccccctaagtagaaaattccctatgggccctgtctccctgggggcctctgtctgctggtggtctgcttaccacagaatcctaaggggcaggagtgcctgggcatgtgtctgtgggagccttgcagtcagttgtgtttggacaagtgcaacagtcaggctgctgattcctgtggcatgcaggctgtagaggttgacaaatggagggggtgtgttgaggtgtgacgccctagtgtgattttttaaaatttaaactctggtaagaacatttaatatgaaacct

SEQ ID NO: 20321 - DNA, 428 bp, Homo sapiens
  SIMILAR (6)..(428): 911254mologous to Homo sapiens creatine transporter,accession number Z66539,Smith-Waterman Score=680.
  misc_feature (1)...(428): n = a,t,c or g
tttcgtcaaagctggggtcccctcaggtgtggatagatgcggggacccagattttcttttcttacgccattggcctgggggccctcacagccctgggcagctacaaccgcttcaacaacaactgctacaatgggaccagcttctttgctggcttcgaggtcttctccatcctgggcttcatggctgcagagcagggcgtgcacatctccaaggtggcagagtcagggccgggcctggccttcatcgcctacccgcgggctgtcacgctgatgccagaggccccactctgggctgccctgttcttcttcatgctgttgctgcttggtctcgacagccagtttgtaggtgtggagggcttcatcaccggcctcctcgacctcctcccggcctcctactacttccgtttccaaagggagatctctgtggcn

SEQ ID NO: 20322 - DNA, 1143 bp, Homo sapiens
  SIMILAR (229)..(471): 1001254mologous to Homo sapiens creatine transporter,accession number U41163,Smith-Waterman Score=465.
gcctggtgctcaggacaggaaaagatttctcaagtgggagccagctgggaaaagggggcagtccctgaggctggccaagggctgctcacctttgaacaagggacagatgttccagacattgatgctgccggccttcatgaactggcccagcgagatctccaagaagaaaatggggattcctccgaccagggctatcaggatgcagggaataaggaacacacctggggggagatctctgtggccctctgttgtgccctccgctttgtcattgatctctccatggtgactgatggtgggatgtatgtcttccagctgtttgactactactcagccagtggcaccaccctgctctggcaggccttttgggagtgcgtggtggtggtctgggtgtatggagctgaccgcttcacggacgacattgcctgtatgatcgggtaccgaccttgtccctggatgaaatggtgctggtcctcttcacccgctggtttgatgaagcttagagagccagccagcagtggaaccttctgggttattcacaatagactgaacccaaaagtccaaaccgccaaaagccaccccagagtcagtccacattggtgtgcagcttgggtgcgagtgcacgctggtgcgtacaaaactacaatgttcaaaacagtgtggtacctgcataattatcaacatatagaatgtaataatgtaattgagagtccagaaataaacctaaatatctacagccaactgatctttgccaagggtaccgagaacttcagggaaagaatagtcctcaacaagtgctcagttgttgcttccacaagtcccctggtcgtgctgcttgtgcttggagtgctgctgcctggcgccctggacagcatcatttactatctcaagcctgactggtcaagctggggtccctcaggttggatagatgtggggacccagattttcttttcttatgccattggcctgggggccctcacagccctgggcagctacaaccgcttcaacaacaactgctacaaatgcctggtgactctcatcttgcagcaggccacactgttggcctccaatgaagcctttaaaaagcagatggagagtgctagtgaggcggccaagaagtacacggagaatgaccagctcaagaag

SEQ ID NO: 20323 - DNA, 2426 bp, Homo sapiens
  SIMILAR (760)..(2226): 961254mologous to Homo sapiens GABA/noradrenaline transporter,accession number U17986,Smith-Waterman Score=2560.
tcagctggaattccggctgaaagcaagcaatgctccccaccctgcaaatccagggcccagcagcctttgctcctggggatagaggccctggcaggcactgtcccttccctgtgcccatcacccccactggtgccctcctgccagtctctgactcttgtgacagtctggtggacctggtctggccatctgttacctatcttgccttggggacccagagcagagtctggccacatcccttgggggctcctggtcaggctggggagtcacctgaacaaagaagacagtgtctagagctgtgggacatggccagctccctgggggacaaggtccccagagcagcatgtgggaagagggggcagacagtgtggcagctgcatctcgcctgcctctgcctggcccagttccactctccacctgctcaacccccacctctctccagaagaggagggggacccgacccggatccaatatcccgctccctgcctgggcctcccacacctgcactgcccacacactcatacagctctcactccccacgtgctccacgcctcctgtccccactgaggagagctcccagaggctcgcctgctccccaccgacacgcgtccctgcagacaaacgaggcgcccagggagcttccccactgcacttggccagggctgccggggcgcagccttgcccctagcttcctctggcgggagccatggctcggaggacaatggggacctctgaacatacctgcccgcaagggggaccggaggcgctgggagtgggggtgtgagggaggtggtgccacagcctccgctgagcagcctggccccccagatcgtgtacttcactgctacattcccctacgtggtcctggtcgtgctgctggtgcgtggagtgctgctgcctggcgccctggatggcatcatttactatctcaagcctgactggtcaaagctggggtcccctcaggtgtggatagatgcggggacccagattttcttttcttacgccattggcctgggggccctcacagccctgggcagctacaaccgcttcaacaacaactgctacaaggacgccatcatcctggctctcatcaacagtgggaccagcttctttgctggcttcgtggtcttctccatcctgggcttcatggctgcagagcagggcgtgcacatctccaaggtggcagagtcagggccgggcctggccttcatcgcctacccgcgggctgtcacgctgatgccagtggccccactctgggctgccctgttcttcttcatgctgttgctgcttggtctcgacagccaggtttgcatggggctctgggacagggagccaggaggggggcggagggagggctgcaggcaaggaaaggggtggaggaggtgcggggatcggcctgagctgccctggccacagtttgtaggtgtggagggcttcatcaccggcctcctcgacctcctcccggcctcctactacttccgtttccaaagggagatctctgtggccctctgttgtgccctctgctttgtcatcgatctctccatggtgactgatgtgagtggggtggggggtctgcctgtgacctctggtggccgtctgccatcctccctgactgggctctgtccccagggcgggatgtacgtcttccagctgtttgactactactcggccagcggcaccaccctgctctggcaggccttttgggagtgcgtggtggtggcctgggtgtacggtaggtcatggctgagggctgggctgggggatggtggcggggaaggcaggtctccagcttggccctcccgcctcacctcgccgcagggagctgaccgcttcatggacgacattgcctgtatgatcgggtaccgaccttgcccctggatgaaatggtgctggtccttcttcaccccgctggtctgcatgggcatcttcatcttcaacgttgtgtactacgagccgctggtctacaacaacacctacgtgtacccgtggtggggtgaggccatgggctgggccttcgccctgtcctccatgctgtgcgtgccgctgcacctcctgggctgcctcctcagggcaaagggcaccatggctgagcgctggcagcacctgacccagcccatctggggcctccaccacttggagtaccgagctcaggacgcagatgtcaggggcctgaccaccctgaccccagtgtccgagagcagcaaggtcgtcgtggtggagagtgtcatgtgacaactcagctcacatcaccagctcacctctggtagccatagcagcccctgcttcagccccaccgcacccctccagggggcctgcctttccctgacacttttggggtctgcctgggggaggaggggagaaagcaccatgagtgctcactaaaacaactttttccatttttaataaaacgcccggaattccgccgatac

SEQ ID NO: 20324 - DNA, 4000 bp, Homo sapiens
  SIMILAR (728)..(1858): 721254mologous to Homo sapiens creatine transporter,accession number Z66539,Smith-Waterman Score=1312.
  misc_feature (1)...(4000): n = a,t,c or g
tagtcggagcgaggtggcgagtcgctgagcccgccgcggccccgagagcggctgcagccgccgccgccgggaaggagagggcgaggcgcgcccgagccgccgccgccgccgccaccgccgccgccgccaccaccgccaccggagtcgcgggccagccgggcagcctccgcgggccccggccggggcggggggcgcgggccacaggcccctgctccggccgtcgtttgcagaccgcgggcgccgatgtcgcccgcgccccgttaggatgagtctcgggtcgggcgaggagccgccgcagccgccgccgcccgagccgcgggcaggagcctcgggagccgccgccgccgccgccgccgcccggccgggccccgacgccgcccgcgcgcccccgggcccccgacacacatgagattcttcaggctcactttcaagtgcttcgtggactgcttctgactgcgccgcccgcgccccgcaccccgccgtccgcccgccgccccgtcccccggcccggccgccccccggcccccggccggcccgcgccctcggggccctccccggtgccgccggtgccccccgcctgaccgccgccccccgtgaggcgccgcgaccccggcccggccgtgcggcccgccggggccatggcgaagaagagcgccgagaacggcatctatagcgtgtccggcgacgagaagaagggccccctcatcgcgcccgggcccgacggggccccggccaagggcgacggccccgtgggcctggggacacccggcggccgcctggccgtgccgccgcgcgcagacctggacgcgccagatggacttcatcatgtcgtgcgtgggcttcgccgtgggcttggggcaacgtgtggcgcttcccctacctgtgctacaagaacggcggaggtgtgttccttattccctacgtcctgatcgccctggttggaggaatccccattttcttcttagagatctcgctgggccagttcatgaaggccggcagcatcaatgtctggaacatctgtcccctgttcaaaggcctgggctacgcctccatggtgatcgtcttctactgcaacacctactacatcatggtgctggcctggggcttctattacctggtcaagtccttttaccagcacgctgccctgggccacatgtggcaactatcctggaaacactccccgacttgcgtggagatctttccgccatgaagactgtggccaatgccagcctggccaacctcacctgtgaccagcttgctaaccgcccggtcccctggtcatcgagttctgggagaacaaagtcttgaagctgtctgggggactggaaggtgccaggggccctcaattgggaangtgacccttggtctgctggcctgctgggtgctggtctacttctgtgtctggaagggggtcaaatccacgggaaaaaatcgtgtacttcactgctaacattacccctacgtggtcctggtcgtgctgctggtgcgtggagtgctgctgcctggcgccctggatggcatcatttactatctcaagcctgactggtcaaagctggggtcccctcaggtgtggatagatgcggggacccagattttcttttcttacgccattggcctgggggccctcacagttctgggcagctacaaccgcttcaacaacaactgctacaaggacgccatcatcctggctctcatcaacagtgggaccagcttctttgctggcttcgtggtcttctccatcctgggcttcatggctgcagagcagggcgtgcacatctccaaggtggcagagtcagggccgggcctggccttcatcgcctacccgcgggctgtcacgctgatgccagtggcccccattttgggctgccctgtttttcttcatgctgttgctgcttggtctcgacagccagtttgtaggtgtggagggtttcatcaccggcctcctggacctcctcccggcctcctactacttccgtttccaaagggagatctctgtggccctctgttgtgccctctgctttgtcatcgatctcttcatggggaactgatggcgggatgtacgtcttccagctgtttgactactactcggccagcggcaccaccctgctctggcaggcccttttgggagtgcgtggtggtggcctgggtgtacggagctgaccgcttcatggacgacattgcctgtatgatcgggtaccgaccttgcccctggatgaagagggtgctggtccttcttcaccccgctggtctgcaatgggcatcttcatcttaaacgttgtgtactacgagccgctggtctacaaacaaaaccctacgtgtacccgtggtggggtgagcgccatgggcctggcctttcgccctgtccttccatgctgttcgtgccgctgcaacctcctggggctgccctccctcagggccaaagggcacccatggctgaagcgctggcagcaccctgaccccagcccatctggggcctccacccacttgggagttaccgaggttcagggacgcagatgttcagggggcnttgacccacccttgaaccccagtgtccgagagcagcaaggtcgtccgtggtggagagtgtcatgtgacaactcagctcacatcaccagctcacctctggtagccatagcagcccctgcttcagccccaccgcacccctccagggggcctgcctttccctgacacttttggggtctgcctgggggaggaggggagaaagcaccatgagtgctcactaaaaacaactttttccatttttaataaaacgaccaaaaatatcacaacccaccaaaaatagatgcctctccccctccagccctagccgagctggtcctaggccccgcctagtgccccacccccacccacagtgctgcactcctcctgcccctgccacgcccaccccctgcccacctcttccaggctctgctctgcagcacacccgtgggtgacccctcaccccagaagcagcagtggcagcttgggaaatgtgaggaagggaaggagggagagacgggagggaggagagagaggagaagggaggcaggggaggggcagcagaaccaaggcaaatatttcagctgggctatacccctctccccatccctgttattagaagcttagagagccagccagcaatggaaccttctggttcctgcgccaatcgccaccagtatcaattgtgtgagcttgggtgcgagtgcacgcgtgcgtgagtacggagagtatatatagatctctatctcttatcaaaggtgaatgccagatgtaaatggcgcctctgggcaaaggaggcttgtattttgcacattttataaaaaccttgagagaatgagatttctgcttgtatatttctaaaaagaggaaggagcccaaaccatcctctccttaccactcccatccctgtgagccctaccttaccccttctgcccctagcccaaggagttgaaatttatagatctaactttcatgggcaaaacaaaggctttcgagctgttgcgtgtgtgagtctgttgtgtggatgtgcgtgtgtggtccccagccccagactggattggaaaagtgcatggtgggggcctcggggctgtcccccacgctgtccccttttgccaaaattctgtggggcaaagaggctgcaatattccgtcctggggtgtctggggctgctaaccctggccttgctcaggcttccccaaccctgtgccgggggcaaaacccccagggaagggaaccctgggaacaagggctcccaacatcccagggcttaaaggtgggatgcacttccccgcacctccagtcttctgtgtagcagctttaacccacgtttgtctgtcacgtccagtcccgagacggctgagtgaccccaagaaaggcttccccgacacccagacagaggctgcagggctggggctgggtgagggtggcgggcctgcggggacattctactgtgctaaaaagccactgcagacatagcaataaaaacatgtcattttccaaa

SEQ ID NO: 20325 - DNA, 363 bp, Homo sapiens
  SIMILAR (31)..(135): 421254mologous to Schizosaccharomyces pombe open reading frame (AA 1 - 87),accession number X07027,Smith-Waterman Score=65.
atgggcaagcggggcctcatcctcctgatagaagcttgtattgctattgcacaaccactccaaagatggtttgtggtcccaccaagagctggcatgccagtgacctatgacccagcaattctgctgctggaagtccacccgtgtgaaatgcacgcttgtgttcaccaggagagaaggttctttgtagatctcaaacagggaactttccacacacccctcaagagcaggctgttccctctgcctggaatgctcttccggttcaaccttgatcccacgacccagccccatgctggtgccctgcaggtgtgtttgtccgatggagacacgtgttcagggctcagccagcccagggggtcaagggca

SEQ ID NO: 20326 - DNA, 1389 bp, Homo sapiens
  SIMILAR (768)..(947): 361254mologous to Chlamydomonas reinhardtii vegetative cell wall protein gp1,accession number AF309494,Smith-Waterman Score=78.
tcaggcgacggtttccgcggacaggacagacggggtggccggatcccctgcacagctccaagtttgggtgacggtttccgtggacagggcggacagggtggccgggtcccctgcacagctccaagtttgggtgacggtttccgtggacaggacagacggggtggccgggtcccctgcgcagctccaagcttgagtgatggtttctccctcgctagccttgcgggggttgctggacaggaccacaaaagctggtgcccagctccgtccccagcacgcctgccccgacacggtgaggggctttgtaacacgcccagctctgtcgctccagaccctgggtgcacagctagaggcgccactggcaagcctgcacgtcgagcccagggatgccgtggccagcagtggttgggatttcacgaactttagacagctgccggtgtcagggtcccggggcttttcccggccgccaccccccccgccaaatgagccatcagctccctctccccagtcatggagaccgcactgctgtccttcttccaggccaggagcagcccccgccatgtgatgagctccgccacgccagcttctgtcttcctcccggtgacggcaccacagctcccccggcaccgcgtacattcctgttttggggtattttattcgcatctgcagagtagagaggaacattccagaatgtgaagacttcagaacgtggaccctgggttctggagagaaggtggcctgacttttagctgggagctgtgcagctgtgtccccctccctgccgcccttgccacagagcagcgcttcctggtggccttttccccccaccacgccccccacactcccctcaggccggacccctccatccacagtggacacagtagcctgggagcgttggatcccccactcagctttccccagaagcctcaagaccacagtggcctcccacggcggagcagtcccagggctggtgttcatccagggcacggacaggcctgaagtgcagacatttcctctgccaagcagtggacgcaggtcggccccgctggccagggcggctctaagtttggaaaaacgaaagtcccgtggcagagtgggcccctggggtgggatcctggagccagggctgggcaaggtgtgggttgagagacccgggggccttccctgcagctggcatggagtgatggggagggggtgctgggtggagagggagctatagaggccacaggaggggtccctagcctccagcaccatggccgtggtctggggggcatcctggcagccccatggagtggccgtgtccagggactgagctccaaatgaggaaccgtgcggggtccagagacctgcactcactcggccgggccccacctgctgccacagccccctcat

SEQ ID NO: 20327 - DNA, 2541 bp, Homo sapiens
  SIMILAR (102)..(1385): 281254mologous to Herpesvirus papio NTR,accession number AF200364,Smith-Waterman Score=154.
tcaaagacgcatggctgctcggaaggcagggagagcactgccgaagctactacgagtcttctgaatttctgcgcgacagtccaaagtgacgtgctgagccgcatctgcaggtgcccggtgtgccagggtcagcccagaagccacaggggacccagatggccccagtctccccacgacggggaccacagcggggctggcatacactgggcgctcaacgattgctcccacaagctgccctaagcagcccagcatttccccagcatccaggaggccgctgggctcctcggagaagggggcagtcttcacaggggcatagtccagaatcactgccttcagaaagggctcagcctcactggaaccatccccaacttctgtcaccatgcactccgctctcttgcccttgagggggccccaggcaggctggcaggctggggacagcgggtcgggcacgtgggtgggtctgggcgcggcgccctctgaacggggagccccgatgtccgcgcggcactggctccgggctcccgggcgccggcctattttcttgctgtccgctctgtggtagaccccagcttggggtgggggtcctgccgccagcaggagtccagggggtccctcgtcgagagtcgttgggtgcccactctgtcccctggcacctggaccagtgcccagtgtggagtgacgtcccatgagcaccaaagacctgccccctcccagccccaggtagaagccactgccgggcctgcacctgtgtgatgccaaaggctgtcggcattcctgcgtgggagcggccaccaactcgtccagagacagagggagctgggggtagctgtgccgaacgcctattggctccagtggagatggcgccagtctcacgaggccagagaagagacccagagccaggatccagacatggggtcctcccacggacacggcagcgttggggggtccgaggcccccacagcacctcccacggacacgacagcattgggagatctgaggccccggagcacctcctacggacacggcagcgttgggggatctgaggccccagagcccagggctgctcatggaattgggcgccaatttcccgggacccacatggcagaggcccgtggcaggggccggtggggaaactgtggcccggaggtcaggggtcctgtccacagtcaccgcctgtgtgagtctcccggggctgccataacaaagagccacgaactgggagctaaagccacggaaacgcgacccctccagcccgctgtccctgtagggcggggctgtggcaacaccacatttgcccagggcctgcgaacccgcccgcgctgtctgaggagtggccaccgacggcaccagatggaggctctccagccctccctcccgagccccggtagtgagagtgggtgctgaaaccccatcccgggccccaaaggacactggccgattctcgcgcagaaagccacaggccttgtcgcactccctcccggctggaggcgcggaatccggcctggttgttggcggtccgatctggggaccggctcttcgaggtctgtcctgttcagccccgcctggggcatagggtcttctaggtctcgggttgtggtgcggggttgccagataaatgcagtaatggcagcaaggagaaccggcatttccactgggccttttacgtctaccatgcctgttttcccatgtggccctccgactcagggcgctcacgttcaccttgggaaaaataacaggttttggttttgttttctttttctttttcttaaccacaaaacactcatcaatggttgttccgcggtatggatgagccacgtccgtgggttccttcacccggggagggacatcggggctgcggcaggtgcacatgtgcgggtcccccaggggccaggacatgactagtgcgtctccagactctggcccaaaacccagcctccatccacccctcagtggcttgaagcagctcagctggtcatgggggctggtgagcagctccgtgtgcctggcatgaggcaccagggtcagttgtgacctcacggaggaacagcctccgccacgccagcttctgtcttcctcccggtgacggcaccacagctcccccggcaccgcgtacattcctgttttggggtattttattcgcatctgcagagtagagaggaacattccagaatgtgaagacttcagaacgtggaccctgggttctggagagcaggtggcctgacttttagctgggagctggctttccagtaggtctgcatagctctgaattgattttggaagaaaccgccctgaactgtttttctcactgccctgtctgctcttgaggggtgtgtggaaagttccctgtttgagatctacaaagaaccttctctcctggtgaacacaagcgtgcatttcacacgggtggacttccagcagcagaattgctgggtcataggtcactggcatgccagctcttggtgggaccacaaaccatctttggagtggttgtgcaatagcaatacaagcttctatcaggaggatgaggccccgcttgcccat

SEQ ID NO: 20328 - DNA, 957 bp, Homo sapiens
  SIMILAR (170)..(307): 971254mologous to Mus musculus p38-2G4,accession number X84789,Smith-Waterman Score=232.
aattccttctaggaaggaccatgaaaaagctgaatttgaggtacatgaagtatatgctgtggatgttctcgtcagctcaggagagggcaaggtgaggagagtaccagagttggcaaagaggggtgactgagagtgttcaccagaccaaatgttacttaaattactctttcaggccaaggatgcaggacagagaaccactatttacaaacgagacccctctaaacagtatggactgaaaatgaaaacttcacgtgccttcttcagtgaggtggaaaggcgttttgatgccatgccgtttactttaaggtactaagcaatgatagtacttggaaccagtctgactcacagaccatacacccaggaacactttttcctctcccttcctgcctagacttgtagcgtgcatgtgctcactccctccctctctctccccatctccttctcattgaaggtaatgtaaaagagcaatcctaagcatgatttctgcctgagggtaggagctattttaaaatatgagcaaaatggtaagacttgatggggagttaaagatacctctgaatatcatcttccctgccagagcatttgaagatgagaagaaggctcggatgggtgtggtggagtgcgccaaacatgaactgctgcaaccatttaatgttctctatgagaaggagggtgagttccaaaaagagcttcactttggattccctgattataagatatccttcctgtaagttcagaagagctaagtatgacaaaggaactttttatcaaaacacatcttcatttttgccataggtgaatttgttgcccagtttaaatttacagttctgctcatgcccaatggccccatgcggataaccagtggtcccttcgagcctgacctctacaagtctgagatggaggtccaggatgcagagctaaaggccctcctccagagttctgcaagtcgaaaaaccc

SEQ ID NO: 20329 - DNA, 407 bp, Homo sapiens
  SIMILAR (151)..(264): 781254mologous to Mus musculus p38-2G4,accession number X84789,Smith-Waterman Score=152.
cttttgctcccttgaagatctatcctggctataacccagtctaagccagaaatctcagagccctgtgtttccataaccaggtagttgtctcactgcctaccacttcaaactactgaagtgggtggatttggaaaccttttgggatactggatagcttgttccataggttgtgtactatctacaggtatgctgtcacaccagttgaagcagcatgtcatcgatggagaaaaaaccattatccagaatcccacagaccagcagaagtaggtgccaaccctacttattaccttctaccacacaagactagtcatcaggtttttttctatactcccaactgaatcttgtccgccctctactccatgttttcaggagtggacctgtgctcttaatattccctttctctaggc

SEQ ID NO: 20330 - DNA, 2729 bp, Homo sapiens
  SIMILAR (411)..(458): 811254mologous to Homo sapiens cell cycle protein,accession number AF104670,Smith-Waterman Score=63.
gagagaccacgcttcccctcatgctcctcaacggctccgccttcccgccggagcctgacccttcccagagtgcccggcgattgcggcgtgcgaggcccttggagggcaaggccccagggcctggcttaggagcgcgagaggcaggctgggaattgtagttcgaaggccctcgagagcggctagagtctggcggccgagaggactagttgtcccagcgtgccctgcgcctcagcccgcgcgctcgcagcttctcgctctcgcctgcctgcccgctcccttgcttgctcgcgctttcgctcgccctctcctcgaggatcgaggggactctgaccacagcctgtggctggggaagggagacagaggcggcggcggctcaagggaaacgaggctgcagtggtggtagtaggaagatgtcgggcgaggacgagcaacaggagcaaactatcgttgatgttctctggtcgtgaccaagtataagatggggggcgacatcgccaacagggtacttcggtccttggtggaagcatctagctcaggtgtgtcggtactgagcctgtgtgagaaaggtgatgccatgattatggaagaaacagggaaaatcttcaagaaagaaaacggaaatgaagaaaggtattgccttttcccaccagcatttcgggtacaatcaactaacctatcgtcacttctccccttttgaaagaagcgacccaggattatattcctccaaggaaaggtgacttggttaaaaattgaccttggggttccatgttggatgggcttcatcgctaatgtagcctcacactttttgtggttgatgtagctcaggggacccaagtaacagggaggaaaggcagatgttattaaggcagctcacctttgtgctgaagctgcccctacgcctggtcaaacctggaaatcagaacacacaagtgaccagaagcctggaacaaagttgcccactcatttaactgcacgccaattagaaggtatgctgtcacacagtttgaagcagcatgtcatcgatggagaaaaaccataattccagaatcccacagacaagcagaaagagggcccatgaaaaagctgattttgaggttacatgaagtatatgctgtggatgttctcgtcaagcctcaggagagggcaaggcccaaggatgcaggacagagaaccactatttacaaacgagacccctctaaacagtatggactgaaaatgaaaacttcacgtgccttcttcagtgaggtggaaaggcgttttgatgccatgccgtttactttaagagcatttgaagatgagaagaaggctcggatgggtgtgggtggagtgcgcccaaacatgaactgctgcaacccttttaatgttctctatgagaaggagggtgaatttgttgcccaggtttaaatttacggttctgctcatgccccaatggccccatgcggataaccagttggtcccttcgagcctgaacttctacaagttctgagatggaggttccaggatgcagagctaaaggccctcctccaggagttctgcaaagtcggaaaaaccccagaaaaagaaaaaaaaagaaggcctccaagactgcaggagaatggccactggtggcattctctgcagtcttggaaacatttagaagaaaatggaagctggggggacttgaggtgggtcccatctccccagcttgctgctcctgcctccatcccccttcccaccaaacccccagactctgtgaagtgcagttcttcttctccacctaggaccgccagcagagggggggggattccttggcccccaccccagttccccaacccactcccttccaacaacaaccagctccaactgactctggtcttgggaggtgaggcttcccaaccccggaagactactttaaatgaaaaaaagaaattgaataataaaatcaggagtcaaaattcatcgtcttcaaggcccctctttctagccttttctactactctctgcttggtcaaggtttgtgccccactacagaacaggggctaaattagccaccaccactgaaaactcagccgaatttttttataccactctgatgtcagcattttttccatctgtttggggctttttcctcttttttccattctccccaaatattttatctggcttcaaaattaagaggattatttttcagattgtttttattcagtgtggccgattcctcatctgattcaggctgtccagtcaggccccctccccattttgggacctggagccttcatttatgaagagattctccatcctatgaaatggatcctcatttgtaaatcttttttcttcccattttcaccaaagctgtaaagaaataatccatctcaaaccttacccttttttctctggagtcagtggggtctttcctcgctccatcttacacagaccctgagctggaagcctcaacctggttttgttcccctgtttgaaatattgtgatctccctcccatgaaagaaaaaccaagaaccagaggcgtagactgactgaagacacaactcctggctttctgaagctatggacttggattggattgctgggggtttgtagagaaaggtgacaaatttcagtacctctggcatgctgtcccaggaaactagggctcccactaacttatgaggtttttaaacacattgaaaatgacatgacattaaaataaatttggatatgctcataatgaaaaaaaaaaaaaaaaagtcgacc

SEQ ID NO: 20331 - DNA, 3969 bp, Homo sapiens
  SIMILAR (2590)..(3228): 951254mologous to Escherichia coli similar to fdrA gene of E. coli,accession number U73857,Smith-Waterman Score=1023.
  misc_feature (1)...(3969): n = a,t,c or g
atgccgctggattctggtgcaccaaaaccgggactgtcacatgatccttttgaagtgctccgccgagatagtgttgataagacctctcgggtatggtcaggccttgaacgttaccaggagctgcttactgaggacgcactgggtgatctcatcccttcttttctactgactggtcaacagacaccggcgctcggccgaagagtatctggtgtcatacaaattgccgatggaagtcgccgtcgtaaagctgctgcacttaccgaaagtgattatcgtggtctggctggcaagctgcatgatgagcacatgcctgcattatccagattgggtaacgattatcgcccaacaagcgcttatgaacgtggtcagcgttatgcaagccgattgcagaatgaatttgctgaaaatatttctgcgctggctgatgcagaaaatatttcacacgctgatgacacatcaatctacatgttttatcaaaaggtcggcgacaactcaatcgacagctggaaaaacgcgggccgtgtctttaaagacagcgataagttcgacgccaacgatccgatcctgaaagatcagacgcaagaatggtccggttctgcaacctttacatctgacggaaaaatccgtttattctacactgactattccggccggaaggcgaagataaagccgtcacgacacagagagaaagagcgccttttggtgccaaagacgagcaggccgagcaccacaagggggcggggttttatcggggaacgggggaaggcccaccccaaaccccgaagcgggaacggcgcaagagcaaagcggcacgccgagggccacagacccaaaagcgccagagataggcaaaagaggcaacggacaaagcagaggcagaaggacaaagacgcacccaaaaagccaaaacgagacggcaaaccccacagaggaagacgacaggcccagaggaaaggcgagagggaacacggcgcgacacaaaacggaaagaaaaagggcggagaagaagccaaaggcacaaggacacacgcgaagggcaaagcaacaggggcaacaacacagcgaagcccaaagccgcaaaggcaaccggacaggggacaaagggaaaggcgcagggccaaagccccaacggcacagggcgaggcgggaaagccagacagcaaacagcgcaagggagccagcagcaagcgcccaacagccaacagaggacaaggaaacgggacaacggcgaggcgcgaacagggcaacagcagaaacgaggatacgcggcgaaagcggaccaggcacaaaaggggagaaggcggacaagcgcaaagacagggtaaacacgcgcaggaccaccaaacggcgaacaagaggccaaagcgacgcaaaacgcgcgaaaaaaggcatcacgcggcgggagacgcgacaccgggcgcgccacaggcccaacgccgaccacggcggacggagcagcaacgaccacggaccggcgccaagaacgacaataacgaaacgacagcagcgccactcgacacccacgcgacgaagacgacgacaccacgcaacaacgggagcgcacgaaagcaccgacatacacgacgagactctcgagtgatccctcatttggccagtgtgggcactaataaagatgaggaagaggaggacgagtgggaaaaactaacttcagattctgagtgtgagaaacagctaccggaggagattaatgaaaagaaaggaaaactaaaaaaagtatgttttactagcccatcagctccacctgctgaattaagtgaatggccacctcctctgtgccccttactggagaagcccgggacggccatgtgcgtgggctgcgggagtcagatccacgaccagtttatcctgcgggtgtcgcccgacctcgagtggcacgcggcctgcctcaagtgtgccgagtgcagccagtacctggacgagacgtgcacgtgcttcgtgagagacgggaagacctactgcaagcgggactatgtcagggagaaggccatccgcatcccgcacgggtgccgcagcgctcccccgggcccgggaatgcccgcaggcgggtcaccgcagtctcctggtggccacaaagtgtcctgggcgcgcgccggagcccgtacagccagggagatgagggcggccgcaggcccagcgctgacaccggcgcaccttgggcccgcaggcttgttcgcatcaagtgcgccaaggggcaggctgctccttcatgagagcgtcgggccgcgggttggcggcgtagcaggtccgcagagtgtgcagctgcttctcgttcagcacagtccgcacgcgggtcgtcttctccgtctgcttgtgcacgtgcgggcgcaacgcgggctgccggcccgacccagcgtctgccaggacaggacaattgtggcaattaataaagacccagaagctccaattttccaagtggcagattatggaatagttgcagatttatttaagacaattgtggcaattaataaagacccagaagctccaattttccatgtggcagattatggaatagttgcagatttatttaaggcccgcttgcttcttttcacgttcttgactgaattccatgtggtcacagttggaggaaaggtccctctggcgcgtcaggcgctgcaaaacgatctcaacgtgatgctgttttccgataacgtctcagttgaagatgaactggcgctcaagcaactggcccacgaaaaagggctgctgatgatggggccagactgtggcacggcgattatcaacggcgcggcgctctgttttggtaacgccgtgcgtcgcggcaacatcggtattgttggcgcatccggcaccggcagtcaggagttgagcgtccgcattcatgaatttggcggcggcgtttcgcaactgattggcaccggcgggcgcgacctgagcgagaaaatcggcggcctgatgatgctcgacgccatcgggatgctggaaaacgatccgcaaactgaaatcattgcgcttatctccaaaccgcctgcgcctgcggtggcccgcaaagtgctggaacgtgcgcgcgcctgccgcaagccggtggtcgtctgcttcctcgatcgtggcgaaacgccagtggatgagcaggggctacagtttgcccgcggcaccaaagaggcagcgctaaaagcggtgatgctctccggcgtgaaacaggaaaatctcgacctgcatacgcttaaccagccgttgattgcggatgtgccgaaaaccgccgactccggcagccagcgcattaatagcggcaccagaatcaacggcaccacaccacctacccaaaacaccgtttgccatgctaagtttgcccccgcgaaacccagtgtcgccgccagcgccgcgccaatgggaacaccgcaatacatcaggctcactgccgtcccacgaaaacgtggacccgcggcttcagacgtcagggcgataagattcggcaacgccgcccccaggccgacaccggtcatcagccgcgcaaagaccaggacgcgacaccacaccactagcggctccacgagccgcagacgtcgacgccgcgaggcagcggagcgacacgcgacaatgccgcaaggatcgagcatacgagctagcgactctatacacagagaacgcaaacacgccgataggacgatcgggaaaccgcgatcaccacattccaacgaaaccagaagcgaccacgcgacgtcggtctcccaggcatcgacaacagacacccgctgcgaaatgcacggctacggcgcctcggccaacgccagagcgaatcaatcagcacacaacagccacgaactcgagaccacacacatgctcgtccangaagagccacacagaagccgcaacgctaggcggagcatctggcctgaccgtacgtcaacacgcggccacacgtacacaaccgagccacgaaccgcgtgggccgaccgtgcgcgcaagacggcacgacaagcgacacgctag

SEQ ID NO: 20332 - DNA, 2834 bp, Homo sapiens
  SIMILAR (2025)..(2276): 691254mologous to Rattus norvegicus amino acid feature: homeodomain, bp 647 .. 826; amino acid feature: LIM1, bp 155 .. 307; amino acid feature: LIM2, bp 341 .. 493,accession number L35571,Smith-Waterman Score=274.
tcagccaggagccaagaacccaacaaagaggggtttttgccatcttgttttgaggcccagtttgatgaacaatttagccaggttcttctgggggagggggagtatcaatgcatagtggactgtcactggaatattctgggtcctaatcagcagctgcccagagatggggtctgagtgtataatgggcaggtacggctgaacagaaacagaggtgcctccaccccaggcaaggcagtttcccccaggtagccataggcctgcagcacagatccgtagaccaggctgggcctctgggtgctgtgtggccttgccccgctcctcccctctctggatcttcacttcctccctatagaaagaggaaactgggctggatgggctatttgtaaatatttgtccagacctagaaattcgtagaggggaacataaaccgaaatggtgcagtacagatccacggtatatatgggtcgggatcaaatggagatgtgaaatgggagcaagcgggtattcagtgcacccccatctgggatctcggagaggctcccctttgtttgtttcgggcttcagggtgcaggctctggaatcagtcactgtttccccgggatggagagaacctggggccaagcgaggagagtgccagcggctgctcagcaccttggtcggtgggaggccactgggctggggaacctggagccttgaggaaggagacaggggccgaagcccaagggcgggcaggaaggaactgttgcaagccctggaggcccgtccataaccgtggatgagtcttctacacatgtggcctggccctgtccaaatgggctctgaaggaggggaagggccctcgtaggcccccggcatattcgcacctcccacccagtcccctgggcagcgcctcgccctgggtccacgtcggtccctttccctctccagagtcctgggcaagcctctttcctcttcctctgaaactccgacttcttccggagggcttcgctcgttccgagggtcctgcgactggaggaggcacatccctgagcagccactccctccccgcagcggcctgtcgccgagctcccgcgccctgcttgagctcgggagagatcgctgcggggcagtccggcccgggagcgagagaaagaacgaaaatgcacagctctctccgagtaaggcgaacagatggagaggaagacgaacagttaaacgaaacaaacagaataaaacagaaacgaaatcgggccccggggggctgggccacccggagacgctgggtcgggccggcagcccgcgttgcgcccgcacgtgcacaagcagacggagaagacgacccgcgtgcggactgtgctgaacgagaagcagctgcacactctgcggacctgctacgccgccaacccgcggcccgacgctctcatgaaggagcagctggtggagatgaccggcctgagcccgcgggtcatccgcgtctggttccagaacaagcgctgcaaggacaagaagaaatccattctcatgaagcagctgcagcagcagcagcacagcgacaagacggtgagcagccgctgggccggaggctcgagtcgggtgggggctgcgcttccgccgcggtatctgcgtgcccttttctgggcgagccctgggagatccagggagaactgggcgctccagatggtgtatgtctgtaccttcacagcaaggcttcccttggatttgaggcttcctattttgtctgggatcggggtttctccttgtcccagtggcagccccgcgttgcgggttccgggcgctgcgcggagcccaaggctgcatggcagtgtgcagcgcccgccagtcgggctggtgggttgtgcactccgtcggcagctgcagaaagatccccagtggagaaagagggctcttccgatgcgatcgagtgtgcgcctccccgcaaagcaatgcagaccctaaatcactcaaggcctggagctccagtctcaaaggtggcagaaaaggccagacctaactcgagcacctactgccttctgcttgccccgcagagccttcagggactgactgggacgcccctggtggcgggcagtcccatccgccatgagaacgccgtgcagggcagcgcagtggaggtgcagacgtaccagccgccgtggaaggcgctcagcgagtttgccctccagagcgacctggaccaacccgccttccaacagctgggcttgctctcagctggcggccggtccccaagggacactttccgactcggagcacgcggccctggagcaccagctcgcgtgcctcttcacctgcctcttcccggtgtttccgccgccccaggtctccttctccgagtccggctccctaggcaactcctccggcagcgacgtgacctccctgtcctcgcagctcccggacacccccaacagtatggtgccgagtcccgtggagacgtgagggggacccctccctgccagcccgcggacctcgcatgctccctgcatgagactcacccatgctcaggccattccagttccgaaagctctctcgccttcgtaattattctattgttatttatgagagagtaccgagagacacggtctggacagcccaaggcgccaggatgcaacctgctttcaccagactgcagacccctgctccgaggactcttagtttttcaaaaccagaatctgggacttaccagggttagctctgccctctcctctcctctctacgtggccgccgctctgtctctccacgccccacctgtgtccccatctcggccggcccggagctcgcccacgcggacccccgccctgccccagctcagcgctccctggcggcttcgcccgggctcctag

SEQ ID NO: 20333 - DNA, 276 bp, Homo sapiens
  SIMILAR (261)..(49): 291254mologous to Mus musculus lymphoid-restricted membrane protein,accession number U10484,Smith-Waterman Score=74.
tcaagggcgaacgagaattactccagcgcatgcacaagtgtgaaacaccagactgggatccaaaagtctgcttgtcactgagccgtaagttaaccagcggcagagctgagaacagataggaccaaaatgtgatcctacaagcagcagccgtcggtgaagacagtcaggacatctctggtcttcaaggctctggccttcagtttcatgcaggtccacagcctggaggtagtcgctgacctcactaccccctggtccccatgtcaaacagcagctcat

SEQ ID NO: 20334 - DNA, 387 bp, Homo sapiens
  SIMILAR (41)..(157): 331254mologous to Xylella fastidiosa hypothetical protein,accession number AE004008,Smith-Waterman Score=59.
atgggacacatcttcatgaagtttgaggacaccaagatcaagacaggtctccacacgacccagaaggaaaaaagaaaagctcccatccaagggcatgttctcttcagtatccctgcctcaggtgctgacacagagacatcaaagaccaacctgctcctggtcactgtgttggcagccacaacacctgatattactgaggagttaaatctgatctgcagtagatcaatgtctctgcggtctctaaatcatcagcttacttcatgcattttatctgacagaaggacaaatcggcaattcgagagacttaaagaattattaggtgattctttaaaaggagaagccaaagcaagcacacagaacattcatgtgtcagttagtatttactga

SEQ ID NO: 20335 - DNA, 1167 bp, Homo sapiens
  SIMILAR (1051)..(950): 361254mologous to Xenopus laevis metalloprotease/disintegrin xMDC13,accession number U78186,Smith-Waterman Score=57.
tcaagattgctgcagcagggcatcaaactgcatgcaggtacttctgagcagaccacgtggcctccaggtctctccgctgaagacggccttgccctggctcctgatcctcttgcagtgggcctcgcgctcccgctccagccggcccttcgtgctaaactgcagggcagtgctctgttcctgaggacgcgcgtggccggcacctcccacctcggtgactccgagactccgcagccctgcggagagcccacgatggccgtctgcagaggagcgatcctctctcccttccgagggaggaggccgggctacgggtgagtaagctgctgcgggccccgtgccccgccgggtgtgaacggagatgcgctgcgcagtgcccgtcctgcgcagctcccagcttagagaccgcagagacattgatctactgcagatcagatttaactcctcagtaatatcaggtgttgtggctgccaacacagtgaccaggagcaggttggtctttgatgtctctgtgtcagcacctgaggcagggatactgaagagaacatgcccttggatgggagcttttcttttttccttctgggtcgtgtggagacctgtcttgatcttggtgtcctcaaacttcatgaagatgtgtcccattttcatcctttctggtaatctaagtttcttaaatctaaattcccttgccttttctttagggctcagtgacaagcagacttttggatcccagtctggtgtttcacacttgtgcatgcgctggagtaattctcgttcgccagggatgaggtcccctggggctaaacgaatgaacagtttttgaaaagcagaagctacgtccagggggtttctgggcctcaaattgcgcagacttgcggtgctggggagacgttttgcctgcaggcagcaggctctgaattgccctttagctcccgacaatcgcgtccaacgggaagcagcctgagcatccatgagtgcaggagcgtccaccgtgcagtagacactgcccagcaatgcaacgagcggcatgcagcggacactgcccagcaatgcagcgagcgacatgcagcggacactccccagcaatgcagcgagcggcgtgcagtagacactgcccagcaatgcagcaagcggcgtgcagtagaccctgcccagcaatgcagagagcgacat

SEQ ID NO: 20336 - DNA, 1208 bp, Homo sapiens
  SIMILAR (778)..(692): 621254mologous to Gallus gallus B-creatine kinase,accession number M33714,Smith-Waterman Score=73.
ctgctcggaattctcgcggcgaaccacgcgtccgcggatttcctcatgcaggggcgtgtgctctggaggagatttagcccaggtgacagccctgaggaggttggttcctgcttccttgccctggctggatgggaggccccggccctggagggagactggccaggcagccagtgttcggagagctggaggcatggtgtccccttcctgtgtgacctgttgatggggaaaaggagagctggaaacttacaggtcataggtggatttccagtccggacactgcctgccattctccccagggaagggaagaagcggggctctggccaggactgcagggtcttggcagctccagggaacctagggtgcacctggcacttagcctctgtgaacacaggtttcctcatctgcactgggggcccattaactgcaataaccacagggctgttggacattaacgtaagcaaaatgtctagcacagcaccttgcagaggcgttcgagcattataacgaatggcatccgcatagtgcgctgggttatcgctcgccacgggaatatctgcggcagcgggcttgtaatgggttaaatgataacagatgtcttccagcgaatttttgaccgcaacaacccgtggcataacgtcaacggcagcaacttcccctacttcgacagcctgcaatttgccgataacgtgaaaaagtggctgtcgaggagctgctgttgctgttccgcgtcggtcctgctcctgcgcgcgtcgtccaggcccgccaggtcgccgaccagtctctagggcgtccatcgcgggacccacgggaggcagaagtggaggccgtgcgcaccgcgagctcaacacagttgggggccaggtggccgcctcccagcaggttgtcggggttgagctgggtcttgtgctcatcgctgggcttgtagtgcggtgccggtcctcaaggatggggccgaagagatccttgaacacgtcgtaggactcctcgtcggccgccacgcggcccacggccgcgggtctggatggcgcctccagcgcgaagccacccctggcgcgcagctccgcgttcagctggggcagcgcctcggccactgggtcttggtggccgctcaggtcgggaaactcgtcctgcgccgggaggcgagcttcagcgccccgcggctgctgggcctccattgatgtcgtgtggctggagggtggtccttgcat

SEQ ID NO: 20337 - DNA, 958 bp, Homo sapiens
  SIMILAR (385)..(540): 761254mologous to Homo sapiens origin recognition complex subunit 6,accession number AF139658,Smith-Waterman Score=190.
cgggaattgttcgctttagtgccggcgccatggggtcggagctgatcgggcgcctagccccgcgcctgggcctcgccgagcccgacatgctgaggaaagcagaggagtacttgcgcctgtcccgggtgaagtgtgtcggcctctccgcacgcaccacggagaccagcagtgcagtcatgtgcctggaccttgcagcttcctggatgaagtgccccttggacagggcttatttaattaaactttctggtttgaacaaggagacatatcagagctgtcttaaatcttttgagtgtttactgggcctgaattcaaatattggaataagagacctagctgtacagtttagctgtatagaagcagtgaacatggcttcaaagatactaaaaagctatgagtccagtcttccccagacacagcaagtgggatcttgacttatccaggccacttttcacttctgctgcactgctttcagcatgcaagattctaaagctgaaagtggataaaaacaaaatggtagccacatccggtgtaaaaaaaagctatatttgatcgactgtgtaaacaactagagaagattggacagcaggtcgacagagaacctggagatgtatctactccaccacggaagagaaagaagatagtggttgaagccccagcaaaggaaatggagaaggtagaggagatgccacataaaccacagaaagatgaagatctgacacaggattatgaagaatggaaaagaaaaattttggaaaatgctgccagtgctcaaaaggctacagcagagtgatttcagcttccaaactggtatacattccaaactgatagtacattgccatctccaggaagacttgacggctttgggattttgtttaaacttttataataaggatcctaagactgttgcctttaaatagcaaagcagcctacctggaggctaagtctgggcagggggctg

SEQ ID NO: 20338 - DNA, 3383 bp, Homo sapiens
  SIMILAR (1025)..(2377): 661254mologous to Homo sapiens Human ischaemic heart disease associated protein,accession number Y42111,Smith-Waterman Score= 1442.
tttttttttttttttttgccgggttgtttgttttttaatggtttagggttgttttattttaatcttgtccttcagaggtgatatgaatacctagaaatgttacaggaaatagactaaatgaataaaacagaatctagaacacacagcaagtgcagtggtatgaaccggttgtgcaccaagggctggaaggaagttggctcgggctagcgtttgttcagtgctcgccatgggagcactttgcctgctctccaactaccgggaacaccgacagtggtccgtggacaattctcagaccaaggaggcctgcaccagcatgtcaggaacctccaaggagagtctggggcatggggggctgccagggttgggcaagacctgcttaacaaccatggacacaaagctgaacatgctgaacgagaaggtggaccagctcctgcacttccaagaagatgtcacagagaagttgcagagcatgtgccgagacatgggccacctggagcggggcctgcacaggctggaggcctcccgggcaccgggcccgggcggggctgatggggttccccacattgacacccaggctgggtggcccgaggtcctggagctggtgagggccatgcagcaggatgcggcccagcacggtgccaggctggaggccctcttcaggatggtggctgcggtggacagggccatcgctttggtgggggccacgttccagaaatcaaaggtggcggatttcctcatgcaggggcgtgtgccctggaggagaggcagcccaggtgacagccctgaggagtgggtaaaagaggaggaggtctgtttcatgcctccagttcccccagctccgggggcagcaggacagagcctgcagaaggataagggggagctgtctgccgagcaggggatctgggccacattgatgacgctggtgatcatggtgacagcggcaaataaagagcgagtggaagaagagggaggaaaaccaaagcatgtgctgagcaccagtggggtgcagtctgatgccagggagcctggggaagagagccagaaggcggacgtgctggaggggacagcggagaggctgccccccatcagagcgtcagggctgggagctgaccccgcccaggcagtggtctcaccgggccagggagatggtgttcctggcccagcccaggcattccctggccacctgcccctgcccacaaaggtggaagccaaggctcctgagacacccagcgagaacctcaggactggcctggaattggctccagcacccggcagggtcaatgtggtctccccgagcctggaggttgcaccaggtgcaggacaaggagcatcgtccagcaggcctgaccctgagcccttagaggaaggcacgaggctgactccagggcctggccctcagtgcccagggcctccagggctgccagcccaggccagggcaacccacagtggtggagaaacacctccaagggcagccctgctgaagggcgctgtggccccgggcttctctcggagggacctggtgtttcctagcatcttctgcgcctgcctagggatctccatccacatacaagagatggatactcctggggagatgctgatgacaggcaggggcagccttggacccaccctcaccacagaggctccagcagctgcccagccaggcaagcagggcccacctgggaccgggcgctgcctccaagcccctgggactgagcccggagaacagacccctgaaggagccagagagctctccccgctgcaggagagcagcagccccgggggagtgaaggcagaggaggagcaaagggctggggccgagcctggcacgagaccaagcttggccaggagtgacgacaatgaccacgaggttggggccctgggcctgcagcagggcaaaagcccaggggcgggaaaccctgagcctgagcaggactgtgcagccagggctccggtgagagctgaagcagtaaggaggatgcccccaggcgccgaggctggcagcgtggttctggatgacagtccggccccaccagctccttttgaacaccgggtagtgagcgtcaaggagacctccatctctgcgggttacgaggtgtgccagcacgaagtcttgggagggggtcggtttggccaggtccacaggtgcacagagaagtccacaggcctcccactggctgccaagatcatcaaagtgaagagcgccaaggaccgggaggacgtgaagaacgagatcaacatcatgaaccagctcagccacgtgaacctgatccagctctatgacgccttcgagagcaagcacagctgcacccttgtcatggagtacgtggacgggggtgagctcttcgaccggatcacagatgagaagtaccacctgacttgagctggatgtggtcctgttcaccaggcagatctgtgagggtgtgcattacctgcaccagcactacatcctgcacctggacctcaagacgggccctaaggagaagtactgcttccagcaagtcaaatacttggattttatcaatggcgagacaaaagaggcaaggccaaatcgggctggtcttaatcccgaacggtctgtggggccccttctccactcgctggagtgcggggcggtgggagagagcaggggctacaaggagggtcgacccagtgccggcgccatggggtcggagctgatcgggcgcctagccccgcgcctgggcctcgccgagcccgacatgctgagggcctacttcaagaaaaacttctcggccgtgagcttgaatgagatggcaagaagggcgatagcaaacggcgatggcacacgtccctgggaacagccagccctgtccgtgggtagaaaaatgagccagggagaactttccgttcattccgccaacgcctactgcagtcgggtttatagcggggaacccgacaacgaggcgcagaccccgctgtctgcttatttaattaaactttctggtttgaacaaggagacatatcagagctgtcttaaatcttttgagtgtttactgggcctgaattcaaatattggaataagagacctagctgtacagtttagctgtatagaagcagtgaacatggcttcaaagatactaaaaaggattctaaagctgaaagtggataaaaacaaaatggtagccacatccggtgtaaaaaaagctatatttgatcgactgtgtaaacaactagagaagattggacagcaggtcgacactaagaattttgaaattgcttttgataattttctgtcagaaatggagaaggtagaggagatgccacataaaccacagaaagatgaagatctgacacaggattatgaagaatggaaaagaaaaattttggaaaatgctgccagtgctcaaaaggctacagcagagtga

SEQ ID NO: 20339 - DNA, 1640 bp, Homo sapiens
  SIMILAR (783)..(1142): 701254mologous to Homo sapiens ankyrin motif,accession number D78334,Smith-Waterman Score=384.
atgcgcagaccaagcacgccggctctagcggtggtggtctttgctaggtctggaggtagagcagatgctgaggcgttcaaaggaaggcggtgcctgtggacaagcaggcttgcacaggatctggcccgtgccgaccagggcgccaggaccctgaaagtctcgtcccagggattgggagtggggcacattgtagaatctgtgtttggagcaggtcaaccatcagatcgggtacctgaggtgagaatgcaggtctgcgagcccctaggaccggaccataacgaccttaacagccataacggccgtaactgccataacggccggctgcgcgaggcccttccagcatttccactttcgtcaggtactggagagggctgccggccggatgccagggcagaggggcagggcggacggctaggagttcaagaaacatcctggtctgagggaaaggctgcagcctgcaccgccatgaataagcttttcagcttctggaagaggaagaatgagacccgcagccagggctacaaccttcgagaaaaggatttaaagaaacttcacagagctgcttcagtcggggatttgaagaagctgaaggaataccttcagatccaagaaatatgatgtaaatatgcaggacaaaaaatacaggacacctttgcacctagcctgtgctaatgggacatacagattgttgtacttttttcctaatttgaggcaacaatgcaaaataaatgtccgggatagtgaaaacaaatccccattgattaaggcagtacagtgtcaaaatgaggattgtgcctactattcttctaaactttggtgcagacccagatctgagggatattcgttataatactgttcttcactatgctgtttgtggtcaaagtttggtcattagttgaaaaactggcttgaatacgaagctgatcttgaagcgaaaaataaggatgggtataccccactattggttgcccgttattaacaattaatcccaaaattggtaaaatttcttctggaggaaaggggctgatgtgaatgcttcagataattatcaaagaacagcccttattcttgctgtcagtggtgaaccaccatgtttagtaaagcttcttcttcagcaaggtggggaaatatgtaacgaagggaatggtggattcacagctgaggaatatgtttatttccatggttttactgcatagatacccacaattcactgcgagccatggaaagtcagaaacatgctaaatagacaccttattcttggcactacatgtgactaaaggaagatatggaacccatttctacaatttctttgccgcttccttgaattggaaaaatggtactttgcaaggaaccgttaaagtgaactatgataatatttttgctgactacccagttgaagaaaaagtttcgttaattggatgggattttttttttttttcacgttagaagaatgaatgaagaaattttaaaagataaacatcctatattgtgaaccatcagctgaaaagataaatttgtgttcaatatataggcagaaaaaaatttgtgtcaaaatgttgaatggaataataatgaggaaactgtgtgttaggcatgtattaaaacatttaaataaaataaaaatacatttcaaaaaaaaa

SEQ ID NO: 20340 - DNA, 954 bp, Homo sapiens
  SIMILAR (222)..(109): 411254mologous to Zea mays root cap-specific protein,accession number AF134580,Smith-Waterman Score=64.
ctacacaatatccttgccaagatgttgaacgtgaatcttctcatgagcagacaaatctagactgtggctagttttcaaaagaaatggcctggtttcttcaaaactgtcagcgtcttgaaaaccaaaattaccaatggggcgcccccctcctcctgtcccctcagtctctccagggccgctgccagggagcttggcgatcgcgccacactctctggagccccaccttgtgcaatcttcctgcctggtagttccgccaaaaacaaaacagtcaaagcgcaaacctggaaggggcgcgcaggcaccaactttgccaaacgctacagagttttccgtttgcagaaatgacccaaaagaaggggggcgccgctccccgtgattccccaatcggcttctggagccagaggctcctcctcgcccctcggcgggagaaagcccgcggccggctgctgctgcccgcttccctgctccgaggaaaaacgactccacaactttgtgcgcgagagaggctcgctccttcggcggctcctcctcctcctccccgctgcgggcctgcccctttgttggagccgagcgcatggacgcctgaattggcaaggagagctgcttagagaactggtaggggcagccagctgatgcgcagcccagagtgtttggtgagggagcatctgtggtggagcacagccagggatagccatctctgtaggccccactagctcccacaggagactttagtcctaggggaactgtcagacttgaactctgcagggtggtcttgcccattagactggactggtctgacctgaataatccttggtcttctggtcccttctggaaccccaacctggcaatgtctgcttgcagggcagcctcgggtgccctgggggcccactctatagcttttgcactggtggaccatgcctgactagtggagagctgcagtggggtggtctccat

SEQ ID NO: 20341 - DNA, 1039 bp, Homo sapiens
  SIMILAR (916)..(566): 291254mologous to Volvox carteri f. nagariensis hydroxyproline-rich glycoprotein DZ-HRGP,accession number AJ242540,Smith-Waterman Score=93.
acatggatggagttgagagccattatcctcagcaaaccaacgccagaacagaaaaccaaacaccacatgttctcacttataactgggagctgaataatgagaacacatgtacacatggcaggaaacaacacacactggggcctgtcaaggtaggtgacttggggcgccaagttcccgacgcggtggccgcggtgaccgccgaggcccggcagacgctgacccgggaacgtagtggggctgatcttccggaacaaagttgctgggccggcggcggcggggcgagagcgccgagggggagccggagcgctgcagaggcgcgggccggagggctggcgctgatctgcacccttctcatctggagagcggacccctggctgcccggaggcgagccccttcccggggggtgggggcggcaacgcgcgacccagcggtcctgcgccccaccctccctcctccgcctccagcgctcggctccaacaaaggggcaggcccgcagcggggaggaggaggaggagccgccgaaggagcgagcctctctcgcgcacaaagttgtggagtcgtttttcctcggagcagggaagcgggcagcagcagccggccgcgggctttctcccgccgaggggcgaggaggagcctctggctccagaagccgattggggaatcacggggagcggcgccccccttcttttgggtcatttctgcaaacggaaaactctgtagcgtttggcaaagttggtgcctgcgcgccccttccaggtttgcgctttgactgttttgtttttggcggaactaccaggcaggaagattgcacaagttggggctccggagagtgtggcgcgatcgccaagctccctggcagcggccctggagagactgaggggacaggaggaggggggcgccccattggtaattttggttttcaagacgctgacagttttgaagaaaccaggccatttcttttgaaaactagccacagtctagatttgtctgctcatgagaagattcacgttcaacatcttggcaaggatattgtgtagat

SEQ ID NO: 20342 - DNA, 935 bp, Homo sapiens
  SIMILAR (248)..(340): 581254mologous to Drosophila melanogaster DmCks1,accession number U40077,Smith-Waterman Score=86.
cggcgcggggctgaaggctagcaaaccgagcgatcatgtcacacaaacaaatttactattcggacaaatacgacgacgaggagtttgagtatcggttagtgctggcgcgggagcaactagcgacgggtcgtgagctttggccgctgagggcacaaggaattagtaacaggaactgaggcgatagaattggcgcatgcgtacgagacatgtcatgctgtcccaaggaccatagccaagctggtccctaaaacccattctgatgtctgaatctgaatggaggaatcttggcgttcagcaagaagtcagggatgggtccatttatatgatccatgaaccggaactcttaacattttggctgttcccggcgcccacttacccaaggaacccaaagaaaatgaaagctgggcaagctaacttttcaagccttcaagcttttacaccagctgtcccttacttcctaaacatctttctggataacatttatttatgttggccttcttgttttcttcacttttggatattttaaaagatgtttcaattacactggtttgaatggtgctgggtaactggctttgccttccttaagtagagcccacccacccacccatagccccagcccagatggaggtgctctgtgggggcccacagccctaaagctgaggtgtgaccccccagaagcccacgatgtgcttctgtatccaggaacacacttgggcaggatgggagggaaggcatctggagtttggaggaccatgggctgtttacaggggttcatgttaaacttgctgtttttgttttttcctgccgggtgttgtatgtgtggtgacttgcgggatttatgtttcagtgtactggaaactttccattttatttcaagaaatctgttcatgtttaaaagccttgattaaagaggaagtttttataaaaaaaaaaaa

SEQ ID NO: 20343 - DNA, 467 bp, Homo sapiens
  SIMILAR (157)..(270): 631254mologous to Homo sapiens islet regenerating protein,accession number M18963,Smith-Waterman Score=135.
tcaagcacaggtgagaggcagagaatccatccacctgtttctgttctctcctgcttagctccagggatggaactgggactgggatagaggaaaggtgaactcctcattaaggaaatgaatgtttggtttttgtcctgagtcctaaagccaggagggtcatactctttcgggtctcccagttgtaactcttctcattgacttataggattccagaaatggaaggatgtgccttgtgaagacaagttctcctttgtctgcaagttcaaaaactagaggcagctggaaaatacatgtctagaactgatccagcaattacaacggagtcaaaaattaaaccggaccatctctccaactcaactcaacctggacactctcttctctgctgagtttgccttgttaatcttcaatagttttacctaccccagtctttggaaccttaaataataaaaataaacatgtttccacta

SEQ ID NO: 20344 - DNA, 1404 bp, Homo sapiens
  SIMILAR (464)..(967): 451254mologous to Homo sapiens Sequence encoded by human reg cDNA,accession number P81514,Smith-Waterman Score=219.
gtttcccatggatgtgactctctcctagggaatgctataacttttaaattaagaaaagcacttgttcagagaaatgaaagacacaaaaagattcaggaaaataccaggcacagaaagataaataccacatgttctagctcaaatgtggaagctaacaatttagatctcatagcagtagagagtgaaatagtggttactatagtcacagaaggggacggagaagacagcgaaagcttggttaaggaatacaaaatcctctttcacaaacagcttggcaaactgtgcaagtcaaagatgggctttgtcctttcccagcagcaaccagatgtcagttctcatgccctgagcagcccagaagaagcagagacttccaggaatagtgatgatggtgtgaaggaggactctgggagaggggcaagattgttgatttgcctcttaagcaagagattcattgcagctcagcatggctcagaccagctcatacttcatgctgatctcctgcctgatgtttctgtctcagagccaaggccaagaggcccagacagagttgccccaggcccgggatcagctgcccagaaggcaccaatgcctatcgctcctactgctactacttttaatggaagacccgtgagacctggggttgatgcagatctctattgccagaacatgaaattcgggcaaactgggtgtctgtggttcacccagggccgaggggtgccttttttggcctcaactgatttaaggaggagtgggcacttgatggactttcaatgtcttggatttgggcctccaatgacccccaaaaagaacccgccgctgggcactgggagcagtggggtcccctggtctccttacaaagttcctgggggcattgggagcccccaagcaggtgtttaaatcctgggctacttgtgtgagcctggaccttcaaagcaccaggatttccagaaattggaaggatgtgccctttgtgaaggacaaggttctcctttggtctgcaaagttcaaaaaactagagggcaggctgggaaaatacaatgtctagaactgactccagcaattacgaacggagtccaaaaattaaaccggaccatctctccaactcaactcaacctggtcactctcttctctgctgagtttgccttgttaatcttcaatagttttacctaaccccagtctttggaacccccacacaataaaaataaacatgtttccactattgtgctgtcttactgtgtctgctatttccacagctgatgcctgggtggttgagatgagagtgattacaacaaagcttgctctggcctatccacttcttaaaagtccatccgcataccatgcatattggaattcagtatttatgaacatatgtggctttgcttatgacaaggttaacaagatgga

SEQ ID NO: 20345 - DNA, 322 bp, Homo sapiens
  SIMILAR (72)..(320): 971254mologous to Mus musculus vacuolar protein sorting 35,accession number AF226323,Smith-Waterman Score=415.
acgaggcagatctctacgaacttgtacagtatgctggaaacattatcccaaggctttaccttttgatcacagtttcaaaggaactcaccagacttttgaaaataccagttgacacttacaacaatattttaacagtcttgaaattaaaacattttcacccactctttgagtactttgactacgagtccagaaagagcatgagttgttatgtgcttagtaatgttctggattataacacagaaattgtctctcaagaccaggtggattccataatgaatttgggatccacggtgattcaagatcagccagatcaacctgtaga

SEQ ID NO: 20346 - DNA, 420 bp, Homo sapiens
  SIMILAR (360)..(419): 901254mologous to Mus musculus vacuolar protein sorting 35,accession number AF226323,Smith-Waterman Score=89.
gatctctacgaacttgtacagtatgctggaaacattatcccaaggctttaccttttgatcacagttggagttgtatatgtcaagtcatttcctcagtccaggaaggatattttgaaagatttggtagaaatgtgccgtggtgtgcaacatcccttgaggggtctgtttcttcgaaattaccttcttcagtgtaccagaaatatcttacctgatgaaggagagccaacagatgaagaaacaactggtgacatcagtgattccatggattttgtactgctcaactttgcagaaatgaacaagctctgggtgcgaatgcagcatcagggacatagccgagatagagaaaaaagagaacgagaaagacaagtcagttggaaggtgtaaatgtggaacgttacaaacagattgttttgactggca

SEQ ID NO: 20347 - DNA, 1449 bp, Homo sapiens
  SIMILAR (289)..(1131): 1001254mologous to Homo sapiens maternal-embryonic 3,accession number AF183418,Smith-Waterman Score=1441.
atggccatttctgatgaactgcactacttggaggtctacctgacagatgagtttgctaaaggaaggaaagtggcagatctctacgaacttgtacagtatgctggaaacattatcccaaggcttgaagaaacaactggtgacatcagtgattccatggattttgtactgctcaactttgcagaaatgaacaagctctgggtgcgaatgcagcatcagggacatagccgagatagagaaaaaagagaacgagaaagacaagaactgagaattttagtgggaacaaatttggttttccctgatgaatttcacctccagactttgaatccttttcttcgggcctgtgctgagttacaccagaatgtaaatgtgaagaacataatcattgctttaattgatagattagctttatttgctcaccgtgaagatggacctggaatcccagcggatattaaactttttgatatattttcacagcaggtggctacagtgatacagtctagacaagacatgccttcagaggatgttgtatctttacaagtctctctgattaatcttgccatgaaatgttaccctgatcgtgtggactatgttgataaagttctagaaacaacagtggagatattcaataagctcaaccttgaacatattgctaccagtagtgcagtttcaaaggaactcaccagacttttgaaaataccagttgacacttacaacaatattttaacagtcttgaaattaaaacattttcacccactctttgagtactttgactacgagtccagaaagagcatgagttgttatgtgcttagtaatgttctggattataacacagaaattgtctctcaagaccaggtggattccataatgaatttggtatccacgttgattcaagatcagccagatcaacctgtagaagaccctgatccagaagattttgctgatgagcagagccttgtgggccgcttcattcatctgctgcgctctgaggaccctgaccagcagtacttgattttgaacacagcacgaaaacattttggagctggtggaaatcagcggattcgcttcacactgccacctttggtatttgcagcttaccagctggcttttcgatataaagagaattctaaagtgctccgcccaccctgccagctccgcccaccctgccagctccgcccaccctgccagctccgcccaccctgccagctccgcccaccctgctaccgcgatgagctgctactcccgaaaggcccggccagctccgcctccgcgctcagccccttccccgcctcgggaggccaagtggattcgtggctggtgcacagcgtggcagctgaggatgcagacgtggctcacgggctgctcggcgccaccgccacgttggccagaggagtcggcgccagccaggctgcacagtgggggcggcggggatccccaagcagctcggagtag

SEQ ID NO: 20348 - DNA, 3115 bp, Homo sapiens
  SIMILAR (45)..(500): 691254mologous to Homo sapiens maternal-embryonic 3,accession number AF183418,Smith-Waterman Score=459.
  misc_feature (1)...(3115): n = a,t,c or g
tactcggggcgggtgctgcttgctgcaggctctggggagtcgccatgcctacaacacagcagtcccctcaggatgagcaggaaaagctcttggatgaagccatacaggctgtgaaggtccagtcattccaaatgaagagagtgcctggatcaaaaacaagcgtattggagtgcgtcataaaacaatgcttcgtaatatgcttgggtgaactccggacttctatgttatcaccaaagagttactatgaactttatatggccatttctgatgaactgcactacttggaggtctacctgacagatgagtttgctaaaggaaggaaagtggcagatctctacggaacttgtacagtatgctggtaaacatttatccccaaggcttttaccttttggtccacagtttgagttgtaataatgtcaagtcatttcctcagtccagggagggatattttgaaagatttggtagaaatgtgccgtggtgtgcaacatcaccttgaggggtctgtttcttcgaaattaccttcttcagtgtaccagaaatatcttacctgatgaaggagagccaacagatgaagaaacaactggtgacatcagagattccatggattttgtactgctcaactttgcagaaatgaacaagctctgggtgcgaatgcagcatcagggacatagccgagatagagaaaaaagagaacgagaaagacaagaactgagaattttagtgggaacaaatttggagcgcctcagtcaggtggaaggtgtaaatgtggaacgttgctgacagattgttttgactggcatattggagcaagttgtaaactgtagggatgctttggctcaagaatatctcatggagtgtattattcaggttttccctgatgaatttcacctccagactttgaatccttttcttcgggcctgtgctgagttacaccagaatgtaaatgtgaagaacataatcattgctttaattgatagattagctttatttgctcaccgtgaagatggacctgggaatcccagcggatattaaactttttgatatattttcacagcaggtgggctacagtgatacagtctaggacaagacatgccttcagagggatgttgtatctttacaagtctctctggattaatcttggccatgaaatgttaccctgatcgtgtgggactatgttggataaagttctaggaaacaacagtgggaggatattcaataagctcaaccttgaacatattgctaccagtagtgcagtttccaaagggaacttcaccagacttttnggaaaattaccagttggacactttaccaacaatattttaaccagtcttggaaattaaaacattttcacccactctttgggtactttgactacgagtccaggaaagagcatgagttgttatgtgcttagtaaatgttctgggattataacacagaaattgtctctcaagaccaggtggattccataatgaatttggtatccacgttgattcaaagatcagccaagatcaacctgtagaagaccctgatccagaagatttttgctgatgagccagaggctctggtggctcgcttcattcatctgctgcgctctgaggaccctgaccagcagtacttgattttgaacacagcacgaaaacattttggagctggtggaaatcagcggattcgcttcacactgccacctttggtatttgcagcttaccagctggcttttcgatataaagagattttctaaagtggatgacaaatgggaaaagaaatgccagaagattttttcattttgccccaccaagactatcaagtgctttgatcaaagcagagctgggcaggaattgcccttaaggactttttctttcaagggaggcacttagctggctggggggaattgggttttggaaatcatggggacagtcgcatatggaattcatgtcccagggcattttctctgtatggaaggatggaaatcaggcgatttcccaaaggcacagctaggctggcccttcacctttggatccattggggcactttttgaaagggttgaagtgctttcagtggaagaggattcctggaaccctctgagggactcagtgtggcccttgctgcatccaaacttctaaagaaacctgatcagggcccgagctgtgagcacctgtgcacatctcttctgggtctggcagaaacacggacaaaaaatggggagggagcttcacggaggcaagaggggtaatggagtgccctaaaaaagcctctaaaaatagcaaatcagtgccatggacccctctcttacaagtgccagctttttatagaaaattctgaaccagatatatctatttttatgaaaagggaaaatgatgcgggtaacaattccaggttttaaaacccagcttattccaaaaggtttcgnagaaagaccttcccggaatctttggactccagttgaaggaaacagagcaggtttaacaaaccattttcataaacacactgggagcatttgccgcttgcgggcgggaaatcacccagaatcccgaggggcccaatttatggaaggtcctcatccctttaaaaaaggaaatagcctcacccatactccctttcccatgtacatcccagtggagggttttattaccgctaggtttccctttcccatagattgtgcctttgagaaatgctgaggtaggtttcccgatttcttacctgtgatgtgttttacccagcacgtccggacacttcaccttcagggaccttaattaaaattattcacttgggtaagtgttccaagtctttctggatcaccccaagtagcatgactgatctgcaatttaaaattccctgtgatctgtnnnnnnnnnnnnttatataaataaaccaacccccccacccctttttttgggttacaaagaaacctcccttttttttggtgggggggtgggctcattgggggagggggattttttttctttcggggggagaacaaccccaaaagcgttggttttttgttttttaccccggttggaaattatttaaaaaaaagggaaaccggttgggaaaatccttttgggcctttcccctaaatggcaaaaaagggccttgggaaaaatttcccttaaaccta

SEQ ID NO: 20349 - DNA, 402 bp, Homo sapiens
  misc_feature (1)...(402): n = a,t,c or g
tcgccctagctgcacaatatatatgctgaccatatatatgtatacacacacacaaaactgcacatgcttgaaacatttgcaaccnnnnnnnnnnnnnnnnnnnnnnnnnnnnnnnnnnnnnnnnnnnnnnnnnnnnnnnnnnnnnnnnnnnnnnnnnnnnnnnnnnnnnnnnnnnnnnnnnnnnnnnnnnnnnnnnnnnnnnnnnnnnnnnnnnnnnnnnnnnnnnnnnnnnnnnnnnnnnnnnnnnnnnnnnnnnnnnnnnnnnnnnnnnnnnnnnnnnnnnnnnnnnnnnnnnnnnnnnnnnnnnnnnnnnnnnnnnnnnnnnnnnnnnnnnnnnnnnnnnnnnnnnnnnnnnnnnnnnnnnnnnnnnnnnnnngtaacctaaatctttttgtgtttgct

SEQ ID NO: 20350 - DNA, 435 bp, Homo sapiens
  SIMILAR (1)..(78): 341254mologous to Monkey B-lymphotropic papovavirus T- antigen,accession number L29432,Smith-Waterman Score=42.
  misc_feature (1)...(435): n = a,t,c or g
ggctgcacgatatatatgctgaccatatatatgtatacactcccacaaagctgcacatgcttgaaacatttgcaaccnnnnnnnnnnnnnnnnnnnnnnnnnnnnnnnnnnnnnnnnnnnnnnnnnnnnnnnnnnnnnnnnnnnnnnnnnnnnnnnnnnnnnnnnnnnnnnnnnnnnnnnnnnnnnnnnnnnnnnnnnnnnnnnnnnnnnnnnnnnnnnnnnnnnnnnnnnnnnnnnnnnnnnnnnnnnnnnnnnnnnnnnnnnnnnnnnnnnnnnnnnnnnnnnnnnnnnnnnnnnnnnnnnnnnnnnnnnnnnnnnnnnnnnnnnnnnnnnnnnnnnnnnnnnnnnnnnnnnnnnnnnnnnnnnnnngtaacaataaataattttgtgtttgctctccacattcatattcagaaatctctcttaaaaacaaaa

SEQ ID NO: 20351 - DNA, 436 bp, Homo sapiens
  SIMILAR (1)..(435): 841254mologous to Homo sapiens Similar to Plasmodium falciparum glutamic acid-rich protein precursor (A54514),accession number D87440,Smith-Waterman Score=583.
  misc_feature (1)...(436): n = a,t,c or g
aagagggaggtgttgaaaagaagatttgaaatcaagaaaaaactaaaaannnnnnnnnnnnnnnnnnnnnnnnnnnnnnnnnnnnnnnnnnnnnnnnnnnnnnnnnnnaaaaaactgacacagattcaagaatctcaggtaacatcccacaacaaggaacggcgttccaagcgggatgagaaactagacaagaaatctcaagccatggaggagctaaaagcagagcgagaaaaacgaaagaacagaacagctgagctccttgccaaaaaacagccattaaaaaccagtgaggtctactctgatgatgaagaggaggaagaggatgacaaatccagtgaaaagtcagaccgctcatcacgaacatcatcgtctgatgaagaagaggagaaagaagagatcccctccaaatcccaaccagttttcttacctgaagaaa

SEQ ID NO: 20352 - DNA, 750 bp, Homo sapiens
  SIMILAR (10)..(171): 921254mologous to Homo sapiens Similar to Plasmodium falciparum glutamic acid-rich protein precursor (A54514),accession number D87440,Smith-Waterman Score=254.
atggtgtgttcagattcagactcttcctcagaagatgaagagttccatgatggctatggagaagacctcatgggagatgaggaagacagggcccgtctggtacagatgacagagaaagaaagagagcaagaactgttcaatcgcatagagaagagggagcccctgccaaagagcaattcgccggggaggggtgaattacagctaacgaaaaggctgatatttcctatcaacagctggcggaccgtccgcacctatttgcacaatcatatcgagccggctgatgaaaaaaaatccaaccacgcttgccgcactaagttactctgccgccgatggccgccggcgatgctgtgcacccccgcagcacgttgtaggggcaccggcaccaggccgaagggggggggagaagtgcccgaaaaggcgcggcccgccccaaacaaaccccacccacaacgaaggcaaagcaaaaaggtcaaacgggagacacccaacgaaaaccacggcaacgccagccgcacacgccagaagaggaagcagaaaagacggaaccagaccatgaactcgcagaccccacaagcagcaggatcgagaaaccaagaaagagaaaatgggcacgagcctaaaagacagggcgcccaaagagcggcacgaaacacccagacacgacaggacgccagagagaaccaccgaaccctgaggtataaacagatcaccaaaggaaagcccgaccggaagcccaacaagacaggctga

SEQ ID NO: 20353 - DNA, 867 bp, Homo sapiens
  SIMILAR (280)..(825): 1001254mologous to Homo sapiens Similar to Plasmodium falciparum glutamic acid-rich protein precursor (A54514),accession number D87440,Smith-Waterman Score=926.
atgcgtctccgcgtgggccgcgtgcgagccggggtccagctcaactcccaaggcgcgcgccccgggggatccacggctggagacgcatgcaggccccgggccactgggaccctggctctgaggctgcgggcccggagtggggaacgagggcagagcgccctggaacgcagcggccgcgcgcctcctcccttgctgcgtggactgggcgctaacggcgcaggaggcgcacggggccagggatgcggggaccgttggcgcggacaagggtggcgcccaggccgatttgaaatcaagaaaaaactaaaaacagccaaaaagaaagaaaagaaagaaaagaagaaaaagcaagaagaggagcaagaaaagaaaaaactgacacagattcaagaatctcaggtaacatcccacaacaaggaacggcgttccaagcgggatgagaaactagacaagaaatctcaagccatggaggagctaaaagcagagcgagaaaaacgaaagaacagaacagctgagctccttgccaaaaaacagccattaaaaaccagtgaggtctactctgatgatgaagaggaggaagaggatgacaaatccagtgaaaagtcagaccgctcatcacgaacatcatcgtctgatgaagaagaggagaaagaagagatccctcccaaatcccaaccagtttccttacctgaagaattgaatcgggttcgattatcacggcataagctagaacgctggtgtcacatgcccttctttgctaaaactgtcacaggatgttttgtgcggattggcatcggaaaccacaacagcaaaccagtttaccgggttggtatttcttcccttggacaattgtccatgctttcagtataa

SEQ ID NO: 20354 - DNA, 4502 bp, Homo sapiens
  SIMILAR (252)..(1112): 931254mologous to Homo sapiens Similar to Plasmodium falciparum glutamic acid-rich protein precursor (A54514),accession number D87440,Smith-Waterman Score=1337.
tgtgggtcgagcagcggcggcggcggcggcagtggcggtcccactggcaggcgggcaagaggggagtccgggcggcggccggcgtgggagccgggggaccaccatggtaaagaagcggaaaggccgcgtcgtgatcgactcggacacagaggacagcggcagcgacgagaacctggatcaggagctcttgtccctggcaaagcgaaagcgcagtgactctgaggagaaggagccgcctgtgagtcagcctgcagccttcgtcagactcggagacgtctgacagtgacgatgagtggacatttgggagccataaacataagaagaaaggacaagccagaacactagagcagaaaggaaccatgaagaaacaggccaacaaaactgcctcctcaggcagttcagaccaacggacagttcagctgagagctcagccccctgaggaaggtgaagtgtcagactctgacagcaacagctcctcttccagttcagattcagactcttcctcagaagatgaagagttccatgatggctatggagaagacctcatgggagatgaggaagacagggcccgtctggaacagatgacagagaaagagagagagcaagaactgttcaatcgcatagagaagagggaggtgttgaaaagaagatttgaaatcaagaaaaaactaaaaacagccaacaagaaagaaaagaaagaaaagaagaaatagcaagaagaggagcaagaaaagaaaaaactgacacagattcaagaatctcaggtaacatcccacaacaaggaacggcgttccaagcgggatgagaaactagacaagaaatctcaagccatggaggagctaaaagcagagcgagaaaaacgaaagaacagaacagctgagctccttgccaaaaaacagccattaaaaaccagtgaggtctactctgatgatgaagaggaggaagaggatgacaaatccagtgaaaagtcagaccgctcatcacgaacatcatcgtctgatgaagaagaggagaaagaagagatccctcccaaatcccaaccagtttccttacctgaagaattgaatcgggttcgattatcacggcataagctagaacgctggtgtcacatgtttcttctttgctaaaactgtcacaggatgttttgtgcggattggcatcggaaaccacaacagcaaaccagtttaccgggtcgctgagattacgggtgttgtggaaactgccaaagtttaccaactaggtggcaccagaacaaacaaagggctgcaactacggcatggcaatgaccaacgcgtgttccgtttagagtttgtctcaaaccaagaattcaccgaaagtgagtttatgaagtggaaagaagcgatgttctctgctggcatgcagttgcccactctagatgaaatcaataaaaaggaattatctattaaagaagctcttaattataaattcaatgatcaggacattgaagagattgtaaaagagaaagaaaggttcagaaaagctccacccaactacgctatgaagaagactcagctactgaaggaaaaggccatggctgaggacctggggggatccaggacaaggccaaacaaatccaagatcaactgaatgagctggaggaacgggcagaggccctggaccgccagcggaccaagaacatatccgctatcagttacatcaaccagcggaaccgggagtggaacattgtagagtctgagaaggcccttgtggctgaaagtcacaacatgaaaaaccaacagatggatccctttactcggcggcagtgcaagcctaccatcgtttctaattccagagacccagctgttcaagctgccatcttggcccagctgaatgcaaaatacggttctggagtgttaccagatgctccaaaggaaatgagcaaggcaagtgtgggtcaaggcaaagataaagatttgaattctaagtcagccagtgacctctcagaaagatctgttcaaagtacacgattttgatgtgaagattgacttacaagttcccagctcagagtcaaaggctttagccatcacctccaaggctccgccagccaaggatggggctccaaggagatctctggaacttgggaaggactacaaaaaacggacgaggggcttattttgaggcacacccagcctgctgcttctgaccctgcatgccccatcgcagcgtcccacctttcctcctttcctttggatttagccttctttgggctgggagcagctgttgaactggggaagagactcttaaactgccagttcatctgttaatattaaaccatttggctgttttaggacctcctttgttttgcacaccatctcccaccagcctccccgtcccccagggccccacccagtgtgggcctgggctctcttgggctttatccatgtctttagatttgtgtttgccttttgtttttttaaccgcgcagttcattggccactctgcacgcattcagtattaccatggagctgggaatcttgctggagcccctggggcaatagcagcagcaccaggcggtctcctctacagactgccttggcccacccattgaacattcggcacgtgaccttgtggggggagcggggattgggcacctgcgatcctctttcctctcttcatctttctcttctgcccttctttttggaagaaggggtttcaaaaccagtttagtttccaaaaagtgtacatttgtggggggggggggtctaatttgagagcgagagtgtgtatgtgtgtgtgtgtaagtgtgtggatttttttatcatttttttaaaatgcagtactctttgtatcagtctgtcatggggtctatagctgtttcagatttttttcagctgtacttgagcatctgaaactgcaagaaagaaactcattaaatgtgattcttcttactaaacaggcctgactgctgtagctgtgtaacttccccattcccacctactcttcccatcctttcccaactttggagaaaactccccagtttagccccctgacctgcaggctgtgtcctgggcaggtgtggggaggggaagcccatggccagggtaccaggggaggggcagtgaatgtcttgctcttcccatggggtacagcccacagcttcttggctgaacgtaggaacttcttttttcttcacccagtataccagcctcttcctggtgattctgttttgctgctttggcaagaactacattttgtttttaagagaaatttctgaatatgaatgtggagagcaaacacaaaaagatttaggttacgccgggtgcagtagctcacgcctgtaatcccagcactttgggaggcctaggcgggtggatcaccctgaggtcaggagttcaagaccaatctgactaaccacggtgaaaaccccatctctactaaaactaccaaaacttagccgggcatggtgggtgcgtgcctgtaatcccagcttactcgggggggctgagacaggaagaatcccttgaacctgggaggcggaagtttgtggtgagccaagaatcgtgccactgcactccagtctgggtgacagagtgagactccgcctcaaaaagatttaggttgcaaatgtttccaggcatgtgcagttttgtgtgtgtgtatacatatatatggtcagcatatatattgtgcagctagggcgaagccagcagaggtgtgtgtatgtctttaatgaaatgtttgaaaagagataagctgactgcttgataatcactctccaggtgtaaagctccaagtgtaaataaaagtgggcatttaacaaatctttcagaacaaaagtacagctgactatatataccaagagctaagctaaaggaacagctgagagctccgatctccacgagagactaatctaaaagctctgctttgtaacttcctcaccctgccttcgtacaaggaagggggacgatgggaaatcatggacttgtaagttgtatttaaacataaaaatgaacttggtaacttctgggtttagtaagagcctcagtgtccgctttaacttagtttactttttttttatttttaaagcagcaatggatggtttttaaaggagtattatggattgtaaaattgcctaaatatgactgtaacacagctttgtggtagctgtgacacagttcacttgggcaaagggagtggtgatggactcggttaaaatccatatatacttgaataagtccattgaccgaaactctttatagaccaattgtgtaaatgtggaattcacagactgttaacattgcctggacttcagtcagagtccctggagtctgctgggacctctcctatcatgatgaacttggacttttttttttgatttctggttttaaaaaaacataaaattatagaatccagataattcgctggagtcattctgatccaccatgtaggatctgtatttagtatcctttgggtttggggaagtgttgattacattatgggctgtgttaattaaaatttttatttaaaactgaaaaaaaaaa

SEQ ID NO: 20355 - DNA, 709 bp, Homo sapiens
  SIMILAR (471)..(28): 831254mologous to Homo sapiens Human prostate cancer- associated protein 89,accession number Y48303,Smith-Waterman Score= 597.
  misc_feature (1)...(709): n = a,t,c or g
cagtgtcatagggagggcttctctttnttcttggcactccttttcaacctggggtcaggtaatcccaccttgtgttttccactttctttctacacaatataagaactgtatcaagtcttgaccttttttggaactgccttccacagagatgggtttcaagagattgttcacaatcatggagtaactcttcccatttagattctttaccaaaagatcaaatgacctctctgtgaaatgcacctgcacattctcagtgggaacttgatgaactccagttaaggtaatgtagattttcacaaacttatctgactgatcccatccataattactgattttcaccgtatagcccgttgtaatgggagcaaccacagcagctggtttttcattatcaagaagttctgctttcttctgtgatttctgttgcatcttgttcttgatttctgtctcaatcttggatttttaagcagataagggcatcacgtactcttttcctagtagccttttccagcaacacctttacctcttgtagatctttctgtagctcttctgaagccatgggggctgggtcaggccgaagtcccgagctgcagccgcgcagaagaaggaacaggaaaccccgcgccgagccctcaaaccgagcgcagacgcctacccgcacgagtcgcggcgctgcagcctgcgcccacaccgaccctgcgcaagatcgcgg

SEQ ID NO: 20356 - DNA, 2818 bp, Homo sapiens
  SIMILAR (727)..(2793): 251254mologous to Homo sapiens RNA binding protein,accession number AB016088,Smith-Waterman Score=429.
aatattacagaagagaattggtggttttctcgatgccttggtcaggaacagtcaaccagccagatatatcaacgactatcagcttagtaattacggactggacatgctcgggccttcgctggacccagcccccatggcttcagaagagctacagaaagatctagaagaggtaaaggtgttgctggaaaaggctactaggaagactgaaaaatccaagattgagaccgaaatcaagaacaagttgcaacagaaatcgcagaagaaagcagaacttcttgataatgaaaaaccagctgctgtggttgctcccattacaacgggctatacgaaagggggggggggggaagagagaggaggagaagcccccacctccaacgaagcgcaagcaacagaagttcgggggggggcgggggggggaaaagacaaagacgatggcgaccgagaacgccgcaaggaaaacacgaggagggcgggcgcgcaccgaatagaacaacaggcacgaacagtgaatacagatcaaaaaacgacgggagacagagaaggagaggaggaacgagaaggggcggagacgacacaagactgccacgcagaaaaggaggagagaggaacgccgagcgcggagggtgggcgaaggaacaaggaagagagaacaaccggcgcacgaacaggaacacgcgacgactacccacacccgcccccccgcgccccccgaacaagaaaaacacaaacccacaacagaaaggaaagaaagaaagaagagaccccaggggacgcaaagcgaaaaaaacaccgcaacaccacaccgacccgacgcagcgacaacagccaacaaaagaaaacaaagaccaccccacgcgcaggcggcgaaacggagcgcaaaaccaagagagcagaaaaaaaaaaccaaaacagaagaaaacaacagaagagagagccaccgcgggagccgaccccccccccagaaccccaacccaagcggccccccaccgaccgcacgcagacaagaaaaaccacagacccccgaagagacggcgccaaacgacaagaacaagaagcagcaagggcgacaagcaacaaacagacaaacaagaccggacacgacacccacgccccagacagcgagcagacgccggaaaaacacacacaaacaacaagcccgacagccacaaaagagaaacaacgagacaaaacaaccaaccaacccccaaaccccacacaccaacacaccgaacccgcaagcgcacgacgcccgcgcagcgccgcgcaccacaagcagacgccccacacccagcacaacgagaaagagaaaaaacataacaagccgaaacagcaaaagagccgcgagcggcgccgccccggcggcggcagaccacaccccccccacgcacccccaacaaacgcgcggcccggcgcgcgccccaccggaccagcccacccccgcacaccaccgcggcggcagcacgcaccccacaccaccacaccccccgccccgcggagagcccggcgccagcccccggccgcgcccccgaaagcccgccccgggggcagccgcaagagggggggcacaccgcaccccccccccgccgaccgccgcagcccgcccccccgcccgcccgccgcgcgcaggcgccgcccgccagggcaggacagccaagccccgggggcacgggcccgcgcgccaccgaccggagcccgcacccccgcgccgcacccagacacacgcaccgacagacgccgcccaccggacgccccccacacgcccgcaacgcccgcgccgccggcgggaaagaaaggagacagacgaacggaaacaaagaagaggaaaagaaaaaggaacgaagcaaccaagaaagagacagaaagggacaaggaagagaaggagggaaaacgagaagaaaagagagagaagagaaaagagaagacaagaaagaaaaaaaaagaagaagaagaggaaagaagaggcgcggagaaggaggaaagaacagaagaaggaagagaagaggagaaggagcgagacaaagagggcaaaacatgcaaaaacgaagagaagagaagagagaagagagaggaggcgggggaacacaaggagaagggacgacacgagcaggagaagagagagggagacgacgagaacgcgcgcgaggaagagaagcacagacacggaagcgacacgcgcacacacaaacgaagaacagaagagcgcacaccgcgaagcaacaagcggagcgcgcgcgcgagaaagaacacacccgccacggcacgacgcccgcgcaggaggcgcgcccgcacaccgcccgccggcgccccccagcaggcacaaaacgccccgcccgccccggccaccgcccgcaacgacaaagagaagacacccagaccacccgccccagcgacgcggaccacccgacaccccgaggaccccgcaccgccgcccgcgcaccccggcgacgcccgcggacccgcccgaccacgaaagaggcgccgacggcccgcgctgcggcgccacgacgcacaacacccgcgaggacggcccggcacgccgccccggcacccacgcccaccagaaccgcccgccacgcccccgagagcccaccccgcatcagagcgacccgcccccccgcacccaccgaaagcggcgtgtcgccggcgacgggcagcagcagcagacggcgagcgcagtggcagcgacgcgcgcggcgagaggcgcaaccgacgcgctcagggcgtcgcgccgcaccaagaggagcgcctcagcacgcgcgacggagagcccccgcacggaggaatagagcgacgcgtgacagccgcacagcgccagtag

SEQ ID NO: 20357 - DNA, 475 bp, Homo sapiens
  SIMILAR (454)..(335): 451254mologous to Pseudopleuronectes americanus HPLC6,accession number M62415,Smith-Waterman Score=80.
ttttttccagagtagagtttattagaacaataactggtgataatgataaatattgatcaaagactgagcctaggaagtgggttttttgaggctgcatatactcaaggcaattcttcagaaccacagagggctcattggatcctattaaaagctgagagttaatgaataaacagataaaacagagacctgagtagacggtagtcgatattcttgtacatgtattctacctctagattccatagaaagaactaaaagtacatgaatttcactaccaacatctccatcagttaccagctgtatcaccttggatcagtcaggtaacctcccgcgaatctggttgcttccggggcaggggatccgcgggctgcaggtttgagcctgggagccggcagggtggagcagttggagggccaagcctttgagctccagggggggtggccgggacagtgggtagtgccagccgatcggcgtcctg

SEQ ID NO: 20358 - DNA, 536 bp, Homo sapiens
  SIMILAR (482)..(354): 691254mologous to Homo sapiens Human secreted protein, SEQ ID NO: 6075,accession number G01994,Smith-Waterman Score=142.
ctatgaaccattagattccaataagagaataggtacatcatcatctagttatgttctttgcctttgtagctctttagccattttctcaaatttcatgggaaatctcttatcattttgtggtgttttaaaattaaaatctttggcatgcatacattgacggtttttttttaattaggcttgataagtgttcattcatattagcagcagggaacaatgattcatcaatgtgtgctccagctgtcctgcatttttcaacccagagcgccgaaacgagctttacgcctctcttctgagctttgtcccaagtgctctggtacccatctttgaagataacgtgagttacttgtttgttaaaagtttttgaaccctttgcccccatatccgcaagctgtgttgtaaaagtctaaagaatagttttccgttccattggatgaccacacttcaacataggccactacatctttcaggatgggggccgccatgacagacggcgggatccggccagctggcctacgcggtgcttgcgagcctggcgg

SEQ ID NO: 20359 - DNA, 2724 bp, Homo sapiens
  SIMILAR (2323)..(2439): 971254mologous to Homo sapiens Human secreted protein, SEQ ID NO: 6075,accession number G01994,Smith-Waterman Score=197.
tcagtcgatgagagctgtcagtcgtgagttctgagtaatgtgaaggtgccaggtagaaggtacaaaggcaagaaaggtgggaaggcctggagcctgtgcgaagagcagcacggccttggtgtggcccggggatggatgcagaaccgcgagaagagagaggctgacttcagccacggccacgggctctggggttagactgctctcatctttggttttctgtaggttcattgtgattgttgtaccagggtattgtttttgttgtttatttacttgagagtcacaggccgtcctgtctttgatctgttctggaaacttctccactgtgatttcttttgcctgttttctcacgcctccattgctgggaacgcaatctcgtgtgctatcctttgcttctatagcccatgtctcatgattttcctctatttctttcctcttgtatctccttatttcattctggatgtcttctattggtttcttttccatttcacctttgactctttttaagtctattctgatgctaaatccatatactgcctcctctttgcccactcccagagaccaccatgtgtctttaatgaaaatgaccctcaaaactctgggacagtccacactgtgtttcttgttggacttactgaccacaggcatgccagagccaaaatagagtcttgggcaggggaggcagctcctttcacacttgtggctgcttctgcagataagctgttcggtgacctccatatttctaaatactgtggccgtattgctgtttcggtttttcagtttcagcagtactgcgggctctgtgacagtacttcccattgcagcagtactgtggcctctgcggcagtacttaacatagtggcagtacagtggcctctgtggcaggacttcacattgtggcagtaccgtggcctctgtggcaggatttcacattgtggcagtaccgtggcctctgtggcaggacttcacattgtggcagtaccatggcctctgtggcaggacttcacgtgtggcagtaccgtggcctctgtggcagtacttcacgttgtggcagtactgtggcctctgtggcaggacttcgcattgtggcagtaccgtggcctctgtggcaggacttcacattgtggcagtaccgtggcctctgtggcaggacttcacgtgtggcagtactgtggcctctgtggcagtacttcacgttgtggcagtaccatggcctctgtggcaggacttcacattgtggcagtaccatggcctctgtggcaggacttcatattgtggcagtaccgtggcctctgtggtagtacttcacgttgtggcagtaccgtggcctctgtggcaggacttcacattgtggcagtactgtggcctttgcagcagtacttcatattgcagcagaactgtggcttctgtggcaatacttcatattgtggcagtacttcatattgcagcagtaccatggcctctgtggcaatacttcatattgtggcatacttcatattgcagcagtacagtggcctctgcagcagtacttcatattgtggcagtaccgtggcctctgtggcagtacttcatattgcagcagtactgtggcctctgcggcagtacttcatattgcagcagaaccgtggcttctgtggcaatacttcatattgtggcagtacttcatattgtggcagtaccatggcctctgtggcagtacttcatattgtggcagtacttcatattgcagcagtaccatggcctctgtggcagtacttcatattgtggcagtaccgtggcctctgtggcagtacttcatattgcagcagtactgtggcctctgtggcagtagttcatattgtggcagaattgtggcttctgtggcaatacttcatattgtggcagtacttcatattgcagcagtaccatggcctctgtggcagtacttcatattgtggcaggactgtggcttctgtggcagtacttcatattgtggcagtacttcatattgcggaagtaccgtggcctctttggcagtacttcatattgtggcagtactgtgtcctctgtagcagtacttcacaacaaacaaaacaaaaaacaaaacaaaacctggatcctgccatcttacatattttggtggagcagctggagggccaagcctttgagctccagggggggtggccgggacagtgggtagtgccagccgatcggcgtcctggggattgcctgaatggatttgctgcctcagggatccgaagtctctttcattcccttactggggatttgaggtctggaggctcgcaagcaccgcgtaggccagctggccggatcccgccgtctgtcatggcggcccccatcctgaaagatgtagtggcctatgttgaagtgtggtcatccaatggaacagaaaattattcaaagacatttacaacacagcttgtggatatgggggcaaagatcagagaaagaagcactgaggagagaaacaatctgaccaaggcaagaactgggacgggaaaattatatacgatggaaatggggaaagacagaccaatctgtgtacaaatgaagctgcttggaaggaattggccacctaaagaaggaagagacagttggtgcatcttccagatcgaaataaactctggcttctgttgggtcatgaagaagagagggaatgggaagaaatctaaaatgagaatccgaagaatatcctccaaaagagctactattgtccccagttcttga

SEQ ID NO: 20360 - DNA, 671 bp, Homo sapiens
  SIMILAR (56)..(502): 451254mologous to Mus musculus ribosomal protein,accession number M76763,Smith-Waterman Score=162.
cctctcttccacaggaggcctacacgccggccgcttgtgctgcagcccatgtctcttagtgatccccttgaaaagttcccagcatatttttccgagtacttcaacaccaacattcgattggggcggcggaaaaatagccctttgcccatcactgcccatttaagggtgtgggcccgaagatatgctccatgtggtgttgaggaaagcagacattgacctcaccaaagagggcgggagaactccactgaggatgaaggtggaacgtgtgatcacccatttttgcagaatccacgccagtacaaagatcccaagactgggttctttgaacaagacaagaaggatgtaaaaggatggaaaatacagccaggtccctagccaattggtctgggacaacaagctcccgtgaaagacctgggagccgactgaaagaagattccgggcccattagagggcctgcgtcactttctgggggcctttcgtgtccgaggccaagcacaccaagaaccactgggccgccgtggccggcaccgttgggtgtgtccaaggaggaaataaggtctgtagggccttgtcttgttaataaattagtttatataccaaaaaaaaaaaaaaaaaaaaaaaaagtcgacgcggccgcgaatttagtagtagtagtagtagtaggcggccgc

SEQ ID NO: 20361 - DNA, 941 bp, Homo sapiens
  SIMILAR (188)..(676): 331254mologous to Mus musculus proline-rich salivary protein,accession number M19419,Smith-Waterman Score=142.
gccggatcgttccggactacccacgcgtccgcagcgctggctgtgttgactgtttggcgtggtttacacgggtttctgtcttggtgtctggacagcgggggtggggggggtgccgggcccaaacttccccaggcctattctcacactggtgagagggccctaggggaagggtgtgggctgggtggcggggccaggccagctgagacctacaggaccgtggagcatttaggtctcccacccaactccacccggtcctctgagcatcagttacagagcccaggcagcaggagggcagggcccagccccttatcacccatcctcaaggcaggcaggaaccctgaaggcagcttccaccagggggtcccttagcccccaccctccaaaagccccagaccctgccaggcctcaccctgccagcatcgtggccccagctgacggctcccaagggcaggtgctggcaacacaagcaggagccctcggggcatcccgcagggcacacaccaggtcgccctgggctccccaagcacctcccagacccagcccttgggtgggtcctggcccacaaacccccacgccctgcccctgagatgagccccaccgcccacctggcctccagccctggagacctttctcccccttggccatggctcccatggggaggctgcaggccctccctgggctggaccagaggggacagactgtctctcccctgcgacttctgggggcactggagtccttggcctggttaccttcagcatttatagccctccagtgagttattcctcggagttctcacagagcagcatgcgcctgcggcaaagccctcacctccagcccctggaccacctgactgctgcctcccacctggcgccaaacacggccaccgcctcttttgttaacaggacagttgatccattaaattaaaaatcattcaatagaaa

SEQ ID NO: 20362 - DNA, 908 bp, Homo sapiens
  SIMILAR (114)..(356): 371254mologous to multiple sclerosis associated retrovirus element gag polyprotein,accession number AF123880,Smith-Waterman Score=138.
gaggtgggaatttgaaagggaaagtaactgagcttttgctagacttagaaaaacttctgggtgtagtagagatccttgttagacatggggacaaaggcgagcatcccaaaggactccccactagggtgtctttaaggcaattggagcaaattcaaatgagatggctcaaagaaaaagaaacaattttcttgggagaacaagaaatttggcctgaaacttgttctttacattatcatactattttacaattggacttattcagtaaaaaggaaggaaaatggggagaagttccttacgtacaggcttctatggccccctaccaggattctgacttaagagtcaactgcaggatgtgtctggctcatgttacttccaggcaccaagaaaccgcgtgggatatcctcgatgctcccttcctagcggcaccccctggagggcccatgccctctccagggtcttctcagtcccccagttctgcgaggggtcctgccagttctccagtgtgggatttcaccccaatgtcatcagaaaaccctcccttttatttagctagctccagcctgtatcccccactgcccaaggaagctcatgcaaccatagggaaggaaaggggactatcaagagccaagggatcccccatacaactttactcagatcttggaacttttagatgccgtccaattcccaaagaaataacaagtattcactgcaggggacaccagaaggaagacactgttcttattagaggaaattcccttttggaaagagcagctaaggccacagctaaggaaaccctggtatttcaggctgctgcgctactaccaggtcatccatgtcagtggaaccgtagtatacacccaaggaaattaaagggactgagtaaaaggcttccagtaagacccctctag

SEQ ID NO: 20363 - DNA, 838 bp, Homo sapiens
  SIMILAR (797)..(835): 841254mologous to Mus musculus leukotriene B4 omega- hydroxylase,accession number AB037540,Smith-Waterman Score=58.
atggtcattgttggcctggcagcgggggtcttgttagtgggtcctggtgatgggggtctaatcagtgagggtgtggtcagggaagacctgatgtgtggggtctggtcagcaggaacctggtcagtggggactgctgagcgctgcttggagaagccaggtgcattgcacgttatcgagggccctctggacagctgggatggcccagtgatgcccaatggcccggtcaaaaatcataaaggagaacagcaagaggtccccagcaaacatccacagatggccttggaaatctgcctgtgcttggacttcctgtactacccattcctgaggggcgatgcttctgcagggcctgtgacttggtgcacaacttcagacaccatcatcttgcagcagcaccgcaccctcactagccagggtgttgatgacttcctcaaggccaaggccacattcaaggcttcggactttattgatgcgcttgtgctgagcaaggatcttaattcaggaggtagaatggagcttgagatcaagtgtctgatcaaggtacttgaacttgatctggagggctctggggagccatggaaggtgctggataaaggagtgacagtcagctatgttttcgagatgactatagaaggctgcctggaaggagtgaacaagagccaggagaccagggagggagcttgtggggcaggtctggagatggcaaaggagggatcctgcttggatgaaaggtcttcagggactgtctcaggttacacacaggtgtcctcagagctagtgtgttcagggttcttgtctccaggatgaaaatgggaaggagttgtcagacgaggacatataa

SEQ ID NO: 20364 - DNA, 551 bp, Homo sapiens
  SIMILAR (299)..(451): 331254mologous to Nicotiana plumbaginifolia ATP-2,accession number A59304,Smith-Waterman Score=60.
atcgagaccaatggacagcgtcgtggaattctctgacctggtcttatgacctgttagctttcttcatcagacgtgagcaccaggatggcaggggcctcatctgtcctgttcctcctgtggcctgggtcctagcaccatgtctggtacagtgtagatgctcaagggaagtttactttgtagaccccacttacctgggagatgttactgttagtctaccctgtaccattttgtaaacctccagcccattttgcagactctgatcacagtgaaacgttccatgggaacttgggccatgagaaacatccttcctaaccacgtgactgcagaaacatccttatcgcgtcctcctgggcaaaggcccaacagcctgactgcagggacatccttgccatatcctgctgggcagcaagctctaccacccagatccctccctcccagtcccatgattaccccagcctgtgagtggcagttggtgctggcactaagctggtttcctcctccccagggttttgctggcaataaagatgttgctgttgaagccaaaaaaaaaa

SEQ ID NO: 20365 - DNA, 2856 bp, Homo sapiens
  SIMILAR (1050)..(415): 281254mologous to Macaca mulatta rhadinovirus 17577 latent nuclear antigen,accession number AF083501,Smith-Waterman Score=132.
ctacttttggtaagcagaactggcactgtgggatgaaccgaatgccatgttaagatgcccgatgccaatgctcatcacatcccagaaaaggtgttggttgatatagacagctggacggtggccatggaagttggaatccgctaaggagtgtaacaactcagctgctgaatcaactactccctggagaagcatgtgggagcgctggggagggttctcttttctttgtgaagggcaggatgccccggaatgggttcgacccgagagaggggactgtaccttggaaagcatcgtggttctggtggcatctggtgagctctggctggcccttgaaaatccaggggagacagtgtaagtcttacgcagggccatacccatgtctgcagcagatctccaagatgagcagactctccccccggccccatctgtctcctgttccccactccgtggaggtggcgggccacgtgctggtccctgccaccagggcggcggttccgtgcagcgcctcggctggtgcttagcagtcgacgtatagaactggtgtgcaccaggggaatccgactgtttaaacaaagcatcgcgaaggccctcggggggtgttgcaaagtgatttctacccagtgctgttcgtggggaacctggtgctaaaccattggtagacgacctgcttccgggttggagtttggccacacatggccaacctccacttgtggctgctcctgggtcaggcctctggggtcgaccagctgacgcctgagggtgtgagacagctggcggctcgccatgtcccaggtcgaccagcaggccctctggaccgagcggtgtgcaggggtgcccgttgggatgagctggatccggagcgtccgcatctcggtcggaacctccagggtcaaccagctgctgcccgcgagctccggacttagccggcggctccctgtgtcccagattggccagcaggcgaccagtggcggtcccacggctacctgccaccttccagggagctctgaggcggatgcccccatcacgtcccgctaccctcccacagctggcctttgccaggcaacggcaggggaaccgctttgacgctgctttcgaatcctccggcgaagacttccaccagatgccccgggtgggccggatgggatgagactggcccaccccagaccgtgctgttgttttgaaggcaaggcgagggttaaagaaagacagagagagacagttggcggcttcaacagcaacacttttattgccaacaaaaccctgaggaggggtgaaccagcttagtgccagcgccaactgccgctcacaggctgaggtaatcatgggatgggagggaggggtctgggtggtagagcttgctgcccagcaggaaacggcaaggatgtccctgcagtcaggctgttggacctttgccccagggccttgtgccatccctcctcgttccccctgatcctgcccacgccgttgtaaacagctccttcttaatggcccgtcagctgatgagagtttcctgccagcacctgactgccacactgctttgccaaagggaccaggctcctcggcacaggagctgaggttctgcttcaatcctggtgaatccatgggatcgatgataaggtgggaatcagagggaagagcaaaataaaggggagtgaaggtctgattgtaacctgagacagtctctggagactgttcatccaagcaggatccctcccttgccatctccagacctcccccacaagctccctccctggtctgctcttgttcactcattccagtcagccttctacagtcatctctaacacgtatctgactggcccctcctttatccagcaccttccatggctccccaaagcactccagatcaagttcaagttctttgatcggacagttgatctcaagctgcattctacctcctgtggtgcctacgttaccatctgtgcctaggatgtgcaatgggcccttgctcccactgcagggttgacgttccctccagctggagacctggtctcctgacatcgcctggcctgtttgtcctgctctttgtcccatcagaatctctgagcaagatctcccaggtccatccagacacctgctttgtccacttttgactgggccattgaacaccactgggccaccccaactgtccacaggctccttgataacatgcatttcccctgacatttcccagtagtgctcagcagcccccactgaccaggtcccgacaagggcctcactgatgaggacacgcccaccaggctctgctgactgggtcccatgtgcccagtcctccactgaatagcaccccttgacctggtcaccagtgccccagcccatgctgaccaggccagcactaagtcccagatgaccaggtctccactgatcaagccccacagcccaggtttgcactgaccagacaccaaacatctctgtcttcccttctgccacatgttgcctgttgtccgtgactttggtaagagcttccttgtgtacgaggatgatgtccaggatgttggtctggtgtccctgagacagcactaacaggtccatgcctgggtccaggtccttcctggactgattggcaaagagctcactgatgttcttgaaggcatctctgcttaagtggatggcccttccgtctttgatattaggaacaatatcacagagggggtgtacaacttctgtgatattgtaatattctttcttcccatggatattaggaatgatatcccgggggggcttgttgtacaccccatccgtgggggagaggatgatattactctgcatatcatagagggtgcacacggctgtaatgttgtccataataacatccagaggggaagagaatattattcccat

SEQ ID NO: 20366 - DNA, 355 bp, Homo sapiens
  SIMILAR (326)..(45): 921254mologous to Homo sapiens NF-kB subunit,accession number X61498,Smith-Waterman Score=468.
aagttgggaaggaggggtcctccccttcccatgagaatcctttatttgtcccaactgaggggtgggtgtggggtgttaaataagatttgaaataggtggggacgctgtacagggggtccgggaagggggctgggggcaggcagcaggtcagtgcacctgaggctgggggtgcccgtggagaagcctcctggtggctcagggggtgggcccagcttctctgcctcctgctccactgactggctcccgtacgcactgtcttccttcacctctgtgctgggcagcttgtctcgggtttctggacccctcagcagcctcactccctcctctgaagtttttgtatcatagtccccatcat

SEQ ID NO: 20367 - DNA, 385 bp, Homo sapiens
  SIMILAR (3)..(248): 891254mologous to Homo sapiens NF-kB subunit,accession number X61498,Smith-Waterman Score=388.
gatggcaggcctttggggacttctctcccacagatgtgcataaacagtatgccattgtgttccggacacccccctatcacaagatgaagattgagcggcctgtaacagtgtttctgcaactgaacaccaagcgaggaggggacgtgtctgattccaaacagttcacctattaccctctggtggaagacaaggaagaggtgcagcggaagcggaggaagccttgcccaccttctcccaagccttcgggggtggctcccggaccccctgtacagcgtccccacctatttcaaatcttatttaacaccccacacccacccctcagttgggacaaataaaggattctcatgggaagggaggacccctccttcccaacttaaaaaaaaaa

SEQ ID NO: 20368 - DNA, 5686 bp, Homo sapiens
  SIMILAR (4279)..(3206): 871254mologous to Homo sapiens p50-NF-kappa B homolog,accession number S76638,Smith-Waterman Score=1587.
ttatcttcttccggattcggcgtggtcagcagtttgcaaccgtagaaaatcgagtttgcgcctgccataaagcacatcgcctgagtctgttcgttcatctgctcgcgtccggcagaaaggcgcacgtaagaggttggcatcatgatcccccgcgaccgcaatggtgcgaataaaatcaaaggcatcgacatcatcgttatcggcaagcggcgtgcctttcaccttcaccagcatgttgattggcacgctttccggcggcgtcggcaggtttgccagttgcagcaataatccggcgcgatcttttaccgtttcgcctaagcccacaatgccgccagaacagactttgatcccggcatcgcgcactttttccagcgtatcgaggcgttcctttccacaacgattggttttaaccaaggcacacatgtttgtgaattttttacgaatttgtgcttctcgtggttggtggggaggtagtatatggcctttaggatctttcaacaagccacattcaaaagctcttaagatgtagttaatagtacctacattgtctagtttctgtattatttccttatccctaggaataggaatcaccttctgtttaagggatgttggaccatgaggtacataaaatatagaagcagaaaatagaatggtggttgccaagtgatagcgaaaagcaataggcttccacgttccgtaacagtagacgaccacggcagaaatcttccttccgataggttcgccttcctgtggaggacaggcagaaacatctatggaaggccaaatattcccaacaggctccattaattgcgttgcgctcactgcccgctttccagtcgggaaacctgtcgtgccagctgcattaatgaatcggccaacgcgcggggagaagcggtttgcgtattgggcgccagggtgggttttcttttcaccagtgagacgggcaacagctgattgcccttcaccgcctggccctgagagagttgcaacaagcggtccacgcttggtttggcccagcaggcgaaaattctgtttgaaggtggttccgaaattcggcaaaatcgacggcgactcccatcggcgagtctctatgacaccagatactcttcgaccgaacgccggtgtctgttgaccagtcagtagaaaagaagggattcagctgttgatacttgtgcatgcttcacgaagttcttgtgctgtgcttttcagctccatcaggacatttatgttcttctctacactgattattccagttagcaattcctctaatcttttttcaaggttcttagcttccttgcattggcttagaacatgctcctttagctcagaggagtttgttattacccaccttctgaagcctacttctgaaaattcatcaaaccaattctctgtccagttttgttcccttgctggcaaggagttttgatcctttggaggagaagaagtgttctggtttttggaattttcagcctttttgcactggtttttcctcatcttcatggatttatctacctttgatctttgatgttggtgaccttcagatgggtttcctctactgcaggtctgctggagttcgctggaggaccactccagatcctgttgccgggtatcaccggcggaggctgcagaacagcaaagattgttgcctgttccttcctctggaagatttgtcccagaggggcacccacctaatgccagctggagctctcctgtatgaggtgtctgttgacccctgctgagaggtgtctcctcatcaggagccaggggggtcagggacccccttgaggaagcagtctgtccctcagcagagctcaagtactgtgctgggagatctgctgctctcttcagacgtggcgttatttctgagggctctgttctgttccattgatctatatctctgttttggtaccagtaccatgctgttttggttactgtagccttgtagtatagtttgaagtcaggtagtgtgatgcctccagctttgttcttttggcttaggattgacttggcaatgtgggctcttttttggttccatatgaacttgaaagtagttttttccaattctgtgaagaaagtcattggtagcttgatggggatggcattgaatctgtaaattaccttgggcagtatggccattttcatgatattgattcttcctacccatgagcatggaatgttcttccatttgtttgtatcctcttttatttcattgagcagtggtttgtagttctccttgaagaggtccttcccgtcccttgtaagttggattcctaggtattttattctttttgaagcaattgtgaatggcagttcactcatgatttggctctctgtttgtctgttattggtgtataagaatgcttgtgatttttgtacattgattttgtatcctgagactttgctgaagttgcttatcagcttgagattttgggctgagacaatggggttttctagatatacaatcatgtcatctgcaaacagggacaatttgacttcctcttttcctaattgaataccctttatttccttgtcgtgcctaattgccctggccagaacttccatcactatgttgaataggagtggtgagagagggcatccctgtcttgtgccagtcttcaaagggaatgcttccagtttttgcccattcagtatgatattggctgtgggtttgtcatagatagctcttattattttgagatatgtcccatcaatacctaatttattgagagtttttagcatgaagggttgttgaattttgtcaaagggccttttctgcatcagttcctccttgtacctctggtagaattcggctgtgaatccatctggtcctggactcttttttgttggtaagctattgattattgccacaatttcagagcctgttattggtgtattcagagattcaacttcttcctggtttagtcttgggagggtgtatgtgtcgaggaatttatccatttcttctagattttttagtttatttgtgtagaggtgtttgtagtattctctgatggtagtttgtatttctgtgggatcagtggtgatatcccctttatcattttttattgtgtctatttgcttcttttctcttttcttctttattagtcttgctagcggtctgtcaattttgttgatcctttcaaaaaaccagctcctggattcattaatgttttgaagggttttttgtgtcctagtcccgggctggcctcaccttggtgctgcaagtgaggtcaagaggcgtgtggccccggaagctgcttcgggtgtccttctcaggcccttcagagtccgagtcgctatcagaggtagggggtgaaggcagtgggcacaggggctcctcgttttcagcatggatgtcagcaccagccttcagaaggaggcgggtgagggtcgggtaccccagtccagctgccaggtgcaggggtgtgtttcccgcaaaggtgcgagcgttcacgttggcccggagcttggtgaccagatgggtgaccaaccccagctcctccatctctgtggctagatgcaaggctgttcgtcccccctgccgctctgtggcctccacttcagccccactgtccaccagcagatccaggcactcagggcttcgggctcggaccgccaggtgtactggatacagtccctcaaagtcaggcatatgcaacagctggggcacagcaggagctccactctgaagcagtgcacgcagcagctcaggagcaccagcgcctgcccgcagcgccagatgcatggctgagtctccatgccgatccagcagagctgggtctgcacctacccgcagcagaaagctcaccacactcgtctgccccgtgatcaccgccaggtgcaggggcgtctggtgcaggtggttggtgaggttgacaacgccgaggtcctgggcgtggtggatgacatagactatctgctcaatgacactggtctgcccgtggatgatggctaggtgcagtggtgtgtctccgttctcgtcctgcgccgtcagcaggtggcgctgtcccgccagcagcgcgcgccggtccgcggtgacgccgtagtcgagtagggctcgggcgctgcgctgcgccaggccgaacaggcgcgcgttgtactctcgagctcgctgcagcattctccggggcctgcggctcgcactggggggtcctggagggggcgctcggctccgcggcttcctccccggagtccctgctgggcaccgtggcggccatctgcgccccgcccccgcctcccgggtagcaccgcatggggcccgcgccggactggtaggggctgtaggccagggaggaggggaagaaaccgaggctgccacctcctccagctcctccgtagcccccggctgcacccccagagcctccacccatgtgggagccacccccgaagggctgggagaaggtgggcaaggccttcctccgcttccgctgcacctcttccttgtcttccaccagagggtaataggtgaactgtttggaatcagacacgtcccctcctcgcttgcgtttcagttgcagaaacactgttacaggccgctcaatcttcatcttgtgataggggggtgtccggaacacaatggcatactgtttatgcacatctgtgggagagaagtccccaaaggcctgccatccattctcatcatcctcatagaaccgaacctcaatgtcatctttctgcaccttgtcacaaagcagataaacttcatctccaccccgcacagagcctgctgtcttgtccattcgagaaatcttcaggtttgatgcccccggagatttgctatcatggatgggctgggaggtgactggcttcaggggcagggagaaggagccatcactggctctaaggaaggcagagaagcgcagccgcactatactcagatccatcaccttcttcagttctttggcctcttgctccagctcccgctgctcggcctccgtaaggccctggggcctagagcggagccgctgcctctgaagtttttgtatcatagtccccatcatgttcttcttagtcacatgcaggacacccaggttgttaaactgggcagtcatgttcttgggccccacagaaacggcgcagatccccagcttcgagcattgcttgcccaccagactgtgggcgatgagcacgaggtgggtcactgtgtgttaccaggtccacctcgatcttggctggtccctcgtagttacagatcttgacagtgggataggtctttcggcccttctcactggaggcaccgggcagtcctccatgggaggggccttcacagccatatcgaaatcggaagcctctctgcttaggctgttccacgatcaccaggtaggggccatcagctgtttctggggctggctccttgggttccacaatggaggagttcaatttgaaatcatcatattcaataataccatccagacctgggttgtagcaactctccatgtctctgggctaggcccggctctgtctagtggctccggccaggttctgcttcccagaattttagacgcccgcgggtccgcgtatctttgtacaacggtgtcgacgtggatccgagtgtcgtcgcctgcgcgccctttccggctgtgtgcagctgctgctctccagccccaggcgctgtccgctaaaggccctcctccctcttttctcttgtcccggccacccaggggtctgaatccagccactcaccgtg

SEQ ID NO: 20369 - DNA, 346 bp, Homo sapiens
  SIMILAR (6)..(344): 411254mologous to Fowlpox virus protease/polymerase,accession number AF006065,Smith-Waterman Score=219.
ctccacagaccatcacggacaccgagctttgggtaactctcacagtggaggtatgggacatctctactccttccctggcaactgatcacatgcccgttaccatcccattaaaacctaatcacccttaccccgctcaacgccaatatcccatcccacagcacgctttaaaaggattaaagcctgttatcactcgcctgctacagcatgggcttctaaaacctataaactctccttacaattcccccattttacctgtccaaaaactggacaagtcttacagattagttcagaatctgcgccttatcaacaaaattgtttcacctatccatcctgtggtgcccaaccc

SEQ ID NO: 20370 - DNA, 809 bp, Homo sapiens
  SIMILAR (291)..(785): 411254mologous to Feline leukemia virus gag-pol precursor polyprotein gPr80,accession number AF052723,Smith-Waterman Score= 284.
tatgggacatctctactccttccctggcaactgatcacatgcccgttaccatcccattaaaacctaatcacccttaccccgctcaacgccaatatcccatcccacagcacgctttaaaaggattaaagcctgttatcactcgcctgctacagcatgggcttctaaaacctataaactctccttacaattcccccattttacctgtccaaaaactggacaagtcttacagattagttcagaatctgcgccttatcaacaaaattgtttcacctatccatcctgtggtgcccaacccaccagcctttactagtcaaatcacccaagcagtttctcaggctcttggtattcagtggaaccttcatatcccttatcatcctcaatcttcaggaaaggtagaacggactaatggtcttttaaaggtacacctcaccaagctcagcctccaacttaaaaaggattggacagtacttttacctcttgctcttctcagaattagagcctgtcctcgagatgctacagggtacagtcgatttgaacttttatatggacgcactttcttgcttggccccaacctcatcccagacaccagccctctaggcgactatcttccagtcctccagcaggctagacaggctgctaatcttctcttgcctactccagatccccagccacatgaagacaccctagctggacgatcagttcttgttaagaatctgacccctcaaactctacaacctcgatggaccggaccccacttcatcatctatagtaccccgactgccgtctgcctgcaggatcctccccactag

SEQ ID NO: 20371 - DNA, 516 bp, Homo sapiens
  SIMILAR (85)..(513): 421254mologous to multiple sclerosis associated retrovirus polyprotein,accession number AF009668,Smith-Waterman Score=317.
atgctgcccaatcgcctcggaagcccagtagaccatcacggacgccgagctttgggtaactctcacagtggaagcccaaagcctccttcgtgtcttcctctcatatctccccaccttaacccacaagtatgggacatctctactccttccctggcaaccgatcacatgcccattaccatcccgttaaaatctaatcacccttaccccgctcaatgccaatatcccatcccacagcatgctttaaaaggattaaagcctgttatcactcgcctgctacagcatgggcttctaaaacctataaactctccttaccattcccccattttacctgtcctaaaaccagacaaggcttacaagttagttcagaatctgcgccttatctaccaaattgttttgcctatccaccccgtggtgccaaacccatatactctcctatcttcagtacctccctctactacccattattctgttctggatctcaaacatgctttctttactattcctttgcaaccttga

SEQ ID NO: 20372 - DNA, 1896 bp, Homo sapiens; identical to SEQ ID NO: 434
  SIMILAR (277)..(432): 861254mologous to Homo sapiens Human secreted protein, SEQ ID NO: 5210,accession number G01129,Smith-Waterman Score=239.

SEQ ID NO: 20373 - DNA, 1806 bp, Homo sapiens
  SIMILAR (607)..(1752): 421254mologous to Baboon endogenous virus strain M7 gag-pol precursor polyprotein,accession number D10032,Smith-Waterman Score= 716.
atgatttcctgcctagctgaagggcttaaaagggcagcttacaaagctgttaattatgacaagcttaaagaaactacccaaggtaaagacgaaaacccagcccagttcatggcccgcttagcagcaacccttagacgctttaccgccctagacccagaagggccagaaggcggtcttattcttaatatgcattttatcacccaatccactcctgacattgggaaaaaacttcaaaagttagaatctcgccctcaaaccccacaacaggaattaacctcgccttcaaggtgtacaataatggagaggagactgacgctgcccgatcgccttggaagccccctggaccatcacggacaccgagcttcagggcctgtttcccttgcccccataacttttgtgggtattgacggccaagcttcaaaacaccttaaagctcccctactttggtgccaacttggacaaccttcttttaagcactcttttttagttatccccacctgcccagttcctttattaggccgagacattttaaccaaattatctgcttccctgactattcctggactacagccacatctcattgccactcttcttcccaacccaaagcttcctttgcgtcttcctcttgtatccccctaccttgacccacaagtatgggacatctttactccctccctggcaaccgatcacatgcccattaccatcccattaaaacctaatcacccttaccctgctcaacgccagtatcccatcccacagcacgctttaaagggattaaagcctgttatcactcgcctgttacagcatgggcttctaaaacctataaactctccttacaattcccccatttcacctgtccaaaaacctcacaagtcttacagattagttgaggatctgtgccttatcaaccaaattgttttgcttatctaccctgtggtgcccaacccatacactcttttgtcctcaatacattcctccacaactcactattccattcttgatcttaaagatgcttttttcactattctcctgtacccctcatcccagcctctctttgctttcacttggactgaccctgacacccatcagtcccagcagcttacctgggctgtgctgccgcagggtttcagggacagctctcattacttcagccaagctctttctcatgatttactttctttccacccctccgcttctcaccttattcaatatattgatgaccttcttctttgtagcccctcctttgaatcttctcaacaagacacccttctgctccttcagcatttattctccaaaggatattgggtgtccccctccaaagctcaaatttcttctccatccgtaatctacctcagcataattcttcataaaaatgcacatgctctccctgccaatcgtgtccgactgatctctcaaaccccaacaccttctacaaaacaacaactcctttccttcctaggcatggttggatactttcgattttggatgcctggtttcgccatcttaacaaaaccattatataaactcacaaaaggaaacctagctgaccccatagatcctaaatcctttctccattcctctttccgttccttgaagacagctttagagactgaagccaccctagctctccctgactcatcccaacccttttcattacccacagctgggctggaagtgcagggctgtgcagtcagaattgttacacaagggccgggaccacgccctgtagccttttgttccaaacaacttgaccttactgttttgcctagccctcaagtctgcatgcagcagccaccactgccctaa

SEQ ID NO: 20374 - DNA, 648 bp, Homo sapiens
  SIMILAR (28)..(546): 681254mologous to Homo sapiens neutral protease large subunit,accession number M27826,Smith-Waterman Score=571.
atgacctcaggtcctcagattaaccagcccaagaaacatctcaccaatttcaaatctgaaccatctgacctctcccctcctccccaggctgctccttgccagctgaagactgacgctgcccaattgccttggaagccccatagaccatcacgcaagcttcgggtaactctcatagtggaaggtaagtccgtccctttagtcaatacggaggctacccaatccacattaccttcttttcaagggcctgtttcccttgcctccataactgttgtgggtattgacggccaggcttctaaacccctgaaaactcccctactctggtgccaacttggacaacactcttttatgcactcttttttagttatccccacctgcccagttcccttattaggccgagatattttaaccaaattatctgcttccctgactattcctggactacagccgcatctcattgccacccttctccccaacccaaagcctccttcgtgtcttcctctcctatccccccaccttaacccacaagtatgggacatctctacttccctggcaaccgatcacatgcccattaccatccgattaaaacctaatcacccttaccctgctcaacgccaatatcccatcccacagcacgctttaaaggattaa

SEQ ID NO: 20375 - DNA, 404 bp, Homo sapiens; identical to SEQ ID NO: 12906
  SIMILAR (97)..(123): 881254mologous to Homo sapiens calbindin D28K,accession number S46006,Smith-Waterman Score=40.
  misc_feature (1)...(404): n = a,t,c or g

SEQ ID NO: 20376 - DNA, 439 bp, Homo sapiens; identical to SEQ ID NO: 18593
  SIMILAR (293)..(436): 771254mologous to Homo sapiens neutral protease large subunit,accession number M27826,Smith-Waterman Score=186.
  misc_feature (1)...(439): n = a,t,c or g

SEQ ID NO: 20377 - DNA, 1059 bp, Homo sapiens; identical to SEQ ID NO: 806
  SIMILAR (328)..(459): 881254mologous to Homo sapiens calbindin D28K,accession number S46006,Smith-Waterman Score=211.

SEQ ID NO: 20378 - DNA, 1134 bp, Homo sapiens
  SIMILAR (150)..(1): 721254mologous to Homo sapiens Human secreted protein, SEQ ID NO: 7420,accession number G03339,Smith-Waterman Score=170.
atgtgggaaagtttggaacttcctggaaacattttcaatggctttgaccaaaatgctgataatgatatggacgatgaaattcaggctgaggtcatctcagatggagatgaggaatttgttgggaactggaataagcctagagacttggtgccctgcatcctagccactctagccttgactaaaaggggacaagatacagctcagaccatggcttcagagggtgcaaggccaaagcattggcagcttccaggaggtgttgggcccgtgggtgctcagaaatcaagaattgaggtttgggaacctttgcctatatttcgcaggatgtatggaaaagcctgtatgtccaggcagaagtttgctgcaggggcagggttttcctggtatgttcctgtggcagttgttggagcaaaagttcacgatgtgaacctccatatgctgtcctttccatccaagtggaagctgcacacatgcatgaaatttggtgccgtgactcagatcgtgacctcccttgggaggtcctcctgttctttgctccttgagaaagatccacctatggtcctcagaccgaccagcccaagaaacatctcaccaatttcaaatctgacaaaggagacacgttttatccgtggacccaaaactccggcgccggtcacggactgggaaggcagccttcccttggtgtttaatcattgcagggacgcctctctgattattcacccaggttttagaggtgtcagaccacgcagggacgcctgccttagtccttcacccttagcgaatttaattaacctcaccttcaaggtgtacaataatagaaaaaagttgcaattccttgccttcactgtgagacaaacctcagccatgtctccagcacacaagaacttccaaacgcctgaacctcagcggccaggcattcctccagaacctcctcccccaggagcttgctacaagtgccagaaatccggccaccaggccaaggaatgcctgcagcccaggattcctcctaagccacgtcccatctgtgcgggaccccactggaaattggactgtccaactcacctggcatccactcccagagcccctggaactctggcccaaggctctctgactgcttcccagatcttcttggcttag

SEQ ID NO: 20379 - DNA, 381 bp, Homo sapiens; identical to SEQ ID NO: 5723
  SIMILAR (295)..(236): 501254mologous to Homo sapiens Human secreted protein, SEQ ID NO: 5576,accession number G01495,Smith-Waterman Score=64.

SEQ ID NO: 20380 - DNA, 453 bp, Homo sapiens; identical to SEQ ID NO: 440
  SIMILAR (152)..(238): 601254mologous to Homo sapiens Human secreted protein, SEQ ID NO: 5576,accession number G01495,Smith-Waterman Score=70.
  misc_feature (1)...(453): n = a,t,c or g

SEQ ID NO: 20381 - DNA, 602 bp, Homo sapiens; identical to SEQ ID NO: 9698
  SIMILAR (192)..(524): 341254mologous to Bovine leukemia virus gag polyprotein,accession number M10987,Smith-Waterman Score=144.

SEQ ID NO: 20382 - DNA, 531 bp, Homo sapiens; identical to SEQ ID NO: 6811
  SIMILAR (313)..(450): 531254mologous to Human T-cell lymphotropic virus type 2 gag polyprotein,accession number AF139382,Smith-Waterman Score=160.

SEQ ID NO: 20383 - DNA, 909 bp, Homo sapiens; identical to SEQ ID NO: 810
  SIMILAR (353)..(391): 761254mologous to Homo sapiens calbindin D28K,accession number S46006,Smith-Waterman Score=45.

SEQ ID NO: 20384 - DNA, 678 bp, Homo sapiens; identical to SEQ ID NO: 813
  SIMILAR (103)..(216): 811254mologous to Homo sapiens Human secreted protein, SEQ ID NO: 5576,accession number G01495,Smith-Waterman Score=150.

SEQ ID NO: 20385 - DNA, 312 bp, Homo sapiens
  SIMILAR (273)..(151): 751254mologous to Homo sapiens Human secreted protein, SEQ ID NO: 5576,accession number G01495,Smith-Waterman Score=152.
tcatttcgtggtggcctgctggtatgataggtctggttgaattttaggatctggattttcagtcttcaccagctgtgaccccccagggagcaccctctttgctctgggctgctgcatttcagccatgcagctgttctcatcctcaggaaagtcccagaactctggcagccacttccagagcccctggaactctggcccaaggctctctgactccttcccagatcttctcagcttagcagctgaagactgatactgccggattgcctcagaagcctgggctgtactgctgcaagcttcacagacagcccccat

SEQ ID NO: 20386 - DNA, 928 bp, Homo sapiens
  SIMILAR (225)..(4): 901254mologous to Homo sapiens RCK,accession number D17532,Smith-Waterman Score=342.
ttaaggcttctcatcttctacaggctcgctgtggtattctgccccacacaggctcttgtcaatattgcttggaataggtttaatttctgttcccagctgctcctcaatacttttcaggttgaagtgatcatcatatgtgatcaagttgatggctaagccaggatgaccaaagcgacctgatcttccaatacgatggagataggtctctgcgagtttttgaagctcagttatacatgcatagtactgggttactccctttagagttagttcctccatcaggttaatctcatagggtttctgcaagtgggaattcatgaacttctgtacactgacagacttacagaaatcttgagcatcgatttcctttgcataggtcatctctttttctttcatgactttagcatcaatttgtatgttagtttttacttcagttagggagagtttgtttgtctgtttagctatcttcatgaagtttttgtgtaaatctttaaagtttttgatggtgatactgatctctgccagccatgtaagtatgcaatattggtcgttatttgctattttcttaggtagaggcagctctaatggcttccagttagcctttcccatcataagagccctcataccacatatcaggaaaccaatatggaaattctccacgctgctaagtatatctgtttcaattatgcattctggcagccactcccagagcccctggaactctggcccaaggctctctgactgactccttcccagatcttctcggcttagcggctgaagactgacactaccagatcgcctcagaagccccctgacccccatgactgtatctctccgatccacctgacattcaccccatttccccagatttccttctttcctgttcctcaccctgatcacacttgatttattgatggcggttccaccaggc

SEQ ID NO: 20387 - DNA, 420 bp, Homo sapiens
  SIMILAR (315)..(202): 841254mologous to Homo sapiens Human secreted protein, SEQ ID NO: 5576,accession number G01495,Smith-Waterman Score=161.
ctaaaccagttcccccaagtgttttatgtcaccttccaaacatggtcttagaaccatgtgtgcatgcaggtatgtaggatgtttgtttctccagttaggatctgattttccaccagaggcactctgtttctgcagaatctctgacaatgcacggattaaataattagcaaacttctgcgaagagagtggtgcaggggagcctggcagccactcccagagcccctggaactctggcccaaggctctctgactccttcccagatcttctcggcttagcggctgaagaccgacactgcccgatcgcctcagaagcccccttgttgcaaagaaaatccttgtataagtctccttgtacatcttcaacaatctcttgatgctgcataccaagaagtggaatttctgaatccttgagtgtcaacat

SEQ ID NO: 20388 - DNA, 816 bp, Homo sapiens
  SIMILAR (795)..(718): 761254mologous to Homo sapiens Human secreted protein, SEQ ID NO: 5576,accession number G01495,Smith-Waterman Score=91.
tcatgaggtctggttaatatcaggaattattgcctcaaacgctgcaggtgtggatcgatctctttcagtcccagtaaatggggctgcaactgcctttgacaacctcaaagctgcacagtgctcatgccctggggcagacaatgatgtgggggagttgctgattttaggatagaaaattacaatgcttatatagtaaacagcacctggaagtttactaatgatttttacaattaacagcagcagtgcggtctgattattcatgcgtgctttcaatccctccaaatgttcctcatgtgacctctttttaggaatctctattccaggcccttcattctgaccatcaccacctgcatcttgtatcctggattcttttaagaattttaaatagtgcatatccctcaacctctttctcctttcaatcttggtgccacacttcaatttctcccttctcttaatttcaattcctttcattttctggtagagacaaaggagacacgttttatccgtggacccaaaactccggcgccggtcatggactgggaaggcagccttcccttggtgtttaatcattgcagggacgcctctgattatacactcatgtttcaagggtgtcagaccacgcagggacgcctgccttggtccttcacccttagtggcaagtcccgcttttctggcagccattcccagagcccctggaactctggcccaaggctctctgactgactccttcccagatcttctcggattagcggctgaagactgacgctgcccgatcgcctcggaagccccctgcacccaggtgatataaacagccat

SEQ ID NO: 20389 - DNA, 1155 bp, Homo sapiens
  SIMILAR (52)..(210): 861254mologous to Human endogenous retrovirus tripartite fusion transcript PLA2L,accession number Z14310,Smith-Waterman Score=246.
atggacacatatagaggaacaacagacactggggcctacctgaagacacgcatgaaatttggtgccgtgactcagatcgggggacctcccttgggagatcaacccctgtcctcctgttctttgctccgtgaaaaagatccacctacgacctcaggtcctcagaccgaccagcccaagaaacatctcaccaatttcaaatccgagacaaaggagacacgttttatccgtggacccaaaactccggcgccagtcacggactgggaaggcagccttcccttggtgtttaatcattccagggacacctctctgattattcacccaggcttcagaggtgtcagaccacgcagggacgcctgccttggtccttcacccttagcggcaagtcccacttttctggggaaggggccagctgctcctcgccagaccgagctaggtcccaattcttcctcagcctccgctcctccaccctataatccttttatcgcctcccctcctcacacctggtccggcttacagtttccttccatgactagccctccccctcctgcccagcaatttactcttaaaaaggtggctggagctaaaggcatagtcaaggatttaattaacctcaccttcaaggtgtacaataatagaaaaaagttgcagttccttgcctccactgtgagacaaaccccagccacatctccagcacacaagaacttccaaacgcctgaactgcagcagccaggtgttcctccagaacctcctccccgaggagcttgctacaagttccagaaatctggccaccgggccaaggaatgcctgcagcccaggattcctcctaagccacatcccatctgtgtgggaccccactggaaatcggactgtccaactcacctggcagccactcccagagcccctggaactctggcccaaggctctctgactccttcccagatcttctcagcttagcggctgaagactgacactgcccaatcgcctcggaagcccccagctctctggtcccatcatgaaagggtgatggattgagggtattaactactggaaatcgcaggggaccaaagacaccagttttgtggaataaagtaagtttgagataaagcgcagtacagacggtcaaggtaatgctgccttttgcttcaccttcagaag

SEQ ID NO: 20390 - DNA, 1825 bp, Homo sapiens
  SIMILAR (874)..(903): 1001254mologous to Homo sapiens neutral protease large subunit,accession number M27826,Smith-Waterman Score=55.
tgctctgagtatgaggactcctccccagctccagtaccagccacagatctcagctcaacactctcgagctctgtaccacaaccccaggatacagggaccagccagcagcttcatcccctggacccttggcatgagctgcttcgtgcccaggagctccaaggtgccaccaaccacaagggctacagccatgcagagcatgagcatgcaggcctaggtgtccagggtgggaatggggctctggctttttcgaacagtgggcacaggcatgctgttcccaccatcagctcaggcactggcaggaggaggactccaagttcttcggcttttggactcttgaacttacaccagtggtttgtcagtggctttcaagccttcagcgacagactgaaggctgcattgtcagcttccctacttttgaggtttggggactcagactggcttcctagctcttcagcttgcaaatgtcttatgctgggacttcactttgtgattgtaggtaacatctgtgctacactcaaggagaaatactcctcaatgctccatttagatgtgaccatgaagaaaaatggggagaaaagaacaaggctccaaaaaagaaagaagggaatgcctccacatccggcttatgaggacctaaacatagctgccatcactctccctgccaatgttgtccttcatcagccaagtggcttcagaacttcagggcagctggaccccgtttggtggtctcttgacacggacgcgcatgaaatttggtgccaagacccgggacttggatcaggggacttcccttgggagatcactcccctgtcctcctactctttgctccatgagaaagatccacctacgacctcaggtcctcagaccgaccagcccaagaaacatctcaccaatttcaaatccaagacaaaggagacaggttttatccatggacccaaaactccggcaccggtcacggactgggaaggcagccttcccttggtgtttaatcattgcagggacacctctctgattattcacccatgtttcaagggtgtcagaccacgcagggatgcctgccttggtccttcacccttagcggcaagtcccgcttttctggagaaggggcaagatttaattaacctcgccttcaaggtgtacaataatagaaaaaagttgcaattccttgcctccactgtgagacaaaccgcagccacatctccagcacacaagaacttccaaatgcctgaaccgcagcggccaggcgttcctccagaacctcctcccacaggagcttgctacatgtgccggaaatctggccactgggccaagcgaatgcccgcagcccgggattcctcctaagccgcgtcccatctgtgtaggaccccaccgaaaatcggactgttcaacttacctggcagccactcccagagcccctggaactctggcccaaggctctctgtctgactgactccttcccagatcttctcggcttagcagcttgaagactgatgctgcccgatcgcctcggaagccccctacaagaccattcacggacgccgagcttcgggtaactttcacagtggaaggtaagcccgtccccttcttaatcaatacagaggctactcactccacattaccctcttttcaagggcctctttcccttgcctccataactgttgtgggtattgatggccaggcttctaaacctcttaaaactccccaactctggtgccaacttagacaatactcttttaagcactcctttttagttatccccacctgcccagttcccttattaggctgagacactttaactaaattatctgcttccctgactattcct

SEQ ID NO: 20391 - DNA, 539 bp, Homo sapiens
  SIMILAR (502)..(242): 791254mologous to Homo sapiens Amino acid sequence of a human secreted peptide,accession number Y10921,Smith-Waterman Score=341.
  misc_feature (1)...(539): n = a,t,c or g
gaattgtggatgattgcggtggagccttcactatgggtgtcatcggtggcggagtcttccaggccatcaagggtttccgcaatgcccctgtttgcagattgctgtctgaagctcccttgtttatctactcttgctcaagatctgtgtctcccaccgttaatgtgagctctgagagggcagagagcagacctaccttgttcatggctgtatccctgcatatggcatggtgcttggcacatataggaattcggcaccggttgagaggtagtgccaatgctgtgaggatccgagccccccagattggaggtagcttcgcagtgtgggggggcctgttctccaccattgactgtggcctggtgcggcttcggggcaaggaggatccctggaactctatcaccagtggagcaattgaccggggctgttctgggctgcccgcagtgncccactggcaatgggtgggctcagcaatgatggggggcatcctgttggcctcattgagggggttggnatcctcctaatcggtaaacagccacagttcg

SEQ ID NO: 20392 - DNA, 1010 bp, Homo sapiens
  SIMILAR (218)..(667): 661254mologous to Homo sapiens protein translocase,accession number AJ005895,Smith-Waterman Score=433.
tgggggagcagagggcagcacttcctccagctccaaaagagtgcacccaccccaacgttaccaatacactcgtgcaggcggaaagctccgacgccggtgtgcgtctacgctgggggcgtggcctgactgcgcggccagacgccagcgccatggaggagtacgctcgggagccctgcccatggcgaacttgtggatgattgcggtggagccttcacctatgggtgtcatcggtggcggagtcttccaggccatcaagggtttccgcaatgcccctgttggaattcggcaccggttgagaggtagtgccaatgctgtgaggatccgagccccttccactacaggtagcttcgcagtgtgggggggcctgttctccaccatcgactgtggcctggtgcggcttcggggcaaggaggatccctggaactctatcaccaagtggagcatttgaccggggctgtgctgggctgcccccaggtggcccactggccatgggtgggcttcagcaatgatgggggggcatcctgtctgcgcctcatttgagggcgtttggcatcctccttcactcgttaaacagccccagcagttccgaaaatgggcccccaattccctggaggaccccaagccaagctgccccctaaggatgtcaccaccggccccaggctaccccaagctatcagcagtaccacttgaggaagccacttgccaccatgggagctacttcctcggttcccttccccgatgggtctaccctcaaggggagggctggcttcccaggttagccctgggacccttccagagaaattttctactctgctccctagtcccagaaatggggtgtggggcaccccacgctgccctgacagatgggtccccttttttctctctcagggcaccccagccccacactcacatggtacgaagttctcaccccagctcctttgtgtggcaccctgatgagtattttaaaacccgttttgaaatgccaaaaaaaaaaacaaagggcggccgct

SEQ ID NO: 20393 - DNA, 585 bp, Homo sapiens
  SIMILAR (174)..(28): 911254mologous to Homo sapiens Human secreted protein, SEQ ID NO: 7141,accession number G03060,Smith-Waterman Score=234.
ttaaggtggcgcgtctggagtctgtcccttctgatgttcagatgtgttcggagtttcttccttctggtgggttcgtggtctcgctggttcaggagtgaagctgcagacctttgcggtgagtgttacagctcttaaggcagcacgtctggagttgttcgtttctcccggtgggcttgtggtctcgctgggctcaggagtgaagctgcagatctggccccacccacatcctgctgattggtagagccgagtggcctgttttgtcagggcgctgattggtgcatttacaatccatgagcttgagctaaacacagggtgctgattggtgtgtttacaatacctgagctcgacataaagactctccacgtcccaaccagactcaggagcccagctggcttcacctactggatcccgcaccagggctgcaggtggagctgcctgccagtcccaccctgtgcgctggcactcctcagcaccttgggtggtcgatgggactggatgccgtggagcagggggtggtgctcgtcggggaggaggaatgttgttgccgctttgatcatctatccagacctctaaaactttccccat

SEQ ID NO: 20394 - DNA, 1104 bp, Homo sapiens; identical to SEQ ID NO: 14015
  SIMILAR (502)..(1101): 991254mologous to Homo sapiens plasma prekallikrein,accession number M13143,Smith-Waterman Score=1083.

SEQ ID NO: 20395 - DNA, 2364 bp, Homo sapiens
  SIMILAR (1)..(624): 901254mologous to Leishmania major probable levansucrase precursor,accession number AL160371,Smith-Waterman Score=979.
atgaacatgaacatcaaaaaaattgtaaaacaagccacagttctgacttttacgactgcacttctggcaggaggagcgactcaagccttcgcgaaagaaaataaccaaaaagcatacaaagaaacgtacggcgtctctcatattacacgccatgatatgctgcagatccctaaacagcagcaaaacgaaaaataccaagtgcctcaattcgatcaatcaacgattaaaaatattgagtctgcaaaaggacttgatgtgtgggacagctggccgcagcaaaacgctgacggaacagtagctgaatacaacggctatcacgttgtgtttgctcttgcgggaagcccgaaagacgctgatgacacatcaatctacatgttttatcaaaaggtcggcgacaactcaatcgacagctggaaaaacgcgggccgtgtctttaaagacagcgataagttcgacgccaacgatccgatcctgaaagatcagacgcaagaatggtccggttctgcaacctttacatctgacggaaaaatccgtttattctacactgactattccggaagtttgctgaggagccagatgccttgtgctgacttgtctattttgaaagaggctgcagaaacactcgattccacctcaacccggaattcagctttcttaggtaatacacatgacgaggctccaattgttcatgtattcattccctcccttgcatattccaccaatatttggtcactcatcttcaacccaacaaccatgattatgatgtgctcacgagactggctttcttcttgtgaaaataagagggtagatcttgcttttgggttggtgtacagtggaacccctgtacagaagctagagcaaatgaagttcagtccccagctaggctgtaaccactttgagagcaaggacagaaatgacttcctgtttgcccccgaggaaatagaaaaggacccacaaggtgaaagtctgctgtgtgacttcatgactaaaacaccaaaagcaatggcaacgaaagctaaaatagacaaatgggatctaattaaactaaagagcttctgcacagcaaaagaaactaccatcagagtgaacaagcaacctacagaatgggagaaaaattttgcaatctacccgtatgacaaagggctaatatccagaatctacaaagaacttaaacaaatttacgagaaaaaaatcaaacaaccccatcaaaaggttgatgaaaggcgtctgctaaacttgacaacagacagattaacaggagaaaaggcatacagatttattaaggtgcaagtgctgagagtcacacaaggtatgaaaattcaaagaagggccagaagcaaagaactccaaggtgatggtgatgaaattcaaagatggaagcgcctccactccccacccaggctgcttggagaagagcctcacaggattattttcaaactagactctgctaatgacatgcacaagagtgccccattttcctcactccaatccccactctggcatcagccggttatgcaggaggttgagaggcagtacaaagaaaagaaagaccttgtgagagagggagggaaatgcaggtgtcagggtagacctggcaaggtggtattaactgagctcagtcttgaagctagaggtgggtggatggaagacattcccagcagaaggactagcaaatgcggaccatgggagctggtgtcccattgtgtccagaattggtgggttcttggtctcactgacttcaagaatgaagcctcggaccctcgcggagtgaagctgcagaccttcacggtgagtgttacagctcttaaggcggcgcgtctggagttgttggttcttccgggtgggctcgtggtctcgctggcttcaggtgtgaagctgcagactttcgcggtgagtgttacagctcataaacgcagtgtggacccaaagactgagggagccggctctggccttggccagcccagaaaggggctctcacagtgcagcagcgggccgaagggctcctcaagtgccgccaaagtgggaacccaggcagaggaggcgccgagagcaagcgagggctctgaggactgccagcacgctgtcacctctcaccatgaaagggtatggagccatgccaagaaggcaagtgggccaggtttgctggaggggcaagtttgggctggggctggattttgggcttctctcagggttttgcctctgactgcagtggatggtcacaccagtaactgcaggctccactccatacagctcaaggcctgtctgcttctgttgctgaaactgaaaaagctgatcaacagggcctcagctccttacagtggggtgatggcccttcccacatctccaggagggtctgtctgctga

SEQ ID NO: 20396 - DNA, 531 bp, Homo sapiens
  SIMILAR (24)..(215): 331254mologous to Mycobacterium tuberculosis SEQ ID NO 405,accession number AX005481,Smith-Waterman Score=81.
atggggaaagttttagaggtctggatagatgatcaaagcggcaacaacattcctcctccccgacgagcaccaccccctgctccacggcatccagtcccatcgaccacccaaggtgctgaggagtgccagcgcacagggtgggactggcaggcagctccacctgcagccctggtgcgggatccagtaggtgaagccagctgggctcctgagtctggttgggacgtggagagtctttatgtcgagctcaggtattgtaaacacaccaatcagcaccctgtgtttagctcaaggtttgtgagtgcaccaatcgagactctgtatctagctgctctggtggggccttggagaacctttatgtctagctcagggattgtaaatacaccaatcagcaccctgtgtttagctcaagatgtgcatgaagcaccataccagagagatatggaactctattttcagaatttttcagaatgtccactgggcagccagctgattgaactcagaaatgggacatgttctctccctatgcggtga

SEQ ID NO: 20397 - DNA, 4021 bp, Homo sapiens
  SIMILAR (3889)..(2543): 931254mologous to Homo sapiens Human calcium channel SOC- 4/CRAC-3,accession number Y95437,Smith-Waterman Score=2181.
tttcgatttaggaagtttattttgccaaagttaaggatgtgtgcccgtgacacagcctcaggaagtcctgacgacatgtgcccaaggtggtcgggcacagcttggttttatacattttagggagacatgggacatcaatcagtatatgtaaggtatacattggttccatccagaaaggtgggacaactcgaagcagggaggggacttctgggtcataggtagataagaggcaaacggttgcattcttttgagtttctgattggcctttccaaaggaggcaggcagagacgcatctatctcagtgagcagaggtggctttgagttctgtcatttgtccacaaggaatttccttgtgagggaggtatgtagctttttaatcgtagtagctatcttttttaggaatagaatgggaggcaggtttgccctaagcagttcccagcttgactttctgctttggcttagtgattttggggccccaagatttattttcctttcacactgtaaactaagttcctcccaaagtaggttgagcctacgcccggggatgaacaaggacagcttggagattagaagcaagatggagtcggttaggttagttgtcctttcacggtcataattttctgttataatttttgcagaggcggtttcagcaccacggcggtcatggccagagcaaaaagtatgtttttgatgttgaaaggaaaggctggacctgactttggtatcagatttactgccagttccgggtggtttacatgatttgaggatcgttatgcattacataatgttaacatgaatgctgagtctgtgggtgctgatgtgaaggcagctgaagagttttggaagcttgattatggaggagatttacttgccacagcaaatcttcaatatggaggaaacctcgctattctggaaacagatgcctgaaagaacttttgtatctgcccaaggggtttttcctgaccactgcacaaagaaagaccatggcatttttgtagagaaagagtttaacagacacaagggtggccacgccatgtgggagactgagttgagaggtgacagcgtgctggcagtcctcacagccctcgcttgctctcggcacctcctctgcctgggctcccactttggcggcacttgaggagcccttcagcccaccgctgcactgtgggagcccctttctgggctggccaaggccagagctggcaccctcagcttgcagggaagtgtggaaggagtggcgtgagcgggaaccggggctgcgtgtggagcttgcgggccagatggagttccgggtgggcgtgggcttggcgggccccgcactgggagcagccggccggccctgtctcacttcatcacagaagaggacaaagaccagcgagtacaggaccagctcgggggggtgtggcaccgaatggaaatccatgagcagcacgtaggcaaacagcaggaggaaggcgatgtagaagaccacattccaggagaagaccacgaagggggaggtgaagaacgccacatagtaccaaagcagcttcttgtgcttgtcgacaggtttcttcctaaatgatacaaagccacagcccaccaagggtataataaacagacacaggataatcttccagttcttggtgtctcgggaaatctctccataccattgcttagaaagaaaattctggaccccaggctgggcgatgaaatgctggtctgtggcctccaccgccagctccagacagttgcttccaccccaagcttcacaggaatagaccagcagctgttctgccaagtcttcatcgctgctgtaacactcagtgaacagctctccaccatctggtctatgagtgccgctggcaatgtctgtgccacatggcagatccgcgcccaccacagcattccacactgtggactcaccaacagcccgggtctcgtactcattagccagctcctcggactccccagcagcattgatgtcgttcttcactttggccagagtcttcagaagcttgctggctcccagggctgccagagtgcagcccctggtctgctcccaaatgactttggagagttccttcttattctgaagaatggcccagatgaagagagcttgcagggggtgccgagtaataggagacacgtcgtggagttctatgtccatctcgtcccggccatttctgtcttccttccggaagcctcttcggaagttcgcaaccagtttccagacaaacgtgaggagggcatcattataggaattcttggcgatctgcagattccggtacacaagcgtgctgaagtggttggagaagagttcagtgaggacatcatgggtgagaaacttccgtaggttcaagccattctccagaaagaggcggacaaacttgggtctgtcctttatgagagccgtaaacatgacttcttgaaggtcagcagacttgagaaccaccagcatatgagaagaggctttgccgtcagtcacatctttgctctcaaccttgattctaccattttccagccatgtgacctggattattgtgtctctgagcctcggtttgctcttctcccatcggcggtcattggtgaaaatctcatcattggctaagtccagctggttccactccagcagaagcttcagctgcccattccagttatccttgtcttgctcactggtgctgaaggctttgtatagagcgtaggagatggcattgctcacaatttcatccccagcttcttccattttaataactgttaataggtgagaacattcgagaatttctttgagccatttgatccaactctcagtctcctcctcaggcagccgggacaccgtgcggggtaaaaagcgcaccagcttctccttgacggcagaagatgtcagggcatcctccacctccaccaggctagcgatcacatcagcgatctggcccgagccttccaccaccacacaaggaattttatttttgatggaggtattgatggctttcaaagtctcttttccacctccttgggcaaaacacacaatggggatcttgccaccatagttggaatcttgaatagtgcgctcagagatatacttctctagctgattccggagctttgcttcgacagtgggatgtccatgacagccattgtccacgagcagcaaatgtgtgtggttgttgtccaggatatacagtggatctcttgtgaagtcatccataaggtactgggctaaaaaatagccctcagcatcgcaattcctgatgagggtgtcccggttggagaccatgccccaagctgctatgccaatggccacaatattctcctctgaactcctgctgatggtgttatctctcaccacctccccgatgtacttcatcaggccataatgggtgcctcccgtgagaatccaagcacctttggactgcgcgatgtagatgagccggctgaagatcttgcgcatgcgcggcttcagggcgaagttcttggcgcccccggtcacagaaatgaccaggttgggtgttttcaggtgccagtgctgggtcagcagctcgtaaaggatttccgcgtccgtgtcgcaggacagacgtatatacttccctttcttccccagtgtctcaaactgaatatccccaaaggcgtcggtaggaaattccttggtgtgtttcttgtagttccatttctcactttggttgatctgggtgccttccatgtgctggctctgggcatagccacacttgcacacattctccgtggccttggaatctttggtaaagaagacacattctcgtttcttaaaatttgcttgaataaaattcaccaagtcccaagaagccatgattgggcacgtctgtgtcctgaaggcagcgtagaagctggcgctttcactgtaagacaagtctgtgctccgagacgcgctggagtacagggtccgggtgctgtccagagtgtcattccttctgttcctcatgctgagcctggctgcccgaaaggacatcttttcctttacttctgcaggctccacgtcttctgtccacctgcatcctccaaccat

SEQ ID NO: 20398 - DNA, 2155 bp, Homo sapiens
  SIMILAR (1499)..(2152): 941254mologous to Homo sapiens putative p150,accession number U93563,Smith-Waterman Score=1106.
atgcctgagcctcccacccactccatgggctcctgtgcggcccgagcctccccgatgagcaccaccccctgctccacggcacccagtcccatcgaccacccaagggctgaggaatgtgagcgcacggcgcaggactggcaggcagctccacctgcagccccggtgtgggatccactaggtgaagccagctgggctcctgagtctggaactaacatttccattacacctggaaatgccacatttgtgacccgggtgcagggacaggcttggtttgcctcatgtatcactggtcatgatatgtctagtttaaaaacttccagtgtcgtggtattaaggagacaatctgaggcacttctaccagccaatttgacatgcaattggcaagattcttctgcccttgccaccttagaaagtgccctgtcccaggtcagacacaaaagattcacatttacacttatggtctttacaggctcagccatagtcattatggcaactgttagcattgctgttgtatctattactgaatcagtacaaacaactgcttttgtagataatctggccaaaaatatatgtgatgaacttctcctacaggacatggatgaagctggaaaccaacattctcagcaaaataacacaagaacagaaaaccaaacaccacatgttctcactcataagtgggagttgaacaatgagaacatacggatacagggaggggaacattacatactggggcctgttggtggcaggttgccaacatccaaactcgctgttgattgccagctcctgctccttgcagcagcccagcatgctctctgctggtgccaaaatacccttccaccaaaccccgctaacttctggaactgtcctagagggtttcctaccctagcaagtgagcttgcctatgtcagccctaaccttgctcttgtcattcagctgagccagaggaaaaaatttgagctattctggggtggtctacagagaaccatcttctttcccttcagtgttctcagaatattgactgttgatgaacaagccaatgatgtgagtgtggctgcagcaaggacccttcaaattttcagagatgacatgattgtatatctagaaaaccccattgtctcagcccaaaatctccttaagctgataagcaacttcagcaaaatctcaggatacaaaatcaatgtacaaaaatcacaagcattcttatacaccaacaacagacaaacagagagccaaatcatgagtgaactcccattcacaactgcttcaaagagaataaaatacctaggaatccaacttacaagggatgtgaaggacctcttcaaggagaactacaaatcactgctcaaggaaataaaagaggatacaaacaaatggaagaacattccatgctcatgggtaggaaaaatcaatatcgtgaaaatggccatactgcccaaggtaatttacagattcagtgccatccccatcaagctaccaatgactttcttcacagaattggaaaaaaacaactttaaatttcatatggaaccaaaaaagagcccacactgccaagtcaatcctaagtcaaaagaacaaagctggaggcatcacactacctgacttcaaactatactacaaggctacagtaaccaaaacagcatggtactggtaccaaaacagagatatagatcaatggaacagaacagagccctcagaaataacgctgcttatctacaactatctgatctttgacaaacctgagaaaaacaagcaatggggaaaggattccctatttaataaatggtgctgggaaaactggctagccatatgtaggaagctgaaactggatcccttccttataccttatacaaaaatcaattcaagatggattaaagacttaaatgttagacctaaaaccataaaaaccctagaagaaaacctaggcattaccattcaggacataggcatgggcaaggacttcttgtctaaaacaccaaaagcaatggcaacaaaagacaaaattgacaaatgggatctgattaaactaaagagcttctgcacagccaaagaaactaccatcagagtgaacaggcaacctacaaaatgggaaaaaattttcgcaacctactcatgtgaaaaagggctaatatccagaatctacaatgaactcaaataa

SEQ ID NO: 20399 - DNA, 1603 bp, Homo sapiens
  SIMILAR (474)..(61): 941254mologous to Cloning vector pSacBII SacB,accession number U09128,Smith-Waterman Score=684.
tcagccttggcaaaaacaccttctaaataactgagacttgctcagaaattcaggaacacaaaccaaaggctcagggtagaaaaacttggaattatcgctgtctttaaagacacggcccgcgtttttccagctgtcgattgagttgtcgccgaccttttgataaaacatgtagattgatgtgtcatcagcgtctttcgggcttcccgcaagagcaaacacaacgtgatagccgttgtattcagctactgttccgtcagcgttttgcagcggccagctgtcccacacatcaagtccttttgcagactcaatatttttaatcgttgattgatcgaattgaggcacttggtatttttcgttttgctgctgtttagggatctgcagcatatcatggcgtgtaatatgagagacgccgtacgtttctttgtatgctttttggttattttctttcgcgaaggcttgagtcgctcctccggcgctgtgcttgatttctcgccgggccttagctgccttcccgcggggcagggctcaggacctgcagccggtcatgccggagcctctccccaacccccaccgtgggcttccgcgtggcccgagcctccccgacgagcaccaccctcctactccacggcacccagtcccatcgaccacccaagggctgaggagtgcaggcgcacggcaccaggactggtttgtaaatgcaccaatcagtaccctgtcaaaacggaccaatcagctctctgtaaaacggaccagtcagctctctgtaaaatggaccaatcagcaggatgtgggagtgaagctgcagagcttcacggtgagtgttacagctgttaaggcagcgcgtctggagttgtttgttcctcccggtgggttcgtggtctcgctggtttcaggagtgaagctgcagaccttcccagtgcgtgttacagctcataaaggcagtgtggacccaaagagtgagcagcagcaagatttattgcaaagagcgaaagaacaaagcttgcacagtatggaaggggatggaccgggttgccactgctggctggggcagcctgcttttattctcttatctggccccacccacatcctgctgattggtccattttaccgagaacccagtgctgagggagccagctccggccttggccaccccagaaaggggctcccacagtgcagcggtgggctgaaggtctcctcaagtgccgccaaagtgggagcccaggcagaggaggcgccgagagcaagcgacggctacgaggacggccagcacgctgtcacctctcagtgccactccatggatgagtgtgcagatgacactggatcaaaaatccatctgactcaacaggtagacatggcggcacaggttgcctctggaatggcctatctggagtctcggaactacattcacagagatctggctgccagaaatgtcctcgttggtgaacataatatctacaaagtagcagattttggacttgccagagtttttaaggtatggcaccagagtctcagaacattaggttatgactatttacccttttacaatggaaagttagcagcattaactgagcagatagacagagaaggaaatagagcaggatga

SEQ ID NO: 20400 - DNA, 1284 bp, Homo sapiens
  SIMILAR (4)..(135): 881254mologous to Homo sapiens Human secreted protein, SEQ ID NO: 7102,accession number G03021,Smith-Waterman Score=203.
atgaacaacttgagacgcgctgccttaagagctgtaacactcaccgcgaaggtctgcagcttcactcctgagccagcgagaccacaaacccaccagaaggaagaaactccgaacacatctgaacatcagaaggaacaaactccggacacgccacctttaagaactgtaacactcaccgcgagggtccacggcttcattcttgaagtcagtgagaccaagaacccaccaattccggacacaccagctactagggaggctgagggcctacgttcaaggctagcagtgtactcaacaagggacagtccctgtgtggcctgttcaggatcctatacacaggctcagggctctttgggcaggaaattccaggatccggttagcttatttgaagatcttactaaaaatacaccagagcccaacctccgaccaattacatcaaaacctgtcctagtgcaggaaactctctccaactttgcacttttcttaaaggaaagtaatggacccagtaaaggtttggggaagccattaaagggactgacctgaaaggccctgcatggattcccatgtccatggagtttggaagataatacagcaaggctgtaccaagtgcagggtcctcacttttaatcctctatcccagaaaacaacggtgggcccaaaaggatgaagagagccattgttgagaccttggccaatgtgactgcttgacaaagaatggtgtggccgatgtgtctatttgaagattttgtgaatctcactcctcaggagaccattgcatcattgggccgcacactggtggtcccatggaaaaagccagatgactttgggcaaagggtgggaaatgaaagaaagttcaaagaccagggaacgctgggaagtccgtttggccttgtggtgtaaattggatcgcccaataaacattccccttggatgtagtctgaggccccctaaactcatctgttatcctgctagctgtagaaatgtatcctgataaacattaaacactgtaatcttaaaagtgtaattgtgtgactttttcagagttgctttaaagtacctgtagtgagaaactgatttatgatcacttggaagatttgtatagttttataaaactcagttaaaatgtctgtttcaatgacctgtattttgccagacttaaatcacagatgggtattaaacttgtcagaatttctttgtcattcaagcctgtgaataaaaaccctgtatggcacttattatgaggctattaaaagaatccaaattcaacctaaaaaaaaaaaaaaaaaa

SEQ ID NO: 20401 - DNA, 669 bp, Homo sapiens
  SIMILAR (664)..(230): 951254mologous to Homo sapiens Merosin M polypeptide,accession number R13436,Smith-Waterman Score=726.
  misc_feature (1)...(669): n = a,t,c or g
ttttttttttttagaatgaaataatcagtttaatatttatagacttgagaaagaacttgaattaaaattcagtctggagtctgaattagcaccatctgaatacagaaagaattctatgtacatgcacaaattagtttaattaacatatataggtaaaatatatttgtttgttttacttgatatacttgttttgacagactcttcctggggttacacttatttttattagttggctactgatccccagaagaactccagtcgttgtagttgtgcggaattcaaattctacaagaaggtccaatcccactttgaatccaccaactgctttggcaaaaccggttccgtcaaaatatgttcccctctgagcatttgcaaaacatgtcccaacatggaagctggaggtgggttgttccagatcggcaggggcctctgccatgtggagattcctgacgcagccatcaatgctataggtcactggaccaattcttcgggtagtgtagttgatgggtaacccaccaacatacagcattcccacgacatnccagatgtcggctttnttgggactgatggttctgttggaagccccatctacataaagaattccttcttgcttacttctcattatctttaatctgtgccactggccatcattgaattgggtgggatcat

SEQ ID NO: 20402 - DNA, 540 bp, Homo sapiens
  SIMILAR (155)..(223): 911254mologous to Homo sapiens merosin,accession number M59832,Smith-Waterman Score=128.
cctccagcttccatgttgggacatgttttgcaaatgctcaggaggggaacatattttgacggaaccggttttgccaaagcagttcgtggattcaaagtgggattggaccttcttgtagaatttgaattccgcacaactacaacgactggattcttctggggttccagggcatttgtgtgatggacaatggcataaagtcactgccaacaagatcaaacaccaaaggcacaggcaagccactggaggttaattttgccaaggccctggaactgaggggcgttcaacctgtatcatgcccagccaactaataaaaataagtgtaaccccaggaagagtctgtcaaaacaagtatatcaagtaaaacaaacaaatatattttacctatatatgttaattaaactaatttgtgcatgtacatagaattctttctgtattcagatggtgctaattcagactccagactgaattttaattcaattctttctcaagtctataaataatattaaactgattatttcattctaaaaaaaaaaaaaaaaa

SEQ ID NO: 20403 - DNA, 486 bp, Homo sapiens
  SIMILAR (62)..(484): 871254mologous to Homo sapiens merosin,accession number M59832,Smith-Waterman Score=621.
gcgtcactgagacctggaagtgcgctggaattcctcatagatatcgctcctttgaaagctgctatggaaccctgtgattaactctgaccgcatggactatgcagggcccgtgtgcttcaaaaacgctgacattggccgctgtgcccatgaaaagctccgcgaagactaagatggagcagctccaggtgaaataggtatccaacctgaggcagatgccaccccatactttgctacgcccaccccagttctgacacatggtccttgtgctgcagaatcagaaccagctcttttgatagggagcaagcagttcgggctttcaagaaacagtcacattgcaattgcatttgatgacaccaaagttaaaaaccgtctcacaattgagttggaagtaagaaccgaagctgaattccgcttgcttttttacatggctcgcatcaatcatgctgattttgcaacagttcagctgagaaatggattgccctactt

SEQ ID NO: 20404 - DNA, 462 bp, Homo sapiens
  SIMILAR (274)..(435): 941254mologous to Homo sapiens merosin,accession number M59832,Smith-Waterman Score=256.
atggcagaggcccctgccgatctggaacaacccacctccagcttccatgttgggacatgttttgcaaatgctcagaggggaacatattttgacggaaccggttttgccaaagcggtgggccatttgatgcatattgccagtgctctgtgcagaagaggagtttttcgatattaccgggatgttacatcaggtgacttccgaaggttctccccacggcggcgacccatcagtcccaaaaaagccgacatcctggatgtcgtgggaatgctgtatgttgttgccgatgcagatgccactgtcaaaaatttagaacaggaagctgaccggctaatagataaactcaaacccatcaaggaacttgaggataacctaaagaaaaacatctctgagataaaggaattgataaaccaagctcggaaacaagccaattctgtaagttctttttatcgtcagtatcagtaa

SEQ ID NO: 20405 - DNA, 9746 bp, Homo sapiens
  SIMILAR (3871)..(7038): 871254mologous to Mus musculus laminin-2 alpha2 chain precursor,accession number U12147,Smith-Waterman Score=4887.
  misc_feature (1)...(9746): n = a,t,c or g
cagcgactcctctggctcccgagaagtggatccggtcgcggccactacgatgccgggagccgccggggtcctcctccttctgctgctctccggaggcctcgggggcgtacaggcgcagcggccgcagcagcagcggcagtcacaggcacatcagcaaagaggtttattccctgctgtcctgaatcttgcttctaatgctcttatcacgaccaatgcaacatgtggagaaaaaggacctgaaatgtactgcaaattggtagaacatgtccctgggcagcctgtgaggaacccgcagtgtcgaatctgcaatcaaaacagcagcaatccaaaccagagacacccgattacaaatgctattgatggaaagaacacttggtggcagagtcccagtattaagaatggaatcgaataccattatgtgacaattacactggatttacagcaggtgttccagatcgcgtatgtgattgtgaaggcagctaactccccccggcctggaaactggattttggaacgctctcttgatgatgttggaatacaaggcctggcagtaacatggctgttacagaacacggaagccctaacgccttaaccaaattaatccccggaattggggcaccgtcaaaatgcccaagattgagtaggtcatctgcacttcattttactccaagatacaccccttagaaaatggagagattcacatctctttaatcaatgggagaccaagtgccgatgatccttctccagaactgctagaatttacctccgctcgctatattcgcctgagatttcagaggatccgcacactgaatgctgacttgatgatgtttgctcacaaagacccaagagaaattgaccccattgtcaccagaagatattactactcggtcaaggatatttcagttggagggatgtgcatctgctatggtcatgccagggcttgtccacttgatccagcgacaaataaatctcgctgtgagtgtgagcataacacatgtggcgatagctgtgatcagtgctgtccaggattccatcagaaaccctggagagctggaacttttctaactaaaactgaatgtgaagcatgcaattgtcatggaaaagctgaagaatgctattatgatgaaaatgttgccagaagaaatctgagtttgaatatacgtggaaagtacattggagggggtgtctgcattaattgtacccaaaacactgctggtataaactgcgagacatgtacagatggcttcttcagacccaaaggggtatctccaaattatccaaggccatgccagccatgtcattgcgatccaattggttccttaaatgaagtctgtgtcaaggatgagaaacatgctcgacgaggtttggcacctggatcctgtcattgcaaaactggttttggaggtgtgagctgtgatcggtgtgccaggggctacactggctacccggactgcaaagcctgtaactgcagtgggttagggagcaaaaatgaggatccttgttttggcccctgtatctgcaaggaaaatgttgaaggaggagactgtagtcgttgcaaatccggcttcttcaatttgcaagaggataattggaaaggctgcgatgagtgtttctgttcaggggtttcaaacagatgtcagagttcctactggacctatggcaaaatacaagatatgagtggctggtatctgactgaccttcctggccgcattcgagtggctccccagcaggacgacttggactcacctcagcagatcagcatcagtaacgcggaggcccggcaagccctgccgcacagctactactggagcgcgccggctccctatctgggaaacaaactcccagcagtaggaggacagttgacatttaccatatcatatgaccttgaagaagaggaagaagatacagaacgtgttctccagcttatgattatcttagagggtaatgacttgagcatcagcacagcccaagatgaggtgtacctgcacccatctgaagaacatactaatgtattgttacttaaagaagaatcatttaccatacatggcacacattttccagtccgtagaaaggaatttatgacagtgcttgcgaatttgaagagagtcctcctacaaatcacatacagctttgggatggatgccatcttcaggttgagctctgttaaccttgaatccgctgtctcctatcctactgatggaagcattgcagcagctgtagaagtgtgtcagtgcccaccagggtatactggctcctcttgtgaatcttgttggcctaggcacaggcgagttaacggcactatttttggtggcatctgtgagccatgtcagtgctttggtcatgcggagtcctgtgatgacgtcactggagaatgcctgaactgtaaggatcacacaggtggcccatattgtgataaatgtcttcctggtttctatggcgagcctactaaaggaacctctgaagactgtcaaccctgtgcctgtccactcaatatcccatccaataactttagcccaacgtgccatttagaccggagtcttggattgatctgtgatggatgccctgtcgggtacacaggaccacgctgtgagaggtgtgcagaaggctattttggacaaccctctgtacctggaggatcatgtcagccatgccaatgcaatgacaaccttgacttctccatccctggcagctgtgacagcttgtctggctcctgtctgatatgtaaaccaggtacaacaggccggtactgtgagctctgtgctgatggatattttggagatgcagttgatgcgaagaactgtcagccctgtcgctgtaatgccggtggctctttctctgaggtttgccacagtcaaactggacagtgtgagtgcagagccaacgttcagggtcagagatgtgacaaatgcaaggctgggacctttggcctacaatcagcaaggggctgtgttccctgcaactgcaattcttttgggtctaagtcattcgactgtgaagagagtggacaatgttggtgccaacctggagtcacagggaagaaatgtgaccgctgtgcccacggctatttcaacttccaagaaggaggctgcacagcttgtgaatgttctcatctgggtaataattgtgacccaaagactgggcgatgcatttgcccacccaataccattggagagaaatgttctaaatgtgcacccaatacctggggccacagcattaccactggttgtaaggcttgtaactgcagcacagtgggatccttggatttccaatgcaatgtaaatacaggccaatgcaactgtcatccaaaattctctggtgcaaaatgtacagagtgcagtcgaggtcactggaactaccctcgctgcaatctctgtgactgcttcctccctgggacagatgccacaacctgtgattcagagactaaaaaatgctcctgtagtgatcaaactgggcagtgcacttgtaaggtgaatgtggaaggcatccactgtgacagatgccggcctggcaaattcggactcgatgccaagaatccacttggctgcagcagctgctattgcttcggcactactacccagtgctctgaagcaaaaggactgatccggacgtgggtgactctgaaggctgagcagaccattctacccctggtagatgaggctctgcagcacacgaccaccaagggcattgtttttcaacatccagagattgttgcccacatggacctgatgagagaagatctccatttggaacctttttattggaaacttccagaacaatttgaaggaaagaagttgatggcctatgggggcaaactcaagtatgcaatctatttcgaggctcgggaagaaacaggtttctctacttatatttcctcaagtgatcattcgaggtgggacacctactcatgctagaattatcgtcaggcatatggctgctcctctgattggccaattgacaaggcatgaaattgaaatgacagagaaagaatggaaatattatggggatgatcctcgagtccatagaactgtgacccgagaagacttcttggatatactatatgatattcattacattcttatcaaagctacttatggaaatttcatgcgacaaagcaggatttctgaaatctcaatggaggtagctgaacaaggacgtggaacaacaatgactcctccagctgacttgattgaaaaatgtgattgtcccctgggctattctggcctgtcctgtgaggcatgcttgccgggattttatcgactgcgttctcaaccaggtggccgcacccctggaccaaccctgggcacctgtgttccatgtcaatgtaatggacacagcagcctgtgtgaccctgaaacatcgatatgccagaattgtcaacatcacactgctggtgacttctgtgaacgatgtgctcttggatactatggaattgtcaagggattgccaaatgactgtcagcaatgtgcctgccctctgatttcttccagtaacaatttcagcccctcttgtgtcgcagaaggacttgacgactaccgctgcacggcttgtccacggggatatgaaggccagtactgtgaaaggtgtgcccctggctatactggcagtccaggcaaccctggaggctcctgccaagaatgtgagtgtgatccctatggctcactgcctgtgccctgtgaccctgtcacaggattctgcacgtgccgacctggagccacgggaaggaagtgtgacggctgcaagcactggcatgcacgcgagggctgggagtgtgttttttgtggagatgagtgcactggccttcttctcggtgacttggctcgcctggagcagatggtcatgagcatcaacctcactggtccgctgcctgcgccatataaaatgctgtatggtcttgaaaatatgactcaggagctaaagcacttgctgtcacctcagcgggccccagagaggcttattcagctggcagagggcaatctgaatacactcgtgaccgaaatgaacgagctgctgaccagggctaccaaagtgacagcagatggcgagcagaccggacaggatgctgagaggaccaacacaagagcaaagtccctgggagaattcattaaggagcttgcccgggatgcagaagctgtaaatgaaaaagctataaaactaaatgaaactctaggaactcgagacgaggcctttgagagaaatttggaagggcttcagaaagagattgaccagatgattaaagaactgaggaggaaaaatctagagacacaaaaggaaattgctgaagatgagttggtagctgcagaagcccttctgaaaaaagtgaagaagctgtttggagagtcccggggggaaaatgaagaaatggagaaggatctccgggaaaaactggctgactacaaaaacaaagttgatgatgcttgggaccttttgagagaagccacagataaaatcagagaagctaatcgcctatttgcagtaaatcagaaaaacatgactgcattggagaaaaagaaggaggctgttgagagcggcaaacgacaaattgagaacactttaaaagaaggcaatgacatactcgatgaagccaaccgtcttgcagatgaaatcaactccatcatagactatgttgaagacatccaaactaaattgccacctatgtctgaggagcttaatgataaaatagatgacctctcccaagaaataaaggacaggaagcttgctgagaaggtgtcccaggctgagagccacgcagctcagttgaatgactcatctgctgtccttgatggaatccttgatgaggctaaaaacatctccttcaatgccactgcagccttcaaagcttacagcaatattaaggactatattgatgaagctgagaaagttgccaaagaagccaaagatcttgcacatgaagctacaaaactggcaacaggtcctcggggtttattaaaggaagatgccaaaggctgtcttcagaaaagcttcaggattcttaacgaagccaagaagttagcaaatgatgtaaaagaaaatgaagaccatctaaatggcttaaaaaccaggatagaaaatgctgatgctagaaatggggatctcttgagaactttgaatgacactttgggaaagttatcagctattccaaatgatacagctgctaaactgcaagctgttaaggacaaagccagacaagccaacgacacagctaaagatgtactggcacagattacagagctccaccagaacctcgatggcctgaagaagaattacaataaactagcagacagcgtcgccaaaacgaatgctgtggttaaagatccttccaagaacaaaatcattgccgatgcagatgccactgtcaaaaatttagaacaggaagctgaccggctaatagataaactcaaacccatcaaggaacttgaggataacctaaagaaaaacatctctgagataaaggaattgataaaccaagctcggaaacaagccaattctatcaaagtatctgtgtcttcaggaggtgactgcattcgaacatacaaaccagaaatcaagaaaggaagttacaataatattgttgtcaacgtaaagacagctgttgctgataacctcctcttttatcttggaagtgccaaatttattgactttctggctatagaaatgcgtaaaggcaaagtcagcttcctctgggatgttggatctggagttggacgtgtagagtacccagatttgactattgatgactcatattggtaccgtatcgtagcatcaagaactgggagaaatggaactatttctgtgagagccctggatggacccaaagccagcattgtgcccagcacacaccattcgacgtctcctccagggtacacgattctagatgtggatgcaaatgcaatgctgtttgttggtggcctgactgggaaattaaagaaggctgatgctgtacgtgtgattacattcactggctgcatgggagaaacatactttgacaacaaacctataggtttgtggaatttccgagaaaaagaaggtgactgcaaagggatgcactgtcagtcctcaggtggaagatagtgaggggactattcaatttgatggagaaggttatgccattggtcaagcccgtcccattcgctggtaccccaacatctccactgtcatgttcaagttcagaacattttcttcgagtgctcttctgatgtatcttgccacacgagacctgagagatttcatgagtgtggagctcactgatgggcacataaaagtcagttacgatctgggctcaggaatggcttccgttgtcagcaatcaaaaccataatgatgggaaatggaaatcattcactctgtcaagaattcaaaaacaagccaatatatcaattgtagatatagatactaatcaggaggagaatatagcaacttcgtcttctggaaacaactttggtcttgacttgaaagcagatgacaaaatatattttggtggcctgccaacgctgagaaacttgagtatgaaagcaaggccagaagtaaatctgaagaaatattccggctgcctcaaagatattgaaatttcaagaactccgtacaatatactcagtagtcccgattatgttggtgttaccaaaggatgttccctggagaatgtttacacagttagctttcctaagcctggttttgtggagctctcccctgtgccaattgatgtaggaacagaaatcaacctgtcattcagcaccaagaatgagtccggcatcattcttttgggaagtggagggacaccagcaccacctagggagaaaacgaaggcagactggacaggcctattatgtaatactcctcaacaggggccgtctggaagtgcatctctccacaggggcacgaacaatgaggaaaattgtcatcagaccagagccgaatctgtttcatgatggaagagaacgttccgttcatgtagagcgaactagaggcatctttacagttcaagtggatgaaaacagaagatacatgcaaaacctgacagttgaacagccctatcgaagttaaaaagcttttccgttgggggtgctccacctgaatttcaaccttccccactcagaaatattcctccttttgaaggctgcatatggaatcttgttattaactctgtccccatggactttgcaaggcctgtgtccttcaaaaatgctgacattggtcgctgtgcccatcagaaactccgtgaaagatgaagatggagcagctcccagctgaaatagttatccagcctgagccagttcccaccccagcctttcctacgcccaccccagttctgacacatggtccttgtgctgcagaatcagaaccagctcttttgatagggagcaagcagttcgggctttcaagaaacagtcacattgcaattgcatttgatgacaccaaagttaaaaaccgtctcacaattgagttggaagtaagaaccgaagctgaatccggcttgcttttttacatggctcgcatcaatcatgctgattttgcaacagttcagctgagaaatggattgccctacttcagctatgacttggggagttgggacacccacaaccaatgatccccaccaaaatcaatgatggccagtggcacaagattaagataatgagaagtaagcaagaaggaattctttatgtagatgggggctttccaacagaaccatcagtcccaaaaaaagccgacatcctggatgtcgtnggggaatgctgtatgttggtgggttacccatcaactacactacccgaagaattggtccagtgacctatagcattgatggctgcgtcaggaatctccacatggcagaaggcccctgccgatctggaacaacccacctccagcttccatgttgggacatgtttttgcaaatgctcagaggggaacatattttgacgggaacccggttttgccaaagcaagtttgtggaattcaaagtgggaattgacccttcttgtagaatttgaattccgcacaactacaacgactggagttttttttggggatcagtagtcaaaaaaatgggagggaatggggtattaaaaattattaattaaaaagttgatgttttatggtcccaatggtgcggggcaagattcaactgcctgtcctatgatgcctggggttctcagggcatttgtgtgatggacaatgggcataaaatcccctgccccacaagatcaaacacccgcattgagcctcacagtgcgatggggaaccagggtnggaagccccaaagccccaaaccccagcatcctacatcagctgaccaccaattgcccctgtgttttgttggcagggcttccccagatgaccgcaaaaagcagtttggcctaacaaccacgtattccgttccgagggtgcatcagatccccttaagctcaccaaaggcacatggcagtccactggagtgttaattttgccaaggccctgaaattgaggggcggttccanccctgtatccatgcccccagcccaacctaataaaaataagtgttaacccccaggaagagtcttgttcaaaacaagtatatcaagtaaaacaaacaaataaatatattttacctatatatgttaattaaactaatttgtgcatgtacatagaattccttctgtattcagatggtgctaattcagactccagactgaattttacttcaagctctttctcacagtctataaataatattaaactgattatttcattctaaaaaaaaaaaaaaaaaaaaaagat

SEQ ID NO: 20406 - DNA, 445 bp, Homo sapiens
  SIMILAR (417)..(277): 381254mologous to Hepatitis B virus mutant envelope protein,accession number AF329859,Smith-Waterman Score=72.
tggtcagttagtgatgccccttgacgctcgaccagaacgtcccatggatggaatgaaggtgcgggcatttatggagcgcctgctgtttgtcaggcgaggtactgataagcgctggagtgtaaggatgtacgtgacctgctctcagagttcaaatttaaatgaagagatatacattaatcaagtagtcattcaagcaaatatgaaattacaactgtgggctatgcgaacagatgacgcgaggggcctgtccagtctgggagatacggaaaggaaaggcccagggctgtttggtgagcggttgcaacgcctggagggtgatgtccagcgcctggctaaaacatatggtaccatcagtggcctggtgactagccacgaggatcccaacaggatgactggtggccccagggttcctgctgtccctgtgggctttgcattcatccttgag

SEQ ID NO: 20407 - DNA, 4055 bp, Homo sapiens
  SIMILAR (22)..(1554): 291254mologous to Homo sapiens emilin precursor,accession number AF088916,Smith-Waterman Score=351.
atgggccgccgccgcctgctcgtctggctgtgcgccgtcgcggcgctgctctcgggggcgcaggccaggggcaccccgctcctggcgcggcctgcgccgcccggtgcctcccgctacagtctctacacgacgggatggcgcccgcggctgcgcccggggccgcacaaggccctctgtgcctatgtggtgcacaggaatgtgacctgcatcctacaggagggagcggagagctacgtaaaggctgaataccggcagtgtagatgggggcccaagtgccccgggacagtcacgtaccgcacagtactcagacccaaatacaaggttggctacaagacagtgacagacctcgcctggcgttgctgtcccggcttcactgggaaacgctgccctgagcacctcacggaccatggggctgcctcaccccagctggagcctgagcctcagattccttcagggcagctggacccaggccccaggcccccttcctacagcagagcagcccccagccctcatggaaggaaaggcccagggctgtttggtgagcggctggaacgcctggagggtgatgtccagcgcctggctcaaacatatggtaccctcagtggcctggtggctagccacgaggatcccaacaggatgactggtggccccagggctcctgctgtccctgtgggctttggggtcatccctgaggggcttgtgggcccaggagacagagccagagggccactaacacctcccttagacgagatcctaagcaaggtgacagaggtgagcaacactcttcagaccaaggtgcagcttctagacaaggtgcatgggctggcacttggccatgaggcccacctgcagcggctgcgggaagccccaccatccccgctcacctccctggccctgctggaggagtacgtggaccgacggctgcaccgactctgggggagcctgctggatggctttgagcagaagctgcaaggcgtccagagtgagtgtgacctgcgggtgcaggaggtacggcggcaatgtgaggagggtcaggccgccagccggaggctgcaccagagccttgatggccgggagctggccctgcgccaggagctgtcacagctgggcagccagctgcagggcctgagcgtgtctggcaggggcagctgctgtgggcaactagccttgatcaatgcccgtatggatggccttgagagggccctgcaggcagtcaccgagacccaaaggggccccggtgccccggccggggatgagcttacgaggctctctgctgccatgctcgagggaggtgtggacgggctgcttgagggtctggagacgctcaatgggacagagggtggagcaaggggatgctgtctgaggttggacatgggggggtggggagtgggcggctttgggaccatgctggaagagcgcgtgcagagcctcgaggagcgcctagcaacattggctggggagctaagccatgacagcgcctctccgggcaggtcagctcggccccttgtacagacagagctggctgtgctagagcaacggttggtctcactggagacttcgtgcaccccgagcaccacctcagccatcctggacagcctcgtggcagaggtgaaggcctggcagagccggagcgaggccctcctacgccaggtggccagccacgcagcactgctccagcagctcaatggcactgtggccgaggtccagggacagctggcagaagggacgggcagctcacccgaaggcgagatcactctgctcaaggtcaatctgaactcagtgagcaagtcgctcacaggcctcagtgactctgtcagcccatacctctgaggccttcttggctgccaacacgtccctggatgagcgggaacgcaaggtggaagccgaagtccaggccatccaggagcaggtcagcagccaaggctccaggcttcaggctggccacaggcaggtcctgaacctgcgtggggagctggagcaactcaaggctggtgtggccaaggtggccagtgggctgagccgctgccaggacacagcccagaaacttcagcacacagtgggacactttgaccagcgggtggcacaagtggagggtgcgtgcaggaggctgggcctgctggccgcgggcctggacagcttgcccactgagccactgaggcccagagagggcctgtggagccatgtggaccagctgaatcgtacgctggcccagcacacgcaggacattgcccgcctccgggatgacctactggactgccaggcccagctggctgagcagagcccagccttatccagcagcgccttccagccttccctggctagcccaaatggcactaaggaggccactgagggaatcctccacgtggctgtcccagccaccaaaacccatgcacagtgctgcagaaactggacagttccggacagcggtcaaggcaaggatgtcatgcttgaaggccagggtagacttgagagagttcacattccactgtcagcaaatcagtgtctggacagccagctgcagggcctgagcatggctggcaggggcagctgctgtggcaaactggccttgatcagtgtccgtatgtaaaggccttgagaggaccctgcaggcagtcagcaccagcctcagcaactgtgcagagacctacaggcccacagccagtggcatcgtccgcattgccctgtgcccacaagcaacagtccacagcccttggtggcttctgttccttgtcccctcggcttctcttccgcagccatcaggactaggtttgtgcaggaaggtgatgcccactggaactctcctcacacctggcagcttcatggatgttgtatctgaactaaggaccagaggctgccagatgtttctggctcctcacgtgtccttcaggacagaacagaagcacaaagactcaagccaagaagttctctttaattccctttgatcctcccccaagggtgaagggctttaaggcagctggtagaaccccaggaaagaacggaatccaggcaatctgtttagagaccccccactccaaatttatccttttcctttccttcccctaagatgtttccagggccctctggtgcccacactgtcctcttccttccacttgggggtggggaaatccttccttgcgaggtcaaggccattttctcttaaaaaaagtggccttgaattgaggccaaggcccttgaagaaggagccaccagttggaggaaaagggctccaaagccttgctttttaacacccctgcaaaacccccaccttcccaagatggttcacaaaaggtgagaaattcaggtacgaaaccatcaatggacaacttgaaaatgcatgttcctcaggcctatgcagttccccagagactcttgacaccggtctcttgctgaggctcccagcctcagtttcccccacagcagcacgggccccactgtgctgctcttcaggtccccacagccctgcctttggttcctggacatttggtattctgccctccactctggtactatcagagtagggcaggctctggattaaagcttttagccggtctaaagctactttcttcaaagacagtgggaggagaggttgctggggcatcagccctgcttcccacagctccttaggcaagagcttacccagcagctgtgagcaccaagctggccagcagaggctgggggaggactttcaggccaacacctgcccccagctgagtttgggactgtccttaagcgaggtctggagagaggcagcggcagcagccggacggggagcaggccaagccggaaccacagcctgcaggtgtgggtgtgtgtcatgtgctgagatgccagggcaccagcaagggggatatgttggcagtgatgtctggcttcggagggtacagtcctggctcccagacaaggggcggggagaacactgtgtccttccagaggctgtaccacactcccactgctgtcacccttcactgaagcctcgagcctcggtagggcctccctcttctccctgtcctatcaagagttacagcaaggtcccaggttgacagggagctcgtgcc

SEQ ID NO: 20408 - DNA, 529 bp, Homo sapiens; identical to SEQ ID NO: 3741
  SIMILAR (12)..(359): 871254mologous to Homo sapiens p40,accession number U93566,Smith-Waterman Score=510.

SEQ ID NO: 20409 - DNA, 1569 bp, Homo sapiens; identical to SEQ ID NO: 16679
  SIMILAR (643)..(1566): 491254mologous to Homo sapiens p40,accession number U93569,Smith-Waterman Score=616.

SEQ ID NO: 20410 - DNA, 1964 bp, Homo sapiens
  SIMILAR (1166)..(1606): 431254mologous to Homo sapiens p40,accession number U93570,Smith-Waterman Score=243.
atggccattctgtttgaaatgaggttggggcagcagagctctgccaagtttccaggcttccagtcctctttctttcctgtgatacctgtaaacaaaccctctgggaagttcaaacgggacagagcccacttcagctcaacaaggctgctgtggccagactgccaaatttctcagctctggggagggtatctccgaaaaaaaggcagtagccccagtcagggacttatagataaaaccccatctccctggaaaaaagcacctagggaaaggggtggctgtgggcgcagcttcagcagatttaaacatccctgcctgacagcactgaagagagcagcggacctcccagcacagcattcaagctctgctaaggacacctcccaaaaggggccgacagacacctcatacaggagagctctggctggcatctggcaggtgccccctctgggacgaagctttcagaagaaagatcaggcagcaatctttgctgttgtgcagcctctgcaggtgatacccaggcaaacagggtcaggagtggacctccagcaaacttcagcagactggcagcagaggggcctgactgtcagaaggaaaactaacaaacagaagggaatagcatgttcactcaaagaccccatccgaggtcaccaacatcaaagaccaaaggatcacaacttctcgccagcaagggaacaaaactggacggagaatgagtttgacaaattgacagaagtaggcttcagaaggtgggtaataacaaactcctctgagctaaagaagcatgttctaacccaatgcaaggatgctaagaaccttgaaagaagcttagaggaattgctaactagaatacccagtgtagagaagaacataaatgacctcatggagctgaaaaacacagcacgagaacttcgtgaagcatacacaagtttcaatagcccaattgatcaagcagaagaaaggatatcagtgattgaagatcaatttaataaaataaacagagaagacaagattagagaaaaaagaataaaaaggaataaacaaagcctccaagaaatatgggactatgtgaaaagaccaaatctacagttaattggtgtacctgaaagtgacaaggaaaatggaaccaagttggaaaacactcttcagaatattatccaggagaacttccccaacctagcaagagaggccaacattcaaattcaggaaataccagagaacgccacaaagatactccttgagaagagcaactccaagacacataattagtgtgggttcaccaaagttgaaatgaaggaaaaaaatgttaaaggcagtcagagagaaaggtcggggttacccacaaagggaagcccatcagactaacaacagctgatctctcagcagaaactctacaagccagaagacagagtgggggccaatacttcaacattctttaaagaaaaggaatttttcaacccagaaatttcatatccagcccaaactaagcttcataagcgaaggagaaataaaatactttatagacaagccaaatgctgagagatttttgtcaccaccagggactggcctgccctaaaagagcaccaggcctgccctaaaagagctccttgaaggaagaagcacttaaacatgggaaagggaaccacccgggtacccagcttgcttgccaaaattcattgcccaaaattgttaaaggacccttcgagggcttagggaagggaacttgcatcaactaatgagcaaaataaccagctaacattcataatgacaggatcaaattcacacataagaatattaactttaaatgtaaatggactaaatgctccaattaaaagacacagactgggcaaattggataaagagtcaagacccatcagtgtgctgtattcaggaaacccatctcacgtgcagagacacacataggctcaaaataaaaggatggaggaagatctaccaagcaaatggaaaac

SEQ ID NO: 20411 - DNA, 1081 bp, Homo sapiens
  SIMILAR (64)..(663): 381254mologous to Homo sapiens proteasome activator hPA28 suunit beta,accession number D45248,Smith-Waterman Score=174.
ggcacgagaagcgaaagcccgggcgactagccgggagaccagagatctagcgactgaagcagcatggccaagccgtgttggggtgcgcctgagcggggaagcccgcaaacaggtggaggtcttcagacagaatcttttccaggaggctgaaggaatttcttctcagagttcttgccacagaaaatcatataccctgaatccagcttctttccaagaggacttccccttcaatgtggcttgaccttgaacctttcgtccggggccccactgggacatccccccatccccagacccctccaccccaaggatgatgagatgggaaacagataaggcagggagaagaaaggaagttccctaaagtgtgggattttttccctgggggaattgaggaaagttcctgttccctggtttgccctgggttaaagccagaaagtctgggacttttcaaagagaaattgcattcttggtgatttacattggatccagacacctgattccccaagatttgaagatggaaatgattttgggggtagccaatccaggaagaaggtgctggaaaaagggtgaatgcctgtcaagaccaaagtgggaagcttttccagacaaccatttccaagtactttcttcagaacgtggggatgcctgtgggccaaggcctcccaaggagactcatgtaatggattaccgggccttggtgcatgaacgagatgaggcagcctatggggagctcagggccatggtgctggacctgagggccttctacgctgagatcgtaaagagcagtggaattggagcacatgtgagcttcaaggtgcagaacatacacagctcctactgctctgggcctactgtgtctcccacatgtgtcactggactgcctgcatcacagtctcctgactcaggagcccagctggcttcatccagtggatcccacacctgtgctgcaggtggagctgcctgccagtcccgtgccttgcgcctgcactcctcagcccttgggtggtcgatgggactgggcaccgtggagcagggggcggcgctcattgaggaggttcaggctgcacaggagcccacagagggg

SEQ ID NO: 20412 - DNA, 1935 bp, Homo sapiens
  SIMILAR (1777)..(1914): 691254mologous to Homo sapiens peptidylprolyl isomerase,accession number X52851,Smith-Waterman Score=160.
atggctgcttctggaactggaacaggaaatatacaagatgagcctggaaccatttacagtgtcaaaaaccgggaatatagacttgtatggtggtacttgttggagaaaaacatcaggccccgcatgtggtacagcgatgtgatgtgggtgtgtaagcagctgccaatcaaaggcgaaaggcacagcacagtgtcaagccagcacctgtgtctaccaaaacacacaggggtacgagctggtgggctccaagatcccagcaacgacgttcatccagccatgaccctcagagccacaatgaccaggagtcgcaacaatgagtcgagggccggtcctgccattgggctgatgctggcacccccacgggaactcttcaaaaagacgcctcgccagattgcactgatggacgttggaaacatgggccagtctgtggacattagtgggcttcagttagccttggccgaacgccaatctgaattgccaacgcaaagcaaagcgagcttccccagtattctcagtgacccagacccggattcttctaattctggatttgacagctcagttgcctctcagatcacagaagctttagtcagcggaccaaagccacctattgaaagcctttctagacaagtcccagacattttgaaggctaaatatagcacactgagaggacaaatagctgacacacaggcgtccggggaaaatcacggcccctgggcaatgaggggacacagcttcaatgacttactgatcgccactacccaaacagagctgcccaccagaaaaaatgccaagctctccctgagtttagattctgtctgcattatatcaacgttacagaattgcacattttccaaaaaccgccaccaccacagagctgccctgtgtcccatgggtcttgactttaccacaatcctaagtggtcccatgaagaccagccccccacagcacacgtggcaggtcagcgctgcttcatcggcattggcttcccagctaaatgctcaaagctcaaaacagctcctggagcaggcccacgtgctgcccaagttgcccaagttgagtccttgttgccactcaacaggaccactggttaccaaagcaccgcctccgtccagaatcctaactacactctgccccttccatggggaaccctcagctgcctacagctccctccatgcagcaacctgccaactcccacccactcacccggtctcagttgcaaaggtggaacatggggtcaagactgccctaggtcagacacagctctcagaatctgcccacatgatcacaataggagaagactgccctgagtcagacacagccctcagaaactgcccacaccattatgtgtatgcatccaggagcacattgtgtttctgccacgaggttgaacctgagatcgacatctttgcatgggccttgtatccttttgcatttagctttttgatgaatgacactgacagtgtgaatcagacagtcagtccaggtagcgtaactcgctccagacacctgaggctagcagccacacccattgtcctctcttggtttcctgagaaagcaaaggaccattgtgtggatgtcatcattcccatgtatctggggcaccatgtgcagctaatgaagctgacttttaaaaagaaggctgtgagctttgcagatgctgctgccgcccagggccccctgcttccagccatggtcaaccccaccatgtttttccacattgctgtcgatggcgagcccttgggctgtgtctccttcgagcgtgaacgtttcccagttttttatctgccctgccaagatgccaagacagagtggttggattgcaagcatgtggtctttggcaaggtgaaagatggcatgaatattgtggaggtcatggagcacttggggtccaagaatggcaagatcagcaatcagcaagaagatcaccattgctga

SEQ ID NO: 20413 - DNA, 1091 bp, Homo sapiens
  SIMILAR (619)..(720): 551254mologous to Homo sapiens cyclophilin 3 protein,accession number M80254,Smith-Waterman Score=101.
gcaacgagagagcaaaactccatctcaaaaagaaaaaagaaagaaagaaatgctaggggaaaatgttttaactagtcattcttcccagtagctaatgaagctgacttttaaaaagaaggctgtgagctttgcagatgctgctgccgcccagggccccctgcttccagccatgggtcaaccccaccatgtttttccacattgctgtcgatgggcgagcccttgggctgtgtctccttcgaggtaaggggcctggaaagcaagaagtgactgctcatctaatccataaaactatgttaacagattggagctgtttgcagacaaggttccaaagacagcagaaaaattccatggctctgagcactggagaaaaaggatttggttataagggttccctgctttcacagaattattccagggtttaacgtgtcagagtggtgacttcacacgcccatacagcattggtggcaagtcccatctgccagggagaaatttgatgacaagaaccttcatcctgaagcatacgggtcctggcatcttgtccatggcaaatgctggacccagcgtgaacgtttcccagttttttattctgccctgccaagatgccaagaacagagtgggttggattgcaagcatgtggtctttggcaaggtgaaagatggcatgaatattgtggaggtcatggagcacttggggtccaagaatggcaagatcagcaatcagcaagaagatcaccattgctgactggacaactgcaataaatttgacgggtgtttctcttaaaaaaaaaaaaaaaatactgtgacagaccaaggtaaattgtttttgataattacagaagtgtgatttcttaatcagcagctgtcaaacatagtgttccttaatttaaaagcttgaacactaaattataaattggagaggttggaataattacggtcatatctctagaaacacaagtctttagtagcaaaaaagaaattagcaagagaagaaaactgttcagtactttgaaaggaaaaagttttcagtgatagtttttttagatgaaaattaacatgataaagaagtgacaggccaggtgtggtggttgacgc

SEQ ID NO: 20414 - DNA, 2569 bp, Homo sapiens
  SIMILAR (1238)..(1426): 851254mologous to Homo sapiens nn296_2 secreted protein,accession number Y28810,Smith-Waterman Score=285.
atggctgatgtgtacagctgctgctcaggccccaccctgaaatcttgggacgaaatttctgtgcccacggaaggtttcagaggcagattatctggattaaataagaaaagacctttagtaatcactgattctaagggaagccgactttcgcttcccgtcagcagcctttggcggaagagtgtcccgcctcttccgctctacagcggaggtggctgtggcggtggcgctggtggctgcggcggcggcggcggcagcggcgctcgagcggttcctgtcagggtcagccggcgggccccctgggtggtccacctgcaaatcgcggagcggcgccccagggatcgatggcgatgaactataacgcgaaggatgaagtggacggtgggcccccgtgtgctccggggggcaccgcgaagactcggagaccggataacacggccttcaaacagcaacggctgccagcttggcagcccatccttacggctggcacggtgctacctattttcttcatcatcggtctcatcttcattcccatcggcattggcatttttgtcacctccaacaacatccgcgagatcgagattgattataccggaacagagccttccagtccctgtaataaatgtttatctccggatgtgacaccttgcttttgtaccattaacttcacactggaaaagtcatttgagggcaacgtgtttatgtattatggactgtctaatttctatcaaaaccatcgtcgttacgtgaaatctcgagatgatagtcaactaaatggagattctagtgctttgcttaatcccagtaaggaatgtgaaccttatcgaagaaatgaagacaaaccaattgctccttgtggagctattgccaacagcatgtttaatgatacattagaattgtttctcattggcaatgattcttatcctatacctatcgctttgaaaaagaaaggtattgcttggtggacagataaaaatgtgaaattcagaaatccccctggaggagacaacctggaagaacgatttaaaggtacaacaaagcctgtgaactggcttaaaccagtttacatgctggattctgacccagatgcataatggattcataaacgacgattttattgtttggatgcgtactgcagcattacctacttttcgcaagttgaatcgtcttatacaaaggaaaagtgatttacatccaacattaccagctggccgatactctttgaatgtcacatgcgtattaccctgtacattattttgatgcacgaaaacgtatgatcatgagcgctatttcatggatgggaggaaaaaatccatttttggggatggcttacttcgctgttggagccatctccttccatctgggagttgcactgctagggattaatcataaatatagaaacagtagtaatacagctgacattaccatttaattttatattatgaaagcaaatcatctgcatgtgcatcaaggccagtcctattcaacctagctttcgaatgctgatatctggttagtatgtcattttgaagttgggcacataacttttctaaaaaaaagcagtctttgttgtttgcttcttccctacggatgacttctaaaaatatatgacgggtataaaaaaattagctatattgatcatatcaaccctgtaactgctgcaaatggcattctaatgtttgcattttattcggacaggccacatgatgcatagagcctctttcatgtgacttgtgtctactgcttaaatctttatgctgtgttgatgatattatattgacatatgaagctgtatatgtgtatgtattttgtggagaaagggattacaagatgtatgagtataatgacttgctaacctttcaggattcagagaaagatgaagaaagaccatatctaaataatacacttcatcattttcatgtgtataaatgcttaaagtaccatactttgtttgaggtggttcatgtatccagtttatccagtacagttatttgtcaagcttagctttgatttcaaaggacacgcttaccttgtctggcataagaattaatgctcatgtctgcagtggttgggtaggtcctgcttaggagaattaaaaaattcctctttccgtttggttgaatgttgcagtcaggaaccccaactcacttgggaatgtttttatatgtaatccatttccctttgaagcttatactttataagggggaggaaagaattcaggtgatatgggaaaactgcttggcagaccttcatcttctgcctcaactgtaaaccacatgtaaatgcttaatggagactgttttcattcttgtgatatttaacattcagaaaattacttcagctttgggaaatactcaggctgtttttattctgcaggtaagtgttttgacttaagtactaatattccagaaattttttggaaagcagtaaccttaatttcctatgtatttcattccacttttgcatataggtcaaatagcaatgtgtatgcacattctctttagttaaggcaccaattgtttcggcttgagtttcctaagacatactttagaaagatgctctataaatttcg

SEQ ID NO: 20415 - DNA, 493 bp, Homo sapiens
  SIMILAR (1)..(294): 581254mologous to Homo sapiens Human secreted protein encoded by gene 117 clone HBMUW78,accession number W74845,Smith-Waterman Score=282.
gaaatgaccagaaaacagcctgatgttgataaagtaacgaagacctataagaggagagctgctgatccttcctcattacaatcccatattccagtcttggataagggacgggcaggaagaaaacgctttccagcatcaagcttgtatccctctaggtcacagacacaaattgaaaccaaaaatcctagggtaaacttactggtgagcaaatggcagcaagtctggctcctggcgttggaaagaaggaggaaactcaatgatgccttggacagactagaggaggtttggaaattcataccctcaacaccacattgtcatttgccctcattcctcataacacattgccattgccaaaatcttggtattttttaacttttctgataataagcaaactcttgctatttgagtacatttttaaatttccaaaataaataccacaagtatgtgtgattttgtgaaatattgatatatgggacttggatttagggaaaaa

SEQ ID NO: 20416 - DNA, 1107 bp, Homo sapiens
  SIMILAR (1)..(1104): 641254mologous to Homo sapiens trabeculin-alpha,accession number AF141968,Smith-Waterman Score=1168.
  misc_feature (1)...(1107): n = a,t,c or g
ctgagggaatttgctaactttgattttgatatctggcgcaaaaaatacatgcgatggatgaatcacaagaaatctcgagtgatggacttcttcaggagaattgataaagaccaggatgggaaaataacgcggcaggaatttattgatggaattctttcctcaaagtttccaaccagtcgcttggagatgagcgcagttgcagacatctttgacagagatggcgatggatatattgactactatgaatttgtagcagcccttcacccaaataaagatgcatataaacctatcacagatgccgacaaaatcgaagatgaggtgacaaggcaggtagctaagtgtaaatgtgcaaagcgatttcaagttgagcagattggtgataataaatacaggtttggagactcccagcaactgcgactggtccggatcctgcggagtactgtgatggttcgtgttggaggtggatggatggcacttgatgagttcttagtgaaaaatgatccttgcagggccaaaggaaggacaaacatggaactgcgtgagaagttcattttagcagatggtgccagccagggtatggctgctttccgaccccgaggccgaagatcccggccatcatcacgaggcgcttcacccaacagatccacttctgtgtccagtcaggctgcgcaggcggccttccccacaggtccctgccaccaccacacccaagggaacgccaatacaaggaagcaagcttcgacttccaggatatttatcagggaaaggcttccactctggggaggacagtggcttgataacaactgcagctgccagagtccgaacacagtttggctgattccaaggaaggattncccagccgaccaggaagttcgagcttggaagcaaagtttggcagcaggggccagcagccgccgaggcagtgatgcatcagactttgacatttcagaaatccagtccgtgtgctcagatgtggaaactgtcccccagacacacagacctacaccccgagcaggttctcggccatccacagcgaagccttcaaaaatccccacgccccagaggaaatcacctgccagcaaattggacaagtcctcaaagagatag

SEQ ID NO: 20417 - DNA, 4721 bp, Homo sapiens
  SIMILAR (1332)..(1652): 671254mologous to Homo sapiens actin binding protein ABP620,accession number AB029290,Smith-Waterman Score=383.
aaaggcaaatctaatggtacctggctgttcttaagaatgcatagagaggcttagcaggctgggattgattgaagcttatttcctgcttgaaactgacagtgtttatggccccaacttaaaactgcctattacttcaggccaaagggttccatggcgaaattgaggatttgcagcagtggctgactgacacggagccgtcatctgttggcatcctaaaccgcctgggaggtttaccggaaacagccaaggagcagcttaatgtccatatggaagtctgtgctgcctttgaagctaaagaagaaacatataagagtctgatgcagaaaggccagcagatgcttgcaagattgcccaaaatctgcagagacaaatatttgaccaagacataaataacttgaaaagaaaaatggggaatcggtggaaaccaaactcaatgaaagggaaaacttaaactggaagaggctctcaacttggccattggagttccacaattctcttccaagacttcatcaactggcttactcaggctgaacagaccctaaatgtagcttctcggccaagtctcatcttggacacagtcttatttcaaattgacgaacacaaggtttttgccaatgaagtaaattctcatcgtgagcagataatagagctggacaaaactggaacccacctaaaatattttagtcagaaacaagatgttgttctaatcaagaatctacttatcagtgtacaaagtcgatgggaaaaagtggttcaacggttggtagagagaggaagatctttggatgatgcaaggaagagagccaagcagttccatgaagcttggagtaaacttatggagtggctagaagagtcagaaaagtctttggattctgaactggaaatcgcaaatgatccagacaaaataaaaacacaacttgcacaacataaggagtttcagaaatcactcggagccaagcattctgtctacgacaccaccaacaggactggacgttctctgaaggagaaaacctccctggctgatgacaacctgaaactggatgacatgctgagtgaactcagagacaaatgggataccatatgtggaaaatctgtggaaagacaaaacaaaattggaggaagcccctgttattttcttggacaattcacagatgccctacaggctctcattgattggttatatagagttgaaccccagctggcagaagaccagcctgttcatggagacattgatttggtgatgaatctgatcgataatcacaaggccttccaaaaagagttggggaagaggaccagcagtgtgcaggccctgaagcgctcatcccgttatactcatagattttagtcgggatgactcctcctgggtcaaggtccagatgcaggaattaagcacacgctgggagaccgtgtgtgcactttctatatcaaagcacacacggttagaagcagccctgcgtcaggcagaggaattccactcgggggtacatgccctcttggagtggctggctgaggcggaacaaaccctgcgtttccatggtgtcctcccagatgatgaggatgctctccggactctcattgatcagcataaagaattcatgaagaaactggtagaaaagagagctgaactaaataaagccaccactatgggcgacaccggttctggctatttgccaccccgactccatcactaccattaagcactggataacaatcatccgggcgaggtttgaggaggtgctggcctgggcaaagcaacatcagcagagattagcaagtgctctggctggggcttattgccaaacaggaattgttggaagctttgctggcttggttgcaatgggctgaaactacacttactgataaggataaagaagtcatcccccagggagatcggaagaggtggaaagcactccattgccagaacaccagacctttcatggagggaaatgaccagaaaacagcctgatgttgataaagtaacgaagacctataagaggagagctgctgatccttcctcattacaatcgccttattctagtctttgataacggacgagcatgaagaaaacgctttccagcatcaagctagaatccctctgggtcacagacacaaattgaaaccaaaaatcctagggtaaactttacttggtgagcaaatgggcagcaagtctggctcctggcgttggaaagaaggaggaaactcaatgatgccttggacagactagaggagctgagggaatttgctaactttgattttgatatttggcgcaaaaaatacatgcgatggatgaatcacaagaaatctcgagtgatggacttcttcaggagaattgataaagaccaggatgggaaaataacgcggcaggaatttattgatggaattctttcctcaaagtttccaaccagtcgcttggagatgagcgcagttgcagacatctttgacagagatggcgatggatatattgactactatgaatttgtagcagcccttcacccaaataaagatgcatataaacctatcacagatgcccgacaaaatcgaagatgagggtgacaaggcaggtagctaaagtgtaaatggtgccaagcgatttcaagttggagccagaattggtgataataaaatacagggtctttcttgggaaatcaagtttggagacctcccagcaactgccgactggtccggatcctgcggagtactgtgatggttcgtgttggaggtggatggatgggcacttgatggagttcttagtgaaaaattgatccttgcagggccaaaggaagggacaaacatgggaactgcgtgagaagttcattttagcaggatgggtgccagccagggtatggctgccattccgaccccgaggccgaagatcccggccatcatcacgaggcgcttcacccaacagatccacttctgtgtccagtcaggctgcgcaggcggccttccccacaggtccctgccaccaccacacccaagattctccatcctttaacacgcaattatggtaaaccatggttgacaaacagcaaaatgtcaactccttgtaaagcagcagagtgcttcagactttcccgtggccatcttacagaggggaacgccaatacaagggaaggcaagttttcggatttccggggtattttattcagggaaaggcttccactctggggaggacagtggcttgataacaattgcagctgccagagtccgaacacagttttgctggatttccaaggaagattcccagccgaccgggaagtcgtgctggaaggcaaagttgggcagccagggcctagcagccgccgaggcagtgatgcatcagactttgacatttcagaaatccagtccgtgtgctcagatgtgggaaactgtcccccaggacacacaggaccttacaccccgaggcaggttcttgggccatccacaggcgaagcttttcaaaaatcccccacggcccagagggaaatcacctgccagcaaattgggacaagtccttcaaaggagatagtggcaattggttcttaccaagggcccttcctttgaggcattttattattttaagttttgaacgatgttaaaatatggtgtagaaattcttgtgaaatattgcaagaggcgagtttaaaattcttgcagatggccttatttgtgtatttgtctttttattttatctgtataattttttttgtcagatattctgggggtttaaagtcacatcctatgtgaggggggaaaagtttaacatgaacttaacattttttgcactgtaacgggccgggcacacacttaaactcagttactgtaccctacagggtaagtctacatcctctctgacagccacagcactcacatcaatccctggacgttagggattccctccatggacattttccctgttttttatgggaaactctggagaagctggaatggtacatggcagggggatatttttttgagatggatttaaatgtaaccccaaaagatggaagaccaaaaaagaccaaacacaccccacacggcagtctttgccagtatcctgacagagaactcacaggaagttactttcaagcacttgcccagtactatggatattccaagtacctttgcagcatttcctctgcccattgcctttcaatgaaggccagaggccatccctgggatatttaggaccctattatactgtaaggaatcataagtattaaagtgccggtccatataccatgtgaggttttccttttgccttgagtggaccagtagcacctgtatcattgaaactcattttgtatcaggagcaattttgcttgcagaaagctatgaaataaaacacgtcccttaactgcattgcctatggaattaattttttttccccagggaaaactagtgtattttttttatgagcaatatcaatttggagtgaccaaaagatacttaaaaatgggtttattttgatttctcatctgaaataatcatgttctggatattagacctattatactgtaagaatataagtataaagtgcgttcatatacatgtgaggttttcttttgcttgagtggacagtagcacctgtatcattgaactcattttgtatcagagcaattttgcttgcagaaagctatgaaataaaacacgtcccttaacacgcaattatggtaaaccatggttgacaaacagcaaaatgtcaactccttgtaaagcagcagagtgctcagactttcccg

SEQ ID NO: 20418 - DNA, 426 bp, Homo sapiens
  SIMILAR (251)..(108): 301254mologous to Sterkiella histriomuscorum SPEC3-like protein,accession number AF333344,Smith-Waterman Score=62.
ggggtcagcttgaatttcctaggtctaatctaataagaagtttttattttttttctaaccacttcacagttcactgttcctcctaataagttatatttaacatctgaccacctttcccacccaccttgcttaacccaaaatgtcaatatcataataaacgagagcaacagtagttggcctctaggaaaaaactccatcaaaaagcaagaactaactagacacacccatctacaaagctgctcattaaccagacaggaagacaatgggagaactatagccctgcagggagatggcacatacctcatggcaaatgagtgacaggttatgttcacatgtaggagatttataatcctccctcaccccaaataatatgatggcttttctcttggaactaaaagatagtcttccaaaggatagaaatatttt

SEQ ID NO: 20419 - DNA, 3342 bp, Homo sapiens
  SIMILAR (1557)..(694): 541254mologous to Homo sapiens unnamed protein product,accession number AK001559,Smith-Waterman Score=754.
ctagcagtttttatgcctgatttgtttccctctgaagtctgtcatgcctgcagccccagactgtactcttccttgcacacagctcagaggaacatagacgatggtgtcagctgttggacttgcagccccacttcctgccagccccggcttccctgagaaggaagagggccgcctctcttgtttcatacccttccccattcttggcttggttacattgtgcttgtcaaataagcactcagctcccctctgagatgaatgcatattcccggaggtgtcccctggacatgctctgagaatgttcccatgcttgctttggttactcagaaccccgaaatccacgggagggatgagggtggttggctggcaggaggggctgctggagggctgaacaaatgcccgtgtggggtgctggtctcctggccaactgtgtccaggctttcttttgctttctcctgctttctccattatcttatctttcaggaccttagaagtgtttcctgaagtttcctcatcttttacagatacataacttccactgtcactttcattataatctggctcaaaagcagcttcatcagtgtctactttgcactttctgtctgacacggtgccattgggggattcatcctcatggctgggtttgttctcctgttggttatcttccccagctccattttgcttggacactggctgaggttcctttaacttgtgtacaatgaagaggtgcttgggactggggaacttggtgtcttcttttatttctgtttcctcctcattggtggcatctgtcatttctttcaggtcagggtccttgaggctgtgcatcagctggacgtgcttctctagcatcaatcgtttggtaaaggtacgtctggagtctgggcagtgcgagcaggcatacactttcctgatgcctttgtgcttgatccggttgtgctggcacaggtggcggcagggatgtttcttcatttgcttcccttgctccttcctcacgtgggatatgtacacatctctctgaatgaacaggcggtcacactcccaacacgtccacccaggactggccactttcttggtttccactgattttttcacaggagatggagatttcttttccaatttctctttcccattcatggatttggtgtcctctttgttctgatttgatgccattggacaaataggacacttgtagaagacttcacagtgagaaccttgaatgtgagactgcagggcagccacatcagagtatacaacattgcaatgcacacatcgaaaaccaactctcctcatgtagtgcagacagttcttggtgacatgggtctggaagtgcaccgacctgcagatggccccgcactcagggcaggtgtagagagatttgtgctgatggattctctggtgtgatgcgtaactgcactggttaggaagcagcatctggcagatagtgcaagtcttttgtccacgtgtatctgcagcttcgatgcgcatgctctgtctgtcatagtgctgggtcagactcttttcaactgcaaaggagtccccacactccaagcacttgtacccacgcgttggtaacgtgatccctgcattggtgggaggactcaggtttggaatgtaaacagggactggattgacactgctcagcaccttgttgaaagcttccaccacagaactctgcaaggacgacaccacctggactcgagacacctttttggggggttgcgaggctgctgcattgattattgcctgctttatttgttgctgagcctgaggcaaaaggttaatgttggcaaggtgcacagtctttggcacgagtttggcgttggcccggctgggtgccggcaccacgacagtttgctgctggatggcgttggcggctttaatgatggcgctgctggcgctctgtttaggggtgagctctgcaggtgaaactgcattggtcatgaccgtggactggagaggcgccctgaggagagaggaaaggatggcagctgatgctggagatgacagaaggaatgtcacagaggccatcacagacgccgtctgctcagaagatttcttcccagagtcaagatccacttctggcaataccctggtcactgttctcttgatttccccagaagacatcttaatggtttttatgcggactttgaggattgctggtgcggacccagactcaggagcccagctggcttcacccagtggatcccgcaccggggccgcaggtggagctgcctgccagtcccgcgccgtgcgcccgcactcctcagcccttgggtggtcgatgggactgggcgccgtggagcagggggcggcgctcctcggggaggctcgggcagcacaggagcccacggaggggcagggaggctcaggcatggcgggctgcaggtcctgagccctgcccttccccttgtgaatccctccaggctcagggattccagggattccagggattccctcccattcccgtttaaggacaacgcggatggtaagcactcccccttctaccacgtgaggacacagcaagaaggaacatcgatgaaccaggaagcaggccctcaccagacactgaatctgctggcaccttggccttgggcttttccagcctccatattcatttgggtcatccttactgctgtgtcctgcatccatttgctggagaaggacctcactgatatccgatttgctaataacctgaaactttccagctccagagcctgagctagactcaatgtcagtgatgatgtcgttgaccttcggggacagattctgcttttgccctggtgggtctgggttgagatgcattgcatttgatcttgctggagaaatttccagtcttctcagcccgtggcagagttgagtaattgtgacagattgacagcttgttacagagaagtttgcccacacctgagctgtaggataaaattcaggcttcttcgcacacacctgtggccatttgtcactgacacccctgcctccctgatccctcctgctttgataaccttccatgctcttagcaactcccagctgccggcagatgccctgcatgggccatttccacctctgtgctttgccccttctcttctctccatccttgctgcttccttggctagacatcactgactcatccttgaagaaatccccttctccaagaaggcttcctgacctcccctctttccctttcatcctgtttggtttagtggctccctccctgggtcctacggtaacttcatgtttaactttttgagaaactgtcagattggtttccatgcagctgtagcattgtacattcccacaaacaatgtctgagggttccagcttctctacatccttgcgaacactcat

SEQ ID NO: 20420 - DNA, 6002 bp, Homo sapiens
  SIMILAR (250)..(759): 661254mologous to Homo sapiens Human Zntr2 protein,accession number Y95660,Smith-Waterman Score=650.
  misc_feature (1)...(6002): n = a,t,c or g
atgcaagctaccaagactgaatcaggaagaaatggaaaacctggacagcccagtaacaggtgtcattatttgcttaatcaaggctgggttgctaactctgggaaaggaggaagaaccaacattccagataaggagcttaaatctggagatgacccagaaaatgttcacatcacttcctttcaatatttggccttagctgccttcccacggggcagggctcgggacctgcagctcgccatgactgagcctccccacccctccgtgggctcctgtgcagcccgagcctccctgacgagcgctgccccctgctccacggcgcccagtcccatcaaccacccgaaggctgaggagtgtgggtgcacggcacgggactggcaggcagctccacctgcagcccgggtgcgggatccactgggtgaagccagctgggctcctgagtctgagtatgtatgtaactgctctgtggttggaagcctgaatgtgaatcgctgcaaccagaccacagggcagtgtgagtgtcggccaggttatcaggggcttcactgtgaaacctgcaaagagggcttttacctaaattacacttctgggctctgtcagccatgtgactgtagtccacatggagctctcagcataccgtgcaacagttctgggaaatgccagtgcaaagtgggtgtcattggctctatatgtgaccgatgccaagatggatattatggctttagtaagaatggctgcttgccctgccaatgcaataatcaggtctgccaggtgcgatgccctcacaggtgcttgtttaaactgccacgaaaatagcaaaggaaatcactgtgaagaatgtaaagaaggattttatcatagtcctgatgccactaaagaatgtcttcgctgcccttgttcagcagtgacatctacaggcagctgctctataaaatcgagtgaattggaacctgaatgtgaccagtgtgaagatggttacataagcccgaactgcaataaatgtgaaaatggctattacaattttgacagcatctgtagaaagtgccaatgtcacggtcatgtgtacctaatctcaactccaaagatttgtaagcccgagagtggtgagtgcatcaactgcctccataacaccactgggttttggtgtgagaactgcctataaggttatgttcacgacctcgagggaaattgcatcaagaaagaagttattcttccaacacctgaaggttctaccattttggtttccaatgcctctttgaccacatcagtgcccacccctgttataaatagtacttttatcccctacaatccctgtagactatcttttcagtaagcacttctgaaaacagcacttcagctttagctgatgtatcatggacccaatttaacatcatcattttgacagtcatcatcattggtgtggtgctgctaatgggatttgagggggctggatatatgtaccgcgagaaccaaaaccggaaactcaatgcccccttttggaccatcgagctgaaagaagacaatatcagtttcagcagctaccatgacagcattcccaatgcagatgtttcgggattggtggaagatgatggcaatgaagtggctcccaatgggcagatgaccctgacgacgcccatacataactacaaagcctaaggagctagaactgttctgaattgttaaaccacagtgcttgctaagacagagtcagcccctgggccagacaaagcctggctagagtttgctgagaaagcaaaggcaaatagtgcatctgaaattttcaggtacaaatttgtaatgcgcttagcctatctattgctcttagttttcccatgaagatctgaagcgttcactgtcattaggacttgaagtaaagtatatttttgtaccaaaccacatgggagtatggaaaggctgaaccccatagtgcagcccaaaaccactttgacctccagatagactcctggggaagcattcaccaagccagtggtaacaagatgatgaatgtggagggggaaaagactgctggaagacttcatctccattcctgaaacattttttttaaaacagtgtcagggattatattcgttttactatacaaaaggacatcattgaggaaaagcttgtttctaggctgtatcacagtaaataatcttgattgtttctagaacaggggtagaaaagtcccaagatcttcagaagggcttggttttttcctcccaggattcttgctcagtgatgagttgaaagcacaggataagcttctaagggaggaaggcagcattggggagcaggaggctgatggtcctcctcagggtctcagtgtaaatgataaattgtctaaaaataaggaatattcctgcctctagagaaattaaggtgtacatagttaatgtagcatatctggtcgacgttgtatttgtatctatttgtaaaaaaaaaatcatgtcatattttatcatctggaattttatttgtacagcagttaatggtgttgtaaaaagaaaaatatggggattgcttaaaatactgtaaaatagatggcaatattgctagagctgggactctggtgagcatccgtcatttttagtccttcttgaggacattgctgaaatttataagagggcgaaggtttctttctttcctttctcagtctaaaagtagagttatatgctctttgacttaactatgattcaagcaatagattttgaagtcagtaatcgttaagctgggacataggatgcattctccaaaaacattaatttaattagacattagccaccctatatattttacatagattaatataaaacatatcctcattaaaaaatgtttttcttgaatgtaaaagatagtcttccaaaggatagaaatattttagttccaagagaaaagccatcatattacttgggatctgtagttttcatgcctatgaaatatttataatcctccctcaccccaaataaaaaatctcctacatgtgaacatagcctgtcactcatttgccatgaggtatgtgccatctccctgcagtgctatagttctcccattgtcttcctgtctggttaatgagcagctttgtagatgggtgtgtctagttagttcttgctttttgatggagttttttcctagaggccaactactgttgctctcgtttattatgatattgacattttgggttaagcaaggtgggtgggaaaggtggtcagatgttaaatataacttattaggaggaacagtgaactgtgaagtggttagaaaaaaaataaaaacttcttattagattagacctaggaaattcaagctgacccctttgcctaacttccctagagaaaaacctagaacttggtcatccctttataggagacccctaagttgttctcagggtttggagatgatgttctggagggagtacaagcaaataatctacttctggtaatctgagggtgctttgcgtatttggccattgctcagaagaatagaggttacattatattacattatatgaaaattatttagtttttctatagccctttgtagtttgcaaagcacttttccatatgtgtgtcctctcttccacaccatagccccctgaggaagtaattgttgtccccattttatagatgaaaaggctgaggcacagaggagctaaatatcttgttcaaggctatacaatgtgtgtgattattaggcttggaatcagggcctctaactctaaagcacatgttttttcaactatatgcagaaattgcctagccatggacacaagaaagctgggaggaagagttctacttgtggatgtttttaattttttttaaatatcaggagcaatccagggccatacagctatgaagcacttagtgaaaagaacacaagaagatttactaactgaagttagtattagtgattagaaaacaaaactgccagtttgtgcttcattaaggtgaactcatctctccaagcaggaagggaaaatttgctttccctagcagttgctgcatatgtgtgtacagactgcacaattcttaggaatttttgcaaaatggcatacctgtctttctcccagatacaccgccccctgccccccccaaaaaaggtcaggattaaaggtggtgagaagtgaacatttattaaacagaagttaaaccaatagagagaaaggaggtttgttggagtctaagaggattttgaccatgtagaaattccttgaaacagaccttaaaaggtattgaaaaattgaatcacaaagaaagtttacctttaaatacttgttaatggctcctagatcatggttataatttttctcaatgggaaaaaaagtcttaaaatttgttttaaataagatcctctaatgtctcgagctttttgattctggaaataatttgctttaaaatataaatcaatcagaaagtgatctaccactgaaatcattctaggaaactagcatgggatgcactgcacaatgttctttcctctaaaggcatgggccccataaactgtggcatctggcagcaggatgccatcagtgcctttagaaagcctaattttggggccgggtgcggtggctcacgcctggtaattcccagcactttgggaggccgaggcgggtggatcacaaggtcaggagttcgagaccagcctggtcaacatggcgaaatcccgtctctactaaaaacacaaaaattagccgggtgtacgtgcctgtagtctcagctacttgggaggctgaggcaggagaatcacttgaacctgggaggcagaggttacagtgagccgagatggcgccatttcactccagcctgggcgacagagcaagactctgtctcaaaaaaaaggaagaaaaagaaagcctaatattgggagaatgtttgtgtaaggattggaaatctgtttatttttaaataagatagcactgatgtgaatcttgtttggaaattacagatactgccattaagcgatgcttttatcttcattaattcattttggtaagcgcctatgcatttctgatggttaggtgccctaggtagtgttaagtatgtccgtgtcctcccttactcccctctcgctccctctaccctctatcccctagggttcttttattaatggaatttctccagttactagagaaaaaaatgacatttgaaaactaaagctcatttatattaatactaaggtcctgtgggcctagtgccgttactcttcccagtgatacctaagattttaagagtaagagaacagaggaaacatggggatgagaggagagaggttttttagacaacatttgtaggacaccctcaaattatatcactgttctctagcgccaatattcccaggtaaattgaccattaaagcaatactcactgacctactagtttattttggtcagctgagtaccatcaggatatttaaccctttaagtggctgttttggggagtagaaaactcaaaggcaacaatacttcttcttgaccagctttgattgggaatggggttattagatcaattcaccttggtcctacactttttagggatgcttgggtgaaccttaacccccccacttataatggaaccatccctgggttccctatatttggggcctatgtggggtagggaattgtttacttggtttcggcagcagccagcccctagaaaggttaagccccggggcttccagatctaaggttagtcccaaaagcctaaatgatttaaagtccaagttgtaatgcttaggcataagccccnctataatacattaaattataggccgagcaattagggaatgttttctaaaacattaaacttgtatttatgtcgactaaaattctaacacaaacttaaaaaatgtgtctcatacatatgctgtactaggcttcatcatgcatttctaaatttgtgtatgatttgaatatatgaaagaatttatacaagagtgttatttaaaattattaaaaaataaatgtatataatttgtacctaaaaaaaaaaaaaaaaaactcnagggggggc

SEQ ID NO: 20421 - DNA, 420 bp, Homo sapiens
  SIMILAR (1)..(132): 1001254mologous to Homo sapiens CGI-72 protein,accession number AF230666,Smith-Waterman Score=223.
tgcaaacatgaatctggagattcttctgggtgtataaaaccccctaaatcaccactttccccagaattaatacaagtcgaggatttgacgcttgtatctcagctttcttcttcagtgataaataaaactagtgagcacagatttttaaaaaatagttatttatcctataagatacattaaaaacagtttgattgtagttatattgtatttttatgaagttgctttttaaaaactcaagtggatatgatagggaaggcttgaaactatttcaggggcaaaaaccatagacatttcttactgatttattgcttagagactactgctggttgagaatcctttccatttaataacacagattccactgtagtttgactctcctcaactcataatccaagcatactgagaggcctgattcataac

SEQ ID NO: 20422 - DNA, 483 bp, Homo sapiens
  SIMILAR (1)..(375): 391254mologous to Homo sapiens dJ901O8.1 (continues in dJ1121G12 (AL109965)),accession number AL078461,Smith-Waterman Score=260.
atgttggtccgttttgagcgctggagtcatcgttatgatgagtggatttactgggatagcaatagattgcgaccctctgagagaccagcactaagaaaagaagggctaaaagatgaggaagatttctttgattttaaagctggagaagaagttctggctcgttggacagactgtcgctattaccctgccaagattgaagcaattaacaaagaaggaatatcgaaaacagaaaaaaaagtgaaattggaagacaaaagctcaacagcatttggtaagagaaaagaaaaagataaggaaagaagagagaagagagacaaagatcactacagaccaaaacagaagaagaagaaaaaaaagaaaaagaaatctaagcaacatggtgtgcatgcagagacgggacaatgtttgtcggaaatacagcagatggaacaagcagaatttggtggggctgcagacatgaccgccaaaactcctgattcttag

SEQ ID NO: 20423 - DNA, 1173 bp, Homo sapiens
  SIMILAR (464)..(667): 981254mologous to Homo sapiens CGI-72 protein,accession number AF151830,Smith-Waterman Score=349.
tcaattctaaaagagaatactgaagaaaggatctaagatgagaaaaagcccccaaatcgccctggaatcacttttgagattggtgctcgtttggaggcactggactacttacaaaaatggtatccatcacgaattgaaaaaattgactatgaggagggcaagatgttggtccattttgagcgctggagtcatcgttatgatgagtggatttactgggatagcaatagattgcgaccccttgagagaccagcactaagaaaagaagggctaaaagatgaggaagatttctttgattttaaagctggagaagaagttctggctcgttggacagactgtcgctattaccctgccaagattgaagcaattaacaaagaaggaacatttacagttcagttttatgatggagtaattcagttgtttaaaaagaatgcacattaaagccatgcccgaggatgctaaggggcaggattggatagctttagtcaaagcagctgctgcagctgcagccaagaacaaaacagggagtaaacctcgaaccagcgctaacagcaataaagataaggataaagatgagagaaagtggtttaaagtaccttcaaagaaggaggaaacttcaacttgtatagccacaccagacgtagagaagaaagaagatctgcctacatcttagtgaaacatttggacttcatgtagagaacgttccaaagatggtctttccacagccagagagcacattatcaaacaagaggaaaaataatcaaggcaactcgtttcaggcaaagagagctcgacttaacaagattactggtttgttggcatccaaagctgttggggttgatggtgctgaaaaaaaggaagactacaatgaaacagctccaatgctggagcaggtatgaaatggtagcatttgatttttttcaaggttcccactggaatgatcacggagctctagtatctacgtaattgaaattccccttttgatcagatatgggaataggaagctaattaattgatgatatatttttaactctgccttctccaaggtatacagataactacagacttcattagtgtttgatttcatagactggcattaaagcctttgtctccaaaatttgaaggcctggagacaggcatcccagggtataagcttccagctggatcacctttaac

SEQ ID NO: 20424 - DNA, 1642 bp, Homo sapiens
  SIMILAR (320)..(1225): 481254mologous to Homo sapiens CGI-72 protein,accession number AF151830,Smith-Waterman Score=532.
ctaaaagatgaggaagatttctttgattttaaagctggagaagaagttctggctcgttggacagactgtcgctattaccctgccaagattgaagcaattaacaaagaaggaacatttacagttcagttttatgatggagtaattcgttgtttaaaaagaatgcacattaaagccatgcccgaggatgctaaggggcaggtgaaatcccagcatccactaagctggtgttgtcctatcgacccagctggatcgtgtaaccagtctatgggaagtgaggattggatagctttagtcaaagcagctgctgcagctgcagccaagaacaaaacagggagtaaacctcgaaccagcgctaacagcaataaagataaggataaagatgagagaaagtggtttaaagtaccttcaaagaaggaggaaactttcaacttgttattagccacaccagacgtagaggaaggaaggaagatctgcctacatctagtggaaacatttgtagggacttcatgttaggaggaacgttccaaagatggtctttccacagccagagagcacattatcaaacaagaggaaaaataatcaaggcaactccgtttcaggcaaagagagctcgacttaacaagattactggtttgttggcatccaaagctgttggggttgatggtgctgaaaaaaaggaagactacaatgaaaccagctccaatgctggagcaggcgactttcacctaaacctcaaagtcagaaaaaaaatgaagctgacattagcagttctgccaacactcagaaacctgcactgttatcctcaactttgtcttcagggaaggctcgcagcaagaaatgcaaacatgaatctggagattcttctgggtgtataaaaccccctaaatcaccactttccccagaattaatacaaagtcgaggatttgacgcttgtatctcagctttcttcttcagtgataaataaaactagtcctccacagcctgtgaatccccctagaccttttcaagcataagtgagcggagaagaagatctcagcgtttaggcaccttaccccatgcctgatgattctgtagaaaaggtttcttctcccctctccagcccactggatggggaaaagtattctcccatccagttcttcaaaaatcagccaagaatcttccagtacccagaggtgcctgatgttgcaacatttgcccacttgagaagctgggaccctgtctcccttcttgacttaagtcgtggttcagaagttacagcaccggtagcctccagattcctcttaccgtaatgaatgtcccagggcagaaaaagaggatacacagatgcttccaaatccttcttccaaagcaatagctgatggaagaggagctccagcagcagcaggaatatcgaaaacagaaaaaaaagtgaaattggaagacaaaagcttcaacagcatttggtatcaggagttgggatttctcagcactgctaatgaagatcccctcttatagtccaataagcttatcaggacttccagagtcatgacatgaacagtttaattgaacccatccactctgggcaggtaagagaaaagaaaaagataaggaaagaagagagaagagagacaaagatcactacagaccaaaacagaagaagaag

SEQ ID NO: 20425 - DNA, 1208 bp, Homo sapiens
  SIMILAR (375)..(740): 311254mologous to Schizosaccharomyces pombe putative asparagine synthase,accession number AL031534,Smith-Waterman Score= 126.
  misc_feature (1)...(1208): n = a,t,c or g
ggcacgagccgtaggctccttcagggcctgagccatcccgcgtgtcttgcgctcggtggaaatgcccagccgagggacgcgaccagaggacagctctgtgctgatccccacccgacaattcgaccccacacaaggaggatctaagcagcaagattaaagaccaaaaaattgtggtggatgaactttctaaccttaagaagattagggaagtatataggcaacaacagaccagcaatatattctttcttgcagaccgaacagaaatgctgtctgagagcaagaatatattggatgaactgaaaaaagaataccaagaaatagaaaacttagacaagaccaaaatcaagaaatagtcaacctgatttcacataacaatgtgtggcatttgttgttctgtaaacttttctgctgagcatttcagtcaagatttaaaagaggacttactatataatcttaaacagcggggacccaatagtagtaaacaattgttaaagtctgatgttaactaccagtgtttattttctgctcacgtcctacacttgaggggtgttttgactacccagcctgtggaagatgaaagaggcaatgtgtttctatggaatggagaaatttttagtggaataaaggttgaagctgaagagaatgacactcaaattttgtttaattatctttcctcctgtaagaatgaatctgagattttgtcactcttctcagaagtacaaggtccctgggtcatttatatattatcaagcatctagtcattatttatggtttggtagggatttttttggtcgccgtagcttgctttggcattttagtaatttgggcaagagtttctgcctctcttcagttgggcacccaaacatctggaattggcaaatcagtggcaagaagttccagcatctggactttttcagaattgatcttaagtctactgtcatttccagatgcattattttacaactgtatccttggaaatatatttctagggagaatattattgaagaaaatgttaatagcctgagtcaaatttcagcagacttaccagcatttgtatcagtgggtagccaaatggaaggccaaactgtatccttggaaaaacctgttgttcctttaaatatggatgttgccacaagctggcattgggagactcatgcagtatttttcccatgtgccacctacaggngaggtacttcaagtctttctta

SEQ ID NO: 20426 - DNA, 2734 bp, Homo sapiens
  SIMILAR (386)..(754): 921254mologous to Homo sapiens putative sialoglycoprotease type 2,accession number AJ295148,Smith-Waterman Score=579.
  misc_feature (1)...(2734): n = a,t,c or g
ctaacggcgggccaggaatttgattttgggggccctataaaaaaaatttttccttgcaagcccggggttgtaaaatttgatccttttaaacgggcgcccccnnnnnnnnnnnnnnaattgtaaaaataagccagcccctttcttcctagtgaagtgggagaaacggtttacactgtccgatgagaaacacttccgttctttggtaaccctgctagggggcgccgctagattccatcctatttctccgatgaaagtatcaggctgtgtaggaagcgtggcagcatctgcttctggggaggcccagggagcttttactcatggcggaaggcaaattgggagtaggcgtcttacatggcaggagcaggaccgagagagggggggtattgagaaggggcaaatcctgtcttcagcagcagacattgctgccacagtacagcacacaatggcatgtcatcttgtgaaaagaacacatcgggctattctgttttgtaagcagagagacttgttacctcaaaataatgcagtactggttgcatctggtggtgtcgcaagtaacttctatatccgcagagctctggaaattttaacaaacgcaacacagtgcactttgttgtgtcctcctcccagactatgcactgataatggcattatgaaatgcatgaatggtattgaaagactacgtgctggcttgggcattttacatgacatagaaggcatccgctatgaaccaaagtatgtggctccttcagggctgagccatcccgcgtgtcttgcgctcggtggaaatgcccagccgagggacgcgaccagaggacagctctgtgctgatccccaccgacaattcgaccccacacaaggaggatctaagcagcaagttggcacccaaacatctggattggcaaatcagtggcaagaagttccagcatctggacttttcagaattgatcttaagtctactgtcatttccggatgcattattttacaactgtatccttggaaatatatttctagggagaatattattgaagaaaatgttaatagcctgagtcaaatttcagcagacttaccagcatttgtatcagtggtagcaaatgaagccaaactgtatcttgaaaaacctgttgttcctttaaatatgatgttgccacaagctgcattggagactcattgcagtaatatttccaatgtgccacctacaagagagatacttcaagtctttcttactgatgtacacatgaaaggaagtaattcagcagttcattgatgtcctgagtgtagcagtcaagaaacgtgtcttgtgtttacctagggatgaaaacctggacagccaaatggaagttttggaaaacgtgtgatagggaaaggcaaatgttggcaatcctgttttctgggggggcttggatttccatggttattggcaaccctgctggaccgtcatattcctttagatgaaccactcgtccttcttaatgtagctttcatagctgaagaaaagaccatgccaactacctttaacagagaagggaataaacagaaaaataaatgtgaaataccttaccctaaaaatttctctaaagatgttgctgctgctgctgctgacagtcctaataaaacatgtcagtgtaccagatcgaatcacaggaagggcgggactaaaggaactacaagctgttagcccttcccgaatttggaattttgttgaaattaatgtttctatggaagaactgcagaaattaagaagaactcgaatatgtcacttaattcggccattggatacagttttggatgatagcattggctgtgcagtctggtttgcttctagaggaattggttggttagtggcccaggaaggagtgaaatcctatcagagcaatgcaaaggtagttctcactggaattgggtgcagatggagcaacttgcagggttattctccgtcatccgtgtccgctttcaagtcgcatgggcttggaaggattggaattaaggaaataatgatggaactgggtcgaatttcctccctagaaatccttggccgtgatgacaggagttattggtgatcatggaaaagaagcaagatttcctttcctgggatgaaaatgttgtctcctttcctaaattcctctgcccgatttggggaaaaagcaaaccttgactttaccccccgaggaattggtgaaaaattaccttttaacgccttgcagcctgtggaacttggtccttacagcctctgctcttctgcccaaacgggccatgcagatttggatcaagaattgcaaaaatggaaaaaattaatgaaaaggcatctgataaatgtggacggctccaaatcatgtccttagaaaatctttctattgaaaaggggaccaaattgtaatgtgattccccatgttaccaaattaaaattagttttttttttaatattttaaaggaaggaaccccgccggcttaactatggtttaatatagtagttttaaagttcatttggttgaattttcattttttcctgtcacagagcttctaaaaccatggaatttccttagtgatagggaatatcttttgttgttcataataagccccttttgatcacacctgagtttatgctaatgcggtgacttagggtgaggtctctaaatagcctttaacacctgcagcttgggaggccaaggcagagggatctcttgagtccaggagtttgagaacagcctgggcaacatgatgaaacctcatctctacc

SEQ ID NO: 20427 - DNA, 499 bp, Homo sapiens
  SIMILAR (255)..(434): 831254mologous to Homo sapiens eukaryotic protein synthesis initiation factor,accession number AF104913,Smith-Waterman Score= 269.
  misc_feature (1)...(499): n = a,t,c or g
gtgggcaggattccgaggtcgagccacgcgtccgcttcatagagtctgacagtccctgttcctctgaagcactttcaaagaaagaactgtctgccggagagctgtataagcgactcgagaaactcattattgaggacaaagcgaatgatgaacagatctttgactgggtagaggctaatctagacgaaatccagatgagttcacctacattccttagagctttaatgactgctgtttgtaaagcagctattatagatttgctgcggatgttttttgattgtctatatgacgaggaggtgatctccgaggatgccttctacaaatgggagagcagcaaggaccctgcagagcagaatgggaagggcgtggctctgaaatctgtcacggcattcttcacgtggctgcgggaagcagaagaggagtctgaggataactaaaacttcaaatacacaaaatgaaacaaaagaaacaatttaagtatttttttaaaaagtttcan

SEQ ID NO: 20428 - DNA, 552 bp, Homo sapiens
  SIMILAR (141)..(410): 971254mologous to Homo sapiens Amino acid sequence of a human RNA-associated protein,accession number Y84430,Smith-Waterman Score=444.
gcagaaacatcgaatgaatgctgaaattcctagtctggtttcttcagtggtgtgtttgtgttttagtacaacctgcaaaagagttactccattgtctaaaaatgcaaatgagaatttccaaatatacaaaatgcctccaagctcaaatagctataactgtaccaaagacatggaagaaaccaaaagatcggacccgaaccactgaagagatgttagaggcagaattggagcttaaagctgaagaggagctttccattgacaaagtacttgaatctgaacaagataaaatgagccaggggtttcatcctgaaagagacccctctgacctaaaaaaagtgaaagctgtggaagaaaatggagaagaagctgagccagtacgtaatggtgctgagagtgtttctgaggccgactcttctaccttcagagtggacactgctgttatcaagcagagagtgccgatcttactcaagtacctagactcagatacagagaaggaactgcaagcactttatgcactacaagcatcgatagtaaaacttgatcaacctgcca

SEQ ID NO: 20429 - DNA, 1260 bp, Homo sapiens
  SIMILAR (1134)..(1229): 371254mologous to Homo sapiens eIF4GII,accession number AF012072,Smith-Waterman Score=51.
atggctcctaaaacaaaattttttaccaatgcaaatttcactttaaacattggttatacaccctatgcctgggagaagccaaaaccagatccagtgttaaagtctccttccccagtccttaggctagtcctcagtggagagaagaaagaacaagaaggccagacatctgaaactactgcaatagtatccatagcagagcttcctctgcctccatcacctaccactgtttcttctgttgctcgaagtacaattgcagcccccacctcttctgctcttagtagccaaccaatattcaccactgctatagatgacagatgtgaactctcatccccaagagaagacacaattcctatacccagcctcacatcttgcacagaaacatcagaccctttaccaacaaatgaaaatgatgatgatatatgcaagaaaccctgtagtgtagcacctaatgatattccactggtttctagtactaacctaattaatgaaataaatggagttagcgaaaaattatcagccacggagagcattgtggaaatagtaaaacaggaagtattgccattgactcttgaattggagattctcgaaaatcccccagaagaaatgaaactggagtgtatcccagctcccatcaccccttccacagttccttcctttcctccaactcctccaactcctccagcttctcctcctcacactccagtcattgttcctgctgctgccactactgttagttctccgagtgctgccatcacagtccagagagtcctagaggaggacgagagcataagaacttgccttagtgaagatgcaaaagagattcagaacaaaatagaggtagaagcagatgggcaaacagaagagattttggattctcaaaacttaaattcaagaaggagccctgtcccagggctaactaaggcagaagaaggaaatgaagaggaaggaccaaatgccacgaacaaatcagatttccaggaggtttttagtttgcccagatccatcacaggaatcactatctatggcagctatagacatacagaatgtacttatgaaataacaaggcttgataagtcaaaattactctttgatctcaggttactaggaaataagaaggcccaagaagagggagggagagagatggaagaactgccggttggtggagcagtcagaacatacatatttctcgatcaagttggccgtcttacatggtttgtggtgccccaaaacaattacaacagtaacatcaaagatcactga

SEQ ID NO: 20430 - DNA, 396 bp, Homo sapiens
  SIMILAR (220)..(345): 951254mologous to Homo sapiens Amino acid sequence of a human RNA-associated protein,accession number Y84430,Smith-Waterman Score=222.
ggcacgagcattcccagcgtatcagaaaaccattgttttagcctaatggctctaagagtagcccaggagaagctgccatggatgagattggacttctgcgggttccaaagctggtgcttaccgtttcagctgatgtaacttttcagtaaaaatttttgttatcttttgtggcagggaatgctctggaacatgtattaagctttcttttgctttttcatgcagatcaaccaacccaaattgccaatgcgaactctggatcctcgaattttgcctcgaggaccagactttacaccagcctttgctgattttggaaggcagacacctggtggaagaggcgtacctgtaagtgcaagttccctacaactcacttagttagacactggcacagactccatg

SEQ ID NO: 20431 - DNA, 6181 bp, Homo sapiens
  SIMILAR (3992)..(4744): 771254mologous to Homo sapiens eIF4GII,accession number AF012072,Smith-Waterman Score=912.
tttcgtagaaaatccaccggcatcgcctgagccccgctaccgagaagggcgccgcttcctccggggagggggataaagatcccccgccgccggcccatgaggatattgccgtgaaaggcacagcgactgcagcaggaaccggacccggcaccggagcggcggcggcggcggcggcggcagcggtcccccctcctcacccgaacatcagggccctccagactcaggcgccccaacaaattcctagaggacctgtgcaacaacctcttgaggatcgaatcttcactcccgctgtctcagcagtctacagcacggtaacacaagtggcaagacagccgggaacccctaccccatccccttattcagcacatgaaataaacaaggggcatccaaatcttgcggcaacgcccccgggacatgcatcgtcccctggactctctcaaaccccttatccctctggacagaatgcaggtccaaccacgctggtataccctcaaacccctcagacaatgaattcacaacctcaaacccgttctccgtttttcccaaaaggcctcaaaatacagcctccctagagctaccatcccgaacagcaagtccttcccattcgtccctggtgcacagacacccactgcagtgtaccagggttaattcaggcacatcatggatgggttaaccatctgcccttgccgtacccagtgccccaggggcctcagtactgtataccacagtaccgtcatagtggccctccttatgttgggcccccccaacaatatccagttcaaccaccggggccaggtcctttttatcctggaccaggacctggggacttccccaatgcttatggaacgcctttttacccaagtcagccggtgtatcagtcagcacctatcatagtgcctacgcagcaacagccgcctccagccaagagagagaaaaaaactataagaattcgggatccaaaccagggaggtaaagacataacagaggagattatgtctggaggtggcagcagaaatcctactccacccataggaagacccacgtccacacctactcctcctcagcagctgcccagccaggtccccgagcacagccctgtggtttatgggactgtggagagcgctcatcttgctgccagcacccctgtcactgcagctagcgaccagaagcaagaggagaagccaaaaccagatccagtgttaaagtctccttccccagtccttaggctagtcctcagtggagagaagaaagaacaagaaggccagacatctgaaactactgcaatagtatccatagcagagcttcctctgcctccatcacctaccactggtttcttctgttgctcgaagtacaattgcagcccccacctcttctgctcttaggtagccaaccaatattcaccactgctatagatgacaggatgtgaactctcatccccaagagaagacacaattcctatacccagcctcacatctttgcacagaaaacatcagaccctttaccaacaaatgaaaatgatgatgatatatgcaagaaaccctgtagtgtagcacctaatgatattccactggtttctagtactaacctaattaatgaaataaatggagttagcgaaaaattatcagccacggagagcattgtggaaatagtaaaacaggaagtattgccattgactcttgaattggagattctcgaaaatcccccagaagaaatgaaactggagtgtatcccagctcccatcaccccttccacagttccttcctttcctccaactcctccaactcctccagcttctcctcctcacactccagtcattgttcctgctgctgccactactgttagttctccgagtgctgccatcacagtccagagagtcctagaggaggacgagagcataagaacttgccttagtgaagatgcaaaagagattcagaacaaaatagaggtagaagcagatgggcaaacagaagagattttgggattctcaaaacttaaattcaagaaggagccctgtcccagcttaaatagctataactgtaccaaagacatggaagaaaccaatagatcggacccgaaccactgaagagatgttagaggcagaattggagcttaaagctgaagaggagcttttcattgacaaagtacttgaatctgaacaagataaaatgagccaggggtttcatcctgaaagagacccctctgacctaaaaaaagtgaaagctgtggaagaaaatggagaagaagctgagccagtacgtaatggtgctgagagtgtttctgagggtgaaggaatagatgctaattcacgctccacagatagttctggggatggggttacattttcatttaaaccacaatcctgtaagcctactgatactgaagggaagaagcagtatgacagggagtttctgctggacttccagttcatgcctgcctgtatacaaaaaccagagggcctgcctcctatcagtgatgtggttcttgacaagatcaaccaacccaaattgccaatgcgaactctggatcctcgaattttgcctcgaggaccagactttacaccagcctttgctgattttggaaggcagacacctggtggaagaggcgtacctttgttgaatgttgggtcacgaagatctcaacctggccaaagaagagaacccagaaagatcatcacagtttctgtaaaagaagatgtacacctgaaaaaggcagaaaatgcctggaagccaagccaaaaacgagacagccaagccgatgatcccgaaaacattaaaacccaggagctttttagaaaagttcgaagtatcttaaataaattgacaccacagatgttcaatcaactgatgaagcaagtgtcaggacttactgttgacacagaggagcggctgaaaggagttattgacctggtctttgagaaggctattgatgaacccagtttctctgtgcgttacgcaaacatgtgtcgatgtctagtaacgctgaaagtacccatggcagacaagcctggtaacacagtgaatttccggaagctgctactgaaccgttgccagaaggagtttgaaaaagataaagcagatgatgatgtctttgagaagaagcagaaagaacttgaggctgccagtgctccagaggagaggacaaggcttcatgatgaactggaagaagccaaggacaaagcccggcggagatccattgggcaacatcaagtttattggagaactctttaaactcaaaatgctgactgaagccatcatgcatgactgtgtggtgaagctgctaaagaaccatgatgaagaatccctggagtgcctgtgtcgcctgctcaccaccattggcaaagacttggactttgaaaaagcaaagccacgtatggaccagtactttaatcagatggagaaaattgtgaaagaaagaaaaacctcatctaggattcggttcatgcttcaagatgttatagacctaaggctgtgcaattgggtatctcgaagagcagatcaagggcctaaaactatcgaacagattcacaaagaggctaaaatagaagaacaagaagagcaaaggaaggtccagcaactcatgaccaaagagaagagaagaccaggtgtccagagagtggacgaaggtgggtggaacactgtacaaggggccaagaacagtcgggtactggacccctcaaaattcctaaaaatcactaagcctacaattgatgaaaaaattcagctggtacctaaagcacagctaggcagctggggaaaaggcagcagtggtggagcaaaggcaagtgagactgatgccttacggtcaagtgcttccagtttaaacagattctctgccctgcaacctccagcaccctcagggtccacgccatccacgcctgtagagtttgattcccgaaggaccttaactagtcgtggaagtatgggcagggagaagaatgacaagccccttccatctgcaacagctcggccaaatactttcatgaggggtggcagcaagtaaagacctgctagacaatcagtctcaagaagagcagcggagagagatgctggagaccgtgaagcagctcacaggaggtgtggatgtggagaggaacagcactgaggctgagcgaaataaaacaagggagtcagcaaaaccagaaatttcagcaatgtcagctcatgacaaggctgcattatcagaagaggaactggagaggaagtcgaaatctatcattgatgaatttctacacattaatgattttaaggaagccatgcagtgtgtggaagagctgaatgcccagggcctactacatgtttttgtgagagtgggagtggagtccaccctggaaaggagccagatcaccagggatcacatgggccaactactctatcagctggtacagtcaggaaaaacttcagcaaacaggactttttcaaaggtttttcagaaactttggaattggcagatgacatggccattgatattccccatatttggttgtaccttgctgaactggtgacccccatgttaaaagaaggtggaatctccatgagagaacttaccatagaatttagcaaacctttacttcctgttggaaggagctggggtcttgctatctgaaatattgcacctactatgcaaacaaatgagccataagaaagtgggagccttatggagggaggctgacctcagctggaaggactttttaccagaaggagaagatgtacataattttcttttggagcagaagttggacttcattagagtctgacagtccctgttcctctgaagcactttcaaagaaagaactgtctgccgaagagctgtataagcgactcgagaaactcattattgaggacaaagcgaatgatgaacagatctttggactgggtagaggctaatctagacgaattcaggatgagttcacctccatcccttagagctttaatgactgctgtttgtaaagcagctattatagccgactcttctaccttcagagtggacactgctgttatcaagcagagagtgccgatctacctcaaggtacctagactcagatacagagaaggaactgcaagcactttatgcactacaagcatccgatagtaaaacttgatcaaccctgccaatttgctgcggatgttttttgatgggtctatatgacgaggaggtgatctccgaggggtgccttctacaatggggtgtgcaggcaaggggcccccgcagagcagaaatgggaagggccgtggcctctgaaatcctgtcacggcattcttcaccgtggcctgcgggaaacagaaagaggagtcctgaggataacctaaaacttcaaatacacaaaatgaaacaaaagaaccaattttaagtattttttttaaaaagtttcacgtccttcgcccaatcacagtgcagcaaggccaattyytcgcagaaacccccacgtgttgcacgagtgggagaggggaaagagaaaaaaaggtgatcatggaggaaaaaggtactggataaaagtaaacttcaaaccttagggcgggagcactaaaaccaaaatacatgtattatttatagaaaatattttctgttttaatcttttctttttaaacaaggactcatacttaaaaaaatgtttagcaaaaaaaaaaaaaagttgagaacttttaatttattttaaggactgcaaatgccagtgtaattttttaatttgcagtttctgtaaacaacttgtataatagaaaagcagagaatgaaaatttccctccccttcaagatgcacctcatgtttgttttaaggtatagccatttagtcccagatttgagaaagtttggggtgaaccaaggttaagaaagattttttttttttttggccatcaaatcatttctgcctgcctctcagcttgcttcagaaaattttaaaaaaatcacaatagtaatcaaaacatacataacattgaaacagaaggaaatgctgtggacccacagaactcccaagaattgtttaaaaaaaaaaaagtgctaccctgagaaaagtactcttaatatctcttgaaatctttagagcaactttaaggcttgtaaatacatagaacaaatatttaaaaaaacaaaaagaaattgactcagtactatttcttttcactttgaaaatataaagaacaaaataaagacaaacattgcaagtttaaaaaaaaaaaaaaaaaag

SEQ ID NO: 20432 - DNA, 327 bp, Homo sapiens
  SIMILAR (1)..(78): 1001254mologous to Homo sapiens Human prostate cancer- associated protein 109,accession number Y48412,Smith-Waterman Score =139.
gagaagacgaaagccaacatcaagtgggtgaaggagaacaaggaggtggtgctccagtggttcacagaaaacagcaaatagtccccagcccttgaagtcacccggcacctgtcgcccagtccctgggctgatctcagggaagcccagctccagggccagatgagcagaagctctcgatggacaatgaacggccttgctgggggccgccctgtaccctctttcacctttccctaaagaccctaaatctgaggaatcaacagggcagcagatctgtatatttttttctaagagaaaatgtaaataaaggatttctagatgaaaaaaaaa

SEQ ID NO: 20433 - DNA, 2808 bp, Homo sapiens
  SIMILAR (1)..(1746): 841254mologous to Homo sapiens aminopeptidase N precursor (EC 3.4.11.2),accession number M22324,Smith-Waterman Score=2520.
atggccaagggcttctatatttccaagtccctgggcatcctggggatcctcctgggcgtggcagccgtgtgcacaatcatcgcactgtcagtggtgtactcccaggagaagaacaagaacgccaacagctcccccgtggcctccaccaccccgtccgcctcagccaccaccaaccccgcctcggccaccaccttggaccaaagtaaagcgtggaatcgttaccgcctccccaacacgctgaaacccgattcctaccgggtgacgctgagaccgtacctcacccccaatgacaggggcctgtacgtttttaagggctccagcaccgtccgtttcacctgcaaggaggccactgacgtcatcatcatccacagcaagaagctcaactacaccctcagccagggcacagggtggtcctgcgtgccccccgacattgacaagactgagctggtggagcccaccgagtacctggtggtgcacctcaagggctccctggtgaaggacagccagtatgagatggacagcgagttcgagggggagttggcagatgacctggcgggcttctaccgcagcgagtacatggagggcaatgtcagaaaggtggtggccactacacagatgcaggctgcagatgcccggaagtccttcccatgcttcgatgagccggccatgaaggccgagttcaacatcacgcttatccaccccaaggacctgacagccctgtccaacatgcttcccaaaggtcccagcaccccacttccagaagaccccaactggaatgtcactgagttccacaccacgcccaagatgtccacgtacttgctggccttcattgtcagtgagttcgactacgtggagaagcaggcatccaatggtgtcttgatccggatctgggcccggcccagtgccattgcggcgggccacggcgattatgccctgaacgtgacgggccccatccttaacttctttgctggtcattatgacacaccctacccactcccaaaatcagaccagattggcctgccagacttcaacgccggcgccatggagaactggggactggtgacctaccgggagaactccctgctgttcgaccccctgtcctcctccagcagcaacaaggagcgggtggtcactgtgattgctcatgagctggcccaccagtggttcgggaacctggtgaccatagagtggtggaatgacctgtggctgaacgagggcttcgcctcctacgtggagtacctgggtgctgactatgcggagcccacctggaacttgaaagacctcatggtgctgaatgatgtgtaccgcgtgatggcagtggatgcactggcctcctcccacccgctgtccacacccgcctcggagatcaacacgccggcccagatcagtgagctgtttgacgccatctcctacagcaagggcgcctcagtcctcaggatgctctccagcttcctgtccgaggacgtattcaagcagggcctggcggctgtgaacaaccggtccatccaactccccaccaccgtgcgggacatcatgaaccgctggaccctgcagatgggcttcccggtcatcacggtggataccagcacggggaccctttcccaggagcacttcctccttgaccccgattccaatgttacccgcccctcagaattcaactacgtgtggattgtgcccatcacatccatcagagatggcagacagcagcaggactactggctgatagatgtaagagcccagaacgatctcttcagcacatcaggcaatgagtgggtcctgctgaacctcaatgtgacgggctattaccgggtgaactacgacgaagagaactggaggaagattcagactcagctgcagagagaccactcggccatccctgtcatcaatcgggcacagatcattaatgacgccttcaacctggccagtgcccataaggtccctgtcactctggcgctgaacaacaccctcttcctgattgaagagagacagtacatgccctgggaggccgccctgagcagcctgagctacttcaagctcatgtttgaccgctccgaggtctatggccccatgaagaactacctgaagaagcaggtcacacccctcttcattcacttcagaaataataccaacaactggagggagatcccagaaaacctgatggaccagtacagcgaggttaatgccatcagcaccgcctgctccaacggagttccagagtgtgaggagatggtctctggccttttcaagcagtggatggagaaccccaataataacccgatccaccccaacctgcggtccaccgtctactgcaacgctatcgcccagggcggggaggaggagtgggacttcgcctgggagcagttccgaaatgccacactggtcaatgaggctgacaagctccgggcagccctggcctgcagcaaagagttgtggatcctgaacaggtacctgagctacaccctgaacccggacttaatccggaagcaggacgccacctctaccatcatcagcattaccaacaacgtcattgggcaaggtctggtctgggactttgtccagagcaactggaagaagctttttaacgattatggtggtggctcgttctccttctccaacctcatccaggcagtgacacgacgattctccaccgagtatgagctgcagcagggatggacacctgccgcagccctgaccatcattacacttccgatagctgagggccacacaactgtgatgagaggaatctcctctcacttccccagctcccgagcccccagggcagacctcgactaccctgtgctcctatga

SEQ ID NO: 20434 - DNA, 239 bp, Homo sapiens
  SIMILAR (67)..(237): 1001254mologous to Homo sapiens aminopeptidase N precursor (EC 3.4.11.2),accession number M22324,Smith-Waterman Score=296.
ggcgcctcagtcctcaggatgctctccagcttcctgtccgaggacgtattcaagcagggcctggcggctgtgaacaaccggtccatccaactccccaccaccgtgcgggacatcatgaaccgctggaccctgcagatgggcttcccggtcatcacggtggataccagcacggggaccctttcccaggagcacttcctccttgaccccgattccaatgttacccgcccctcagaattcaa

SEQ ID NO: 20435 - DNA, 654 bp, Homo sapiens
  SIMILAR (265)..(651): 1001254mologous to Cloning vector pSacBII SacB,accession number U09128,Smith-Waterman Score=695.
atgcaggctgcagatgcccggaagtccttcccatgcttcgatgagccggccatgaaggccgagttcaacatcacgcttatccaccccaaggacctgacagccctgtccaacatgcttcccaaaggtcccagcaccccacttccagaagaccccaactggaatgtcactgagttccacaccacgcccaagatgtccacgtacttgctggccttcattgtcagtgagttcgactacgtggagaagcaggcatccaatggtgtcttgatccctaaacagcagcaaaacgaaaaataccaagtgcctcaattcgatcaatcaacgattaaaaatattgagtctgcaaaaggacttgatgtgtgggacagctggccgctgcaaaacgctgacggaacagtagctgaatacaacggctatcacgttgtgtttgctcttgcgggaagcccgaaagacgctgatgacacatcaatctacatgttttatcaaaaggtcggcgacaactcaatcgacagctggaaaaacgcgggccgtgtctttaaagacagcgataagttcgacgccaacgatccgatcctgaaagatcagacgcaagaatggtccggttctgcaacctttacatctgacggaaaaatccgtttattctacactgactatccg

SEQ ID NO: 20436 - DNA, 3728 bp, Homo sapiens
  SIMILAR (1356)..(1697): 1001254mologous to Homo sapiens aminopeptidase N precursor (EC 3.4.11.2),accession number M22324,Smith-Waterman Score=599.
  misc_feature (1)...(3728): n = a,t,c or g
tggatctcctctctccaggcggagcgtgcccctgcccagtccagtgaccttcgcctgttggagccctggttaatttttgcccagtctgcctgttgtggggctcctcccctttggggatataagcccggcctggggctgctccgttctctgcctggcctgaggctccttgagccgcctccccaccatcaccatggccaagggcttctatatttccaagtccctgggcatcctggggatcctcctgggcgtggcagccgtgtgcacaatcatcgcactgtcagtggtgtactcccaggagaagaacaagaacgccaacagctcccccgtggcctccaccaccccgtccgcctcagccaccaccaaccccgcctcggccaccaccttggaccaaagtaaagcgtggaatcgttaccgcctccccaacacgctgaaacccgattcctaccaggtgacgctgagaccgtacctcacccccaatgacaggggcctgtacgtttttaagggctccagcaccgtccgtttcacctgcaaggaggccactgacgtcatcatcatccacagcaagaagcttaacttcccccctaagccaggggcacagggtggtcctgcgtggtgtgggaggctcccagccccccgacattgacaagactgagctggtggagcccaccgagtacctggtggtgcacctcaagggctccctggtgaaggacagccagtatgagatggacagcgagttcgagggggagttggcagatgacctggcgggcttctaccgcagcgagtacatggagggcaatgtcagaaaggtggtggccactacacagatgcaggctgcagatgcccggaagtccttcccatgcttcgatgagccggccatgaaggccaggtttcaacatcacgcttattccaccccaagggaccttgacagccctgttccaacattggtttcccaaaggttcccagcaccccacttccagaagaccccaactggaatgtcactgagttccacaccacgcccaagatgtccacgtacttgctggccttcattgtcagtgagttcgactacgtggagaagcaggcatccaatggtgtcttgatccggatctgggcccggcccagtgccattgcggcgggccacggcgattatgccctgaacgtgacgggccccatccttaacttctttgctggtcattatgacacaccctacccactcccaaaatcagaccagattggcctgccagacttcaacgccggcgccatggagaactggggactggtgacctaccgggagaactccctgctgttcgaccccctgtcctcctccagcagcaacaaggagcgggtggtcactgtgaattgctcatgagctggcccaccagtggttcgggaacctggtgaccatagagtggtggaatgacctgtggctgaacgagggcttcgcctcctacgtggagtacctgggtgctgactatgcggagcccacctggaacttgaaagacctcatggtgctgaatgatgtgtaccgcgtgatggcagtggatgcactggcctcctcccacccgctgtccacacccgcctcggagatcaacacgccggcccagatcagtgagctgtttgacgccatctcctacagcaagggcgcctcagtcctcaggatgctctccagcttcctgtccgaggacgtattcaagcaagggcctgggcgtcctaacttccacaacttttggcctaccagaacaccatctacctgaacctgtgggaccacctgcaggaggctgtgaacaaccggtccatccaactccccaccaccgtgcgggacatcatgaaccgctggaccctgcagatgggcttcccggtcatcacggtggataccagcacggggaccctttcccaggagcacttcctccttgaccccgattccaatgttacccgcccctcagaattcaactacgtgtggattgtgcccatcacatccatcagagatggcagacagcagcaggactactggctgatggatgtaagagcccagaacggatctcttcagcacatcaggcaatgagtgggtcctgctgaacctcaaggtgacgggctattaccgggtgaactacgacgaatagaactggaggaagattcagactcagctgcagagaagacccactcggcccatcccctgtcatcaatcgggcacagatcattaatgacgccttcaaccctggccagtgcccattaaggtccctgttcacttctgggcgctggaacaacaccctctttcctggatttgaaggaggagacagtaacatgccctggggaggccgccctgagcagcctgagctacttcaagctcatngtcnngttggaccgctccgaggtctatggccccatgaagaactacctgaagaagcaggtcacacccctcgttcattcacttcagaaaataataccaccacctgggaggggagatcccaggaaaacctggatgggaccagttacagcgaggttaatggccatcaggcaccgcctggttccaacgggtttccaggagtgtgagggagatggtctctgggcctttttcaaggcagtgggatgggaggaaccccaataattaacccgatccaccccaacctgcggtccaccgtcttactgcaacgctatcgcccagggcggggaggaggagtggggacttcgcctggggagcagttccgaaatgccacactggtcaatgaggcttgacaagttccgggcagccctggggcttgcagcaaagagttgtggatcacgtgaacaggttacctgagcttacaccctggaacccggattttattcccggaaggcaggacggcaacctctaccatcatcaggcattaccaacaacgtcattgggcaaggtctggtctgggacgtttgtcacgagcaactggaagaagctttttaacgatttatggtggtggttcgtctcctttctccaccctcatccagggcagtgacacgacgatttctccacctgagtatgagctgcaggcagctggagcagttcaagaaaggcaacgaagaaaacaggcttcggctcaggcacccgggcccctgagcaaagccctggacgaagaccgaaagccaacctcatccaggcagtgacacgacgattctccaccgagtatgagctgcagcagtggttcacagaaaaaacagcaaaataagtccccaagccccttgaaggtcacccgggcccccatgcaagggtgcccaacatgtgtcccaatcccagcgggctgggtgcaggggccttccattccttggaagcccgagggcaccaggtgtccttcccccttcaaagggacaaaagtctcccagccccacgttctctctggcctgtgagccaagtctagttccctgatgacccccaggctgcctgagcaccctccccagcccccntgccccttcatgccaaacccccgccctaaggcctgggcatgggcacctgttcgccccagtgccctgggggttggatctcagggaagccaagctccaagggccagatgagcagaagctctcgatggacaatgacacggccttgctggggggccgccctgtaacctctttcaactttccctaaagacccctaaatctgaggaatcacacagggccagcacgatctgtatatttttttctaagagaaaatgttaaattaaagggttttctcgatgaaaaaaaaaaaaaaaaaaaaaacactt

SEQ ID NO: 20437 - DNA, 429 bp, Homo sapiens
  SIMILAR (183)..(377): 891254mologous to Felis catus glyceraldehyde-3-phosphate dehydrogenase,accession number AB038241,Smith-Waterman Score=298.
caccccaggccaagatcatccatgacaactttggtactgtggagggactcgtgaccacagtccacaccatcactgccacccagaaaactgtggatggcccctccaggaaactgtgtcataacagccgcagggctctccagaacatcatccttgcctctaccggcactgccaagcctgtgggcaagggcatcctggcctacactgagcaccaggctgtctcctccgacttcaacagtgacacccactcctccacctttgatactggggctggcattgccctcaatgaccactttgtcaagcttatttcctgttatgacaatgaatttggctacagcaacagggtggtggacttcatggcccacatggcctccaaggagaacctgagctccacaggactcaatgaaaaagcaactgtaacagaagagatag

SEQ ID NO: 20438 - DNA, 4466 bp, Homo sapiens
  SIMILAR (3888)..(4010): 921254mologous to Homo sapiens glyceraldehyde 3-phosphate dehydrogenase,accession number M28283,Smith-Waterman Score=211.
ctcactgccggcttcctcactggaatgtcgtaagctcgcacaatgttcaccagcagctttatgtctccatcagacaggttttgggctgtcaccttcttccgaccttttctccttggccgcagtggtcgcttttgttctgccagcttgaaaaggcttaggcccaaaatgctttcacggagatgatatgcaagaaacacttccagctgtggtgctgcaaccaggtttcctcgtccaccccagaagcttgtgggtggggtctcagccacctctactgccatgcgacaggagagtaagggaatgtctggcactgggagactgatattgggaacttcttcttctactatcatatcagcaagaagaaaatattgttttgcaattaagaaacgatttatcactgattctctaacctgctggaggtacttggctactatggccctatgggtgtctatgtgttccttggtttctattacatttctgtctcgtaaccgtttctcatagtcctggaataccttttccataatttctcggtcatagactggaacttgcttataatttcggaattctggcacctcttggcttctaagatgaagaagcctaaatcgtttggatctatttaattcttgatctgaaacaaagttaaactcctgttgcagctgctccagtctaaagaaatcagggacataggattcaccactggtagcaaccgagataagctgcatcaaaggggcattgttggggtcatttgggtcgagcttggactctgctgcccacttggccaattttttcatgtctgtcagtcctgatgtgccaatagatgagatggcatctgctttcttcaaagcactccgaaatccgatgttctgctgtgacaatggaggaattaaaggtatcccgttttctccaatggcccatgccacactatgagacactttccctgaggtcatcagagtcagctggttactgccatcagcttcaaatgagaagggcactccacttccaactccctcgtggtccagtgtcacatgctgattactgctaaactccacttcttcagtaggagcccttccagtgacaacagtagtctcaggaataggcagaaacacttctgctagcaaggtgggactactgtgtccgacagtttcatagaccttctgcttgtagaactgccttggcattcttatctcaagcctggctagaagctctgagcccatcagtggaggcatggctgggcacctgcaggaggggaggccttcttgccttctctcctgtctttctgagtctgccagtgggtgtctcctggcccacttcctttccttcctgcctgcctcattactgtcttctgctcttccttctagctctctatccggtcttctcatgttaatcttggtcttcctgatatcagcttttcctactgctaagaggacagaggaagaggagcccttcaagtgttccaggccatcagcctcagcagaagccccagagcagatggaatagagagtccacgtggaccccacagcaggggcagggacctcacaggggctgtgtccagtgaccacgtatctgaaggctgccccagttctcctctccagtgcagagttgggcaactctctacttttacctcctgggttcattagaagagctgcccaccacagcttgggaacaggaccctggaggcgctggccttggtcagccaccccctttaattggtcaattgtggtaaggtccagggggtccttgaagtggggcttatgtggccaggatggcatctgaagtgttaaactctccggccagttgactatttgcaaattgaaaatctgcccaaagtgaactcggaagtctgctcctagtggccgactgactgtcctggacacctccttgttgttgaacagcacttttaagtacactgagcgcttctttacatcctcccttctcgagacctccgctctggggcactggtcattgggtgttacgcttcctgccaggcttagctccgggaccagcgtgggctcccaaggcctcctcctgctctgggctgctctctccctcacctcctgctctatcactgcccgatcagtgggctctggagggctgggcttcacaaggtcctcctcgggatacggctctgcaatctcatcaccgggatgttcttctgctgcttgtttccttttcttcttcttggccctctgttgagttagaggcaacatgatatcaaacaggaattttggaatttcatttaagagcacagtcttcatagccagatggacttgcactttcctccaggccttccactgttgtaacgacgttctgtattcttccatcttctgtgcgtactcctccgtgtgctcttctaacagttcacttatttcagcttgaatttctgcttcatatgcttcttcatctgctttctggtcagctttttcctttctcaaaacaagtttcaagggagtatttgtaaatctctggaactctcgaagggatttcatctctttccaaacttttatgatagtcttaagcaatgttctatctttttcttgttcagcatcacggaattttcttgtttgtcgaatttcagatttatactcattgatggttttttggatggtatcgagagactgatgaggtttttctggatcaaggccagtctgaacagcatttcttaaagcttggagcttatcagtaagaaatttcgccttgtttctctggtgtcttgcaaggtactggtcatataactgggccagcttggctgccaaaacatgctctcggctaaaacagggatgatgagtgaagattaaccctgaaatatcaatgtccagttggaaatttccaggagggtctccagatctgatcacatgctgactactgtgaacgtattttacagcctttttatacagtgtttcaagctctgccttaatgctctgctcctgtgttagtactggcggccttgaaggaaatggcttgatggggtttggcagagctaggatcctgccgtcatctccaaaccatcttctttcggggtcctgcatcagcaatctgttctccatgatgttctgattggtgcgtgccacctctggtcttaccccggtgtaaaggccttcatcttccaggaacctgggctgtacattctcaggaagctttttatatgtagggactgtctgcctactgggtatgaagagcatttctctttccatctgcagccgatcatggatgctttcataatctgcaggtctgactgctacaaaatcgtcagccacgtgatctaagcccaataggaagtcctcggcatcatcaccattaagcagttcttcctcatccatttcctttcctcctccttgtgcaggtggttcttcttcttccccttcctcctcctcttgattagttcccgctctatgtcttgcttttggtttttcctctgatccttctggttcgggatcaaagttgaaagtaaagaagttataggcctcttctgcagaagggaagccaggtggaacctggggtttaggcttgatttttcgtgcagaatcatggaacttgactcttgagtaactttgggagtcaacttcttgttgagtcctttctacctctttccctggcacagagctgaatccccctatatccccactggctgtcaactccactgagctcctcaagggtgagctgtcactgtcatcactgggtgttctgagcctatcggacacctctgtgccaaattcagtctccaattctttcttactgggacttcgtaagcgtctgggccgaggagtggggatttcctgcagcaatgcactttctgctttggacctcgctgcttgcaatttctccctcatgcgtcccctcatggaaaattctgcaaagcctgttctggaagttgaaggaattggaggtaagccttcgatgctggggctggcattgccctcagtgaccactttatcaagctcatttcctggtatgacaatgaatttggctatagcaatagagtggtggacctcatggcccacatggcctccaaggagtaagaccctccgtgggcctctccggactgtcatactcaggaggcgggtcttgggctcctcctgcacaggctcctgggggttgccaaggtgggatttttcggacaccatttccttggggacagcagttggtggctgtttctttcttggctgtcttcgaacctttgagttcttattctgtcttcccatgtctgcatcctcatcattttcaatgaactcctctgtaattatttttactttttcttccctgggattcattttggctgggatgggtcccctctctcctggctcccatccatcttctatccctgtctgttctgagttttgcccaagaagttcatctctgtgcactgcatcaccaagactatctgggcacctggagtcatgggctttgaccagtgaggggtataaataggagacatgtgataggatggtggtgccctcttcatcttccaccat

SEQ ID NO: 20439 - DNA, 1211 bp, Homo sapiens
  SIMILAR (318)..(809): 531254mologous to Pichia ciferrii glyceraldehyde 3-phosphate dehydrogenase,accession number AF053300,Smith-Waterman Score=366.
cagacagccgcatcttcttttgcgtcgccaggcgagccacatcgctcaaacaccatggggaaggtgaaggccctagtcaacggatttgatcgtattgggcgcctggtcaccagggctgcttttaactctggtaaaggggatattgttgccatcaatgaccccttcattgacctcaactacatggtttacatgttccaatatgattccacccatggcaaattccatggcaccgtcaaggctgagaacgggaagcttgtcatcaatggaaatcccatcaccatcttccagggagcgagatccctccaaaatcaagtgggggtgacactggcgctgagtacgtcgtgggagtccactgggcgtcttcaccaccatgggagaaggctggggctcattttgcaggggggagccaaaagggtcattcatcttttgccccctctactgaagccatcatgttcatgatgaaagtgaattatgagaagtatgacaacagccttaagatcatcagcaatgcctcctgtaccaccaactgcttagcgcccctggccaaggtcatccatgacaactctggtattgttgaaagactcatgattacagtccatgtcatcactaccacccagaaaactgtggatggcccttgcaggaaactgcggcctgatggccacagggctctccagaacatcatacctgcatctactagcactgccaaggcaatggtcaaggtcatccctgagctgaacaagaagctcactggcatggcctcccatgtccccactgccaaggtgttggtcgtggacccgacctgccatctggaaaacctgccaaatattatgacatcaagaagatgatgaagcaggcttcagaggatcctatcaagggcatcctgggctacactgagcaccagattgtctcctccgacttcaacagtgacacacagtcttccacctttgatgctggggctggcattaccctcaacgaccactttgtcaaggctcatttcctggtatgacaatgaatttggctacagcaacagtgtggtggacctcatggcccacgtggcctccaaggagctttctggttactctttgaaagtttcttttgctgtgcagaagctctttagtttaattagatccaatttgtcaattattgcttttgatgcaattgttttcggtgtctttgtcatgaaatctttgcctgtttctatatgcagaatg

SEQ ID NO: 20440 - DNA, 603 bp, Homo sapiens
  SIMILAR (92)..(352): 891254mologous to Homo sapiens SIB 121 intestinal mucin,accession number R12603,Smith-Waterman Score=443.
  misc_feature (1)...(603): n = a,t,c or g
cccactgccaacgtgtcagtggtggacctgacctgccgtctataaaaacctgccaaatatgatgacatcaagaaggtggtgaagcaggcgtcggagggccccctcaagggcatcctgggctacactgagcaccaggtggtctcctctgacttcaacagcgacacccactcctccacctttgacgctggggctggcattgccctcaacgaccactttgtcaagctcatttcctggtatgacaacgaatttggctacagcaacagggtggtggacctcatggcccacatggcctccaaggagtaagacccctggaccaccaagccccagcaagaagcacaagaggaaaagagagaccctcactgctggggagtccctgccacactcagtcccccaccacactgaatctcccctcctcacagttgccatgtagaccccttgaagaggggaggggcctagggagccgcaccttgtcatgtaccatcaataaagtaccctgtgctcccaaaaaaagagaggaagaacatgccacaattagtnnnnnnnnnnncagaaaatcccctccctaaaaattatcatgtaaacccctgtgggggggggcgggcg

SEQ ID NO: 20441 - DNA, 3399 bp, Homo sapiens; identical to SEQ ID NO: 7346
  SIMILAR (322)..(2382): 911254mologous to Homo sapiens pM5 (3' partial),accession number U91318,Smith-Waterman Score=3192.

SEQ ID NO: 20442 - DNA, 3129 bp, Homo sapiens; identical to SEQ ID NO: 7347
  SIMILAR (2334)..(2375): 641254mologous to Homo sapiens polycystic kidney disease 1 protein,accession number L43619,Smith-Waterman Score=50.

SEQ ID NO: 20443 - DNA, 553 bp, Homo sapiens
  SIMILAR (403)..(212): 681254mologous to Homo sapiens pM5 (3' partial),accession number U91318,Smith-Waterman Score=198.
aagatgcctaagagagcagccgttgtggccagggaaattaattacactgtcttagtgacaagtgggtgatcagaaaacaagaagcgcgtgtggaagggaacatgaatcagcagcattaagttcgagtaagagcaatactctaatgaccgtgggcccccaagaaactgaaaccactccacattggctttctcttctcacgttgtcaagcaacacgtaagtctcgcatgctgcatcctggctctctctcagggaagacaggcaggtggtaaattgcagaacacgttaccaggtttgagaatgtcagaatgccgttgtcctgggtcaagaggttggaacgaaacaggccaccgctcagggataagaggactcccgggaggggctggtcatcctcagcttttatctggggatgagaaggtgagaccagagcaaggttaaactcctactacctatgaaaataacagttccacaagtcaagaggtcatttttacaaggtttttttcttttattgttactcaaaggaggacaggggacctaatcgaattccaccgcactg

SEQ ID NO: 20444 - DNA, 891 bp, Homo sapiens; identical to SEQ ID NO: 18386
  SIMILAR (213)..(106): 661254mologous to Escherichia coli phnB protein,accession number J05260,Smith-Waterman Score=119.

SEQ ID NO: 20445 - DNA, 4713 bp, Homo sapiens
  SIMILAR (808)..(1581): 941254mologous to Homo sapiens Polycystic kidney disease 1 polypeptide (polycystin),accession number R87539,Smith-Waterman Score=1288.
atggggtctacaggtgtgtacaaagtgacccctcgctcctgccaccggtttgagcaagcgttctacacctatgacacgtcttcacctagtatcttgacattgacagccattcgccaccatgtccttggaactatcaccaccgacaaaatgatggatgtcactgtgactatcaagtcttccatcgacagtgaacccgccttggtcttaggccctctgaagtctgtgcaggagctgcggagggagcagcagctggctgagatcgaggcccgcaggcaggagagggagaaaaacggcaatgaggaaggtgaagaaagaatgaccaagcctcccgtgcaggagatggtagatgagttacaaggccccttctcgtatgatttctcttactgggcgcgtgtcctctgttttgtggggacaggacccgccaaactgaagtatattaattattttaggtctggagagaaaatcactgttacaccgtcatctaaagagctgctcttttatcccccttcaatggaagccgttgtcagtggagaaagctgcccagggaagctgatcgagatccacgggaaggcaggcctgtttttagaaggccagatccaccccgagttggaaggagtcgagattgtcatcagtgaaaagggggcaagttcaccgctgatcacagtctttactgatgacaaaggtgcctacagtgttggccccctgcacagtgacctggagtacacggtgacctcacagaaggagggctatgttctgactgcagtggaaggaaccatcggagacttcaaggcctatgccctggcaggcgtcaccctccacagccaggatgtcctcatgctccctggtgacctcgttggcttgcagcacgacgctggccctggcgccctcctgcactgctcgccggctcccggccaccctggtccccaggccccgtacctctccgccaacgcctcgtcatggctgccccacttgccagcccagctggagggcacttgggcctgccctgcctgtgccctgcggctgcttgcagccacggaacagctcaccgtgctgctgggcctgaggcccaaccctgggctgcggctgcctgggcgctatgaggtccgggcagaggtgggcaatggcgtgtccaggcacaacctgtcctgcagctttgacgtggtctccccagtggctgggctgcgggtcatctaccctgccccccgcgacggccgcctctacgtgcccaccaacggctcagcctcggtgctccaggtggactctggtgccagcgccacggccacggctcgctggcctgggggcagtgtcagcgcccgctttgagaatgcctgccctgccctggtggccaccttcgtgcccagctgcccctgggagaccaatgataccctgttctcagtggtagcactgccgtggctcggtgagggggagcacgtgatggacgttgtggtggaaaacagcgccagccgggccaacctcagcctgcgggtgacggcggaggagcccatctgtggcctccgcgccacgcccagccccgaggcccgtgtactgcagggagtcccagtggtcctgctggctggctcctcaggctacctggtgggctttaaattcctggaaagtcacggctctgacagcggctccgctaactcattccaccgtctcatttcacgaaatgaatttaaaactccgctccctgacctcacacgagtccccaggtacagccccgtggtggaggccggctcggacatggtcttccggtggaccatcaacgacaagcagtccctgaccttccagaacgtggtcttcaatgtcatttatcagagcgcggcggtcttcaagctctcactgacggcctccaaccacgtgagcaacgtcaccgtgaactacaacatcaccgtggagcggatgaacaggatgcagggcctgcgggtctctacagtgccagccgtgctgtcccccaatgccacgctggcactgacggcgggcgtgctggtggactcggccgtggaggtggccttcctgtggacctttggggatggggagcaggccctccaccagttccagcctccgtacaacgagtccttcccggttccagacccctcggtggcccaggtgctggtggagcacaatgtcacccacacctacgctgccccagctgcacttggaggcggtgccgtcctcaccaggcagccctcagtgctgctgcacctgtgctccgtcccgcacgtggcttgggagcctgggacccttaaggctgggccgcaggtgagtacagtcctgaccgtgctggcatctaatgccttcgagaaccggacgcagcaggtgcctgtgagcgtgtgcgcctccctgccctctgtgagcgtgtgcgcctccctgactggggcctgctggtaccccagagtgctgatccgcagtggccgggtgcccattgtgtccttggagtgtgtgtcctgcaaggcacaggccgtgtacgaagtgagccgcagctcctacgtgtacctggagggccgctgcctcaattgcagcagcggctccaagcgagggggatacaccttcacgctgacggtgctgggccgctctggcgaggaggagggctgcgcctccatccccctgtcccccaaccgcccgccgctggggggctcttgccgcctcttcccactgggcgctgtgcacgctctcaccaccaaggtgcacttcgaatgcatgggctggcatgacgcggaggatgctggcgccccgctggtgtacgccctgctgctgcagcgctgtcgccagggccactgcgaggagttctgtgtctacaagggcagcctctccggctacggagccgtgctgcccccgggtttcaggccacaattcgaggtgggcctggccgtggtggtgcaggaccagctgggagccgctgtggtcgccctcaacaggtctctggccatcaccctcccagagcccaacggcagcgcaatggggctcacagtctggctgcacgggctcaccgctagtgtgctcccagggctgctgcggcaggccgatccccagctcgtcatcgagtactcgctggccctggtcactgtgctgaacgagtacgagcgggccctggacgtggcggcagagcccaagcacgagcggcagcgccgagcccagatacgcaagaacatcacggagactctggtgtccctgagggtccacactgtggatgacatccagcagatcgctgctgcgctggcccagtgcatgaggaagctgcctgaacaggacatcgcacaaggatcctacattgccctgccattgacgctgctggttctgctggccggttacaaccatgacaagctcattcctttgctgctgcagttgacaagccggctacagggagtcggcgcgctcggccaggcagcctctgacaatagcggcccagaagatgcaaagagacaagccaagaaacagaagacaaggcggacacttgcaacatccatcaacaccagccgagagcccagtacagacgaccagctcccagcccacaatcagaccatgccacagagacacgcacgccgtagcgcacccccaagagcctacgaccgcaaaacaagacaagaagagaacccacaccaaacgagaagtcacgccgctgcgaagcgccgcgagagaccgccccacgacctacagaaacaagcaaccacgcggctgatccccgccggaccgagacgcagagacgggacatccccgagacggacacaaccaccaccgaacacgcgacgcccagcggcggcgggccacctagcacgatttcggcgagccgcgcccggcgcccgcggcgcccgccctcccacagcccgaagggggcgagaagaactcgaccccgcccacatctacgccgccgcccccggactaccaaccccgcccagggcgggaaggacgccccccaccccggaaaggcgagacaggaacacgcgacgccggcggacccgagaagagggagaaggcgagtttagacccgtgtctttcctgaagactatcttcccgtctcaaaatggacatgatggatccacggatgtacagcagagagccaggaggtccaactgccgtagacaggaaggaattaaaattgtcctggaagacatctttactttatggagacaggtggaaaccaaagttcgagctaaaatccgtaagatgaaggtgacaacaaaagtcaaccgtcatgacaaaatcaatggaaagaggaagaccgccaaagaacatttctctacagagaaactaagacctgacgatgacatctgccgccgctcgacatcaaaacattatagaaaattcacgaagggatctacggaggtcctcagcaaatggcagcccctgggtcctgcgggagttcaggtgtctctgagaaacactgggaccgaagcaaagatccagtccacagttacacagcctggcggaaattcatgcctgtcacctctgtcaaacccagtcgaatgttctgtgactggtccctgctgtgctgcaaggattggttttatgccagaaatccttgagattaagggagacgtaagcactcctctttccgatcagcacatggagcacccctcttggcacacagtgccatctctatttcccaagccttcaagcaaaagtctaaagaaaaataggcaatttgaatttgctaaaacacttgatatgcatcgcacgttcacgacattctcttgcttccgccagcagagatga

SEQ ID NO: 20446 - DNA, 4369 bp, Homo sapiens
  SIMILAR (823)..(1659): 821254mologous to Homo sapiens pm5 protein,accession number X57398,Smith-Waterman Score=1129.
tgaggggcgggacccggctgccggcggtgggtctagctggggttaggtttgtccatgctggtgggccagggcgcggggccgctggggcccgcggtggtcaccgccgcggtggtgctgctgctgagcggcgtggggccggcgcacggctcggaggacatcgtggtgggctgcggtggcttcgtcaagtcggacgtggagatcaactactctctcatcgagataaagctgtacaccaagcatgggactttgaaataccagacagactgtgcccctaataatgggtactttatgatccctttgtatgataagggggatttcattctgaagattgagcctcccctagggtggagttttgagccgacgaccgtggagctccatgtggatggagtcagtgacatctgcacaaagggtggggacatcaactttgtcttcactgggttctctgtgaatggcaaggtcctcagcaaagggcagcccctgggtcctgcgggagttcaggtgtctctgagaaacactgggaccgaagcaaagatccaggccacagctacacagcgctggcggaaagtttgcattttttaaagttctgcctggagattatgaaatcctcgcaactcatccaacctgggcgttgaaagaggcaagcaccacagtgagtgtaaccaactccaatgccaatgcggccagtcccctcatagttgctggctacaatgtgtctggctctgtccgaagtgatggggagcccatgaaaggcgtgaagtttcttctcttttcttctttagtaactaaagaggatgaccctgggctgcaatgtctcaccagtgccctgggttccagcccccaatacgagaagtctggtgtaatttgtgctacacggtctccagagaagatggctcgttctctttctattccttgccaagtgggggctacactgtgattccgttctatcgaggggagaggattacctttgatgtggcgccttccagacttgacttcacagtggagcatgacagcttgaaaatcgagcccgtgttccacgtcatgggattctccgtcaccgggagggtcttgaacggacccgaaggagattggtgttccagaagcagtaagtcaccctgaataaccaaatcaaagttaaaacaaaagcttgatgggctcattcccgccttgagaacataaccacagggacatacaccatccatgctcagaaagagcacctctacttttgaaacggtcaccatcaaaattgcaccgaacacacctcagctggctgacattgttgcaacagggttcagtgtctgtggtcggatatcaatcattcgcttcccggacaccgtcaagcagatgaataaatacaaagttgtcctgtcatctcaagacaaggacaagtctttggtcaccgtggagacagatgctcatggatcattttgttttaaagcaaaaccagggacttacaaagtgcaggtgatggttcctgaggcagaaaccagagcagggctgacgttgaaaccccagacatttcctcttactgtgaccaacaggcccatgatggatgtggcctttgtacagttcttggcatcagtttctgggaaagtctcttgtttggacacctgtggtgacttgctggtgactctacagtccctgagccgccagggtgaagaagcggagcctccagctctccggcaaggtcaacgccatgactttcacctttgacaacgtgctccctggaaaatacaaaataagcatcatgcatgaggattggtgctggaagaacaagagcctggaggtggaagtgctggaggatgacatgtctgcagttgagttcaggcagacgggctacatgctgagatgttccctgtctcacgccatcactctggaattttatcaggatggaaatgggcgtgagaatgtggggatttataacctctccaaaggagtcaaccgattctgcctgtccaagcctggtgtgtacaaagtgacccctcgctcctgccaccggtttgagcaagcgttctacacctatgacacgtcttcacctagtatcttgacattgacagccattcgccaccatgtccttggaactatcaccaccgacaaaatgatggatgtcactgtgactatcaagtcttccatcgacagtgaacccgccttggtcttaggccctctgaagtctgtgcaggagctgcggagggagcagcagctggctgagatcgaggcccgcaggcaggagatgtgtttattacggcaaagaggaaggcgaagaaagaatgaccaagcctcccgtgcaggagatggtagatgagttacaaggccccttctcgtatgatttctcttactgggcgcggtctggagagaaaatcactgttacaccgttcatctaaagagcttgcttcttttatccccctttcaatgggaagccgttgttcagtgggagaaagcttgcccggggaagctgattcgagatccatgggaaggcaggcctggttttataaggccagatccaccccgagttggaaggagtcgagattgtcatcaagtgaaaagggggcaagttcaccgcttgattcacagtctttactgatgacaaaggtggcctacagtgtttgggccccttgcacagtgaccgggagtacacggtgacctcacagaaggagggctatgttctgactgcggtggaaggaaccatcggagacttcaaggcctatgccctggcaggcgtaagctttgagataaaagctgaggatgaccagcccctcccgggagtcctcttatccctgagcggtggcctgtttcgttccaacctcttgacccaggacaacggcattctgacattctcaaacctgagccctggccagtattacttcaaacccatgatgaaggagttccggtttgagccatcctcacagatgatcgaggtgcaggaaggccagaacctggaagatcaccatcacggggtacccgaaccgcttacagttgcttatggcacagtgtccttccttaaaccgagagcccgaacaaggggttggccatgggaagcggtgggccaagaacgactgcaagcattttacggagaagacaccggtgacagacgaagaggggcaagttcagattaccgtggattgctgccggggatgtgtgtaccacggttcagctcaaggccagaaggcaacggaccacattgagcgggcgctcccccaccatagggtgattgacggttgggaataatgacatcagatgatgtaaacatcataagttttccggcagattaatcaatttgatttaagtgggaaatgtgattcacttcctctggaataccttccctacattatggggttcaagcttttacaaaagcgaaaaacctcgacaatccaatccagacagtttcccttggccaagtccctgttcttccatttccccccactgctcagagatgggcgagaactatgtttgtgcttctgggactccacacttcccagatcccagtattgactaccatcttgcctcaagttttcttttcaccgcagttggggctaaccattaaacacatcaccttggatttttatttcccacggagggaagctgcctggaacagggacattcgcacaaaggatccttacattgccttggccattgaccgctgctggttctgctgggccggttacaacccatgacaagctcattcctttttgctgctgcaagttgacaaagccggcttacaggggagtcggcgcgctcgggccaggcaagccctcttgacaatagcgggccagaaagatgcaaagagacaagccaagaaacagaagacaaggcggactttaaggaaggaaggggacagttgcagtctcatttggggacaggccacagccagggggttccggccactacccggccctgtggattaaaagcccaaaaagcatgcgtcaagctaactttcagcctgtgctgctgggcccggcaccccatgtccccttgtccactgtggcatcctgcacccatcctcaccccttccgtagaagcccctcgttgcaattgcaattgaaatggaccctcctgtcactctggcttgaacagaatttaatttttcttgagtcaaattattaatttaataattaatttttggtcaaaagaagtattttaagctgtgctgtggtgtgagaaaggcaattcttgatcttcagccttttttttgcaagaagagttccagttgatgtggtgtttggttccatggcggggtaccctaggaattcatactgttttattcacttccctttgcatgtgagatcctgctggaaaccacggcaacctgtatcctctattaggaggtaaaaatcaataaaatggcccattcatttgtgttgtagctcaaaaaaaa

SEQ ID NO: 20447 - DNA, 427 bp, Homo sapiens
  SIMILAR (1)..(297): 661254mologous to Homo sapiens BING4,accession number Z97184,Smith-Waterman Score=328.
gaggaagagaccgttccgaccacagccggagcctctccagggcctcctcgtaacaagaagaatcgggagctccgtcctcagagaccaaaaaatgcttacatcttaaagaagtctcggatctctaagaagcctcaggtcccgaagaaaccccgagaatggaagaacccagagccttcagcagcagcatcataaggaggcgaaggccaagcccacgggggcccggccatctgccctggacagatttgtgcgctgagccagactccagggttgcctgggaacagtctctccccaagatcacctgtagggaaatgagtgttccctggaacaaggaggtgggggcagtgtggccccttccccaactgggggtggacagctgtctcctggggtgggttggtattaaagaggaaagcgattttttggataatga

SEQ ID NO: 20448 - DNA, 433 bp, Homo sapiens
  SIMILAR (3)..(377): 601254mologous to Homo sapiens dJ1033B10.2 (WD40 protein BING4 (similar to S. cerevisiae YER082C, M. sexta MNG10 and C. elegans F28D1.1),accession number AL031228,Smith-Waterman Score= 323.
ctggggccggtgagcccaacttcgatggcctggagagtaatccatacagaagccggaagcagcgccaggagtgggaggtgaaggccctgctagagaaggtacctgcagagcttatttgtctggacccacgagccctggccgaggtggatgtcatctccctggagcagggaaagaaggagcagagccttcagcagcagcatcataaggaggcgaaggccaagcccacgggggcccggccatctgccctggacagatttgtgcgctgagccagactccagggttgcctgggaacagtctctccccaagatcacctgtagggaaatgagtgttccctggaacaaggaggtgggggcagtgtggccccttccccaactgggggtggacaacagtcttctcgggtgggttggtattaaagaggaaaaagattttttgg

SEQ ID NO: 20449 - DNA, 731 bp, Homo sapiens
  SIMILAR (267)..(413): 791254mologous to Mus musculus BING4,accession number AF100956,Smith-Waterman Score=199.
cgagaatggaagaacccggagtcccagcgcggcttgtccggggcccaagatccattcccaggccccgcccccgtccctgtggaagtggtccagaagttctgtcgcattgacaaatcccgaaaggtgaggtccagccggagagttgggaagtgctggaggcagggagtgtctgggtgagttggatggaggctgggacaggtagctctcctgtgaccccacttatcctgtgggtcttctgccactcctccccaccaacaatgttacagctaccacattctaaagccaaaactcgaagccgacttgaggtggctgaagctgaggaagaggaaacaagtatcaaagctgctcgttctgagctgctgcttgctgaagaacctgggtttctggaaggggaggatggggaagacacagcctgccacttctcactctgtgcctgtgtcctccccgtctccggtccccaggacaaggtccggcagagccttcagcagcagcatcataaggaggcgaaggccaagcccacgggggcccggccatctgccctggacagatttgtgcgctgagccagactccagggttgcctgggaacagtctctccccaagatcacctgtagggaaatgagtgttccctggaacaaggaggtgggggcagtgtggccccttccccaactgggggtggacagctgtctcctggggtgggttggtattaaagaggaaagcgattttttggaaaa

SEQ ID NO: 20450 - DNA, 621 bp, Homo sapiens
  SIMILAR (1)..(207): 851254mologous to Homo sapiens dJ1033B10.2 (WD40 protein BING4 (similar to S. cerevisiae YER082C, M. sexta MNG10 and C. elegans F28D1.1),accession number AL031228,Smith-Waterman Score= 295.
ttaattggtctggacccagagcccctggccgaggtggatgtcatctccctggagcagggaagaaggaagcagatagagaggctgggctatgacccgcaggctaaggctcccttccagccaaagccaaagcagaagggccgcagctccacggcaagcctggtgaagaggaagaggaaggtcatggatgaggaaaaacagggtaaaatgaacaattggcaatgggccgggccttcccaaaggctgcaccctccctgcttgtgccctctgcccttgtcagcctgcccacttcctcactctgtgccctgtgtccctcccgtctccggtcccccaggacaaggtccggcagagccttcagcagcagcatcataaggaggcgaaagcccaaagcccacgggggcccggccatctgccctggacagatttgtgcgctgagccagactcccagggttgcctgggaacagtctctccccaagatcacctgtagggaaatgagtgttccctggaacaaggaggtgggggcagtgtggcccctttcccaactgggggtggacagctgtctccctggggtgggttggtattaaagaggaaagccgattttttggataaaaaaaaaaaaaaaaa

SEQ ID NO: 20451 - DNA, 2122 bp, Homo sapiens
  SIMILAR (1090)..(1950): 371254mologous to Homo sapiens dJ1033B10.2 (WD40 protein BING4 (similar to S. cerevisiae YER082C, M. sexta MNG10 and C. elegans F28D1.1),accession number AL031228,Smith-Waterman Score= 272.
tttcaagccgactgtgtggcagctgagaggagttttgcacgtggatcgcctgtttgtttgggcgagtatggagacagcccccaagccgggcaaggatgtccttttccaagaaagacaaacttcagaccaagagaaagaaacctgcggcgatactgggaggaagagaccgttccgaccacagccggagcctctccagggcctcctcgtaacaagaagaatcgggagctccgtcctcagagaccaaaaaatgcttacatcttaaagaagtctcggatctctaagaagcctcaggtcccgaagaaaccccgagaatggaagaacccggagtcccagcgcggcttgtccggggcccaagatccattcccaggccccgcccccgtccctgtggaagtggtccagaagttctgtcgcattgacaaatctcgaaagctaccacattctaaagccaaaactcgaagccgacttgaggtggctgaagctgaggaagaggaaacaagtattcaaagcttgcttcgttctgagctgctgctagctgaagaaccttgggtttctggaaggggaggatggggaagacacagcaaagatatgccaggctgacattgtggaggctgtggacattgcaagtgcagccaagcactttgacttgaatctgcggcagtttggaccctacagactaaactactctcgaactggaagacacctggcttttggagggcgccgaggtcatgtggctgcccttgattgggtaacaaagaagcttatgtgcgagatcaacgtcatggaggcggtgcgggacatccggtttctccattctgaggcactgcttgctgttgctcagaaccgctggctccacatctatgacaatcagggcattgagctccactgtatccgccgctgtgaccgagtaacacggcttgagttcctgcccttccacttgctcctggatacagcttcagaaacagggtttctaacctacctggatgtgtcagtggggaagattgtggcagctctgaatgctcgagctgggccggctcgatgttatgagtcagaacccttacaatgccgtcatccatatcggacacagcaatgggtactgcgtctttatgggagtccagctatggaagggagccactggcaaaagattctctgttcatcgtgggttggggtccggggctgtggcaagtagattcttacaggcacgttacatgggccacctctgggccttaggaccaccagcttgaagatctttttgactttgcgaggggacgttacccagcctcttgagcactcgggaccctgccccatgggagcagggcacctggccttctcccagagggaattgcttggttggccggattgggtgacgttgtcaacatctgggcagggcagggcaaggccagcccacccttccttggacagaccttacttcacccaccgggttttaaggccctgtgcatggccttcagttctgcccctttgaagatgtgctgggggtggggcacacataagggcatcaccagcatgctgggtccctggggccggtgagcccaacttcgatggcctgggagagtaatccattacagaagccggaagcagcgccagggagtgggaggtgaaggccctgctagagaaggtacctgcagagcttatttgtctggacccacgagccctggccgaggtggatgtcatctccctggaaacagggaaaagaaggaaacagatagagaggctgggctatgacccgcagggctaaggctcccttcccagccaaagccaaagcagaaggggccgcagctccaaggcaaaccctggtgaagaggaagaggaaggtcatgattgaggaccacaagggggcaaggtccggcagagccttcagcagcagcatcataaggaggcgaaaggccaagcccacggggggcccgcccatctgccctggacagatttgtgcgctgagccagactcccagggttgcctgggaacagtctctccccaagatcacctgtagggaaatgagtgttccctggaacaaggaggtgggggcagtgtggccccttccccaactgggggtggacagctgtctcctggggtgggttggtattaaagaggaaagcgattttttgga

SEQ ID NO: 20452 - DNA, 455 bp, Homo sapiens
  SIMILAR (1)..(342): 1001254mologous to Homo sapiens bK984G1.2 (supported by FGENES),accession number AL031186,Smith-Waterman Score=615.
agcctggcggagctgcctgtcacccatcctgccggagtgaggcctcccatccctggaccgccttatgtggcctcccctgacctctggtcccactgggaagactcagccctgcccccaccaagcctgaggcctgtgcagcccacctgggagggctcctcagaggcaggcctggactgggctggggccagcttctccccagggactccgatgtgggcggccttggatgagcagatgctgcaggagggcatccaggcatcgcttcttgacgggccagcccaggaaccccagagcgcaccatggctgtccaagtcctctgtctcctctctgcggctgcagcagctcctactctgtctaaagagggccacagtggggagcaggggcacctctggaggcaggagaggccccccagcatgctgccctagtacgtgtttagaataaaaaccagtttgtttttc

SEQ ID NO: 20453 - DNA, 425 bp, Homo sapiens
  SIMILAR (280)..(423): 931254mologous to Homo sapiens bK984G1.2 (supported by FGENES),accession number AL031186,Smith-Waterman Score=258.
cgcgccagccggtcggcaggggtcacgcggccgggtgtgcgcggaatggattcagggttctcgggtcgcgcccgggagctagagtcctgactcccagccggggtccccgaccggcctttcggggttgccgggcgcgctctgcaaaggggaaactgaggcccaaggaaattgagtatctctgcaaagtcaccagctgagttcgaaccagacagatcctgggaccccctactctatccgccaccggaagaatctccgtccttgtctttccattctgccctcccggcttcccagcctcccatccctggaccgccttatgtggcctcccctgacctctggtcccactgggaagactcagccctgcccccaccaagcctgaggcctgtgcagcccacctgggagggctcctcagaggcaggcctggactg

SEQ ID NO: 20454 - DNA, 1562 bp, Homo sapiens
  SIMILAR (276)..(806): 871254mologous to Homo sapiens chromosome 22 open reading frame 3,accession number BC002705,Smith-Waterman Score=775.
gcagcctgcgggccccccggcggtttcatagtgaccggcttgaggcctggccaaatcctccccttcacgcagggcctcgaaggccgcaggccccgcccacgtggcgggaggcccggagctcagggcgcgaggaccgccacacaatggaggccaaggcgggcaaggtgcttgagagggtattggtgagataaaagctccagtaataacttgttattgttttcttttatccccagcacacagccccaggaccacccttgaccgtcctcaaccaagcgatgcatgccaggggcccccatggccaactgtccccagcactgcctctggcctcctcagtcctgatgctgctgatgaacctggcacacctgggacagccttggatgttggggccactaacctggcacataagccccttctctctcccagtgcaccggctgctgacccatgccctgggccacacggccctgccaggcctgctcctgagcctgctgctcctgcccactgtgggctggcagcaggagtgccacctgggcacgctgagattcctgcatgcctcagccctgctcgccctggcttctgggctgctggcagtgctgctggcaggccttgggctgtccagtgcagccggcagctgtggatacatgcctgtccacctggccatgctggctggggagggacaccgccctagacggccccgtggggcactgccaccgtggctgtcgccgtggctgctgcttgccctgaccccactgctcagctctgagccacccttcctgcagctcctttgcggcctccttgccggcctggcctgtatcctttgcctgagcccagggcccgtggggatgtgtgggttctgtgggtgggtgcctgggaaggaagtggcacaaaggggtgaaggcccaagcaataccaaggagccgtgcacacacattgcctggcctgtggcgtgggcccacccctggctgcttttggttttccttgaccggccgccctgccccgggcagacagatgcagctggggccttccggtggctggaaccctcagagcgacggctgcaggtgctgcaggagggcgtcttgtgcaggaccttggcggggtgggatgccagtccaggtggtgggcactgtggcagggctgccagtcaggccctcttctcttcccactcctccaggcctcccatccctggaccgccttatgtggcctcccctgacctctggtcccactgggaagactcagccctgcccccaccaagcctgaggcctgtgcagcccacctgggagggctcctcagaggcaggcctggactgggctggggccagcttctccccagggactccgatgtgggcggccttggatgagcagatgctgcaggagggcatccaggcctcagaggtggggtcccctggtataggggccggggtggccctgacactccccacttctccccccacccccaacaggctgcagcagctggagcgcatgggcttccctacggagcaggcggtggtggcactggcagccacaggccgtgtggagggtgccgtgtcactgttggttggaggacaa

SEQ ID NO: 20455 - DNA, 1912 bp, Homo sapiens
  SIMILAR (1384)..(1839): 281254mologous to Homo sapiens chromosome 22 open reading frame 3,accession number BC002705,Smith-Waterman Score=51.
  misc_feature (1)...(1912): n = a,t,c or g
tgggtgctgactaccgtagcttacgaagttcgaccgccctggaattccccggncgacccacgcgtncgcccacgcgtccgcggagatcggcgggagggttgggggaagggacccggactagaacaactgctgactaatccgcgggccgcggggaatgggtggcgcgccagccggtcggcaggggtcacgcggccgggtgtgcgcggaatggattcagggttctcgggtcgcgcccgggagctagagtcctgactcccagccgggggtccccgaccggccgtttcggggttgccgggcgcgctctgcaaaggggaaactgaggcccaaggaaattgagtatctctgcaaagtcaccagctgagttcgaaccagacagatcctgggacccccgtactctatccgccaccggaagaatctccgtccttgtctttccattctgccctcccggcttcccagtaagcacacagccccagggaccacccttggaccgtcctcaaccaagcgatgcatgccagggggcccccatgggcaaactgtccccagcactgcctcttggcttcctcagtcctgatgctgctgatgagcaccctgtggctggtgggggccggccccggcctggtcctggccccggagctgttgctggacccctggcaggtgcaccggctgctgacccatgccctgggccacacggccctgccaggccttgctcctgagcctgctgctcctgcccactgtgggctggcagcaggagtgccacctgggcacgctgagattcctgcatgcctcagccctgctcgccctggcttctgggctgctggcagtgctgctggcaggccttgggctgtccagtgcagccggcagctgtggatacatgcctgtccacctggccatgctggctggggaaggacaccgccctagacggccccgtggggcactgccaccgtggctgtcgccgtggctgctgcttgccctgaccccactgctcagctctgagccacccttcctgcagctcctttgcggcctccttgccggcctggcctatgcagctggggccttccggtggctggaaccctcagagcgacggctgcaggtgcctgcaggagggcgtcttgtgcaggaccttggcggggtgctggcccctgaggctccttgccaccccgggtagcctggcggagctgcctgtcacccatcctgccggagtgaggcctcccatccctggaccgccttatgtggcctcccctgacctctggtcccactgggaagactcagccctgcccccaccaagcctgaggcctgtgcagcccacctgggagggctcctcagaggcaggcctggactgggctggggccagcttctccccagggactccgatgtgggcggccttggatgagcagatgctgcaggagggcatccaggccttcgcttcttgaacggcccagcccaggaaccccagagcgcaccatggctgtcccaagtcctctgtctcctataatgcggctgcagccagctggagcgcatgggcttccccctacggaggcagcggtggtggcactggccagccacaggccgtgtggagggtgcccgtgtcactgttggttggaggacaaagtggcacatgagaccctggttacccatggaaagggtgggcctgcccactccgagggtccctgggcctccctagcccaggcagagagtggggcacaggccaggccctttgggtgcttaagggctgggcctgcatgtgggtagcccgagctccctactctgtctaaagagggccacagtggggagcaggggcacctctggaggcaggagaggcccccccagcatgctgccctagtacgtgtttagaataaaaaccagtttgtttttcaacctggacctccttgggggccaaaaaaaaaaaaaaaaa

SEQ ID NO: 20456 - DNA, 401 bp, Homo sapiens
  SIMILAR (189)..(22): 401254mologous to Drosophila melanogaster Fuzzy,accession number AF022891,Smith-Waterman Score=81.
ctcgatgaggcaatatctggccctcaagtccttcttcagtctctccacgttgcggatattggtcagttcttcaagtcccacaagaaggaccatggctccaaacaccatttggagtagtctctccagcctcagctcagagatgcccacctcagatgacagaacaatgagggtgatgcacagtcgtgttctcggtcctcgcagagctcagctgcacctccagattctgcccaaacatgtggactccattgagggaaccgatgacagagaacgggaggtggggactgtcagtgcgggtcttggagcatggcggtaatcagagtaactcggcctgtggtccggagccgccagagggcgagatggggagctgattggaagaggattaacttcccgcattaatcccc

SEQ ID NO: 20457 - DNA, 1840 bp, Homo sapiens
  SIMILAR (152)..(1717): 1001254mologous to Homo sapiens nucleoporin p62,accession number X58521,Smith-Waterman Score=2641.
ggaagaggtaagcggttactcactccatggctgcagcaaggagaggcggcggcggcctcggctgaagaaagaagaaatcttcccaaggctgcagacaccgacggatttgctttgggagccagagtagctgccgccaccagagtccggagccatgagcggctttaattttggaggcactggggcccctacaggcgggttcacgtttggcactgcaaagacggcaacaaccacacctgctacagggttttctttctccacctctggcactggagggtttaattttggggctcccttccaaccagccacaagtaccccttccaccggcctgttctcacttgccacccagactccggccacacagacgacaggcttcacttttggaacagcgactcttgcttcggggggaactggattttctttggggatcggtgcttcaaagctcaacttgagcaacacagctgccaccccagccatggcaaaccccagcggctttgggctgggcagcagcaacctcactaatgccatatcgagcaccgtcacctccagccagggcacagcacccaccggctttgtgtttggcccctccaccacctctgtggctccagctaccacatctggaggcttctcattcactggtggaagcacggcccaaccctccggtttcaacattggctcagcagggaattcagcccagcccacggcacctgccacgttgcccttcactccggccacgccagcagccaccacagcaggtgccacacagccagctgctcccacacccacagccaccatcaccagtactgggcccagcctctttgcgtcaatagcaactgctccaacctcatctgccaccactggactctccctctgtacccctgtgaccacagcgggcgcccccactgctgggacacagggattcagcttaaaggcacctggagcagcttccggcacctccacaacaacatccaccgctgccaccgccaccgccaccaccaccaccagcagcagcaccaccggctttgccttgaatttaaaaccactggcgccagccgggatccccagcaatacagcagctgccgtgaccgctccacctggccctggcgcagctgcaggggcggctgccagctccgccatgacctacgcgcagctggagagcctgatcaacaaatggagcctggagctagaggaccaggagcggcacttcctccagcaggccacccaggtcaacgcctgggaccgcacgctgatcgagaatggagaaaagatcaccagcctgcaccgcgaggtggagaaggtgaagctggaccagaagaggctggaccaggagctcgacttcatcctgtcccagcagaaggagctggaagacctgctgagcccactggaggagttggtcaaggagcagagggcgaccatctacctgcagcacgcggatgaggagcgtcagaaaacctacaagctggctgagaacatcgacgcacagctcaagcgcatggcccaggatctcaaggacatcatcgagcacctgaacacgtccggggcccccgccgacaccagtgacccactgcagcagatctgcaagatcctcaatgcgcacatggactcactgcagtggatcgaccagaactcggccctgctgcagaggaaggtggaggaggtgaccaaggtgtgcgtgggccggcgcaaggagcaggagcgcagcttccggatcacctttgactgagcgacagcagccctggggcccgcaggtccctagggagttcatgaggggaatgcgccctgttgtctgtagtttggggttgtggcaagatacttgtttgtttgtttctttctttcacagacg

SEQ ID NO: 20458 - DNA, 446 bp, Homo sapiens
  SIMILAR (36)..(4): 631254mologous to Hordeum bulbosum chitinase,accession number AJ400135,Smith-Waterman Score=41.
acccatctcgccctctggcggctccggaccacaggccgagttactctgattaccgccatgctccaagacccgcactgacggtccccacgtgagggaccgcggtgggagtcctaaatgggggaggaggggacgggcggcactgtgcatctgctgtgcctcgcggcctccagcggggtccccctattctgcaggagcagtcgcggcggcgcccccgcccgtcagcaggtggggccttggacgcctgtatctaaaccgaagggggttcggtgtttttgactctgggtcttcaaggcagtaggggctggggaagtttcagtgttgaatttgtaggaccgaggaggcaatggaccaataagcctggttccccaaagaggcactgccaggtcatatggaaagaggatggggctgggagctggcacacttgggtcctaagggggaaggagatg

SEQ ID NO: 20459 - DNA, 386 bp, Homo sapiens
  SIMILAR (61)..(210): 341254mologous to Lycopersicon esculentum extensin (class I),accession number X55683,Smith-Waterman Score=65.
cggcctcccggttgggaccgcgcgagggcggggcgcggaagaatccgggagggccgtgctccgccacccagtatatatctgtccccagtccccggggccgcctcattccctgtcctcggatcacagtctcttctcactacagtgtcgccgcctctgcctgcgtagccccggccatggctctgtagcctcgacccctttgtgcccccggcccgtctccgcgctcaccacgcctgcgctctccgctcccaccttctttcttcagccgaggccgccgccgcctctccttgctgcagccatggagtgagtaaccgcttacctcttctccaactgcctttcccgccctttcgcagctcgtggccctctttagggagccctgggacgccctc

SEQ ID NO: 20460 - DNA, 573 bp, Homo sapiens
  SIMILAR (9)..(368): 301254mologous to Drosophila melanogaster Fuzzy,accession number AF022891,Smith-Waterman Score=153.
aggaatccggttggtggcggctggggacgcccgaggccgtgctgctcccctggctggtggggtccctgtcgccgcagaccgctcgcgactacccggtgtacctgccgcacgggagccccacggtcccacaccggctcctgaccctgactctgctgccgagcctggagctgtgtctactctgcgggccgagcccacccctcagccagttgtatccacagcttctggagcgctggtggcagccactgctggacccgttgcgggcctgtctgccgttgggaccccgggcgctgcccagtggcttcccccttcacacagacatcctcgggctgctgctcctccacctggaactgaagcgctgcctcttcaccgtggagcccttgggggataaagagccttcaccaaaacagcgccggcgcctcctccgaaacttctataccctggtcacctccacgcacttcccaccagagccagggccaccagagaagacagaagatgaggtctaccaggcccagctgcccagagcttgctacctggtgttggggactgaggaaccacgcacaggagtgcgtctgg

SEQ ID NO: 20461 - DNA, 487 bp, Homo sapiens
  SIMILAR (299)..(12): 341254mologous to Homo sapiens nucleoporin p62,accession number X58521,Smith-Waterman Score=98.
acaagagtcgctgttccaaaagtgaagcctgtcgtctgtgtggccggagtctgggtggcaagtgagaacaggccggtggaaggggtacttgtgcctggttgaaagggagccccaaatttaatccctccagtgccagaggtggagaaagaaaaccctgtagcaggtgtggttgctgccgtctttgcagtgccaaacgtgaacccgcctgtaggggccccagtgcctccaaaattaaacccgctcatggctccggactctggtggcggcagctactctggctcccaaagcaaatccgtcggtgtctgcagccttgggaagatttcacgcctgcgctctccgctcccaccttctttcttcagccgaggccgccgccgcctctccttgctgcagccatggagtgagtacccgcttacctcttctccaactgcctttcccgccctttcgcagatcgtggccctctttagggagccctggggggtggacgaaa

SEQ ID NO: 20462 - DNA, 585 bp, Homo sapiens
  SIMILAR (2)..(298): 961254mologous to Homo sapiens PTOV1,accession number AF238381,Smith-Waterman Score=495.
gtacatgctgctcatcccgcagcagctgctgaccacgctagtgccggtgttccggaactcgcgcctggtccagttccacttcaccaaggacctggagacactgaagagcctgtgccggatcatggacaatggcttcgccggctgcgtgcacttttcctacaaagcatcgtgtgagatccgcgtgcttatgctcctgtactcttcagagaagaaaatcttcattggcctcatcccccatgaccagggcaactttgtcaacggcatccggcgtgtcattgcaaaccaccaacaggttcttccaccgaaacctggagcaggagcaacagcaacgagggatgggggggtagtggttaccccgggctgggcccctccaggagtcacagattgaggcccccgcaagagactgtgcttgggagcctgtggccagcagcccccacttgcacccctgcccccaggtgacatgcttctgagcagggggcccctggggacttcaactgcccagcaacatggaggatggtgtcctgaggcctccaaggacggtccccacccctctacgtttccccaataaagccttttaaaaacctg

SEQ ID NO: 20463 - DNA, 830 bp, Homo sapiens
  SIMILAR (1)..(618): 331254mologous to Drosophila melanogaster Fuzzy,accession number AF022891,Smith-Waterman Score=254.
ctcaatggagtccacatgtttgagcagaatctggaggcgccgctgagctctgcgaggaccgacaacacgactgtggcgcggaaaagcttccatgacagcatcaccctcattgttctgtcatctgaggtgggcatctctgagctgaggctggagagactactccaaatggtgtttggagccatggtccttcttgtgggacttgaagaactgaccaatatccgcaacgtggagagactgaagaaggacttgagggccagttattgcctcatcgacagcttcctgggggactcggagctcatcggggacctgacccagcgtgtggactgcgagattcctccagaggggtccctcttgcaggaagccctctccgggttcgctgaggccgcgggcacgaccttcgtcagtctggaggtgtccggccgggtggtggcagcaacagagggttggtggtggctggggacgcccgaggccgtgctgctcccctggctggtggggtccctgccgccgcagaccgctcgcgactacccggtgtacctgccgcacgggagccccacggtcccacaccggctcctgaccctgactctgctgccgagcctggagctgtgtctactctgcgggccgagcccacccctcagccagttgtatccacaggctgctgctcctccacctggaactgaagcgctgcctcttcaccgtggagcccttgggggataaagagccttcaccagaacagcgccggcgcctcctccgaaacttctataccctggtcacctccacgcacttcccaccagagccagggccaccagagaagacagaagatgaggtctacc

SEQ ID NO: 20464 - DNA, 1413 bp, Homo sapiens
  SIMILAR (1111)..(1293): 911254mologous to Homo sapiens Human alpha-adaptin A homolog,accession number AC006942,Smith-Waterman Score=283.
atgggacttaaactggggaacatcctgagctttggggctaccaggaaacccaaacctgcctcagtggatgccaacaccaagctgacgcggtcactgccctgccaggtctacgtgaatcatggcgagaacctgaagacggagcagtggccccagaagctgatcatgcagctcatcccccagcagctgctgcgatttcttgagaagatgtcgaataaacgcgtcacgtcgtacccgaccaccgtacgacgagacacgacagcagttatgctagttgaagcagacgaatgggtgaagtatgagcccaacctcctggttcgggcctgcaaccagctgggccagttcctgcagcaccgggagaccaacctgcgctacctggccctggagagcatgtgcacgctggccagctccgaaagctcttgtaacaacgacgtgcctgtctgcatacagcgagagaaagcggagtatatccgtgcgtttcccttcgtcccacttcgacgccagtgctgctggtcttctgatgaggcagagagttacacaggtcacacgacggagcgcgtgtatgttgaggaggcccccgcgccggagagcccgcagaccgccgagcccacactccgctcccgcccgggccccgggcacgcgtgccgccttgtggttcggccgcggcgaccccactccggcggcggtcccccgagcttggtacggctcagcccgtgtgccccgaagccgcgcgcccgcgccgagcatgctgagatcggtggagcccgcagcagaccttgtggatcggggagtctggcgcgcgattgggctggtgccgcctatcctcaggccggagtcttgaggtattgctccggagaagcgcctgggatcgggtcggcggttgctatacgcagcgctaaagggatgaaggttgaactccagctgggatgtcctgatgtggatgggacaagccctcaacaggaggcgcagaaaatcttcaaagccaaccagcccatggacgcagaagttactaaggccaagcctatcgggatggcggctgctcgagtggatactctggagacgaacccggaaaacggcgtgggcggcgagatcatgcagacgaaagcgtgcagccctcaacaggaggcgcagaaaatcttcaaagccaaccaccccatggacgcagaagttactaaggccaagcttctggggtttggctctgctctcctggacaatgtggaccccaaccctgagaacttcgtgggggcggggatcatccagactaaagccctgcagatctctagctacctctacttaaatactgctcttgtggacttgcctggtgtggcggcctcccaggcatgtgactctcagcaggtgacttggcttctctacgttgctaatggtgcctactcggcatgtaacaggcctggatga

SEQ ID NO: 20465 - DNA, 440 bp, Homo sapiens
  SIMILAR (1)..(180): 551254mologous to Homo sapiens NIP-1 encoded by clone 59,accession number W21733,Smith-Waterman Score=132.
gaccgcaagcaaaagaagagagacccagaaacaagtcggcggctctgaggctacgccagcggaagcgggcagagggtgaagccctggagggcgaagtcccaggggctggaaggcacggaattcgcgagctgaaggaacgggcagagtccgtggagcgcgagatccagtacgtcaaggaccatgctcatcgaggtttacaaggcccggagccagaggacccgtagctgctagaagggcaggggtgtggcttctgggggctggtcttcagctctggcgccttcatccccctgcctctaccttcattccaaacccctctcggccgggtgcagtggcttatgcttgtaatcccagcactttgggaggccaagggcaggaggatcgtttgaggcccaggaggtcaataccagcctgggcaaccatagtaagaccctgtctctatt

SEQ ID NO: 20466 - DNA, 2469 bp, Homo sapiens
  SIMILAR (672)..(2324): 921254mologous to Homo sapiens Human alpha-adaptin A homolog,accession number AC006942,Smith-Waterman Score=2552.
ggacagcatggacagtgtcaagcagagtgcggccctgtgcctccttcgactgtacaaggcctcgcctgacctggtgcccatgggcgagtggacggcgcgtgtggtacacctgctcaatgaccagcacatgggtgtggtcacggccgccgtcagcctcatcacctgtctctgcaagaagaacccagatgacttcaagacgtgcgtctctctggctgtgtcgcgcctgagccggatcgtctcctctgcctccaccgacctccaggactacacctactacttcgtcccagcaccctggctctcggtgaagctcctgcggctgctgcagtgctacccgcctccagaggatgcggctgtgaaggggcggctggtggaatgtctggagactgtgctcaacaaggcccaggagccccccaaatccaagaaggtgcagcattccaacgccaagaacgccatcctcttcgagaccatcagcctcatcatccactatgacagtgagcccaacctcctggttcgggcctgcaaccagctgggccagttcctgcagcaccgggagaccaacctgcgctacctggccctggagagcatgtgcacgctggccagctccgagttctcccatgaagccgtcaagacgcacattgacaccgtcatcaatgccctcaagacggagcggggacgtcagcgtgcggcagcgggcggctgacctcctctacgccatgtgtgaccggagcaatgcccagcagatcgtgtcggagatgctgcggtacctggagacggcagactacgccatccgcgaggagatcgtcctgaaggtggccatcctggccgagaagtacgccgtggactacagctggtacgtggacaccatcctcaacctcatccgcattgcgggcgactacgtgagtgaggaggtgtggtaccgtgtgctacagatcgtcaccaaccgtgatgacgtccagggctatgccgccaagaccgtctttgaggcgctccaggcccctgcctgtcacgagaacatggtgaaggttggcggctacatccttggggagtttgggaacctgattgctggggacccccgctccagccatccagtgcagttctccctgctccactccaagttccatctgtgcagcgtggccacgcgggcgctgctgctgtccacctacatcaagttcatcaacctcttccccgagaccaaggccaccatccagggcgtcctgcgggccggctcccagctgcgcaatgctgacgtggagctgcagcagcgagccgtggagtacctcaccctcagctcagtggccagcaccgacgtcctggccacggtgctggaggagatgccgcccttccccgagcgcgagtcgtccatcctggccaagctgaaacgcaagaaggggccaggggccggcagcgccctggacgatggccggagggaccccagcagcaacgacatcaacgggggcatggagcccacccccagcactgtgtcgacgccctcgccctccgccgacctcctggggctgcgggcagcccctcccccggcagcacccccggcttctgcaggagcagggaaccttctggtggacgtcttcgatggcccggccgcccagcccagcctggggcccacccccgaggaggccttcctcagcgagctggagccgcctgcccccgagagccccatggctttgctggctgacccagctccagctgctgacccaggtcctgaggacatcggccctcccattccggaagccgatgagttgctgaataagtttgtgtgtaagaacaacggggtcctgttcgagaaccagctgctgcagatcggagtcaagtcagagttccgacagaacctgggccgcatgtatctcttctatggcaacaagacctcggtgcagttccagaatttctcacccactgtggttcacccgggagacctccagactcatctggctgtgcagaccaagcgcgtggcggcgcaggtggacggcggcgcgcaggtgcagcaggtgctcaatatcgagtgcctgcgggacttcctgacgcccccgctgctgtccgtgcgcttccggtacggtggcgccccccaggccctcaccctgaagctcccagtgaccatcaacaagttcttccagcccaccgagatgggcggcccagggtttcttccagcgctgggaagcagcttgagcctccctcaacagggagggcgcagaaaatcttcaaagccaaccaccccatggacgcagaagttactaagggccaagcttctggggtttgggctctgctctcctggacaatgtggaccccaaccctgagaacttcgtgggggcggggatcatccagactaaagccctgcaggtgggctgtctgcttcggctggagcccaatgcccaggcccagatgtaccggctgaccctgcgcaccagcaaggagcccgtctcccgtcacctgtgtgagctgctggcacagcagttctga

SEQ ID NO: 20467 - DNA, 1654 bp, Homo sapiens
  SIMILAR (404)..(201): 571254mologous to Homo sapiens PTOV1,accession number AF238381,Smith-Waterman Score=174.
ttttttttttcaggtttttaaaaggctttattggggaaacgtagaggggtggggaccgtccttggaggcctcaggacaccatcctccatgttgctgggcagttgaagtccccaggggcccctgctcagaagcgtgtcaccagtctctgcgggggcctcatctgtgactcctggaggggcccagcccggggtaaccactaccccccccatccctcgttgctgttgctcctgctccaggttccgctgcaggacctgctgctggttggcaatgacacgccggatgccgttgacaaaattgcccttggtcatgggggatgaggccaatgaagattttcttctctgaagagtacaggagcataagcacgcggaatctcacacgatgctttgtaggaaaaagttcacgcaagcccgcgaagccattgtccatgatccggcacaggctcttcagtgtctccaggtccttggtgaagtggaactggaccaggcgcgagttccggaacagcggcactagggtggtcagcagctgctgcgggatgagctgcatgtacagcttccttggccactgctcggtcctcaggatctccccctggttcacgtagacgtgggatggcagccacctcttggaccgactgttgggctcaggcctgggcttttgggggagaggcaaagaggagccctcagggctggagacccccaatgccagtgtcccctcccagccacagtccgtgaggatctgggggtcccaagtccctgggctgccgagtgctcacctcctgccactccatgacaccactccatgccagaaacttgttgttgacgatctggactgggcctgagttgacaccaccaggtcccactgcctgttggaagggaacggggtgggaagaggggcccaggctcctgggaaacctgtctgtctgtcctggggcctgccatccctccctccgagccttggcctgttagccccagctgggtccattctctagtcccaggggaacaggccctgcccctcatctgctcacagccccccatggctccccagtggcctgagacaggtcccggccctcacctggtgcacaggacctgcagagtctgcctcaactggcaaggcatgaccaggacacgtggttaccaggcagggccttccagccgcaggacgatcccaacccctgcccagctccccgctccgctggcttccctgccgccgcgccaagacccaccctccagccctgcagagccgcccagtggccgcttttccatggagccctggtgggaacccgcccggcatcctccgggctcccctgcagctccttgctccagccatcgcatcacactccgcccacaccaagtctggctgcccaaccagggcagtggggtctaatccccctctgtccccagaggggctgtgcttggctggcacacctgcttgcgggtggtgatgacctgccggatggcactgacgaagccgctctggtcgtaggggatgaggcccatgaagatcttcttcttggacgagtacaggagcatgagcacgcgcacctcacagggggagatgtgggggaacagcatgcagcccgcgaagccgttgcccatgatgcggtagaggcctttgagagacaccagacaccttgttggtgaaatggaactggaccatc

SEQ ID NO: 20468 - DNA, 7043 bp, Homo sapiens
  SIMILAR (3098)..(3847): 911254mologous to Mus musculus alpha-adaptin (A) (AA 1- 977),accession number X14971,Smith-Waterman Score=1132.
atgatggggggacagcaggcacccccagggctggggccaattctggaggaccaagccaggccctcacagaatctgggttacctgttcatttctgtgctggtgaactcgaactcggagctgatccgcctcatcaacaacgccatcaagaatgacctggccagccgcaaccccaccttcatgtgcctggccctgcactgcatcgccaacccgaggccgccgccgcctctccttgctgcagccatggaagtcgtgagacgctatagagtacgacggacatgcattgacgcagcgatcatgctcagcgagagcagagtgatatatcatgactggtcgctaactacgatctacgccggatatgacctagtgctcctgtatcgtcgtcactctagagactcagaagacgacgacagacgacatgaggagctaccgagactagcgagcgacgtgcagacgcagacacgcctgctgctgactcatagcacgtccacacgaacatcccctgaggccttgtgcatgccaggctccatgtcgggtgacaccagggacacagatgagtcagaaccaagctctgctcttacggagctccctgtccttctggcagggagcttctggagcgctggtggcagccactgctggacccgttgcgggcctgtctgccgttgggaccccgggcgctgccagatggcttcccccttcacacagacatcctcggcaaaagaagagagaccagaacaagtcggcggctctgaggtaccgccagcggaagcgcaggagggtgaggccctggaggcggagtgccaggggctggaggcacggaatcgcgagctgaaggaacgggcagagtccgtggagcgcgagatccagtacgtcaaggacctgctcatcgagaccaccctagtgccgctgttccggaactcgcgcctggtccagttccacttcaccaaggacctggagacactgaagagcctgtgccggatcatggacaatggcttcgcaggcactgtggccccaggaggggtgagcggcccttccccagcccagctggatggccccagccctcggtccttaatgcaagtcggttatgcctgtaggttgaaaggcatcagggaggaaaatgggaccagaatgccagaggatgcggctgtgaaggggcggctggtggaatgtctggagactgtgctcaacaaggcccaggagccccccaaatccaagaaggtgcagcattccaacgccaagaacgccatcctcttcgagaccatcagcctcatcatccactatgacagcaacagagggttggtggcggctggggacgccgaggccgtgctgctcccctggctggtggggtccctgccgccgcagaccgctcgcgactacccggtgtacctgccgcacgggagccccacgtgtcccccggccgcgcgctcacagttccggatgtcggagatgaacaccgcgagcccccgcatcccatcgcccttggacacggccggcatgatggcggtggtgtcggctccaggcctggccgcagtgggacctggtggtgtcaactcaggcccagtccagatcgtcaacaacaagtttctggcatggagtggtgtcatggagtggcaggagcccaggcctgagcccaacagtcggtccaagaggtggctgccatcccacgtctacgtgaaccagggggagatcctgaggaccgagcagtggccaaggaagctgtacatgcagctcatcccgcagcagctgctggacacgctaggctcctggcagcgctgtgtgaccacgtgtgagacagccctgaagcaagggaaacgggtcgccatcgacaacacaaacccagacgccgcgagccgcgccagatggcagcctgagcgaggagacccccgccggcccccccacctgctcagtgcccccagcctcagccctacccagacagcagtacgccaagtccctgcctgtgtctgtgcccgtctggggcttcaaggagaagaggacagaggcgcggtcatcagatgaggagaatgggccgaaacccaaacctgcctcagtggatgccaacaccaagctgacgcggtcactgccctgccagggctccctaaagagggccacgagctgcgaaagggcgggaaaggcagttggagaagaggtaagcggttactcactccatggctgcagcaaggagaggcggcggcggcctcggctgaagaaagaaggtgggagcggagagccaggcgtgggttacctgttcatttctgtgctggtgaactcgaactcggagctgatccgcctcatcaacaacgccatcaagaatgacctggccagccgcaaccccaccttcatgtgcctggccctgcactgcatcgccaacgtgggcagccgggagatgggcgaggcctttgccgctgacatcccccgcatcctggtggccggggacagcatggacagtgtcaagcagagtgcggccctgtgcctccttcgactgtacaaggcctcgcctgacctggtgcccatgggcgagtggacggcgcgtgtggtacacctgctcaatgaccagcacatgggtgtggtcacggccgccgtcagcctcatcacctgtctctgcaagaagaacccagatgacttcaagacgtgcgtctctctggctgtgtcgcgcctgagccggatcgtctcctctgcctccaccgacctccaggactacacctactacttcgtcccagcaccctggctctcggtgaagctcctgcggctgctgcagtgctacccgcctccaggtaatgaacgccgtgcactccccaacccggggtggcctgctgctggcatctgggggcctcctgctccacggcgcaccagcttgttcctctatctggtgaattttcctgcggaaaattctgcagaaaaatctgcggaaccattttttgctggaacgcttgacagctcttgcatacacttgaaaacacgtcacattctaggaaacgtggtgattggtgctcctgtgagctgctggctggcatctgtcagtggtggagagctctgggggcctctaggccaggaggatggcaccgagtgtgcctgcagtggcctcttgctgaatggacacttggaggatgcggctgtgaaggggcggctggtggaatgtctggagactgtgctcaacaaggcccaggagccccccaaatccaagaaggtgcagcattccaacgccaagaacgccatcctcttcgagaccatcagcctcatcatccactatgacagtgagcccaacctcctggttcgggcctgcaaccagctgggccagttcctgcagcaccgggagaccaacctgcgctacctggccctggagagcatgtgcacgctggccagctccgagttctcccatgaagccgtcaagacgcacattgacaccgtcatcaatgccctcaagacggagcgggacgtcagcgtgcggcagcgggcggctgacctcctctacgccatgtgtgaccggagcaatgccaagcagatcgtgtcggagatgctgcggtacctggagacggcagactacgccatccgcgaggagatcgtcctgaaggtggccatcctggccgagaagtacgccgtggactacagctggtacgtggacaccatcctcaacctcatccgcattgcgggcgactacgtgagtgaggaggtgtggtaccgtgtgctacagatcgtcaccaaccgtgatgacgtccagggctatgccgccaagaccgtctttgaggcgctccaggcccctgcctgtcaacgagaacatgggtgaaggttggcggctacatccttggggagtttgggaacctgattgctggggacccccgctccagcgtggccacgcgggcgctgctgctgtccacctacatcaagttcatcaacctcttccccgagaccaaggccaccatccagggcgtcctgcgggccggctcccagctgcgcaatgctgacgtggagctgcagcagcgagccgtggagtacctcaccctcagctcagtggccagcaccgacgtcctggccacggtgctggaggagatgccgcccttccccccgagcgcgagtcgtccatcctggccaagctgaaacgcaaagaaggggccaggggccggccagcgccctggacgattggccggagggacccccagcagcaacgaccatcaacgggggcatggagcccaccccccccagactgtgtgacgcccctcgccctccgccgacctcctggggctgcgggcagacccccttttcccgcagcacccccggcttctgcaggagcagggaaccttctggtggacgtcttcgatggcccggccgcccagcccagcctggggcccacccccgaggaggccttcctcagcccaggtcctgaggacatcggccctcccattccggaagccgatgagttgctgaataagtttgtgtgtaagaacaacggggtcctgttcgagaaccagctgctgcagatcggagtcaagtcagagttccgacagaacctgggccgcatgtatctcttctatggcaacaagacctcggtgcagttccagaatttctcacccactgtggttcacccgggagacctccagactcatatcctctcaggcccggcccagcctcctgcctctccacgtcggccttcctcaccgtggggaagccggctgacccagctggctgtgcagaccaagcgcgtggcggcgcaggtggacggcggcgcgcaggtgcagcaggtgctcaatatcgagtgcctgcgggacttcctgacgcccccgctgctgtccgtgcgcttccggtacggtggcgccccccaggccctcaccctgaagctcccagtgaccatcaacaagttcttccagcccaccgagatggcggcccaggatttcttccagcgctggaagcagctgagcctccctcaacaggaggcgcagaaaatcttcaaagccaaccaccccatggacgcagaagttactaaggccaagcttctggggtttggctctgctctcctggacaatgtggaccccaaccctgagaacttcgtgggggcggggatcatccagactaaagccctgcaggtgggctgtctgcttcggctggagcccaatgcccaaggcccaagatgtaccggctgaccctgcgcacccagcaaggagccccgtctcccgtcacctgtgtgagctgctggcacagcagttctgagccctggactctcgccccgggggatgtggccgggcaactgggcaagccccttggactgaggcaagttttggtggatgatgggggacctccactggtgacagagaagacacccagggtttgggggatgccctgggactttcctccggccttttgaatctttactttcagaccatctgctgctgtttacattctggggggttagggggagtccccctccctccctttcccccccaagcacagaggggagaggggccagggaagtggatgtctccatcccctcccaccccacccttgttgtagcccctcctacccccctccccatccaaggggcttgtgtattattgtgagcgaataaacagatagaccgcttacagccccatgtctgggtccatcaccccctgctaggtagtcaaagaagtggggtgagcgcatgcagagtgtgggtggccaggcttcgcagcccactgggtgggactctgtgggagacagcagcagcagcagccgccgaagccccagctgcaaggccaccagacgcactcctgtgcctggttcctcagtccccaacaccaggtagcaagctctgggcagctgggcctggtagacctcatcttctgtcttctctggtggccctggctctggtgggaagtgcgtggaggtgaccagggtatagaagtttcggaggagcggccggcgctgttctggtgaaggctctgctttatcccccaagggctccacggtgaagaggcagcgcttcagttccaggtggaggagcagcagcccgaggatgtctgtgtgaagggggaagccactgggcagcgcccggggtcccaacggcagacaggcccgcaacgggtccagcagtggctgccaccagcgctccagaagcgtggggctcccgtgcggcaggtacaccgggtagtcgcgagcggtctgcggcggcagggaccccaccagccaggggagcagcacggcctcgggcgtccccagccgccaccaaccctctgttgctgccaccacccggccggacaccaccagactgacgaaggtcgtgcccgcggcctcagcgaacccggagagggcttcctgctgagagtcacatgcctgggaggccgccacaccaggcaagtccacaagagcagtatttaagtagaggtagctagagatctgcaagagggacccctctggaggaatcacgcagtccacacactgggtcaggtccccgatgagctccgagtcccccaggaagctgtcgatgaggcaataactggccctcaagtccttcttcagtctctccacgttgcggatattggtcagttcttcaagtcccacaagaaggaccatggctccaaacaccatttggagtagtctctccagcctcagctcagagatgcccacctcagatgacagaacaatgagggtgatgctgtcatggaagcttttccacaccacagtcgtgttctcggtcctcgcagagctcagctgcacctccagattctgcccaaacatgtggactccattgagggaaccgatgacagagaacgggagctgctgacgggcgggggcgccgccgcgactgctcctgcagaatagggggaccccgctggaggccgcgaggcacagcagatgcacagtgccgcccgtcccctcctcccccatttaggactcccaccgcggtccctcacgtggggactgtcagtgcgggtcttggagcatggcggtaatcagagtaactcggcctgtggtccggagccgccagagggcgagatgaggaaaagattggaagaggattaacttcccgccttcttcacccaactcaaacagacacgaaatcgtcgacccgggaattc

SEQ ID NO: 20469 - DNA, 636 bp, Homo sapiens
  SIMILAR (1)..(39): 921254mologous to Homo sapiens Unknown gene product,accession number U95740,Smith-Waterman Score=56.
gacttgaagcaggagctccagaacttggtcgcccatcccagaaaaagaaaaaaccaaactgcagaagcagagagaggatgagctaatccagaagatccacaaactggtgcagaagagagacttcctggtggacgatgcggaggtcgagcggttaagggagcaagaagaagacaaggaaatggctgatttcctgagaatcaagttaaaacctctagacaaagtaaccaaatctccacccatatagcagtcccagagggcccatctgtaaagatcgagcttgtgtgtggtgtcgtggtcacatctcccggggccaccacagagatgccagcaggatgccactttgccagcccgacacacggacctttgtaaagaacagcaacaggcaggagaggcagcgtgtgaccagattgtgtcccgtcattgggtggcatatgttaactagctgccaaacaacttcaacccgtgtaattcatgtacatttgcaacagccagcccggtacagcctgtgtgacttttctgtatgtgtgtgtgtgtcgtgaccagcctaagtagttagcataactcaagatgctgatgtgcagtcacccatcagagaaaataaaaatggaaaccacgttcccagcaaaaaaaaaaaaa

SEQ ID NO: 20470 - DNA, 452 bp, Homo sapiens
  SIMILAR (1)..(99): 1001254mologous to Homo sapiens unnamed protein product,accession number AK027164,Smith-Waterman Score=189.
tttcgtttctggtcctttttcctcagagatcacttcaataaaaaaatgtatgaggaatttagacaacttgcttgggaagatgcaaaagaaaattacaggtcagatattttcctttacaccttcaagggaggttttattattttcctcctcctttttttcctttaccccaggtagatccgatagagggagtttttagaaaataatttttaaaactagtactgaagtagcctgattttgaaccgtgaaagtagcacaatataactagagggagacctgtattagttttctatttctgcattgcaaattaccccaaaactccataggttaaaacaataaacatttgttagttcacagcattttaaaagtttttactttttttcttgattatggaagtaatccatgtaaatagtaaatcattttaaaagtacaaaaagtatgaagaagtttgtctt

SEQ ID NO: 20471 - DNA, 2971 bp, Homo sapiens
  SIMILAR (2889)..(2969): 811254mologous to Homo sapiens Human c-myb protein fragment,accession number Y08061,Smith-Waterman Score=119.
tgcggcacaggctgaagtctgtcctcaaggtgtatgatggtcgcagagcaaggctgtgccctggaaccatgtcagggtctgtcccatggtgcagcccttggggtcctgatggttgtatttccctgtcctccctgcaacaagatcagctggacatcatctcccatggcggagacaacccatgatgcccagaggagattgagctggagatggcaaaaattcagcgtctccgggaagtcttggtccgccgggagtctgagctcaggttcatgtcatttgaggagcaatacaatgaggatcacaaaaagggtgtcattgatctcttcacagcagacagcttaaaaaccatgaccagacttgtgacaggggtgtggctcgcttacttggctgccactgcatcaaaccccttgcaggagggggagcatgcaggtgagcagattggggctgggggctgcaggtccaggcttgagggtggagccctcacctgggaccctgtccttctgccgcctgtccgtatcagcaggatgctactgctgctgctgatacctggggaattgccagggatagcgtttaagctcatgaatcctacgaaagctgaaccaatgcacatgtttatcatcttggaaccatttgatttgaggaaattgatggatgacatccagctctgcaaggacatcatggacttgaagcaggagctgcagaacttggtcgccatcccaggctgtaccagaagcatgatgctggtgtctgctcagctgctggaaggcctcaggaaacttataatcatggcggaagacaagggagcagacatgtcacgtgcccagagcaggagcaagagacctcccaaaatgctcatctgtctccttgttgatgtcttctttccagaaaaagaaaaaaccaaacttgcagaagcagagagaaggatgagctaatcccagaagattccacaaactggtgcagaagagagacttcctggttggacgatgcggaggtcgagcggttaaggggagcaagaaggaagacaaggaaatggctgatttcctgagaatcaagtgtaaaacctctagacaaagtaaccaaatctccagccagctcccgggcagagaagaaagcagagcccccgccttagcaagcccacggtggccaagacggggctggcattgatcaaggattgttgcggggccacccagtgcaacattcatgttagcccccacgtggggtgccctgggccatggggacccccccccaccctcttgtctttatagcccccatttcaccggggcccaagagctctccaaggcagaaggggttgaagggcaagcccgtggactgttcaccagagggccatgggcacggcagggcgggcctggggcaccctgttacagagttttaggcagttaggggagttttttcaccgttcgacatggttcctccccagagcatgcccgaaccccaggagtcttgtctcactgtttatccaaacaccaggaaaggtcctccctcaaaaaagcatatctccacttctctctagctgtatctaacccaccgtgtgaatgaactggggagaggggcatgctccccaagctgtgtgtagttcgtgacttcttcaacaatctaggcaccatgttcgggacacgtttccccattccaccctccttaggttctgctcttcaggagcttagggcacatggggcacaggttcccctcccgtctgttcctcttcccaggcaactgtggcctgggagggttcccacatggggcccccgtgttttttgggggcaccacccatataggcagttcccagagggcccatctgtaaagatcgagcttgtgtgtggtgtcgtggtcacatctcccgcttccccccatcctgtgtctgggcacaagttcacatcaaggacaagcgtccattgtgctctcagtctgcctcaggtgtgtgcctggagggggcctggactggcatggatcccagtgtgcagaagagcccagcagggaaaccggaaagcctctgaatgtccaaaggcccagaagccagttgaagaaatggggacccccagaagtagattgcctgacccctgggcactccccacccattcccggggcccacccacagaagaatgcccagcaggatgcccactttgcccagccccgacaacaccggacctttgtaaaaggaaccagccaaccagggcagggagagggcagccgtgtgacccagattgtgtccccgtcatttgggttggcatatgttaactaagctgcccaaacaactttcaaccccgtgtaattccatgtacatttggcaaccagccagccccggtacagccctgtgtgacttcctctgtatgtgtgtgtgtgtcggtgaccagcctaagtagttaggcattaattcaaggtgctgatgttgcagttcacccttcaggggaaattaaaatggggaaaccacgtttcacagcattttaaaagtttttactttttttcttgattatggaagtaattccatgtacatagtaaattcattttaaaagtacaaaaagtatgaagaacgtttgtcttaaaaaaaaaaaaaaattattcctccaactagagaccactctgatgtttcgacgtttttaaaaaagtctttttttgtgcattttttcatcgttgacatcatattgtgatatcatttataaccagttttttcctacttattataccaccatcttccacatcattaaaagctctttgtaaacattaaacactcttcataaatcatgccaatgtctgtttagtaatccatcttgtggatgtactgtaattcatctaatcatttcctcactattggatgtgtagactggttctaggttttcttataaatagtgtcttggattagccaggcatggtaatgggtgcctgtaatcccagctactttttgtattttagtagagatggggtttcaccatattggtcaggctggtctcgaactcctgac

SEQ ID NO: 20472 - DNA, 339 bp, Homo sapiens
  SIMILAR (112)..(264): 981254mologous to Homo sapiens Human secreted protein, SEQ ID NO: 4329,accession number G00248,Smith-Waterman Score=254.
cggcgcggtctatggctgcgacttctctaatgtctgctttggctgcccggctgctgcagcccgcgcacagctgctcccttcgccttcgccctttccacctcgcggcagttcggaatcaacagtgagacaattatgaaaccagcttcaatttcagaggaagaattgttgaatttaatcaataaactgaataatgatgataatgtagatggcctccttggtcagttgcctcttccagagcatattgatgagagaaggatctgcaatgctgtttctccagacaaggatgttgatggctttcatgtaattaatgtaggacgaatgtgtttggatcagtattcc

SEQ ID NO: 20473 - DNA, 1182 bp, Homo sapiens
  SIMILAR (310)..(909): 831254mologous to Homo sapiens precursor polypeptide (AA -29 to 315),accession number X16396,Smith-Waterman Score=827.
atggctgcgacttccctcatgtccaggttggctgcctggctgctgcagcccgtgcacagctgctccctctgccctcgccccttccacctcacggcagttacagatgaagctgttgtaatttctggaaggaaactggcccagcagatcaagcaggaagtgcggcaggaggtagaagagtgggtggcctcaggcgacaaacggccacacctgagcatgatcctggttggcgagagttctgcaagtcactcctacgtcctcaacaaaaccagggcagctgcagatgtgggaatcaacactgcctcttccagacatattgatgagagaaggatctgcaatgctgtttctccagacaaggatgctgatggctttcatgtaattaatgcagggcgaatgtgtttggaccagtattccatgttaccggctaccccatgcggtgtgtgggaaataattaagcgaactgacattccaaccctagggaagaatgtggttgtggctggaaggtcaaaaagtgttgaaatgcccattgcaatgttactgcacacagatggggtgcatgaacgtcccggaggtgatgccactgttacaatatcttatcgatatacttccaaagagcagttgaagaaacatacaattcttgcagatattgtaatatctgctgcaggtattccaaatctgatcacagcagatatgatcaaggaagaagcagcagtcactgatatgggaataaatagagttcatgatcctgtaactgccaaactgaagttggttggagatgtggattttgaaggagtcagacaaaaagccggttatatcactccagttcctggagttaaattcgaacgcagtcaggcaccgtgtatgaaatctaacaatgcgctcatcgtcatcctcggcaccgtcaccctggatgctgtaggcataggcttggttatgccggtactgccgggcctcttgcgggatatcgtccattccgacagcatcgccagtcactatggcgtgctgctagcgctatatgcgttgatgcaatttctatgcgcacccgttctcggagcactgtccgaccgctttggccgccgcccagtcctgctcgcttcgctacttggagccactatcgactacgcgatcatggcgaccacacccgtcctgtggatctacccactagtcaattcaccatcttgttga

SEQ ID NO: 20474 - DNA, 2274 bp, Homo sapiens
  SIMILAR (201)..(452): 841254mologous to Mus musculus methylenetetrahydrofolate dehydrogenase-methenyltetrahydrofolate cyclohydrolase,accession number J04627,Smith-Waterman Score=357.
ccggcgcggtctatggctgcgacttctctaatgtctgctttggctgcccggctgctgcagcccgcgcacagctgctcccttcgccttcgccctttccacctcgcggcagttcggggaatctctccctaggtcaggttggagtgcagtgctgcaatcacggcttactgcagccttgacctcctgggctcaagtgatcctcccacctcagcttaaatgaagctgttgtcatttctggaaggaaactggcccagcagatcaagcaggaagtgcggcaggaggtagaagagtgggtggcctcaggcaacaaacggccacacctgagtgtgatcctggttggcgagaatcctgcaagtcactcctatgtcctcaacaaaaccagggcagctgcagttgtgggaatcaacagtgagacaattatgaaaccagcttcaatttcagagggaagaattgttgaatttaatcaataaacttgaataatgatgataatgtagatggcctccttgttcagttgcctcttccagagcatattgatgagagaaggatctgcaatgctgtttctccagacaaggatgttgatggctttcatgtaattaatgtaggacgaatgtgtttggatcagtattccatgttaccggctactccatggggtgtgtgggaaataatcaagcgaactggcattccaaccctagggaagaatgtggttgtggctggaaggtcaaaaaacgttggaatgcccattgcaatgttactgcacacagatggggcgcatgaacgtcccggaggtgatgccactgttacaatatctcatcgatatactcccaaagagcagttgaagaaacatacaattcttgcagatattgtaatatctgctgcaggtattccaaatctgatcacagcagatatgatcaaggaaggagcagcagtcattgatgtgggaataaatagagttcacgatcctgtaactgcggggacccgggttggttggaaatgtggattttgaaggagtcagacaaaaagctgggtatatcacgtccagttcctggaggtgttggccccatgacagtggcaatgctaatgaagaataccattattgctgcaaaaaaaggtgctgaggcttgaagaagcgagaaagtgctgaagtctaaagagcttggggtagccactaattaactactgttgtcttcctgtgtcacaaacagcactccaggccagcttcaagaagcaaagcaggccaatagaaatgcaatatttttaatttattctactgaaatggtttaaaatgatgccttgtatttattgaaagcttaaatgggtgggtgtttctgcacatacctctgcagtacctcaccagggagcattccagtatcatgcagggtcctgtgatctagccaggagcagccattaacctagtgattaatatgggagacattaccatatggaggatggatgcttcactttgtcaagcacctcagttacacattcgccttttctaggattgcatttcccaaagtgctattgcaataacagttgattacttcatttttaggtaccaaaccttttygagttccaacycgatccaaaccaaaggaaaagtgttsgcthagagaaaatttggggaaaaggtkgaaaaagaaaaaatvggtbagtaattgagcagaaaaaaattcaatttcatatatgctactcgattggcaaccagatttcatctcaagtragaactygmattcggytmaggaaaaaagaaaactggcatggttaatcattttcctaagctgtccttttgaggcttagtccagtttattgggaaaatgtttaggattattccttgctattagtactcattttaggtatgttacccttcagtaagttctcccccattttaagtttttcctaggacctgaaaggattccttttcctacattaatccatgtgtgttgtcatatttgggcttttgctataataccttaacttcattggttaaatttttgtattgtatagtttctttggtgtatcttaaaacctatttttgaaaaaccaaacttggcttgataatcatttgggcagcttgggtaagtacgcaacttacttttccaccgaaagaactgtcgagcagctgcctgcttttctgtgatgtatgtatcctgttgacttttccagaaattttttaagagtttgagttactattgaatttaatcagactttctgattaaagggttttctttcttttttaataaaacacgatctgtctggtatggtatgaatttctgaaaaaaa

SEQ ID NO: 20475 - DNA, 2085 bp, Homo sapiens
  SIMILAR (211)..(1677): 251254mologous to Arabidopsis thaliana putative RNA-binding domain; 80649-84245,accession number AC016529,Smith-Waterman Score= 298.
atggcggccagtgatgtaaactgtggcgcctgctttgcagagctgcaaggcaatgccacggccaatacccctggaggcaccagtcaccacacacacttggccattcatgggagctgccatgactcacaggcaaaggaggcaggccgtaagcggcaaccctggccgcctccggatgggcgctcggagccggctccagattcgcacccgcacctgagcccggaagctctgggatatttccgccgggcgctgtcagcattgaaagaggctcccgagactggggaagaacgagatctgatggtgcacaatataatgaaggaagtagagactcaggccctagctttgtccacgaacaggactggcagtgagatgctgcaggaactgttgggattcagtcccttgaaaccgctttgtcgcgtgtgggctgctctgcgctctaacttgcgcactgtggcctgtcaccgatgcggggtccatgtattacaaagtgctttgctacagctccctcgattgctggggagtgctgcagaggaggaggaggaggaggaggaggatggaaaggatggtcccacggagaccctggaggagctggtcctgggactagccgctgaggtgtgtgatgattttcttgtctactgtggagacacacatggcagcttcgtggtcagaactctgcttcaggtgttaggagggactattctggagtctgagagagccaggccccgtggttcccaatcatctgaagcacagaagaccccagctcaggaatgtaagccagctgattttgaagtccctgaaacctttttgaatcgccttcaggacctgagctcctcctttttgaaggacattgcagtgtttatcactgataagatctccagcttctgtcttcaagtggctttacaggttttacaccgcaaacttgcccagttttgcgctcatatctgcaatgctgtgattggctacctgagtgctcgcggatcctcagtagatggcaagcccctactgctatttctccgagatcaaacgagtttcagactcctggagcaggtcctgctggtgttggagcccccaagactccagagcctctttgaggagcacttgcaggggcagctgcagaccctggctgcacatcccattgccaacttccctttgcagcgcttactggatgcagtcactacccctgagctgctgtcccctgtgtttgaggagctgagccctgtcttggaagctgtattggcccagggccacccaggggtagtcattgccctggtgggggcctgtcgcagagttggggcctaccaagccaaggtcctacagctcttgttggaggcattccactgtgcagagccctcatcccggcaagtggcctgtgtgcctctctttgccactttgatggcttatgaggtgtactatggactgacggaggaggagggggcagtgcctgcagagcaccaggtggcaatggccgcagccagagccttgggggatgtgacagtccttgggtctctactgctccagcatctgctgcacttctccactcctggtcttgtacttcgaagtctgggtgccttgacgggaccacagcttctgtcccttgcccaaagtcccgctggctctcatgtgctcgatgccatcctgaccagcccctctgtgacgcgcaagttgcgccgccgtgtgcttgcagaacctaaaggggacaaatattgtggctctggcctgtaagtccccatgacaaccccgtgtgctaaaatgccatctggagtggagcagccttgagggcccggaaggaaaattgctgctgagcttggggagcagaaccaggagctgataagagccccctttcggccaccatgtggctcgaaatgtggccttgactaccttcctaaagcggcgagaagcttgggaacagcagcagggtgcggtggccaagcggaggcgggcattgaactccatacttgaagactgaggctttggatctgggactgggtgttgatgggggagggcaaaatggggtatccaccccatccctttcctggtttaaattggagtcagaagtcttaagtggtaaatatttgatatttttattgg

SEQ ID NO: 20476 - DNA, 393 bp, Homo sapiens
  SIMILAR (196)..(390): 981254mologous to Homo sapiens AP-4 adaptor complex beta4 subunit,accession number AF092094,Smith-Waterman Score=324.
gtattaacaactcatcttggaattttaagccttttttgtgtaaactttaaatagtacatgaaaagtgacttaattatggcacagcctatttttaagaattctccctttgctatgatgaacaaccacctggtcatatggcagtggcatggaaatggtcctaattttgttgctaaaatagctcttttgttttgttttttggatagaatgtcaaaactggaccaatggggccaggctgaagtattgaactttttgctacgctaccaaccccgcagtgaggaagaactatttgacattctcaatctgttggatagtttcctcaagagcagtagcccaggtgtggtgatgggagctaccaaactttttctgatcttggcaaaaatgtttccccacgcc

SEQ ID NO: 20477 - DNA, 563 bp, Homo sapiens
  SIMILAR (150)..(356): 981254mologous to Homo sapiens AP-4 adaptor complex beta4 subunit,accession number AF092094,Smith-Waterman Score=353.
  misc_feature (1)...(563): n = a,t,c or g
gctgagaaccctagattaaatgaagtaaactaaagattacaccttttctgctggcactaagcgaaaagcaaaaccagtggctgtctattatctcctgtgttttagacagtcaagtgttgagcacttgctcttattcctttattctctaggggaagcaagcacttatttggctacttggtgtccatggggaaagaattcctaatgctccttatgtgttagaggactttgttgagaatgtgaagtcggaaacatttccagctgttaagatggagctgctcactgctttgctgcgccttttcctctcccgacctgctgagtgccaggacatgctaggacgtttgttgtattactgcataggtgggtttttcagaaggaaatagtatttgccatgacccatagtaaaaattcttaatagctttcattgtttggtgagtcacgtctgggacccgagaagaaaatgtgaatgcttcctaggttttcctctctccttcatttttttctcctattatggntggcacaagagtaggaggaaagtggttttgtttttaatgaagtcaatctgt

SEQ ID NO: 20478 - DNA, 2410 bp, Homo sapiens
  SIMILAR (805)..(1827): 991254mologous to Homo sapiens AP-4 adaptor complex beta4 subunit,accession number AF092094,Smith-Waterman Score=1764.
atgggcgtatgggggatcaggaccccattcatggtggtagggttggagtcaccagtgggatcttctccacgggggcagggctcctgcgtgaggcttccacaacggcgtcccgataaaagtcatgctggggcaagaacagggccagagaccctaagggaaagagcccagcagagcaataagttaccagagtgggcagaaaaaggaagtcaccctgcccgctggagcccaaatcgcggagggcgctggacactcccaaccgcgcgggagcggaggccgagccgggcactcaaagcgcgcgctgcagggaggagacaggccaaagtagccgatttccgattgcccgccgcagctccaccagagggagccgcgcagctgcgcctggagagtgagaggctcccacatcaggacgagaaggagccctcgagttaccgtgggagctgtgggagctgccctgtgactcttaggaagatgccgtaccttggctccgaggacgtggtgaaggagctgaagaaggctctgtgcaatcctcacattcaagctgataggctgcgctaccggaatgtcatccagcgagtgattaggtacatgactcaaggcttggacatgtctggtgtttttatggaaatggtgaaggccagtgccactgtagatattgtccagaagaagttggtttatctgtacatgtgcacatatgctcccctgaaaccagatctggctctcctggccatcaatacgctgtgcaaagactgctcagaccccaatccaatggtgcgagggctggcgttacggagcatgtgtagcctcagaatgtcaaaactggaccaatggggccaggctgaagtattgaactttctgctacgctaccaaccccgcagtgaggaagaactatttgacattctcaatctgttggatagtttcctcaagagcagtagcccaggtgtggtgatgggagctaccaaactttttctgatcttggcaaaaatgtttccccacgtacaaactgatgtccttgtgcgggtcaagggacctttgctagctgcctgttcttcagagagccgtgagctctgttttgttgctctttgtcatgtacgccagatcttgcatagtttaccaggtcactttagcagccactacaaaaagtttttttgctcctactcggagccccactacatcaaactacagaaagtggaggtgctgtgtgaactggtgaacgatgagaatgtgcagcaggtgctagaggagcttcgagggtactgcacggatgtgtctgcggactttgcacaggctgccatctttgccataggtggcattgccaggacttacacagatcaatgtgttcagattttaacagagttgctgggtcttcgacaagagcacattaccacagtggtggtgcagactttccgagacctggtttggttgtgtcctcagtgtactgaagctgtatgtcaggccctgcccggctgtgaagagaacattcaagatagtgaggggaagcaagcacttatttggctacttggtgtccatggggaaagaattcctaatgctccttatgtgttagaggactttgttgagaatgtgaagtcggaaacatttccagctgttaagatggagctgctcactgctttgctgcgccttttcctctcccgacctgctgagtgccaggacatgctaggacgtttgttgtattactgcatagaggaagaaaaagatatggctgtacgggaccgaggtctcttctattatcgcctcctcttagttggcattgatgaagttaagcggattctgtgtagccctaaatctgaccctactcttggacttttggatggatccggcagaaagacctgtgaatagctgggcctcagacttcaacacactggtgccagtgtatggcaaagcccactgggcaactatctctaaatgccagggggcagagcgttgtgacccaaagcttcctaaaacttcatcctttgccgcatcaggacccttgattcctgaagagaacaaggagagggtacaagaactccctgattctggagccctcatgctagtccccaatcgccagcttactgctgattattttgagaaaacttggcttagccttaaagttgctcatcagcaagtgttgccttggcggggagaattccatcctgacaccctccagatggctcttcaagtagtgaacatccagaccatcgcaatgagtagggctgggtctcggccatggaaagcatacctcagtgctcaggatgatactggctgtctgttcttaacagaactgctattggagcctggaaactcagaaatgcagatctctgtgaaacaaaatgaagcaagaacggagacgctgaatagttttatttctgtattagaaactgtgattggaacaattgaagaaataaaatcataa

SEQ ID NO: 20479 - DNA, 2975 bp, Homo sapiens
  SIMILAR (2571)..(1237): 941254mologous to Homo sapiens AP-4 adaptor complex beta4 subunit,accession number AF092094,Smith-Waterman Score=2164.
  misc_feature (1)...(2975): n = a,t,c or g
tttccacacatcagccatctttaattactaacacaattcctaaaattgattaggaaataatccaaatcccatcctcaacgcatctccttaccaacattaacctctacaacatcatcactgaaaaatggggtcaattgccaataggaatgaaaggaatgaatcaatgttctttggccaaaaacttaagaatcctgatttctagattttccactctcctttgtatctgatattatctggacttactggcagctctaataggaaagactaagaaagtgtaatagttattcatcttactctagacaagcaacaagactctgttatgattttatttcttcaattgttccaatcacagtttctaatacagaaataaaactattcagcgtctccgttcttgctgcattttgtttcacagagatctgcatttctgagtttccaggctccaatagcagttctgttaagaacagacagccagtatcatcctgagcactgaggtatgctttccatgggccgaggacccagccctactcattgcgatggtctggatgttcactacttgaagagccatctggagggtgtcaaggatgggaattctccccgccaaggcaacacttgctgatgaggcaactttaagggctaagccaagttttctcaaaataatcaggcagtaaagctgggcgattgggggactaggcatgaggggctccaggaatcaggggagttcttgtaccctctccttgttctcttcaggaaatccaagggtcctgatgcggcaaaggatgaagttttaggaagctctgggtcacaacgctctgccccctggcatttagagatagttgcccagtgggctttgccatacactgggcaccagtgtggttgaagtctgaggcccagctattcacaggtctttctgccggatcctcccaaaagtcccaagagtagggttcagatttagggcctacaacaaaaatccgcttaaacttcatcaaatgcccaactaagaggaggcggataatagaagagacctcggtcccgtaacagcccatatctttttcttcctctatgcagtaatacaacaaacgtcctagcatgtcctggcactcagcaggtcgggagaggaaaaggcgcagcgaagcagtgagcagctccatcttaacagctggaaatgtttccgacttcacattctcaacaaagtcctctaacacataaggagcattaggaattctttccccatggaccaccaagtagccaaataagtgcttgcttcccctcactatcttgaatgttctcttcacagccgggcagggcctgacatacagcttcagtacactgaggacacaaccaaaccaggtctcggaaagtctgcaccaccactgtggtaatgtgctcttgtcgaagacccagcaactctgttaaaatctgaacacattgatctgtgtaagtcctggcaatgccacctatggcaaagatggcagcctgtgcaaagtccgcagacacatccgtgcagtaccctcgaagctcctctagcacctgctgcacattctcatcgttcaccagttcacacagcacctccactttctgtagtttgatgtagtggggctccgagtaggagcaaaaaaactttttgtagtggctgctaaagtgacctggtaaactatgcaagatctggcgtacatgacaaagagcaacaaaacagagctcacggctctctgaagaacaggcagctagcaaaggtcccttgacccgcacaaggacatcagtttgtacgtggggaaacatttttgccaagatcagaaaaagtttggtagctcccatcaccacacctgggctactgctcttgaggaaactatccaacagattgagaatgtcaaatagttcttcctcactgcggggttggtagcgtagcagaaagttcaatacttcagcctggccccattggtccagttttgacattcgatttaagagatggtgagcaatgggcttattgatgacaacgcctccttcctgtttcagaatttcctctagagacctcaagcagttcacaactacaattggatcctggtcacgcagcaaactgtataattcatttaccagggcaccatctacttcagagtctccatgaagattatgcatcttggcacatccaaggactaccactctcctgacatatgaagccttatcccgcagaccattgagaataggctgttgtatatactcctgcacaccaggcatcctgaggctacacatgctccgtaacgccagccctcgcaccattggattggggtctgagcagtctttgcacagcgtattgatggccaggagagccagatctggtttcaggggagcatatgtgcacatgtacagataaaccaacttcttctggacaaatatctacagtgggcactggccttcaccatttccataaaaacaccagacatgtccaagccttgagtcatgtaccttaatcactcgctggatgacattccggtagcgcagcctatcagcttgaatgtgaggattgcacagagccttcttcagctccttcaccacgtcctcggagccaaggtacggcatcttcctaagagtcacagggcagctcccacagctcccacggtaactcgagggctccttctcgtcctgatgtgggagccatcggccggcaggccgttcgccccgcccacagatcgctcccgctacttctaggtcctccgccggatttccagcgccgcgtccgactgaccgcagacccctccctctccagttccagccttaattccccctccacgccgttctcatcgcggataggcccaatcttgctttctgcggaagtcccgcccccttgtcaagagaccaaacagaagagcgctgccggtctccccgcgagcgagcgctaagcgtagtcccgactccgaccttaggatgcccttcacgaaatcgtcgacccgggacattncnnacggtcctgcagtgggaggcat

SEQ ID NO: 20480 - DNA, 425 bp, Homo sapiens
  SIMILAR (56)..(166): 1001254mologous to Homo sapiens dJ1163J1.2 (novel protein similar to C. elegans B0035.16 and bacterial tRNA (5- Methylaminomethyl-2-thiouridylate)-Methyltransferases),accession number AL031588,Smith-Waterman Score=211.
ttttttttttgaggaatgtttcacacttggaactgaagtcattttcttttattctagtgactttttgaatgagtatgaaaaaggaaggactcccaatcctgacatagtttgcaacaagcacatcaaatttagttgcttttttcattatgctgtggataatcttggtaagtaatttgggtttaaaacatttttttttttaaagacagggtctcgctctgtcacccaggctggattgcagtggtgcgatcatgactcactgcagcctcgacctcctgggctcaagagattctcccaccccaggctcctgagtagcttggaccacaggcatgccaccatggtcgtgaattttttgtggagatggtgtcacaactgtattgtccaggctggtctcagatttctggcctcaagcagtcctcctgcctcgg

SEQ ID NO: 20481 - DNA, 1391 bp, Homo sapiens
  SIMILAR (546)..(1019): 811254mologous to Homo sapiens dJ1163J1.2 (novel protein similar to C. elegans B0035.16 and bacterial tRNA (5- Methylaminomethyl-2-thiouridylate)-Methyltransferases),accession number AL031588,Smith-Waterman Score=662.
gacttccggcaaggcgcggaagcggcggtagctgcagctggcgaagttgggcgactggcggatgcaggccttgcggcacgtccactgccgttttaccgaaggttgatttatgtattctctttaattgaccttcccgcccgcaggttaccaggtgacaggggtgtttatgaagaactgggactcactgggatgaacatggggttctgtactgccgacaaaagactgtgaaagatgctttacagagtttgccagatcttaggacatcccttttccatcaagtgtcctatggaactgaagtcattttcttttattctagtgactttttgaatgagtatgaaaaaggaaggactcccaatcctgacatagtttgcaacaagcacatcaaatttagttcctgatccttgtgttctaaaaacctcacaggggcagatgccattgccacaggtcactatgcaagaacttccctggaagatgaagaagtctttgagcagaagcacgttaagaagcccgaagggccagcctcatggagaaactgtctttctgtaggttggttcctgtataccttgggccagagagcaaacataggtggcctgagagagccctggtacgtggtggaggcgtccccaccttcacattccattctgcaggccccccggacagaccacccagccctgtacagggacctgctgaggaccagccgcgtgcactggattgcggaggagcctcccgcagcactggtccgggacaagatgatggagtgcccccctccaagggcccctctcttctacccagtgccctgtgtgctgaccctcaatcaagatggcaccgtgtgggtgacagctgtgacccctgatgccagggtctctcccctacagtttgctgtgttctacaagggggacgagtgcctgggcagcgggaagatcctgcggctggggccgtctgcctacacgctccagaagggccagcgcagagctgggatggccactgagagccccagtgacagcccagaagatggtcccaggcctgagtcccttgctctgacagagatggatctgctagaaggaaccctggagagcaggacccatggctgggcggctggtgagcagtcccagggtcccaagggccagcttgctgctgcccaaagcagaggaagccgggctggctgagggtccgaaaagcctgcagggggccgggcgacccccaggaaaagcctcagctccaggctggggctttggctgctggagcatttgctggctggtggggtggcccgagttccccttcaccgcccccagggagggtttcccacctcagagtacaccgaggggacctgcaaagggggctgtcgggacagcgtggaataaacattatttcaaggaaaaaaaaaaaaaaaa

SEQ ID NO: 20482 - DNA, 511 bp, Homo sapiens; identical to SEQ ID NO: 11783
  SIMILAR (45)..(392): 921254mologous to Homo sapiens bA508N22.1 (HSPC025),accession number AL117339,Smith-Waterman Score=556.
  misc_feature (1)...(511): n = a,t,c or g

SEQ ID NO: 20483 - DNA, 509 bp, Homo sapiens
  SIMILAR (2)..(100): 901254mologous to Homo sapiens dJ1014D13.1 (proteins HSPC021 and HSPC025 (similar to C. elegans FAT-3 alcohol dehydrogenase)),accession number AL022311,Smith-Waterman Score=157.
  misc_feature (1)...(509): n = a,t,c or g
ccgcctgcactccctgttaggagattactaccaggccatcaaggtgctggagaacatcgatctgagcacgaagagtatgtattcccgtgtgccagagtgccatggtcaccacatactattatgttgggtttgcatattcgatgatgcgttgttaccaggatgccattcgggtcttcgccagcatcctcctctacatccataggaccaatagcatgttccagaggaccaagtacaagtatgagatgattatcatgctgaatgagcagatgcatgcgctgctggccattgccctcacgatgtaccctatgcgtatcagatgagagcatctacctgcatctgcgggagaaatatgttgacaagatgttgcgcatgcagaatggtgacctccaagtctatgaagaacttttcaggtactcctgcaccaagttcctgtagnctgtaccgcccaactatgatactgtgcacgcgcactaccacactgagtcgttcctgcagagtttgaggcgtct

SEQ ID NO: 20484 - DNA, 2288 bp, Homo sapiens
  SIMILAR (1867)..(2157): 1001254mologous to Homo sapiens HSPC021,accession number AF077207,Smith-Waterman Score=514.
tttttttttttttctggctccaaagatcctttactgagatccactttgaaacactttcggtccttaacttgttaactgagttgacaaggctgatggctgatctaggtaaaggtttcacggttagcaaaaacacttcctgcctataatacattcaaaaccaggttcccggaatgtgtggtgaatatcatccaaggtctctgtccccattcttcttcaggggttcggattaagctcctccaaatttgtggaatctgacggatgaagaaatccccataacgcctggcgaccttggtgtccgcgatgtggaatcatgtccttatcaaatgtagaagtcaacctctgaggctgactgaaattcaacccatccagggcttgagatacccgctgggtccacacggaggttcttcatcttgttgtttgaagacaagaagctgggatcccggaacccctgctctgtgaggtcccaggaagccaagccaggcttggccaacagggcatgggtggtgtagaagcttcaggaagctgcggatggttgaaagctgggcctgctggctgtacttcatcagaaaacacctttcagctgcttgcaggaagggcttctttgtggtaagttggggtgcacattatcatagttgggcactacaggcgaacaggaacttggggcaggagtaactgaaaagttcttcatagacttgtgggtcacctttcatgcatgcgcaacatcttgtcccccatatttctcccgcagctggaggtgaatgctctcatcgatacgcatggggtacatcgtgagggcaatggccagcagcgcatgcatctgctcattctgcttgttaatcatctcatacttgtacgtggtcctctggaacatgctcttggtcctctggatgtagaggaggatgttggcgaagacccggatggcatcctgggtaacgacgcatcatcaaatatgcaaacccaacataatagtatgtgggtgacctgggcactctgggcacacgggaatacatactcttcttgttcagttcgatgttctccagcaccttgatggcctggtagtaatctccctaacagggagtgcaggcggagaagcccgaccaggctgaagtaaccaagcattttgtagagggagtgccggcccatactcccccagccacactctcagggtcacctccgcttgtgtatacctccaactgtcggttgatgttggatttgtctgccagggaatgaaggacattgaggacactatgaacattccagattttgggattggaacgaagaaagtcaatctcctcctctgacttcttggcagtcttacaagcggtactgactgaatgacttgaaactggtagatgaactcatcgataatacccaaaacccactggttgggtagttcaaaggggagcgggacccatcggcattaagaatgtagttgaaaagattgcagtagttgtaataggattcaaacctctgctcccaaggaaggtcccccactgactttggcatatatgtgcctgtaagtataattctttggtataaaatcaggaagacagcatcattgccaaaccttgtggagcaatggcttccagcctccgggccaaggtgtattcttgaagaatctttcagtcaagcttggtccagctgttctcatagatgtcctggatctcatacaccttctggtcaatgacatcacttggagacacgacttggcctgtagctcatccacttttctggtcaatcaaatctgagacagttttgtggaaatactggatgaagtttttgatcacctcagggatcacctgataggtttggttgttcatactgacggttcataagcaaggtccttgctttggatctcctgtgtgcatgtcttatcccgctgatgattatgagtctgaggcggcttatgacccctacgcttatcccagcgactatgatatgcacacaggagatccaaagcaggaccttgcttatgaacgtcagtatgaacagcaaacctatcaggtgatccctgaggtgatcaaaaacttcatccagtatttccacaaaactgtctcagatttgattgaccagaaagtgtatgagctacaggccagtcgtgtctccagtgatgtcattgaccagaaggtgtatgagatccaggacatctatgagaacagatgctgtcttcctgattttatacaaagaattatactacaggcacatatatgccaaagtcagttttcagtcattcagtcagtaccgctgtaagactgccaagaagtcagaggaggagattgactttcttc

SEQ ID NO: 20485 - DNA, 446 bp, Homo sapiens
  SIMILAR (1)..(204): 1001254mologous to Homo sapiens dJ1014D13.1 (proteins HSPC021 and HSPC025 (similar to C. elegans FAT-3 alcohol dehydrogenase)),accession number AL022311,Smith-Waterman Score=344.
  misc_feature (1)...(446): n = a,t,c or g
cgcagcttcctgaagctctacaccaccatgcctgtggccaagctggctggcttcctggacctcacagagcaggagttccggatccagcttcttgtcttcaaacacaagatgaagaacctcgtgtggaccagcggtatctcagccctggatggtgaatttcagtcagcctcagaggttgacttttacattgataaggacatgatccccaaatttgaggagcttaatcgaaccctgaagaagatgggacagagaccttgatgatattcacacacattcaggaacctgttttgatgtattataggcaggaagtgtttttgctaccgtgaaacctttacctagatcagccatcagcctgtcaactcagttaacaagttaaggaccgaagtgtttcaagtggatctcagtaaaggatctttggagccagnnnnnnnnnnnnnnnnnnnnnn

SEQ ID NO: 20486 - DNA, 411 bp, Homo sapiens
  SIMILAR (282)..(410): 811254mologous to Homo sapiens bA508N22.1 (HSPC025),accession number AL117339,Smith-Waterman Score=202.
  misc_feature (1)...(411): n = a,t,c or g
ccctcctaaaaaangcttgggttacttnaaccctnggtcgggcttctccggcctgnactccctgttaggagattactacccaggccatcaaggtgctggagaacatcgaactgaacaagaagagtatgtattcccgtgtgccagagtgcccaggtcacccacatactattatgttgggtttgcatatttgatgatgcgtcgttacccaggatgccatccgggtcttcgccaacatcctcctctacatccagaggaccaagagcatgttccagaggaccacgtacaagtatgagatgattaacaagcagaaaggtgacccacaagtctatgaagaacttttcagttactcctgccccaagttcctgtcgcctgtagtgcccaactatgataatgtgcaccccaactaccacg

SEQ ID NO: 20487 - DNA, 415 bp, Homo sapiens
  SIMILAR (1)..(225): 981254mologous to Homo sapiens dJ1014D13.1 (proteins HSPC021 and HSPC025 (similar to C. elegans FAT-3 alcohol dehydrogenase)),accession number AL022311,Smith-Waterman Score=389.
  misc_feature (1)...(415): n = a,t,c or g
gaccctgagagtgtggctggggagtatgggcggcactccctctacaaaatgcttggttacttcagcctggtcgggcttctccgcctgcactccctgttaggagattactaccaggccatcaaggtgctggagaacatcgaactgaacaagaagagtatgtattcccgtgtgccagagtgccaggtcaccacatactattatgttgggtttgcatatttgatgatattcacacacattcaggaacctgttttgatgtattataggcaggaagtgtttttgctaccgtgaaacctttacctagatcagccatcagcctgtcaactcagttaacaagttaaggaccgaagtgtttcaagtggatctcagtaaaggatctttggagccagnnnnnnnnnnnnnnnnnnnnnnnnnnnnn

SEQ ID NO: 20488 - DNA, 446 bp, Homo sapiens
  SIMILAR (380)..(445): 1001254mologous to Homo sapiens dJ466N1.5 (proteins HSPC025 and HSPC021 (similar to C. elegans FAT-3 alcohol dehydrogenase)),accession number Z97630,Smith-Waterman Score=114.
accggcccgtagatccccgttcgacccacgcgtccggctgatgattatgagtctgaggcggcttatgacccctacgcttatcccagcgactatgatatgcacacaggagatccaaagcaggaccttgcttatgaacgtcagtatgaacagcaaacctatcaggtgatccctgaggtgatcaaaaacttcatccagtatttccacaaaactgtctcagatttgattgaccagaaagtgtatgagctacaggccagtcgtgtctccagtgatgtcattgaccagaaggtgtatgagatccaggacatctatgagaacagatgctgtcttcctgattttatacaaagaattatactacaggcacatatatgccaaagtcagttttcagtcattcagtcagtaccgctgtaagactgccaagaagtcagaggaggagattgactttcttc

SEQ ID NO: 20489 - DNA, 679 bp, Homo sapiens
  SIMILAR (80)..(274): 801254mologous to Homo sapiens dJ466N1.5 (proteins HSPC025 and HSPC021 (similar to C. elegans FAT-3 alcohol dehydrogenase)),accession number Z97630,Smith-Waterman Score=252.
cggggtgatctctgggaccactggatgtgggtctggctgagtactcgtagggatcagttcctttggaatgtcttagaaccaggtgatcaaaaacttcatccagtatttccacaaaactgtctcagatttgattgaccagaaagtgtatgagctacaggccagtcgtgtctccagtgatgtcattgaccagaaggtgtatgagatccaggacatctatgagaacaggtatgggctactggctgaaagggcctctttctgggtgggactggcctggtaatatagttcctacaaataggttggcaatggtaggtgtgagctctttatatcttgtgcactgagtggaatccagtggctgagtcattatagtgagtctgagatttggccaagagggtgtgtgtggttatgatgaggttcagcattggcctccagcttttaccaggtatctggtcagcttcagcctaatttgaaataactggtccatgccaggaatagctgttactattgtttttccaatcccaaaatctggaatgttcatagtgtcctcaatgtccttcattccctggtagacaaatccaacatcaaccgacagttggaggtatacacaagcggaggtgagtgcagcaggccgacagccgtggcctgcgaatttccagctgcttgccatctgttccaaatgaat

SEQ ID NO: 20490 - DNA, 2096 bp, Homo sapiens
  SIMILAR (68)..(799): 341254mologous to Homo sapiens HSPC021,accession number AF077207,Smith-Waterman Score=189.
tccctggtcgacccacgcgtccgcccacgcgtccgggtgctcgcaagcgaggcagccatgtcttatcccgctgactgattatgagtctgaggcggcttatgacccctacgcgtgatcccagcgactatgatatgcacacaggagatccaaagcaaggaccttgcttatgaaccgtcagtatgaacaaccaaacctatcaggtgatcccctgaggtgatcaaaaacttcatccagtatttccacaaaactgtctcagatttgattgaccagaaaagtggatgagctacaggccagtccgtgtctccaagtgattgtcattgaccaagaaaggttgtatgaagattccaggaccatctattgagaacaagcttggaccaagcttgactgaaagattctttcaagaatacaccttggcccggaggctggaagccattggttccacaaggtttggcaatggatgctggtccttcctggatttttatccaaagaattatacttacaggcacatatatgccaaagtcagtgggggaccttccttgggagcagaggtttgaatcctattacaactactgcaatcttttcaactacattcttaatgccgatgggtcccgctcccctttgaactaccccaaccagtgggctctggggatatttatcgatggagttcatctacccagttttcagtcatttcaagtcagtaccgctggtaagacctgcccaagaagtcagaggaggagatttgactttcttcgttccaatcccaaaatctgggaatgttcatagtgtcctcaatgtcctttcattccctggtagacaaatccaacatcaaccgacagttgggagggtatacacaagcgggaggtgacccctgagagtgtggctgggggagtatgggccggcactccctctacatgatgtttgcattacttcagcctagtccgagcttctcccgcctgcactccctgttagggagattactaccaggccatcaaggtgctggagaacatcgaactgaacaagaagagtatgtattcccgtgtgcccagagtgcccaggtcacccacatactattaatgttgggtttgcatatttaatgatgcgtcgttacccaggatgccatccgggtcttcgccaacatcctcctctacatccagaggaccaagagcatgtttccagaggacccacgtacaagtatgagatgatttaacaagcagattgagcagatgcatgcgcttgctggccattgccctcacggatgtaccccatgcggtattgatgagagcattcacctccagctgcgggagaaatatgggggacaaagatgttgcgcatgcagaaaaggtgacccacaagtctatgaataacttttcaggttactcctgcccccaggttcctggcggctggtagtgcccacctatgataatgtgcaccccaacttaccacaaagagccccttcctgcaagcagctgaaaggtgtttttcttgatgaagtacaggcagcagggcccagctttcaaaccaatccgcagcttcctgaagcttctacaccacccatgccctgttggccaagcctggcttggcttccctggaccctcacagaggcagggagttccgggatcccaggtttctttgtctttcaaaccaccaaggatgaaggaacctcgtgttgggaccagccggtatctcaagcccttggattggtgaaatttcagtcagccctcagagggttgaccttcctacattgaataaggacatgatcccacatcgcgggacacccaaggtcccccaggcggtaatgggggatttccttcatcccgtcagatcccacaaatttggaggagcttaatccgaacccctgaaggaaggatggggacagagaccttggatgatattcaccacacatttcagggaacctgtttttgatgtaattatagggcagggaagtgttttttgctaaccgtgaaaccttttacctagatcagccatcagccttttccaactcagttaacaagtttaagggaccgaaagtgtttcaagtgggatcttcagttaaaggatctttggagccagaaaaaaaaaaccaaaaaaagtcgacg

SEQ ID NO: 20491 - DNA, 413 bp, Homo sapiens
  SIMILAR (17)..(412): 921254mologous to Homo sapiens KIAA0666 protein,accession number AB014566,Smith-Waterman Score=652.
gaattccgcacgagctcccccagggcctcctcccttaggggcaatcatgccacctcctggtgctccaatgggcctagcactgaagaagaaaagcattcctcagcccacaaatgccctgaaatccttcaactggtctaaactgcccgagaacaaactggaaggaacagtatggaccgaaattgatgatacaaaagtcttcaaaattctagatcttgaagacctggaaagaaccttctctgcctatcaaagacagcagaaagaagcagatgccattgatgacactctgagttccaaacttaaagttaaagagctttcggtgattgatggtcggagagctcagaattgcaacatccttctatcgaggttgaaattatccaatgacgaaatcaaacgggcaattctaacaatggacg

SEQ ID NO: 20492 - DNA, 621 bp, Homo sapiens
  SIMILAR (256)..(555): 691254mologous to Homo sapiens dJ90A20A.1 (KIAA0381),accession number AL357412,Smith-Waterman Score=351.
gagaaatcacatagatcaagtacttagattgttggtaaattgctatttgcaaatatgcgtgtgcacatgggcatggctttggcatggtgggaggaagggcaggggcactagagtataacaaaatgttttagaacaagttttgatgtgtttgccattctgatttattaaatttaaggcatgtgaaatatgagacgaggtgtgtctcatgtctgtatttgaagcctgcattgacattattcatttcctgtgtttaaggagctggaatatcagaagtctcagcccccacagcccggagataagtttgtgtctgttgtcagccagttcatcacagtagccagcttcagcttctctgatgttgaagaccttctagcagaagctaaagacctgtttactaaagcagtgaagcactttggggaagaggctggcaaaatacaaccagatgagttctttggcatttttgatcaatttcttcaagctgtgtcagaagccaaacaagaaaacgaaaatatgagaaagaaaaaggaggaagaagaacgtcgagctcgcatggaagctcagctcaaagaacaacgtgaaagggaacgtaaaatgagaaaagctaaagagaatagtgaagaaagc

SEQ ID NO: 20493 - DNA, 3592 bp, Homo sapiens
  SIMILAR (1121)..(2161): 931254mologous to Homo sapiens KIAA0666 protein,accession number AB014566,Smith-Waterman Score=1747.
atggccccaagaaagagaggtggacgaggtatttcattcatcttttgctgtttccgaaataatgatcacccagaaatcacgtatcggctgcgaaatgatagcaactttgcgcttcagaccatggaaccagcattgcccatgccccctgtggaggagctggatgtcatgttcagtgaactggtggatgaactggacctcacagacaaacacagagaagccatgtttgcacttccagctgagaaaaaatggcaaatatactgtagcaagaaaaaggaccaggaagaaaacaagggagctacaagttggcctgaattctacattgatcagctcaattccatggctgctggcattcttgaaggagtgtttgtccacattgtcatcacccattgtctgcagaatcagcagcaactactacatgacaagcagggtaacaggcacttcatatgttgtttgcggtcccaccagcatcctatgctacccgcgtgttccaatgtacaccttagcagctttgacagaaagaccctctgcaaggatgcgctttgtcctttgcctgcttctcatgtgagcaggtatttaagaaaatctctgctggctttagagaaggaagaagaagaagaaagaagtaaaactatagagagtttaaagacagcactgaggacaaaaccaatgaggtttgtaaccagattcatcgacttggatggcctatcatgtatcctcaactttctaaagaccatggactacgagacctcagagtctcgaatacatacttctctcattggctgtataaaggcgttaatgaacaactctcaaggccgggctcacgtcctggctcattctgagagtattaatgtaattgctcagagtctgagcacagagaacattaaaacgaaggtggccgtgctggaaatcttgggcgccgtgtgcctggttcccgggggccacaagaaggttctgcaggccatgctgcactaccagaagtatgccagcgaaaggacccgctttcagacattaattaacgacttggataaaagcactgggcggtatcgagatgaagtgagtctcaagactgccatcatgtccttcattaatgcagtgctcagccaaggtgcaggagtggagagtttggactttagacttcatcttcgctatgaaatttctgatgttaggaattcaccctgtaatggataaattaaggaaacacgaaaattcaacattagataggcatttagacttttttgaaatgctccgaaatgaagatgaactagaatttgccaaaagatttgaactggttcacatagacacaaaaagtgcaactcagatgtttgagctgaccaggaagaggctgacacatagtgaagcttacccgcatttcatgtccatcctgcaccactgcctccaaatgccttacaagaggagtggcaacactgttcagtactggctactactagatagaattatacagcagatagttatccagaatgacaaaggacaggaccctgactccacacctttggaaaactttaatattaagaatgtcgtacgaatgttggttaatgaaaatgaagttaagcagtggaaagaacaagcggaaaaaatgagaaaagagcacaatgagctacaacagaaactggaaaagaaagaacgagaatgtgatgctaagactcaagagaaggaagagatgatgcagaccttaaataaaatgaaagagaaacttgaaaaggagactactgagcataagcaagtcaagcagcaggtggcggacctcacagcacagctccatgagctcagcaggagggccgtctgtgcttcaatcccaggtggaccctcgcctggagcaccaggagggccctttccttcctctgtgcctggatctctccttcctcccccaccacccccacctctaccaggtggccctcctcctcccccagggcctcctcccttaggggcaatcatgccacctcctggtgctccaatgggcctagcactgaagaagaaaagcattcctcagcccacaaatgccctgaaatccttcaactggtctaaactgcccgagaacaaactggaaggaacagtatggaccgaaattgatgatacaaaagtcttcaaaattctagatcttgaagacctggaaagaaccttctctgcctatcaaagacagcagagtcatgacaccctgttcaaactctctggacttcagccagttgtttggctagatacaattctcagagaggcaaaggaacattacaaaggtaatggcatgaataccattacctgtatgcatgcaacaggaaccctgcacagaaaagaagcagatgccattgatgacactctgagttccaaacttaaagttaaagagctttcggtgattgatggtcggagagctcagaattgcaacatccttctatcgagagctcagcagctgcaagcagcaagagaggaggggatgaaagcagccaccaggcacatcctaaatcggagtaaggaaatgctggcatcaacacttgtctgggaagagtgttgtatagaggaaacggaactcttgaaatttgttcctgaaaaaagtgacattgacctattggaggaacataaacacgaactggatcggatggccaaggctgataggttcctttttgagatgagccgaattaatcactatcagcaaaggttgcaatcgctgtacttcaaaaagaagtttgcagagcgtgtggcagaagtgaaacctaaagtggaagcaattcgttctggctcagaagaggtgtttaggagtggtgccctcaagcagttgctggaggtggttttggcatttggaaattatatgaataaaggtcaaagagggaatgcatatggattcaagatatctagcctaaacaaaattgctgacacaaaatccagcatcgacaaaaacattacccttttgcactatctcatcactattgtggaaaataagtaccccagtgttctcaatctaaatgaagaattgcgagatattcctcaagctgcgaaagtaaagtgttgcaataatcggagcagccacttccctcagcctggccgcatccagataagcagagtgattacggaggagctggaatatcagaagtctcagcccccacagcccggagataagtttgtgtctgttgtcagccagttcatcacagtagccagcttcagcttctctgatgttgaagaccttctagcagaagctaaagacctgtttactaaagcagtgaagcactttggggaagaggctggcaaaatacaaccagatgagttctttggcatttttgatcaatttcttcaagctgtgtcagaagccaaacaagaaaacgaaaatatgagaaagaaaaaggaggaagaagaacgtcgagctcgcatggaagctcagctcaaagaacaacgtgaaagggaacgtaaaatgagaaaagctaaagagaatagtgaagaaagcggagagtttgatgaccttgtttcagctttacgctcaggagaagtgtttgacaaagacctttctaaattgaaacggaatcgcaaacgtattaccaaccagatgactgacagcagcagagagagaccaatcacaaaacttaatttctaa

SEQ ID NO: 20494 - DNA, 4676 bp, Homo sapiens
  SIMILAR (3119)..(3478): 651254mologous to Homo sapiens KIAA0666 protein,accession number AB014566,Smith-Waterman Score=352.
  misc_feature (1)...(4676): n = a,t,c or g
gaatcctggtcgacgattcccgcctttccagcatgcaggggctgctcatgtaagggggacgttcctccttgcccgccgcactgattcattaaggggcactgctcagtggcgcgggggtgggcgtgcttccgtgggctgggcgctgggttcgcggcgcgccctcctgctgcctccccggagctcccgggccagtagcgtttagtcacatcaagaaatagaacagaattcagccatggccccaagaaagagaggtggacagaggtattgcattcatcttttgctgcctccgaaataatgatcacccagaaatcacgtatcggctgcgaaatgatagcaactttgcgcttcagaccatggaaccagcattgcccatgccccctgtggaggagctggatgtcatgttcagtgaactggtggatgaactgggacctcccagacaaacacagagaagccatgtttgcacttccagctgagaaaaaatggcaaatatactgtagcaagaaaaaggaccaggaagaaaacaagggagctacaagttggcctgaattctacattgatcagctcaattccatggctgctagaaaatctctgctggctttagagaaggaagaagaagaagaaagaagtaaaactatagagagtttaaagacagcactgaggacaaaaccaatgaggtttgtaaccagattcatcgacttggatggcctatcatgtatcctcaactttctaaagaccatggactacgagacctcagagtctcgaatacatacttctctcattggctgtataaaggcgttaatgaacaactctcaaggccgggctcacgtcctggctcattctgagagtattaatgtaattgctcagagtctgagcacagagaacattaaaacgaaggtggccgtgctggaaatcttgggcgccgtgtgcctggttcccgggggccacaagaaggttctgcaggccatgctgcactaccagaagtatgccagcgaaaggacccgctttcagacattaattaacgacttggataaaagcactgggcggtatcgagatgaagtgagtctcaagactgccatcatgtccttcattaatgcagtgctcagccaaggtgcaggagtggagagtttggactttagacttcatcttcgctatgaatttctgatgttaggaattcaacctgtaatagataaattaagggaacacgaaaattcaacattagataggcatttagacttttttgaaatgctccgaaatgaagatgaactagaatttgccaaaagatttgaactggttcacatagacacaaaaagtgcaactcagatgtttgagctgaccaggaagaggctgacacatagtgaagcttacccgcatttcatgtccatcctgcaccactgcctccaaatgccttacaagaggagtggcaacactgttcagtactggctactactagatagaattatacagcagatagttatccagaatgacaaaggacaggaccctgactccacacctttggaaaactttaatattaagaatgtcgtacgaatgttggttaatgaaaatgaagttaagcagtggaaagaacaagcggaaaaaatgagaaaagagcacaatgagctacaacagaaactggaaaagaaagaacgagaatgtgatgctaagactcaagagaaggaagagatgatgcagaccttaaataaaatgaaagagaaacttgaaaaggagactactgagcataagcaagtcaagcagcaggtggcggacctcacagcacagctccatgagctcagcaggagggccgtctgtgcttcaatcccaggtggaccctcgcctggagcaccaggagggccctttccttcctctgtgcctggatctctccttcctcccccaccacccccacctctaccaggtgggatgcttccccctccaccgcctcccctccctccaggtggccctcctcctcccccagggcctcctcccttaggggcaatcatgccacctcctggtgctccaatgggcctagcactgaagaagaaaagcattcctcagcccacaaatgccctgaaatccttcaactggtctaaactgcccgagaacaaactggaaggaacagtatggaccgaaattgatgatacaaaagtcttcaaaattctagatcttgaagacctggaaagaaccttctctgcctatcaaagacagcaggatttctttgtgaacagtaactccaagcagaaagaagcagatgccattgatgacactctgagttccaaacttaaagttaaagagctttcggtgattgatggtcggagagctcagaattgcaacatccttctatcgaggttgaaattatccaatgacgaaatcaaacgggcaattctaacaatggacgaacaggaagatctgcccaaggacatgttggaacagctcttgaaatttgttcctgaaaaaaagtgacattgacctattggaggaacataaacacgaactggatcggatggccaaggcttgataggttccttttttgagatgagccgaattaatcactatcagcaaaggttgcaatcgctgtacttcaaaaagaagtttgcagagcgtgtggcagaagtgaaacctaaagtggaagcaattcgttctggctcagaagaggtgtttaggagtggtgccctcaagcagttgctggaggtggttttggcatttggaaattatatgaataaaggtcaaagagggaatgcatatggattcaagatatctagcctaaacaaaattgctgacacaaaatccagcatcgacaaaaacattacccttttgcactatctcatcactattgtggaaaataagtaccccagtgttctcaatctaaatgaagaattgcgagatattcctcaagctgcgaaagtaaacatgactgagctggacaaagaaataagtaccttgagaagtggcttgaaagcagtagagacagagctggaatatcagaagtctcagcccccacagcccggagataagtttgtgtctgttgtcagccagttcatcacagtagccagcttcagcttctctgatgttgaagaccttctagcagaagctaaagacctgtttactaaagcagtgaagcactttggggaagaggctggcaaaatacaaccagatgagttctttggcatttttgatcaatttcttcaagctgtgtcagaagccagagcaagaaaacgaaaatatgagaaagaaaaaggaggaagaagaacgtcgagctcgcatggaagctcagctcaaagaacaacgtgaaagggaacgtaaaatgagaaaagctaaagagaatagtgaagaaagcggagagtttgatgaccttgtttcagctttacgctcaggagaagtgtttgacaaaagacctttcttaaattgaaacggaatcgcaaacgtatttaccaacccagattgacttgacagcagcagagagagaccaatcacaaaacttaatttctaattttccatgaatacttttttttagaaagctcattagcagccctctaaagtgactagaacgtttcattacactgccttgcaatccaaacagtggcaattttttccttcatctgtgagtgaatgtgtgaacgtgtgtatgtaaatgtatgtgtgtatatattaaaaaatgtatatagatgtctgagtgttgtctggagacctatacgtatggttaaaaagatttatgttaatgtatgtgctccaaaacctttcgtgtatgcattcacattgagtgtggctcattttctttccccgaacgccatgactgttcagaagcacaatactatctcctgaaagagataagagacattccctagattcaaaggcaaaacagaagaaacaaacaaacaaacaaacaaagcttgcaaaatattttatggtttccaagcttgatatcctttaaaattattttcattgatggaactggagttgttggaaaaacatagatttaaaatgatttttgatagctgacattgtgatgttgatgtatcacatcagtaaataggaccagctttgaatttctgacattggtgtggggatacagtctgtaaatgtttattgagaaccatcttgcacacaatttgaattatgtagaatgtcaatcaagtttttgbtatatttaaaagttggacatcaattttttcccctgatttcatccaagttatctctgccaagtgctcttgataatttcttcagatttttggaaaaaaacactatataaavtgcaatccatgctttttttaaagaacaacattgccagagtatgcttgttctaacaatatagatatataaaccttaaaaataataaaatatctcacccaagacttaaaggaagaattctctgaagggataaagcattactaaaaaaaaaaaaaaaaaaaaaaaaanttaagggggggccctttttggaaaagtttctattttcggttttgaaggaaaagctggattttttggaaaaatagggctggactaagggatccttaaaaaaggcccaaaatggcaacattagcaaaaatgcccaaatttatttatctttaagtatatttgaagggattgctggtaaaatgggggcattttaaaattgggggtcacgaaagctacctggaaaatttcagtccaaaaaaataaagctttcagggagacttgaaaaaaataaa

SEQ ID NO: 20495 - DNA, 419 bp, Homo sapiens
  SIMILAR (2)..(412): 991254mologous to Homo sapiens C361A3.1 (JNK/SAPK-associated protein-1),accession number AL031717,Smith-Waterman Score=701.
ccaggtggagcattacgagttccagacgcgccagctggagctgaaggccaagaactatgccgatcagatttcccggttggaggagcgggagtcggagatgaagaaggagtacaatgccctgcaccagcggcacacagagatgatacagacctacgtggagcacattgagaggtccaagatgcagcaggtcggaggaaacagccagaccgagagcagcctgccggggcggaggaaggagcgccccacctccctgaacgtgttccccctggctgacggcacggtacgtgcacagatcgggggcaagctcgtgcctgcgggggaccactggcacctgagtgacctcggccagctgcagtccagctccagctaccagtgtccacaggatgaaatgtccgagtcaggccagtcctcgcctgtgt

SEQ ID NO: 20496 - DNA, 6429 bp, Homo sapiens
  SIMILAR (4997)..(6406): 151254mologous to Streptococcus parasanguinis fimbriae- associated protein Fap1,accession number AF100426,Smith-Waterman Score=109.
tcaaagaacctgtctacacaatgtgtcacaggcacctggtgtctcaccgactctgccaccacccggcagagagaaaacagggaaccccatgtggccaggcagggtgtagctgtgcacatcagacaaacgcttctgggccaccttcctccacgctgggtccccggcctgctcctgaccctcatggtggctgcggggaattctgcagtctgattgcgcctcccctagctctccgtcaccctacagggccaccacttacccatgggacactccccctggccacaacttacctaaaggcaaacctctcaacctcctaaacatcaacgtgtagcagtgacctccaaatgcactgaaagaacccaaactcttagcggtcattcctcaccatgagtagccacaactgtttggttaaaacactgaaaatacagtacataaaaacaaaaacaaaacaaaacaaaaaacaacaaaaaaattaagaaattagaaaaacttcagaacctagagcataaaataaaaagaacttaaatgtaataatttaaaataaagaaaaatcagataaaacactcctatgagcgaaaacataaaacgctacaatttatgaagagagcgacgatgtcagacaacgcaggaggtgaaaggaaagacatcatgagaagaagagcgggcccagagcaagcgcgagaggcagcccggaggccagagagcgtcaagcaagggctccccccggctgaggctgacgtgtcttcagatgcctatgggcaggaaggtggctgtccttacctggcactgaggccagtgagctcacaggccaaaactggcagcaagcgacctggggccctgaaggagtggcctggctctgggcccctgtgctctgaggtgcactcaccggctggctgtgagaacctgctggggcccccgcactctggcttgaacggggaacaccagcaacagggaggagcctctcactccacggcacggctacaaaacctggtagctggagctggactgcagctggccgaggtcactcaggtgccagtggtcccccgcaggcacgagcttgcccccgatctgtgcacgtaccgtgccgtcagccagggggaacacgttcagggaggagtcggcgccgtgccttcgtctgtgaccaaggcagtgcttgtggagcgagggcagagtgtgggcgacctggacggcgctgcccagctgcatggctgtgcaggggacccagtggtcgccaccttctcagtcgacagacacggcagcacacggcagcgacagcacagagggcaagacaaggagacaggcgttagaaggcgtgggcagcagaatgcgcacacgccacatggatggtcagcatgtggtgatggcacagagggcgagacaaggagacaggtgttagagggcgtgggccacagcgtgcgcacacgctcatatggacggtcacacagatgctcacacggacggtcagcatgtgacgataaggagacaggtgttagagggtgtgggcagcagcgtgtgcacacgctcacacggacggtcacacgcttacacggacggtcacacagacggttgcacgctcacacggaggctcacaaggacgcctacacggttacggatgatcacacggatgctcacacggttatgcggacactcacacggacggtcacacactcacacgaacggtcacacagatgctcacacggacggtcacacggaagctcacacggacggtcacacactcacacgaacggtcacacagatgctcacacggacggtcacacggaagctcacacggacagtcacacgctcacacggacggtcacagggatgctcacacggacggtcacacggatgctcacgctcacacggacagtcacacggatgctcacacggacggtcacacggatgctcacacgctcacacggatggtcacacggatgctcacacggacggtcacacgctcacacggacggtcacacggatgctcacacggacagtcacacggaagctcacacggacggtcacagggatgctcacacggacggtcacacggatgctcacaggctcacacggtcacacggatgctcacacggacggtcacacggatgctcacacgctcacacggatggtcacacggatgctcacatggacggtgacacgctcacatggacggtcacacacggacggtcacacacacacggtcacacagatgctcacacggacggtcacacggaagctcacacggacggtcactcacacgaacggtcacacagatgctcacacggacggtcacacggaagctcacacggacggtcacacggaagctcacacggacggtcacacacggacggtcacacacacacgaacggtcacacagatgctcacacggatggtcacacggaagctcacacggacggtcacacactcacacgaacggtcacacatgctcacacggacggtcacacggaagctcacacggacggtcacacggaggctcacacggacggtcacagggatgctcacatggacggtcacacggatgctcacacggacggtcacacggatgctcacacggatgctcacatggatggtcacactctcacacggatggtcacacactcacacggacggtcacaggctcacatggatgctcacacggacggtcacacagatgctcacatggatggtcacactctcacggacggtcacacgctcacacggacgctcacacggacggtcacacggatgctcacatggatggtcacactcacacggatggtcacacacacggacggtcacacgctcacacggatgctcacacagacggtcacacagatgctcacatggatggtcacactcacacggacgctcacacgctcacacggacgctcacacggacgctcacacagatgctcacatggatggtcacacacacggatgctcacatgctcacacggacggtcacacagatgctcacatgggtggtcacactctcacacggacgctcacacacatggatgctacacggatggtcacacagatgctcacatggatggtcacactcacacggacgctcacacgctcacacggacgctcacacggacggtcacacagatgctcacatgggtggtcacactcacacggacgctcacacgctcacacggacgctcacacggacggtcacagatgctcacatgggtggtcacactcacacggatgctcacacgctcacatggatgctacacggacggtcacacatgctcacatggatggtcacactcacacggacgctcacacgctcacaccgatgctcacacggacggtcacacagatgctcacatggatggtcacactcacacggatgctcacacgctcacacggatgctcacacggacagtcacacagatgctcacatggatggtcacacacacggacggtcacacgctcacacggatgctcacacggacggtcacacatgctcacatggatggtcactctctcacacggtcacacgctcacacggacgctcacacggtcacacggatgctcacatggatggtcacactcacacggatggtcacacacacggacggtcacacgctcacggatgctcacacggacggtcacacagatgctcacatggatggtcacactcacacggacggtcacacgctcacacggatgctcaaatggatggtcacactctcacacggatggtcacacacacggacggtcacacgctcacggacgctcacacggacggtcacacagatgctcacatggatggtcacacacacggacagtcacgctcacacggacggtcacatggatgctcacatggatggtcacactctcacacggatggtcacacactcacacggacggtcacacgctcacacggatgctcacacggacggtcacacagatgctcacatggatggtcacacggacggtcacacgctcacacggacgctcacacggacagtcacacggatgctcacatggatggtcacacacacggacggtcacacgctcacacggatgctcacacggacggtcacacagatgctcacatggatggtcacacacacggacagtcacgctcacacggacgctcacacggacggtcacatggatgctcacatggatggtcactcacacggatggtcacacacacggatggtcacgctcacacggatgctcacacggacggtcacacagatgctcacatggatggtcacacacggacggtcacacgctcacacggacgctcacacggacagtcacacggatgctcacatggatggtcacacacacggacggtcacacgctcacacgagatgctcacggtcggtcacacagatgctcacatggatggtcacactctcacaggcatggtcacacactcacacggacggtcacacgctcacacggacgctcacacggacggtcacacagacgtctcacatgggtggtcacactcacacggacgctcacacactcacacggacgctcacacggacggtcacacagatgctcacatggatggtcacactctcacacggacgtcacggatggtcacatgctcacacggacggtcacacagatgctcacatggatggtcacactcacacggacggtcacacgctcacacggacgctcacacggacggtcacacggatgctcacatggatggtcacactctcacacggacggtcacacgctcacacggatgctcacacggacggtcacacggacggtcacacgctcacatggacggtcacggatgctcacatggatggtcactcacacagacggtcacacacggacggtcacacgctcacggatgctcacatggacggtcacacacggacggtcacacgctcacacggacgctcacacggacggtcacacgctcacacggacggtcacacacggatggtcacacagacggtcacacggatgctcacatggatggtcacacgctcacacggacggtcacacgctcacacggacgctcacacggtcggtcacacggatgctcacacggacggtcacacgctcacacggacggtcacacgctcacacggacgctcacacggacggtcacacggatgctcacatggatggtcacacgctcacacggacggtcacacacggacagtcacacgctcacacggatgctcacacggacggtcacacacggacggtcacacgctcacacggacgctcacggtcacacggatgctcacatggatggtcacacgctcacacggacagtcacacgctcacacggatgcttacacggacggtcacacacggacggtcacgctcacacggatgctcacacggacggtcacacacggacggtcacacgctcacacggatgctcacacggtcacacgctcacacggacgctcacggtcacacggatgctcacatggatggtcacacgctcacacggacagtcacacgctcacacggatgcttacacggacgctcacacggatggtcacacatgctcacacggacggtcacacgctcacacggacgctcacacggacggtcacacagatgctcacatggatggtcacacacacggacggtcacacggatgctcacatggacggtcacactctcacacggatggtcacacacacggacggtcacacgctcacacggatgctcacatggacgacggtcacacggatgctcacggatggtcacacggatgctcacatggacagtcacacagatgctccatggacggtcatatggatgctcacacgggcggtcacgctctcacacggacggtcacacggatggtcacacagatgctcacatggacggtcacactctcacatggacggtcacacggatgctcacatggacggtcacactctcacatggacggtcacacggatgctcacacggacaggcacacagacgctcacacggacggtcacacggatgctcacatggatggtcacactcacatggacagtcacacggatgctcacacggatggtcacacggatgctcacacggatggtcacacggactctcacatggacggtcacactctcacacggacgctcacacggacggtcacacggctgctcacacggatggtcacacggacgctcacatggacggtcacactctcacacggacgctcacacggacggtcacacggatgctcacacggatggtcacacggacgctcacatggacggtcacacgttccacacgaacgctcacgtggatgctcacatggacgctcacacgctcacatggacgctcactcacatggacacacacggaaacacggacagtcacatggaccgtcgcacactcacagacggtcacatgctcacacggatgctcacaccgatggtcacatggacgctcacacggacggccaggatgtggtga

SEQ ID NO: 20497 - DNA, 758 bp, Homo sapiens; identical to SEQ ID NO: 3023
  SIMILAR (733)..(359): 721254mologous to Homo sapiens CD37 (AA 1-244),accession number X14046,Smith-Waterman Score=447.
  misc_feature (1)...(758): n = a,t,c or g

SEQ ID NO: 20498 - DNA, 1451 bp, Homo sapiens
  SIMILAR (166)..(636): 451254mologous to Homo sapiens CD37 (AA 1-244),accession number X14046,Smith-Waterman Score=241.
accgctccggaattcccgggtggatacgcgcgtccgcggacgcgtgggtttctctctcagctctccgactctctttctctctcagcctctttctttctccctggctcccccactgtctgcacctcttctgtgtggcgagtggaccgcttaccccactaggtgaagatgtcagcccaagagagctgcctcagactcataaaggacttcctcttcgttttcaacctcttcttcttcgccctcggcagcctgatcttctgccttcggcatctggatcctgatcgacaaaaccagcttcttgtcctttgtggggcttgggctttcgtgcctctgcagatctgggtccaaagtcctgggccatctcagggaatctttcaccatggggcatcgccctcctggggttgtgttggggggccctcaagggagctccgctgcctcctggggcctgtattttggggatgctgctgctcctgtttgccacacagatcacccttgagaaatcctcatcttccaatcagcggggcccagttggagcgaagcttgcgggaacgtcgtaggaaaaaccatccataaagtacggcatcaaccccgaaggagaccgcgccagaagaaaatctgggactatgtgcagtccaacttgcgctggtgcggctggcactacggcagggactggttcaaagtcttcatcctgagaggtaacgggtcggaggcgcacccgcgtcactcgctcttgatacaactttatggcgacatagaactccacaatcctaaataaggtgatcgtgcaccagctcacaaggctagaacacctggcgcggtccagacacagtgcagacgatctgcgctgtccctgcagagagccacattacccggaaggggctgcgcgcagggcatacagaaagtggctgcacaacacccttatttttccatagtgggcaatttgcctgggcgtcggcctactcgaagctcgggttcatgacgctctcgaatattcctgtggaagaaaccgtggaccacggtctaccaacgggctcggctcgataccgtttaggccccgcccctccccaaagtcgcgccccgcccccggtcagcgtgcgctgggcacttcccgtgctgcctgtaaatatttgtttaatccccaggttggccgtggagccctccggcgttcacatttcccctggggacaccacgtggctgcgtgcccctgctgctgtcacctctcccacgggacctggggctttcgtccacagcttcctgtccccatctgtcggcctaccaccacccacaagattatttttcacccaaacctcaaataaaccccccgcgtttttggtaaatgaccacaaaaagggcggccgttctaaaaaagccctggaggggcccaatgttacccgtgcttgaccacgaatacctctttgcctatagcgacctcaatgactccctatctggctagt

SEQ ID NO: 20499 - DNA, 492 bp, Homo sapiens
  SIMILAR (287)..(3): 1001254mologous to Homo sapiens Similar to chromosome 6 open reading frame 32,accession number BC000930,Smith-Waterman Score= 498.
agctccgtctggtgaacctccagatattcatcaagtccatttttcaaggccctgtagacttcttccacccttttaggctgaggctctttggggggattgttgtttttgtggcctaaattgtgcattttcttcagtttggcctgaggcttcttgagagcggaggaattttcaatgaaggagttacacctggatcgcctttcctggaggccgctgaaacccgcaaaggactggcttctaatgatcccattgggccctccaggcgaaaaagactgggatcctaccaacatgatttccgggagtctggtcggtagtccttcaccaaaaacatcatcctcttcatcgaccaggagctcctcagcatcaaaaaactgcatcttggagaggacaggcgcgagaagcagcaggcagcagccccggcagtctcagcagtcacactgccgaccgaggtgatttcctttccttgggttgcccaagccctctggagggcagctt

SEQ ID NO: 20500 - DNA, 2328 bp, Homo sapiens
  SIMILAR (1164)..(1220): 631254mologous to Plasmodium lophurae histidine-rich protein,accession number X01469,Smith-Waterman Score=99.
ccggcggcgtcacttgtgctgggaggggagggcgggtggagacagctgcttgacagctacttcagcccaactccaggaggctgcgcttcggtgcctgcttccagctgatcgccggcacgccaggctcctttgcaagagctggcgcgcgctggagggagagggcagaggaaaggagccgaggcaaggaaaggccctttcagctaaccttttgggatctttcatacaagctgggctgtgcattgaaaaaaatgaggcggtggtgtatggggtgggggcggtgtgagggtgaggttggctgcccacggcaagggttgtgctggaaagccccgctgaagagggctgctttgtagggcactctctctaccggggctgctttggacacagctctcataaagatggcagaaagagaattgtttagctgagacattagccgaaagggaacatcctaggagacatgtcaacatgggaaacacccacatccagtcgtggtctgggcactgctttttgccctttcatttcagagcttttatagcaccttagtttactctccagatgcctacaccttccaccttgtatcatgactatttgtgtagagatggatggttccaaacatttctctatttactggagtctggagaaagagacctggaaagaagtacaaatatgcagtagaagtttggcaggttatcccatgttgcccctttctgtccatctccatcttctgtctcctggagggctcacctgtagggaccacgtcagtggccgccctgtgatgtccaggtgggtctagccaatggggatccccaacaggagatgaaagtgaggtgggaatatgcattccctggctcctccctatgaggtcaccttgggccccagtattgctggcaggagtgagagttgggggatggaaggctgtatttcagcctcttcctttcctgaccctcccccaaaaagcctcaaggggctgcttgaggaagataaatgtgaacacctgcttgcctagaccaagagcagtgcagaaagccactgactcactgtgtgcagttctcagtgttacctggtgggtcataaaggcataaacacctatctttctgggtgtattatcaatattaggaagactcacggggctatctgtgtctactgcattgtagtccttgttgtaaaacaactacaatcaccaccaccatcaccaccaccaccatgattattataatcatcatctcactaccaccaccaccaccaccaccaccacaactacaatcaccaccaccatgaccaccaccacaactacaagcaccaccaccaccactaccaccagcaccaccacaactacaatcaccaccaccaccaccaccacagctacaatcaccaccaccaccaccaccaccaccaccacaactacaatcactaccaccatcaccaccaccaccaccatcaccatcatcgtgaatatcatcatcatcacctcaccaccactaccatcaccaccaccaccacaactataactatcaccaccattatcaccaccaccatcatcaacattatcatcataatcatcatcaccataaccaccactacaaccatcactaccaatcataaccaataccactaccaccactatcatcatcatgattattatcatcatcaccttaccaccaccacaattattattatctctataatcgctaccaccactatcatcactaccaccagtccaaccactaccgccaccaccaccatcatcatcagtatcatcataatctgagccgtttgctcccacacgtgaattctgttctgttcttgaaagcaggataggaacctacactgtgcatggcccttcttttttccttttttcaattgtcatcatcattgtcatcatcatcatcagcagcagcagcacagtggtgtcaaaacaaagcaaagcagaccggagagcctcctgccagaaagatgcatttaccttcaccaaaaacatcatcctcttcatcgaccaggagctcctcagcatcaaaaaactgcatcttggagaggacaggcgcgagaagcagcaggcagcagccccggcagtctcagcagtcacactgccgaccacgaggttgaagcctttaaaaggtgtttttacagcagattttagagacttctcaccttaccaacggttataaacccgtatccttgcaaattcagcagtagagtcattagattgccctctcagcctctgcacgtgaagggtctcagggcttttcaggacatcatatgagaacggaacttgtggtaaagactaccttgccacaacaggaccccaccctgcttaccttccgctggatccac

SEQ ID NO: 20501 - DNA, 1549 bp, Homo sapiens
  SIMILAR (234)..(344): 671254mologous to Homo sapiens p24B protein,accession number AJ132270,Smith-Waterman Score=138.
  misc_feature (1)...(1549): n = a,t,c or g
ccgctccgcaanttccggtcgagccacgcgtccggcgcagagctccgctggtgccacgtttatccccttacatcctcctaggacccggtcggaactcgtcgccccagcccgccgggggcgcaacgcccgaacccgcggccctcgagacgggaccgagagcatcatgggcagcactgtcccgcgctccgcctccgtgctgcttctgctgctgctcctgcgccgggccgagcagccctgcggggccgaagctcaccttcgagctgccggacaacgccacgcaatgcttccacgaggaggtggagcagggcttgaagttctccctgggattaccaggtcatcactggaggccactacgatgttgactgctatgtagaggacccccaggggaacaccatctacagagaaacgaagaagcagtacgacagcttcacgtaccgggctgaagtcaagggcgtttatcagttttgcttcagtaatgagttttccaccttctctcacaagaccgtctacttttgactttcaagtgggcgatgagcctcccattctcccagacatggggaacagggtcacagctctcacccagatggagtccgcctgcgtgaccatccatgaggctctgaaaacgggtgattgactcccagacgcattaccggcttgcgggaggcccaaggaccggggcccgagccggaaggacctttaatagccgaagtctctttactggtctgttgggcgagacgatttgccctgtttcgtgggtcagctttcagtcaggtgctactgttggaaaagcttcttcacagaaaaacgacccatcaagcagggcagtccactcctagccccggcatcctgctctagggccccttcattccccaggntgggagcagctctcctaggtcacagcctgctgggctgggtcgcgtagcccaaggtggaggcagaaccgatgctgctgtggtagccctttgcctttcaatgcccatgcttgattcttgcacctcagccagctgaaggtctcagagaccatgtaatcatgaaggcatccgaactgccattaagtgtgcagcggctgaaaagacatttacaactaggcccaggggattaagcccactgtggggaggggttggacaaggcaaatggttcaagtggccttggctgtttggcagggaactccaaagtgccccaggcctcttgggcaagctttagggccctgcctctgtttaaaaatttggnnnnaaatttggccatgggggttcatttgtcttgggtgtccctatcccatatggagaagaaagggggctctaagttctggctcttctttctttggggtttcttctgtacctgaggaaaccaggccctggggtgactttgcagaantccctgcaccctcggtganaaaaccagtgttcaagccatgcaagcagtacagaatggtgactgggtgcccttggtgagctgtgtatttcctaggaggtagaaaactgagggaaactgtgggctagtagagactaagtgtgagcgtcaaaaaaaaaaaaaaaaaagggcggccgct

SEQ ID NO: 20502 - DNA, 765 bp, Homo sapiens
  SIMILAR (1)..(423): 1001254mologous to synthetic construct primer,accession number AX047489,Smith-Waterman Score=707.
atggatgactccacagaaagggagcagtcacgccttacttcttgccttaagaaaagagaagaaatgaaactgaaggagtgtgtttccatcctcccacggaaggaaagcccctctgtccgatcctccaaagacggaaagctgctggctgcaaccttgctgctggcactgctgtcttgctgcctcacggtggtgtctttctaccaggtggccgccctgcaaggggacctggccagcctccgggcagagctgcagggccaccacgcggagaagctgccagcaggagcaggagcccccaaggccggcctggaggaagctccagctgtcaccgcgggactgaaaatctttgaaccaccagctccaggagaaggcaactccagtcagaacagcagaaataagcgtgccgttcagggtccagaagaaacagcctacccaaatgagacgaaaccagaaaaacaattctgggaatatgatgaaacaagttctttaccacccccaaaagatcacactagctcatcagcattgaatccaaaccaagaagaaatcgctgaattgtcagaaaaagaattcagaagatcgagtattaagctaatcaaaaaggcaccagagaaagcactggaagtcctagccagaaaaatcagacaagagaaagaggaagtcaaactgttgctgtttgctgatgatgtgattgtgtacctggaaaaccctaaagactcatccaaaaagctcctagaactgataagtgaattcagcaaagtttcaatataa

SEQ ID NO: 20503 - DNA, 1134 bp, Homo sapiens
  SIMILAR (668)..(1051): 811254mologous to Homo sapiens Human TRAILLK-2 protein sequence,accession number Y14148,Smith-Waterman Score=506.
gcagtgcggtggaattcgcagaaaggcggaaaggagaaaatctcacgataactcctcctgaggggtgagccatttcctgccatgtagtgcacgcaggacatcaacagacacagataacaggaaacgatccattccctgtggtcacttattctaaaggccccaaccttcaaagttcaaggagtgatatggatgactccacagaaagggagcagtcacgccttacttcttgccttaagaaaagagaagaaatgaaactgaaggagtgtgtttccatcctcccacggaaggaaagcccctctgtccgatcctacaaagacggaaagctgctggctgcaaccttgctgctggcactgcatgcttgctgcctcacggaggtgtctttctaccaggtggccgccctgcaaggggacctggccagcctccgggcagagctgcagggccaccacgcggagaagctgccagcaggagcaggagcccccaaggccggcctgggaggaagctccagctgttcaccgcgggacttgaaaatcttttgaaccaccagctccagggagaaggcaattccagttcagaacagcagaaataaggcgtgccctttcagggtccagaagaaacagtcactcaagactgcttgcaactgattgcagacagtgaaacaccaactatacaaaaaggatcttacacatttgttccatggcttctcagctttaaaaggggaagtgccctagaagaaaaagagaataaaatattggtcaaagaaactggttacttttttatatatggtcaggttttatatactgataagacctacggccatgggacatctaattcagaggaagaaggtccatgtctttggggatgaattgagtcctggtgactttgtttcggatgtattcaaaatatgcctgaaacactacccaataattcctgctattcagctggcattgcaaaactggaagaaggagatgaactccaacttgcaataccaagagaaaatgcacaaatatcactggatggagatgtcacattttttggtgcattgaaactgctgtgacctacttacaccatgtctgtagctattttcctccctttctctgtacctcgaagaagaaagaatctaactgaaaataccaa

SEQ ID NO: 20504 - DNA, 945 bp, Homo sapiens
  SIMILAR (241)..(855): 421254mologous to Homo sapiens pancreatic elastase 2 precursor,accession number D00236,Smith-Waterman Score=299.
ttttacagaactcccacggacacaccatgataaggacgctgctgctgtccactttggtggctggagccctcagttgtggggaccccacttacccaccttatgtgactagggtggttggcggtgaagaagcgaggcccaacagctggccctggcaggtctccctgcagtacagctccaatggcaagtggtaccacacctgcggagggtccctgatagccaacagctgggtcctgacggcttgcccactgcatcagctcctccaaggacctaccgcgtggggctgggccggcacaacctctacgttgcgggagtccggctcgctggcaagtcaagtgtctctaagattgtggtgcacaaggacttggaacttcaaccaaatctccaaaggggaacgacatttgccctgctcaaactggctaaccccgtctccctcaccgacaagattcaagctggcctggcttccctcctgccggcaccattctacccaacaaactacgccctgctaagtcacggggcttggggaaagctgcagaacaaacgggggctgttcctgatgtcctgtcagcagggccggtttgctggccgtggactatgccacctgctcccagctctgccttggtggggcagcagcgtgaaaaccagtatgatctgtgcttgggggtgatggcgtgatctccagctgcaacggagactctggcgggccactgaactgtcaggcgatctgacgctctgtggcaggtgcacggcatcgtcagcttcgggtctcgcctcggctgcaactactaccacaagccctccgtcttcacgcgggtctccaattacatcgactggatcaattcggtgatcgcatataactaaccaaaagatgtccctgggactgtttcagacttggaaaggtcacagaaggaaaataatattatataaagtgacaactatgcaaatcac

SEQ ID NO: 20505 - DNA, 414 bp, Homo sapiens
  SIMILAR (94)..(219): 711254mologous to Xenopus laevis nuclear domain-10 protein NDP52,accession number AF312719,Smith-Waterman Score=165.
tttcgtgggaacagctgatccgtctgttgggaggacagatatctcaaggccaggatggaagaatcaccactaagccgggcaccatcccgtggtggagtcaactttctcaatgtagcccggacctacatccccaacaccaaggtggaatgtcactacacccttcccccaggcaccatgcccagtgccagtgactggattggcatcttcaagccagctacctgcccaaaccaggagctcagctctaccagttccgatatgtgaaccgccagggccaggtgtgtgggcagagcccccctttccagttccgagagccaaggcccatggatgaactggtgaccctggaggaggctgatgggggctctgacatcctgctggttgtccccaaggcaactgtgttacagaaccagctcgatg

SEQ ID NO: 20506 - DNA, 393 bp, Homo sapiens
  SIMILAR (372)..(289): 371254mologous to Gallid herpesvirus 2 RS1 immediate-early gene transactivator-like protein,accession number AF243438,Smith- Waterman Score=37.
gcgaagagctggcaagaggagcagagtgctcaggctcagcgactgaaagacaaggtggcccagatgaaggacaccctaggccaggcccagcagcgggtggtgagtgaggccccttggcaacaggaaacgggaaattccaagggcaagttgtagagaagcctgcgtgtctaaagagaaggggagagacatggctaaagactaaacaacacaaccccaagtcctaatgcagtggagtggagggagcgtttacctccctggctgatgaatgattcactaggaactgtgatctccatctcctcctttctcctgaggccgagctggagcccttgaaggagcagcttcgaggggcccaggagcttgcagcctcaagccagcagaaagccaccctgtatt

SEQ ID NO: 20507 - DNA, 480 bp, Homo sapiens
  SIMILAR (152)..(178): 881254mologous to Gallus gallus retinoic acid receptor-beta isoform 1, RAR-beta 1 {N-terminal},accession number S75943,Smith- Waterman Score=46.
ctgaaagtggttttggaggaaccgggatggaggaggccttcccctgtgggaatagaatcgtccactcctagccctggttgcttctgatacacagccactgcacacacacactcacactcacactcccttgtctgatgccccaaagccaattcctggggcaccctaccctctcttatttggagtttccattgacttctgtgccccaccctagccttttccataaccttaggtattcagtttggaggggttttttgtatttttgaggattcctgtattctgtatcctctcctcgcatctcctcacatggaaagaaataatgtatttgtgccttctgtgaggaatggggggaacaagtggtcccaggtatccccatttccaaggcccccctccctctccaggtccccccacagcaataaaagcttccccctgatatccatccctttgtagtttgaacaaatatatttatatgatatgtatgaa

SEQ ID NO: 20508 - DNA, 542 bp, Homo sapiens
  SIMILAR (257)..(24): 311254mologous to Mus musculus E2F1-inducible protein,accession number AF176514,Smith-Waterman Score=81.
  misc_feature (1)...(542): n = a,t,c or g
ccagcagggactaaagaagagaggacatggggaactggaaaaataagccttccaggattgtggggagaaagacgctgtgggagaggccaggatgctgcattaggcacaggataacctggggaacccaggcacatgggtcctgctctccgaagtctgcaagtcaagaagggaacagagcacgccgaccctctccctttcccctctgtctctcttagtggctttacagtgggtaccctgtcagaaaccagcactgggggccctgccacccccacatggaaggagtgtcctatctgtaaggagcgctttcctgctgagagtgacaaggatgccctggaggaccacatggatgggacacttcttttttcagcacccagggaccccttcaccttttgagtgatcttactcccttcgttacatggcacaaattacacattcatggcacacacacacttcacacacatggcataacatttagggttttcatggcccttttttctattcacattggggggttccnggatatttttgtttcccttaaggaa

SEQ ID NO: 20509 - DNA, 3464 bp, Homo sapiens
  SIMILAR (874)..(1047): 411254mologous to Xenopus laevis nuclear domain-10 protein NDP52,accession number AF312719,Smith-Waterman Score=103.
  misc_feature (1)...(3464): n = a,t,c or g
atggttggaactcagaagttccgctttcccccagtacctatgaatcctggagcccaagtggagagaattctccaaagatcccactttcagcgcagggaccccaatcctgcagttctccgtatctgccacaaggtggcagccaaagcatcgattgatccagagctagacctgatctctggacctctggtccagatcacggaaatggagcctgcaaagacccagaagccactctgggggagcccagtccagatgtggatatggtcaggccccttagcactgaaatcctcaagttggaaaaaaatggtcagctgtgcagaagacatcattcttacaaggtctgtccctgagattgaagtaaagaagaaactgctataccccagctatcagtttcccatccccaaaatggaggacaagatatctcaaggccaggatggaagaatcaccactaagccgggcaccatcccgtggtggagtcaactttctcaatgtagcccggacctacatccccaacaccaaggtggaatgtcactacacccttcccccaggcaccatgcccagtgccagtgactggattggcatcttcaaggtggaggctgcctgttttcgggattaccacacatttgtgtggtctttccgtgcctgaaagtacaactgatggttcccccattcacaccaagtgtccaagttccaagccagcttacctgcccaaaccaggagcttcagcttttaccagtttccgatatgtggaaccgccagggcccaggtgtggtggggcagagacccccctttccagttccgagagccaaggcccatggatgaactgggtgaccctggaggaggctgatgggggctctgacatcctgctggttgtccccaaggcaattgtgtttaaagaaccagctcgatgagagccagcaagaacggaatgacctgatgcagctgaagctacagctggagggacaggtgacagagctgaggagccgagtgcaggagctcgagagggctctggcaactgccaggcaggagcacacggagctgatggaacagtacaaggtgggagctgggccaggggatttccgggtcccatggggagatcacagaagagagggacatcctgagccggcaacagggagaccatgtggcacgcatcctggagctagaggatgacatccagaccatcagtgagaaagtgctgacgaaagaagtggagctggacaggcttagagacacagtgaaggccctgactcgggaacaagagaagctccttgggcaactgaaagaagtacaagcagacaaggagcagagtgaggctgagctccaagtggcacaacaggagaaccatcacttaaatttggacctgaaggaggcgaagagctggcaagaggagcagagtgctcaggctcagcgactgaaagacaaggtggcccagatgaaggacaccctaggccaggcccagcagcgggtggccgagctggagcccttgaaggagcagcttcgaggggcccaggagcttgcagcctcaagccagcagaaagccacccttcttggggaggagttggccagtgcagcagcagccagggaccgcaccatagccgaactacaccgcagccgcctggaagtggctgaagttaacggcaggcatggctgagctcggtttgcacttgaaggaagaaaaatgccaatggagcaaggagcgggcagggctgctgcagagtgtggaggcagagaaggacaagatcctgaagctgagtgcagagatacttcgattggagaaggcagttcaggaggagaggacccaaaaccaagtgttcaagactgagctggcccgggagaaggattctagccttggtacagtttgtcagaaagtaagcgggagctgaactagagctgcggtcacccttgcgttgtgctccagaaggaaaaggagcaggttacaggagggagaaacaggtgagcacccataacccaggccccgtggatgccacaggctgcccggcagctctgacagactcagaggacgagtccccagaagacatgaggctcccaccctatggcctttgtgagcgtggagacccaggctcctctcctgctgggcctcgagaggcttctccccttgttgtcatcagccagccggctcccatttctcctcacctctctgggccagctgaggacagtagctctgactcgccttggctgctcttcccatacctgtcccaatgtgctgctcccccatcttgggacaccaccccaaagcccaaccctgtctctttggcatccaggaggctgaagatgagacagtcagtcctgatggcagctgtgcagagtgggggtgaggaggccaacttactgcttcctgaactgggcagtgccttctatgacatggccagtggctttacagtgggtaccctgtcagaaaccagcactgggggccctgccacccccacatggaaggagtgtcctatctgtaaggagcgctttcctgctgagagtgacaaggatgccctggaggaccacatggatggacacttctttttcagcacccaggaccccttcacctttgagtgatcttactccctcgtacatgcacaaatacacactcattgcacacacacactcacacacatgcatacacttaggtttcattgcccatttttctatcacactgggctccatgatattctgtttccctcaagaactggcttctgttgtggcctgtttttcatcccaagatttcttcacttcatcctctcctacctgggctcttttgtcccacgggagggggtcctgttcgggaagcagtgggctgaatttattcccctggaaagtgggtttttgggagggaaccggggatggaagaaggnctttcccctgtgggaaatagaatcggtcaatcctaagccctgggttgcttctgatacacagccactgcacacacacacttcacactcacactccctttgtttggatgcccccaaagccaaattcctgggggcaccctaaccctctcttaatttggaagtttccgttgggtttaccctgaagttttctctggggtctgcaccagaggcaagcaagcatgggaacaatcatggcctctcaaggtcccttttggttctccagtttcattgggtcctctttctgttcccccccattgacttcctgtgccccacccctagccttttcccataaccttaggtattcagtttggagggggttttgtgtatttttgaggagttcctgtattctgtatcctctcctcgcatctcctcacatggaaagaaataatgtatttgtgccttctgtgaggaatmsmggggggaacaagtggtcccaggtatccccatttccaaggcccccctccctctccaggtccccccacagcaataaaagcttccccctgatatccatccctttgtagtttgaacaaatatatttatatgatatgtaaaaaaaaaaaaaaaaaa

SEQ ID NO: 20510 - DNA, 3623 bp, Homo sapiens
  SIMILAR (523)..(1026): 401254mologous to Capra hircus N-acetylglucosamine 6- sulfatase precursor,accession number U17694,Smith-Waterman Score= 232.
  misc_feature (1)...(3623): n = a,t,c or g
tttcgtcgcctagggagaaaacgtctgactccagccaccggccttcaaggcacggctttttattccttcggctggtcggcctctcgcccttcagctacctgtgcgtccctccgtcccgtcccgtcccggggtcaccccggagcctgtccgctatgcggctcctgcctctagccccaggtcggctccggcggggcagcccccgccacctgccctcctgcagcccagcgctgctactgctggtgctgggcggctgcctgggggtcttcggggtggctgcgggaacccggaggcccaacgtggtgctgctcctcacggacgaccaggacgaagtgctcggcggcatgacaccactaaagaaaaccaaagctctcatcggagagatggggatgactttttccagtgcttatgtgccaagtgctctctgctgccccagcagagccagtatcctgacaggaaagtacccacataatcatcacgttgtgaacaacactctggaggggaactgcagtagtaagtcctgggcagaagatccaagaaccaaatactttcccagcaattctcagatcaatgtgtggttatcagacctttttttgcaggggaaatatttaaatgaagtacggagcccccagatgcaggtgggactaggaacacgttcctctggggttnggagttacctggtatgccctggaaaagaattcctaagtattataattacaccctgttctattcaatggggaaggcacggaagcatggtgaaaactattagtgtggactacctgacagatgttttggctaatgtctccttggactttcctggactacaagtccaacttttagcccttcttcatgatgatcgccactccaagcgcctcattcgccttggacagctgcacctcagtaccagaaggctttccagaatgtctttgcaccaagaaacaagaacttcaacatccatggaacgaacaagcactggttaattaggcaagccaagactccaatgactaattcttcaatacagtttttagataatgcatttaggaaaaggtggcaaactctcctctcagttgatgaccttgtggagaaactggtcaagaggctggagttcactggggagctcaacaacacttacatcttctatacctcagacaatggctatcacacaggacagttttccttgccaatagacaagagacagctgtatgagtttgatatcaaagttccactgttggttcgaggacctgggatcaaaccaaatcagacaagcaagatgctggttgccaacattgacttgggtcctactattttggacattgctggctacgacctaaataagacacagatggatgggatgtccttattgcccattttgagaggtgccagtaacttgacctggcgatcagatgtcctggtggaataccaaggagaaggccgtaacgtcactgacccaacatgcccttccctgagtcctggcgtatctcaatgcttcccagactgtgtatgtgaagatgcttataacaatacctatgcctgtgtgaggacaatgtcagcattgtggaatttgcagtattgcgagtttgatgaccaggaggtgtttgtagaagtctataatctgactgcagacccagaccagatcactaacattgctaaaacctttgaccccagagctcttaggaaagatgaactatcggttaatgatgttacagtcctgttctgggccaacctgtcgcactccaggggtttttgaccccggatacaggtttgacccccgtctcatgttccagcaatcgcggcagtgtcaggactcgaagattttcccaaacatcttcctgtagcgaccctcacacagcctctgcagatggatccctgcacgccctctttctgatgaagtgattgtagtaggtgtctgtagcctagtcttcaagaccacaccctggaagagtttctgggctggctttaagtcctgtttgaaaaagcaacccagtcagctgacttcctcgtgcaatgtgttaaactgtgaactctgcccatgtgtcaggagtggctgtctctggtctcttcctttagctgacaaggacactcctgaggtctttgttctcactgtattctttttatcctggggccacagttcttgattattcctcttgtggttaaagactgaatttgtaaacccattcagataaatggcagtactttaggacacacacaaacacacagatacaccttttgatatgtaagcttgacctaaagtcaaaggacctgtgtagcatttcagattgagcacttcactatcaaaaatactaacatcacatggcttgaagagtaaccatcagagctgaatcatccaagtaagaacaagtaccattgttgattgataagtagagatacattttttatgatgttcatcacagtgtggtaaggttgcaaattcaaaacatgtcacccaagctctgttcatgtttttgtgaattctaggctggtgctgcactgaaatagagcagtaagcttgtgataaaggccaattccaggtagctcttgaaggtgatagccatctactttccagtggctgccaaccacagggagtgccagttaacactggaaggattaaaggcagggtcccttctcttgagaactccctctgagatctgaaaaatgaagtggctttaggaacatcagcagtgaaggactgccaagagtttggtgaaggttgtctcttccgagggccttctgaagacagggctcttgaacagacaagtggaagggctgtaccagggataaaggaaagaagtgcctgtccagcagggagcttgaatttaagttccatgtatgaagtcattggctctatctgcatttttctgtcattctcttcatttgttttaaggtggaaaattttcttacagttgatgcaaagtatcaactactttaccctaccttctccccttttagatgggttcttcctgagttttggagtcttgtatgattatcagtattcccctgtcaaaatcaaatctattcaggtttcttcactgttgagaacacctaaatggtttttatttttgagaagtggggacagagtctcactatggtcacccagggctggagtgcaatggcatgatctcagctcactggcaaccttcgcctcctggggtttcaagcgattctcctggcctccgcctcctgagtagctgggattataggcacacaccaccacgcccagctaattttttgtatttttagtagagacagagtttcaccatgttggccaggctggtcttgaactcctgaccttgtgatccacccacctcggcctcccagagtgctgggattacaggcatgagccaccacgcttggctaagaacacctaaatttttatgtttcttggctcaaaaaccagttccatttctaatgttgtcctcacaagaaggctaattggtggtgagacagcaggggaggaggaagagctgtggtttgtaacttgttcaacttcagggcaataaggcgattttagctttatttaaagtcttctgtccagctttaaggcactttgtaagacagggctggaaataggcttttcttttcaganttgcagntagtcagttngggctaacgtcattngggtatattcc

SEQ ID NO: 20511 - DNA, 464 bp, Homo sapiens
  SIMILAR (153)..(233): 961254mologous to Homo sapiens dJ383J4.4 (A novel protein similar to Aspartyl-TRNA synthetase),accession number AL109921,Smith-Waterman Score=138.
  misc_feature (1)...(464): n = a,t,c or g
attcccaataaacttttnattattggttaagtcanttttnagctgttttaaaaactccaactttgtttccccctttaatccatctaaagccctagatggtggcacttagtggcccttcaaaatatatttaaactgaattatcttttgaatttcaggaggatgtgaaaatgctctcccatctgctccaggctttagattatggggcaccccctcatggaggaattgccttaggtaaacaacttttccttttataagataaactgaattccattgcactgtctcaaattcaggttctcagtttgtgttggtagaggtggaaggatgagtccaagagttccatgagaatgtaagtttctgttgaaatttcagtaatatattttttaaatatatcttaacagttataaagatataacttaactgataatttgcatttgaaagatcattaatagcttaaaacaacagaa

SEQ ID NO: 20512 - DNA, 1272 bp, Homo sapiens
  SIMILAR (921)..(1091): 611254mologous to Homo sapiens dJ383J4.4 (A novel protein similar to Aspartyl-TRNA synthetase),accession number AL109921,Smith-Waterman Score=180.
atggagaaaggtgggaacatacaattggagattcctgacttcagcaactctgtcctgagccatctaaaccagttgcgcatgcagggccgtctctgtgatattgtggtcaatgtgcaaggacaagcttttcgggctcacaaagtggtgctggctgccagctccccctatttccgggatcacatgtccttgaatgagatgagtacagtctccatttcagtcatcaagaaccctactgtttttgaacagctcctttctttctgttacacagggcggatatgcctgcaactggcagatatcatcagctacctaacagctgccagttttctgcaaatgcagcatattatagacaaatgtacacagatcctggagggcattcatttcaaaattaatgtggctgaggttgaagcagaattaagtcaaacaaggacaaagcatcaagagagacctccagagtctcacagggttacaccaaatctcaaccgctcccttagcccacgacataataccccaaagggaaaccggcgaggtcaggttagtgctgtgctggatatcagagagctaagtcctcctgaggagtccaccagccctcagatcattgaaccaagttctgatgtagagagccgggagcccattcttcggatcaaccgagcaggacagtggtatgtggagacaggagtggcggaccgtgggggtcggagtgatgatgaagttagagttcttggagcagtacacatcaaaactgaaaatctggaggagtggcttgggcctgagaatcagccttctggagaagatgggagtagtgcagaggaagtaacagccatggtgattgataccacaggccatggttctgtaggacaggaaaattatactttagggtcttcaggagccaaggtggctcggccaacaagcagtgaagttgacaggaggaaaatcccagagagctggaatcggcccaccacccatttactgctccccaccccagtgacatacatctcctgtacactgagcccaaaaaggtaccgtatctatacttccaaatcaaaaggaaatgtgtatataaaggcaaagaacttcagacttcaagggttagacagactgatatgccttgtcactggatctccaagcatcagagatgtcatagccttcccaaagtccttccggggacatgacctcatgagcaataccccagattctgtccctcctgaggaactgaagccctatcatatccgagtctccaagccaacagactccaaagcagaaagagctcattga

SEQ ID NO: 20513 - DNA, 2761 bp, Homo sapiens
  SIMILAR (235)..(921): 1001254mologous to Homo sapiens dJ383J4.4 (A novel protein similar to Aspartyl-TRNA synthetase),accession number AL109921,Smith-Waterman Score=1185.
atggatgaagctgaattcagtagctttgttgtccggaccaacacatgtggagagttgcgttcgtctcacttaggccaagaagtcaccttgtgtggatggattcagtaccgaaggcaaaacacattcttggtcctaagagatttcgatgggcttgttcaagttatcattccccaggatgaggtaatagaaaatttcctgttattatctaaaagcttctttgatgctattgctgggtcggcagcctctgtgaagaagattttatgtgaagcccctgtggaatctgtggtgcaagtgtctggtacagtcatttcccgtcctgcaggacaagagaatccaaaaatgccaacaggtgagattgaaatcaaagttaaaacagctgagcttctgaatgcctgcaagaagctgccctttgaaattaagaacttcgtgaagaaaacagaggctcttcggttgcagtatcgctacttagacttgcgtagtttccaaatgcagtataacctgcgactgaggtcccagatggtcatgaaaatgcgggaatatctctgtaatctgcatgggtttgtggatatagaaacccccacattgtttaagaggaccccagggggtgccaaagagtttttagtaccatccagggaacctggaaagttttattctctccctcagagtcctcaacagtttaagcaacttctgatggttggcggtttagacagatattttcaggttgcccgatgttatcgagatgaaggttcaagaccagacagacagcctgagtttactcagattgacatagagatgtcatttgtagaccagactgggatccagagtttaattgagggtttgctccagtattcctggcccaatgacaaagatcctgtggttgttccttttcctactatgacttttgctgaggtgctggccaccttatggaactgataaacctgacactcgctttggaatgaagattatagatatcagtgatgtgtttagaaacacagagattggatttcttcaagatgcacttagtaagccccatggaactgtgaaagccatatgtatccctgaaggagcaaaatacttaaaaaggaaagacattggatccattagaaactttgcagctgaccattttaatcaggaaatcttacctgtattccttaacgccaatagaaactggaattctccagttgctaatttcataatggagtcacaaagactggaattaatcagactaatggagacccaagaggaagatgtggtcctactaactgctggagagcacaataaagcatgctctttgttagggaaaattacggactgggaatgtggctggaccttctaggaaacaagagggagtggtgctccgtgaccccactctgttctctttcctttgggtggtagatttccccctcttccctggccaaaggaggaaaatccaagaaagctgggatcggggccaacacccattttactgctccccaccccaggtgaataacatctcctgtacactgagcccaaaaaggcccgtagccaacactatgacttggttttaaatggcaatgaaataggaggtggttcaattcgaattcacaatgcagagctgcagcgttatatcctggcaaccttactaaaggaggatgtgaaaatgctctcccatctgctccaggctttagattatggggcacacccctcatggaggaattgccttagggttagacagactgatatgccttgtcactggatctccaagcatcagagatgtcatagccttcccaaagtccttccggggacatgacctcatgagcaataccccagattctgttccctcttgaggaactgaagccctatcatatccgagtctccaagccaacagactccaaagcagaaagagctcattgaatcatgcataccatgcagaaagttgagcttttaggttttgtcctctttgcttccccaaggctaaagtcagatctagagttctgccacaggtctaacaatcaagtctttagattggaaggaatccaggcaacattcttcaccacaaccgaagaaacagattaaaagataccccaatttttgactttgatttcatgcatcatttggattttttttggttaggacttttttttgaagttcctttttacttaggtgtgaaagatggttctttgttgaaataatatagtggtttagtgttttcaaatcatgtttctcataccccagatagtagattattcacttaggacagaggtaaatccaaattaggtgtgaaatgtaggaaaatgcttgcccccggtaaaactagtgagttgatggagcatttgcctccatcatcctcatcaagagaatcatataaattaagctttataatgacatttcaaccatcaacataatatagtgaggagtagcataatattttttaataatgcagaaaacatcactgaaatgagagtcacaaatttttcttcagtgtttcagcctgagtaagttacataaacctcgcttagcctcccttcctgctaatgtgtaaaaaaacatacttgccctggctacctcaccgggctgttattgctggaatcagaggagataacatatatggaagataaagtgaataaaagtactttgaaaaactataaagcattccacaaatatgagatgatggtattatccatccataaataggtagatatatctctattttatagtttcagattaaacaaaactgatatcaatagaaaaagtccttttacttatcaaaaaaagggaataa

SEQ ID NO: 20514 - DNA, 425 bp, Homo sapiens
  SIMILAR (1)..(201): 1001254mologous to Homo sapiens ubiquitin-like fusion protein,accession number AF311324,Smith-Waterman Score=342.
aaagagcctgttggttgtgtaaataatatcagttttcttgcctcactggccgggagcacaagcagaaatagattacagagcacacgtggggcaggcaggcttcagaactctggaactgggctgtctacaaacctccagcattttcaggaagaaaactttaggaaaagttctccccagttagaacatacaggagtttttttggagaatgtactactcatcacctcccacctgtgaaagcccctcttcagacaaagaagaaaacaacaaatcattgttttctttgtggaaagaaaacaggactggctagtagctacgaatgcaggcaggttggcgagctggagaagctcagatgctttctctgtgataacccagcttggggattatgcaaaataaaatatttaaattgcctgtttataacatcatta

SEQ ID NO: 20515 - DNA, 1650 bp, Homo sapiens; identical to SEQ ID NO: 7891
  SIMILAR (652)..(1641): 751254mologous to Homo sapiens KIAA1099 protein,accession number AB029022,Smith-Waterman Score=1295.

SEQ ID NO: 20516 - DNA, 3099 bp, Homo sapiens; identical to SEQ ID NO: 9619
  SIMILAR (2269)..(3090): 881254mologous to Homo sapiens KIAA1099 protein,accession number AB029022,Smith-Waterman Score=1288.

SEQ ID NO: 20517 - DNA, 419 bp, Homo sapiens
  SIMILAR (1)..(318): 1001254mologous to Homo sapiens ubiquitin-like fusion protein,accession number AF311324,Smith-Waterman Score=568.
agcagaaatagattacagagcacacgtggggcaggcaggcttcagaactctggaactgggctgtctacaaacctccagcattttcaggaagaaaactttaggaaaagttctccccagttagaacatacaggagtttttttgtctacccatggtgttggaatgaatggaaataatgcagcagcagggaaaagcgtaggagaatgtactactcatcacctcccacctgtgaaagcccctcttcagacaaagaagaaaacaacaaatcattgttttctttgtggaaagaaaacaggactggctagtagctacgaatgcaggcaggttggcgagctggagaagctcagatgctttctctgtgataacccagcttggggattatgcaaaataaaatatttaaattgcctgtttataacatcaaa

SEQ ID NO: 20518 - DNA, 3429 bp, Homo sapiens; identical to SEQ ID NO: 19740
  SIMILAR (1300)..(1806): 391254mologous to Homo sapiens Spinocerebellar ataxia type 1 (SCA 1) protein product,accession number R71111,Smith-Waterman Score=200.

SEQ ID NO: 20519 - DNA, 5136 bp, Homo sapiens
  SIMILAR (1114)..(5133): 981254mologous to Homo sapiens KIAA0592 protein,accession number AB011164,Smith-Waterman Score=6751.
atgccctttaaacatcctaagaaagctgtcaagataaaacctcacccacctgtagctcctcgaccttctagtggttccactgcaccatctcgccaccgattgttaagggtcctccccaacattggtcaatcttgttcacctgcttttgggaatgcatatccgcccgaaatctccaggaatggaatttcaagtttggcaactcaactctctgctgagagatacatatcttctatcactggtgaatttcttaaggaagataatagctgggagaataacacactgtctcacttcagtagcaacgtcaaactacctcctcagataccccatttggagttgggaaatgaccaggagcttgctgactctgttctccatcttggatcatccctgcctaggcaaacaaaacattttttaggaaacttgccatctagtaatgggaacattgtcttaccttcagaagaatgtgtaaccgaacaatcacttctacctaaagtgggctcactggcttcatttgcagaaggaaatgctgatgaacagagcagcggcttagaaggtgcgtgcaaacgtgaatctggagttgctactcactaatgctgacaaagggttgaaagctccagagcagcatctcaagcatgttgcaggagtgctgaatggggaatcagtaaagacttcagttcttaacttaccgggaattaagtcctcacaagaatagactcttgtcacctcttcgctgttctgcaccaatgtcgctacataattctctggtgaaaccagagatgacagtccaaatgttttgagtttgggaagctacagccttcttcttctcagtcactggatgttcaaaacataactgattcttctttctctaggactacttgctttcaaggtgttaaagttgattcacttgggaaaagatctgatgttatttccaaagttgaggctcgggatatcacagaaatgactaacaaggcttcccaaagagcctgttggttgtgtaaataatatcagttttcttgcctcactggccgggagcacaagcagaaatagattacagagcacacgtggggcaggcaggcttcagaactctggaactgggctgtctacaaacctccagcattttcatggaagaaaactttaggaaaatgttctccccagttagaacatacaggagtttttttgatgaaccggacgacccccgaccaggagctggtgccggcgtcggagcccgtgtgggagcggccgtggtcggtggaggagatccgcaggagcagccagagctggtcgctggcggccgacgcgggcctactacagtttctacaggaattctcacagcaaactatctctaggacccatgaaatcaagaaacaagtggacggactaatccgggaaaccaaagccacagattgtcgcctgcataatgtcttcaatgacttccttatgctctctaatacccagttcatagagaatcgtgtatatgatgaagaagtggaggagccagtactcaaggctgaggcagaaaaaacagagcaggagaagacacgagagcagaaagaagtagatctcattcctaaagtccaggaggctgtgaactatggcttacaagtattggacagtgcctttgagcaacttgatatcaaagcaggaaactcagactccgaggaagatgatgctaatgggcgggtggaactgatccttgaaccaaaggatctatacattgatcgtcctttaccatatctcattgggtcaaagctgttcatggaacaagaagatgtaggtcttggagagctgtccagtgaagaaggctctgtaggcagtgatcgtggcagtattgtggacactgaggaagagaaagaagaggaggagtcagatgaagattttgcccatcacagtgacaatgaacaaaaccagcacaccacacaaatgagtgatgaggaagaggatgatgatggctgtgacctttttgctgactctgagaaggaggaggaagatattgaggacattgaagaaaatactagacctaaaagaagcagacctacatcgtttgcagatgagctggctgcccgcatcaagggggatgccatgggtcgagtggacgaggagccgacaaccttaccctcaggagaagcaaaacctcggaagacactcaaagagaagaaggaaaggagaactccttcagacgatgaagaggataacttattcgcaccccccaagctgaccgacgaggacttctcgccatttggctctggaggtggcctgttcagtggcggcaaggggctatttgatgatgaggacgaggagagtgacctcttcacggaagcctcccaggatcggcaagctggagcctctgttaaggaggagtcttcatcatccaaacctggaaagaaaatcccagcaggagctgtttctgtatttttaggagacacggatgtgtttggtgctgcctccgttccatcactgaaggagccacagaagcctgagcagcccactccaaggaaaagcccctatggtccccctcccactggcctctttgatgatgatgatggtgatgatgatgacgactttttctcggcaccccacagcaaaccttctaaaacacgcaaagtccaatccactgccgatatctttggtgacgaagaaggagatctgttcaaagaaaaagccgtagcatcgccagaagccactgtgagtcagacagatgaaaataaagcaagagcagaaaaaaaggttaccttatcttccagcaagaatctcaagccctcatcagaaacaaagactcaaaaaggcttattttcagatgaggaggactctgaggatttgttttcttctcaaagtgcgagtaacttaaaaggtgcatctctgctgcctggcaagctccccacgtcggtttccctgtttgatgatgaagatgaagaggataatctttttgggggtacagctgctaagaagcagacattgtctctacaagctcagagagaagagaaagcaaaagcctccgagctctccaaaaagaaagcatctgccctgttgttcagcagtgatgaggaggaccagtggaatattcctgcttcacagacccacttagcatctgacagcaggtctaaaggagaacccagggattctgggaccctccagagccaggaggccaaggctgtgaaaaagaccagtctctttgaggaagacaaagaagatgatctttttgccattgccaaggacagccaaaagaagacccagagagtgtcactcctctttgaagacgatgttgatagcggaggctctctgtttggctctcctcccacatctgttcctcctgcaacaaagaaaaaagagactgtctctgaggcaccacctttgctgttcagcgatgaagaagagaaggaggcacaacttggagtgaagtctgtggataagaaggttgagagtgccaaggagtcattaaaatttgggagaactgatgtggctgagtcagaaaaggaaggacttttgactagatctgctcaggaaacagtcaagcattctgatttattttcttcatcatccccatgggacaaaggaaccaagcctagaaccaaaactgttcttagcttgtttgatgaggaagaggataaaatggaagatcaaaacattatccaggctccacagaaagaagtaggaaagggctgcgatcctgatgcccaccccaagagcacaggtgtcttccaggatgaagagctgcttttcagccacaagctccaaaaggacaatgacccagatgttgacctttttgctggcaccaaaaaaaccaagctgttagagccaagtgttgggagcctgtttggggatgatgaagatgatgatcttttcagctctgccaagtcccagcctttggtacaagagaaaaagagagtagtgaaaaaagaccactctgttaactctttcaaaaaccagaaacatcctgaatccattcaaggtagtaaagaaaaaggcatatggaagccggaaacacctcaggcaaatttagcgatcaacccagcggccttgctgcccacagcggcttcccagatctctgaagtaaagcctgttttgccagaattggcttttccttcatctgaacacagaaggagccacggtctggaaagtgtgcctgtccttcccgggagtggggaggccggtgtgagttttgatcttccagctcaggcagacaccttacacagtgcaaacaagagccgtgtcaagatgagagggaagcgtagaccgcagacccgtgcagctaggcggctggctgctcaggagtccagcgaggctgaggacatgagcatccccagaggacccattgcacagtgggctgatggcgccatttccccaaatggccatcggccacagctcagagcagccagtggagaagacagcactgaggaggccctggcagctgccgctgcaccttgggaaggtggtcctgtgcctggagtggacacaagcccctttgcaaagtctctgggtcattccagaggggaggctgacctttttgattctggggacattttttccacgggcactggatctcagtccgtggagagaacaaaacccaaggcaaagatagcagagaatcctgccaacccaccagtgggtggtaaagcaaagagccccatgtttcctgctctaggcgaggccagcagtgatgatgatctctttcagtctgctaaaccaaaaccagcaaagaaaacaaatccctttcctctcctggaagatgaggatgacctctttacagatcagaaagtcaagaagaatgagacaaaatccagtagtcagcaggatgtcatattaacaacacaagatatttttgaggatgatatatttgctacggaagcaattaaaccctctcagaaaaccagagagaaggagaaaacattggaatctaatttatttgatgataacattgatatctttgctgacttaactgtaaaaccaaaagaaaagtccaaaaagaaagtggaagccaagtctatatttgatgatgatatggatgacatcttctcctctggtatccaggctaagacaaccaaaccaaaaagccgatctgcacaggccgcacctgaaccaagatttgaacacaaggtgtccaacatctttgatgatcccctgaatgcctttggaggccagtag

SEQ ID NO: 20520 - DNA, 3152 bp, Homo sapiens
  SIMILAR (304)..(1071): 871254mologous to Homo sapiens ubiquitin-like fusion protein,accession number AF311324,Smith-Waterman Score=1109.
atggccacagctccatcaccccccatgctgactctggctcctgcctggctctgcccggccaccacaacccctcgggaccattcagaggcatcactggaggcgcttcctggggatccacccgctcatcctgcagccgccgcaactgcagccgccgtcatcccggccctggagcccccacacacccctgtgtatgcaatatttgttaaccattcccttttggatctatacattgatcgtcctttaccatatctcattgggtcaaagctgttcatggaacaagaagatgtaggtcttggagagctgtccagtgaagaaggaaatgctgatgaacagagcagcggcttagaaggtgcgtgcaaagtgaatctggagttgctactcactaatgctgacaaagggttgaaagctccagagcagcatctcaagcatgttgcaggagtgctgaatggggaatcagtagagacttcagttcttaactaccgggaattaagtcctcacaagaatagactcttgtcacctcttcgctgttctgcaccaatgtcgctacataattctctggtgaaaccagagagacagtccaaatgttttgagtttgggaagctacagccttcttcttctcagtcactggatgttcaaaacataactgattcttctttctctaggactacttgctttcaaggtgttaaagttgattcacttgggaaaagatctgatgttatttccaaagttgaggctcgggatatcacagaaatgactaacaaggcttccaaagagcctgttggttgtgtaaataatatcagttttcttgcctcactggccgggagcacaagcagaaatagattacagagcacacgtggggcaggcaggcttcagaactctggaactgggctgtctacaaacctccagcattttcaggaagaaaactttaggaaaagttctccccagttagaacatacaggagtttttttggcctcctgcaagagacggcagaccgtccaggacttgaaagctagtgttttagaaagagtcgccatttgtcttcaccacggggctgaaagggtccgcgaaccccgacgcgtacttccaccccgtggactgttgatagctatggtccaacagatgattgaattaaaggtaactcttataagggctcagaaagaaaagaggagagccagagagaaagcctccatattcttacagaatacatatatcatcatcaacagaatgttcgtgggcatgatggactttaaaggcccgtctggtgaagtcttaggtagaaatgcagaacaggtttccaccgtgcacattacgaagaacagaaatggaggtgggagtttaaataactattcctcctccattccatcgactcccagcacccagccaggagggaccctcagttcagtgttcctcccactgccaacacacccacgcccgtttgcaagcggtccatgcgctggtccaacctgtttacatctgaggaaaggggagtgacccaggacaaagagagggaaagccccgggaggaatcatggttgacaccatcggggaggcgggcagagccattcccattaaacagggcatgctcttaaagcgaagtgggaaatggctgaagacatggaaaaagaaatacgtcaccctgtgttccaatggcatgctcacctattattcaagcttaggtgattattatgaagaattattcataaaaaaagagattgaccttcagacatctaccaatcaaaagtcccaggaaaagtggccatccctagccacatcggcctgcacacccatctccagctctaaaagcaatggcctatccaaggacattggacaccgggctgggtgactccatatgcttcagccccagtatctccagcaccaccagccccaagctcaacccgcccccctctcctcatgccaataaaaagaaacacctaaagaagaaaagcaccaacaactttatgattgtgtctgccactggccaaacgtggcactttgaagccacgacgtatgaggagcgggatgcctgggtccaagccatccagagccagatcctggccagcctgcagtcatgcgagagcagtaaaagcaagtcccagctgaccagccagagcaaggccatggccctgcagtcgatccaaaacatgcgtggggaacgcccactgtgtggactgttgaggacccagaatcctaagtgggccagtttgaacttgggagtcctcatgtgtattgaattgctcaggtatccaccgcagtcttgggcacccgccttttcccgtgttgcgatctttgggagctgggatggattggccagtttgagctcagggaaggttatgttcatctattgggcaatgaccctagccaacagcatcttgggaagggagcagccaggggcagacaaaaccctcagaaaagtccacgagggaagagaaggaacggtggatccgttccaaatatgaggagaagctctttgctggcccccactaccctgcactgaagctgtcccctgggccagcagctgctgcgggccaccactgatgaggacctgcagacagccatcctgctgctggcacattggctcccgtgaggagggtgaacgagacctgtgggggagggagacggctgcacggcgctccatctggcctgccgcaaagggaaatgtggttcctggcgcagctcctgaatctggttacggggtggacgtcatggcccgagatgcccaacggggaacacagcgcctgaccctacgccccggcaggccctccagcccaggagtgcatccaacgtgcttctgcaagtacggctgccccgacggagtgtgtgtagtatctggttttatttgactgcagtcttccttggtgcaaaaacaaaatgggaaaaataaggaatacctcagaatttcaaaaaggaaatcccaaattcagctaataatagcattttcagtactttttcgtaaactaagtaaatacacaaaattgtttgattttttctgaccataagacatattttatgtccttctggccaaggtggatttgttagactcaggccctcctggccacattgcccaagtcacacaggcttctgtattatgtatttagataaaatgtgtgaaaatatatttgaaaaaaaatttcataaatatgcattgatttttgt

SEQ ID NO: 20521 - DNA, 1179 bp, Homo sapiens
  SIMILAR (77)..(163): 1001254mologous to Escherichia coli SapA protein,accession number X97282,Smith-Waterman Score=150.
atgtttgcagaatatgccggaagttacgagaaagatgatcgccaggagcaactcgaccgtcaaccggtcggcaccggtagtggtggatttaggctccggcggcaccggacgtctgtcgaaactcctgaccggggaatgcgacgttctggcctggcctgctgccagaccagctatcacatttgtggcggtgcacaccaccacgacggcattggcgatattcaaccgcctgcgttcctggcgatgaacgtcgcctatctggcatttaacaccgccaaaccgccgctaaataatcccgctgtccgccatgcgctggcactggcgattaataaccagcgcctgatgcaatccatctattatggtacggctgaaacggcggcctctattttaccgcgcgcctcgtgggcctatgacaacgaggctaaaattactgaatacaatccggcgaaatcgcgcgaacagttgaagtctccactgaaaactgccgaactgattcaggcggatatggcgcaggttggcgtaaaagtggtgattgtgccggtagaaggtcgctttcaggaggcgcggttgatggatatgagccatgatctgacgttatccggttgggcgacggacagtaacgacccggacagtttcttccgtccgttactgagctgcgcggcaagtcattcgcagaccaacctcgcccactggtgcgatccgaaattcgacagcgtattgcgtaaggcgctctcttcgcagcagctggcggcgcgtattgaagcctatgacgaagcgcagagtattctggcgcaggaattgcccattttgccgctggcgtcgtcattgcgtttgcaggcctatcggtacgatatcaaaggtctggtacttagcccgtttggtaacgcctcctttgctggggtgtatcgcgagaaacaggatgagagtgccagagaaccgttgcttttccgagttgctcttcttccaggctccgttggtggtcggcatggcccgcagaagaaagaagataaatcagcagaaggtgtaagcatccgatattatatttcatcaaaggatatggatgctaaagaatttgcacatgctatcagagcgcactggctgatcgagcacagtcttcattgggtgttagatgtaaaaatgaatgaagatgccagccggataagaagaggaaacgcagcctaa

SEQ ID NO: 20522 - DNA, 570 bp, Homo sapiens
  SIMILAR (188)..(364): 1001254mologous to Homo sapiens small EDRK-rich factor 1, short isoform,accession number AF073518,Smith-Waterman Score=289.
tttcgtcctgggtcgcgcagtgcggggatccctgcttcagttggcagagagagagctcgcggttggttccggtccggcttttcaggccggacgggtgcctgcccctcaggtgcgagtttgtgcggtaaagaacacaccccggagatgtggaccacggcccgccccaggagggtccttgtttggaggtggaaatcaacgagaacttgcccgccagaaaaacatgaagaaaacccaggaaattagcaagggaaagaggaaagaggatagcttgactgcctctcagagaaagcagagggactctgagatcatgcaagaaaagcagaaggcagctaatgagaagaagtctatgcagacaagagaaaagtgatgactggctatttggaaaacctgggtgctactgccaactgggtgtatcataagctctaagatcaagattttgtagagtggacagtcattacatatgttataacttatcctttaaaaactattttaaactttatcctttcagctttacttagtgcgatgttttagaagcagtcttcaaagaataaaacactaaccatgcatgtg

SEQ ID NO: 20523 - DNA, 861 bp, Homo sapiens
  SIMILAR (196)..(384): 461254mologous to Homo sapiens small EDRK-rich factor 1, short isoform,accession number AF073518,Smith-Waterman Score=116.
cgctgaattcccggctcgacgatttcgtggcctccagcgggcggagccgttggcggagcagagcggaggcgcagccgggcggagggcccacgagggctcagccttcccggtcagcggtggtgacggtatcccagagtgccagagaaccgttgcttttccgagttgctcttctttcaggctccgttgggggtcggcatggcccgtggaaatcaacggagaacttgcccgccagaaaaacttgaaggaaaccccaggaaatttgcaaggggaaaggggaaggaggatagcttgactgccctttcaagaaagcagagggactctttagatcattgcaaaaaagcagaaggcagcctaatgagaagaagtcctatgcagacaagagaaaacgtgatgactggctatttggaaaacccgggtgctactgcccaactgggtgtatcataagctcgtaagatcaagattttgtagagtggacagtcattacatatgttataacttatcctttaaaaaactattttaaactttatcctttcagctttacttagtgcgatgttttagaagcagtcttcaaagaataaaacactaaccatgcatgtgacatattggtgaacattatttttattattgaacattcatatataatttattaggtaatatgatcagataataggatctcttatataataaagaatctttgtcatcagctttgttaacatagtttttttttcctcacagtttctaaggataaggataaagtagatctttgaagtaaacttaaatatataatagaagttagggtccatttgtataattttgctttgaaatcaagttaaagggccaggtgcggtggcttatgcccac

SEQ ID NO: 20524 - DNA, 747 bp, Homo sapiens
  SIMILAR (284)..(249): 831254mologous to Homo sapiens nuclear pore complex interacting protein NPIP,accession number AF132984,Smith-Waterman Score=46.
ctacggatttattcttattgcccaggcttgagtgcaatggcgtgttctcagcttactcaacctccgcctcttgggtttgggtaattgttgtgcctcggcctccctctgcctcttgggcttgggcgattgttccacctcatccaccctccgcctcttgggtttcggtgattgttccacctcatccaccctccacctcttgggtttgggtggtttttccacctcggcctcctgagtagctaagggaggagtcttgagattatcatccactgagggtggaagaggagagggtggaagcgggacaaagagacattccttcagattatcatccactgagggtggaagaggagagggtggaagcgggacaaagagacattccttcagattatcatccactgagggtggaagaggagagggtggaagaggagcaagaggacactccttgatattatcatccactgagggtggaaggggagtgagcagacactcaggaggtgtcttgaggctcagggagttatcagttatagaatgttgttgagttggaggaggtggctggcggcccatcctgttttttaaagtttcagctgtgaggtagagccagtagggcaatcctgaagaatgacgatgctccgctgccgccattctgacccagttgcaaagaggctttcttgcagaaggggggataggggtgggctgatggctgataaatcccagcaggagccaaatgaggagccaaaagcgcagccgcat

SEQ ID NO: 20525 - DNA, 256 bp, Homo sapiens
  SIMILAR (28)..(255): 591254mologous to Bos taurus pyruvate dehydrogenase phosphatase regulatory subunit precursor; PDPr,accession number AF026954,Smith-Waterman Score=224.
atgatggtggtagaagcactatgtgaacttcattgtcctgaagctatacagggaattgctgactggacatcatctattgttggaaaaaaacttatgtggattaactcagtggctcaacaggctgaagggaggtaccttgccgaatggatggtacatggttatccctcagaaaacgtttgggaattggacctgaaacgttttggagccctccagagcagccgcacctttctgcgccaccgggtcatggaagtcatgc

SEQ ID NO: 20526 - DNA, 509 bp, Homo sapiens; identical to SEQ ID NO: 1221
  SIMILAR (244)..(501): 901254mologous to Homo sapiens Mouse novel secreted protein isolated from clone BD407_li,accession number W54454,Smith-Waterman Score=413.

SEQ ID NO: 20527 - DNA, 706 bp, Homo sapiens
  SIMILAR (230)..(496): 861254mologous to Homo sapiens nuclear pore complex interacting protein NPIP,accession number AF132984,Smith-Waterman Score=405.
  misc_feature (1)...(706): n = a,t,c or g
attcgccctcctgcangaattcggcacgagctgaaatacgttttctaggtagagatagattgtgtaagggtacagttatgaggataacagaaacgtggcagattatttaaaatcatcctgaaagtggtgctttatctgatgaaagtgattgtaatccataggaaaatgtttcaacgtgcgcaagagttgcggtggcgggcagaggactaccacaaatgcaaagctttttcagatcaccccctctgcaagaaagcctctttgcaactgggtcagaatggcggcagcggagcatcgtcattcttcaggattgccctgctggccctacctcacagctgaaactttaaaaaacaggatgggccgccagccacctcctccaactcaacaacattctataactgataactccctgagcctcaagacacctcccgaatgtcttcttattccctttccaccctctcctcttccaccctccgtggatgataatctcaagactcctcccttagctactcaggaggccgaggcagaaaaatcactgaaacccaagaggcagaggttgagtaagctgagaacaggtcattgcactcaagcctgggcaataagaagaaatctgtgagtggaacaaaagaaaaaaatcaaaaaacaaaacaaaacccacactccaaaaacaaactaacaaagaataaataaataatataaaaaaaaaaaa

SEQ ID NO: 20528 - DNA, 947 bp, Homo sapiens
  SIMILAR (880)..(725): 301254mologous to Methanococcus jannaschii SSU ribosomal protein S28E,accession number U67562,Smith-Waterman Score=66.
aaaaaactcacacttattctaggaacttttaagatttttaaaaattcagaatgttgtctttgctttcaggtatcattcgaagtctcgcaggtcacacattaaaccctgatcaggatgttagtcagtggacaactgcagacagtgatgaaggccatggtaacaaccaacttagacttgttcttcttctgcagtacctggaaaatctggagaaattaatgtataatgcatacgagggatgtgctaatgccttaacttcacctcccaaggggaatgaattggaagtaagcattatgatggtggtagaagcactatgtgaacttcattgtcctgaagctatacagggaattgctgtctggtcatcatctattgttggaaaacatcttctgtggattaactcagtggctcaacaggctgaagggaggtttgaaaaggcctctgtggagtaccaggaacacctgtgtgccatgacaggtgttgattgctgcatctccagctttgacaaatcggtgctcaccttagccagtgctgggtgtaagagtgccagcctgaaacattgtctgaatggaaacaaagcatgtgagtgctacatctcaactgccgattgggctgctgtgcaggaatggcagaacgctatccatgacttgaaaaagagtaccagtagcacttccctcaacctgaaagctgacttcaactatataaaaaatgtggtaaagtacttgaagcaaacatcccgcatcgctattggacctctgagactttctactttaacagtttcacagtctttgccagttctaagtaccttgcagctgtattgctcgtctgctttggagaccacagtttctaacagactttcaacagaggactgtcttattccactcttcggcgaagctttacgttcatgtaaacagcatgacgtgaggccgtggatgcaggcattaaggaagtga

SEQ ID NO: 20529 - DNA, 683 bp, Homo sapiens
  SIMILAR (37)..(447): 721254mologous to Homo sapiens nuclear pore complex interacting protein NPIP,accession number AF132984,Smith-Waterman Score=492.
atgcgggtgctgtggatgctcttttggctcctcttttggctcctgctggaatttatcagccatcagtccacctgtgttatcaatactctggctgaccatcatcatcgtgggactgactttggtggaagtccttggttacgtatcattattgcatttccgagaagttataaagttgtccttaccctctggacagtttacctttggttgtctttcctgaagactatcttccagtctgaaaatggacatgatgtatccacagatgtacagcagagagccaggaggtccaaccgccgtagacaggaaggaaataaaattggcctgaaagacgtcattactctacggagacatgtggaaacaaaaggtagagctaaaatccgtaagatgaaggtgacaacgaaaatcaaccatcatgacaaaatcaatggaaagaggaagaccgccaaaaaacagtaagatgtgccttgacacaaatactgttgtaggaaccatgtgccaatcaaagtagacaactgtaaagtccttgagaatattttctacaatatttgtggcaaattcagtaggttcaaaattgagtttgtcctttctgcttcattagtttaagctgtataattcctttcccttcctacattcttgtttgtcattttttcgggggaagaggagttgctagtactggcattggtttt

SEQ ID NO: 20530 - DNA, 1490 bp, Homo sapiens
  SIMILAR (750)..(1205): 821254mologous to Homo sapiens Unknown gene product splice form-1,accession number AC002544,Smith-Waterman Score=668.
  misc_feature (1)...(1490): n = a,t,c or g
aaccctctcccagttcccctgcagctcttcaggaatccacatctctgcagagctctttgttctcatgggtggcacctccagagtgaagaagatcctttatcaagaagggaaacaggggaaatgagagggtcctgcaggcagagctggaatcaacttccactctgcctcttgcaagctgtgtgaccccgggcacaatttctccttcctctggtaacctctgttttcttagatttggagcagggtggtcacactgaccttgcagagttccgagaatcagagacagaacataaaaggcctggaaaacattctccaaaaagaagctgcaacatgtgtggacaatgggcttttcatgcctctcttactgtctgttgacctggtgcaagaaacatgctctggtgatggctgtgagggaggaatgaggatagacatagacactcctgtgtctcaaacatagcttctttattactctgttatgactctgtcttccctggggcaggaccccagcctgcctacatttgcagacagacacagtggcatgtggagacaacagtgtgtcccaaagacttttctttaccccctagctgtcggcagtactcagtggatatggtgatattatgacactgatactgctattttgaaacctggaggatggaaaggtgcaaaaatctatcaccagcaacagaaggtgcagactgtgttgggtggcggtaattttgtccatcaaatgaatatgtgtgaaaacattccctcctttggccctacaggtcagaatggcggcagtggagcatcgtcattcttcaggattgccctactggccctacctcacagctgaaacttttaaaaaacaggatggggccaccagcccacctcctccaactcaacaacattctataactgataactccctgagcctcaagacacctcccgaatgtctccttcatccccttccaccctcagtggatgataatatcaaggagtgtcctcttgctcctcttccaccctcagtggatgataatctgaaggagtgtctcctggtccctcttccaccctctcctcttccaccctcagtggatgataatctgaaggactgtctctttgtccctcttccaccctctcctcttccaccctcagtggatgataatctcaagactcctcccttagctactcaggaggnccgaggcggaaaaacccaccccaaaccccaagaggtggagggtggatgaggtggaacaatcaccgaaacccaagaggcggagggcggatgaggtggaacaatcgcccaagcccaagaggcagagggaggccgaggcacaacaattacccaaacccaagaggcggaggttgagtaagctgagaacacgccattgcacttcaagcctgggcaataagaataaatccgtgggtcggaaaaaaagaaaaaaatcaaaaaacaaaacaaaacccacgctccaaaaacaaactaacgaagaataaataaataatataaaaat

SEQ ID NO: 20531 - DNA, 695 bp, Homo sapiens
  SIMILAR (538)..(639): 971254mologous to Homo sapiens Amino acid sequence of a human secreted peptide,accession number Y10916,Smith-Waterman Score=172.
gggaaatgacagggtcctgcaggcagagctggaatcaactgccactctgcctcttgcaagctgtgtgaccccgggcacaatttctccttcctctggtaacctcggttttcttagatttggagcagggtggtcacactgaccttgcagagttccgagaatcatagacagaacatataaggcctggaaaacattctccaaaaagaagctgcaacatctgtcggcagtactcatgggaagggtgatattatgacactgatactgctattttgaaacctggaggatggaaaggtgcacaaatctatcaccagcaacagaaggtcagaatggcagcagcagagcatcgtcattcttcaggattgccctgctggccctacctcacagctgaaactttaaaaaacaggatgggccaccagccacctcctccaactcaacaacattctataattgataactccctgagcctcaagacaccttccgagtgtgtgctctatccccttccaccctcagcggatgataatctcaagacacctcccgagtgtctgctcactccccttccaccctcagctccaccctcagcggatgataatctcaagacacctcctgagtgtgtctgctcactccccttccaccctcagcggatgataatctcaagaaactaaggaagaataaataaataatataaaaataaaatgaaa

SEQ ID NO: 20532 - DNA, 2514 bp, Homo sapiens
  SIMILAR (2383)..(2201): 501254mologous to Homo sapiens PRO2550,accession number AF130089,Smith-Waterman Score=159.
agggtcagtttttaaaggaaaaacaactaactaccttgcaagcttgctagcaggtttaagtgtaataatgtgtgggaatgactgcaccgtgactaacatgcagtgacagcttaattaatgttaacccttatcattatcatataagaatgtgagttacataagagaggagtcctgtcagttcgttctctgctgtgtccccaagaccatgaatcatggctggcatgtagtaggcatttaataatatatgttcaacaagtatttggcagtcttggagggcagaaaaggaggtggggaagatttttaaataacattttttaaaaagtcacattgtcctacaataccgatttttcttgcatatttaggaaattgagggtttttttctaaaacatgcggacatatgggaaataggatgcaacatttgcactaatgtttcagacacagttagaggtttccaagagattttgcgctggggaggctgcttgctacaagctcccaaagctctgggaggacatagtattcattcctccctcagcagaagcggtgaggcaagaggctctggggagcacccagcgttgggcttttagcatagtgtgtcaggtcttcatagtttgggcccagggcacagagaagtcacagctctccggcatcctgtgacctttaccctctttgccaagggaaaatgtggcccaccaaagcaagaaacttgagggcatgggtcaccccagccctggcatctgcccagagcccgagaaggaaggaacaatgatcctccagctacctcacggggctggcacaggtgaccactgccctggcatcacccagctgtgtccggcagcctgaaccccatctgtggggatgcgaggaggaaaatacaaaagtccttaggtgaacactgagaaggcagatgcagcagaaacctccaggccagaactacccagtcttggacctatggtggagatagagcatagctggcgatcatgtgtacttacactctaaggtcacctggttgcactatggcctcatctgtggctctgaaaatgaagatttggaaggagatcatcacagctaatgtttaacaagcccctcctgtgtgccaaatcattcacccctcaccacaaccgaatgagctaaggattctcattatatatagtttatggagagggaagtgcagacataaagaggtgaattatcttacccagatcacacagctgataagtggtggaggcagaatagaatctaaacagtgtggctccggagcccacatgcattgattcgacaagtgtttattgagcacctgccgcggacaaggccttgtgtgattaaatagggttataattagtaatataaaaatgagaaatcactaatgctttttagacttaacattttgtttttttgtaggtttcaggcacagaactgtatatccaataatagtgaaatggatcccactaattatgacagaaatgatgatacatttaaatgacttggatgttttataggtatgatctcgtgaaatcttgagagaaactgaatgacgaatgaaactattgttcctgtttcacacagaagaaaactgaggttaaaaggggtaaagtaattttgcatggcatgaagtagaaattcaaagtacaggaatttgaacttggttctgtccttttctgaagcccttgaccactatagactcaaacatcaccttgtttttccactcattcaacacttttttttttaaattatctaataggttggcactcatcatgagcccctgttctcattctgcaaatgggtgaagctctctattgtcctgaccccacagttcctgtcccatgaccaggggccagctcaccaagggagctggcagcaggcatgttaaagttcagtggacatggccccatggcgagttacctgagggaagggttgagttgaggtggcaggacaggtggggggcctgggtgcctttggaggcaggttccccggggtctcaggctggcccacacatctcataggcgggtgatgctgggggaagcttacgcagttcacagtactggcttcttcctctttttctttccatacaagtggcttagggatggggtagagtagttgacttatttggatgaaaaccactatcttctgtcagaaacttcaaaaggaatcattgctgggctggtaacctaaagaaaaacaaccagacaagtgcccaacgacacttaaaaaggtgatttattatcttgccaagtttaggctgggcatggtgactcgtgcctctaatcccagcattttggggggctgaggctggtggatcaccggaggccaggactttgaggccagcctgaccaatatggcaaaacctcgtccctgctgggggtacaaaaattagccgggcatggtggtgtgagcctgtagtcccagctactcaggaggctgggacaggagaattgcttggattcgggaggtgggggttttagtgggccgagatcacgccattgcactccagactgtgcgacagagcgagactctgtc

SEQ ID NO: 20533 - DNA, 1862 bp, Homo sapiens
  SIMILAR (343)..(729): 541254mologous to Homo sapiens nuclear pore complex interacting protein NPIP,accession number AF132984,Smith-Waterman Score=311.
agatcatcagctattgttagtgttagtgtatgttatgtgtggctcaagacaactttgcttcttttaatataggcagggaagtcaaaagattggatatccctgctttataccaagaaagacaacaccccacatttgcaatgcctgaaaacactaccagccatctgaaaaacatgagacttctctaacttctgttcttttttgtagcagtggaatcccacggtgatatctgagggatgtggttaccttttggaggaggttgacggtttctaaggatgattctttctgagtgaaatattgtcagtgtcattgaccttttcattatttcaactattattattccaggttatcaatactctggctgaccatcgtcatcgtgggactgactttggtggaagtccttggttacatgtcattattgcgtttccgccaagttataaagttgtcattaccctctggatagtttacctttgggtgtctctcctgaagactatcttctggtctcgaaatggacatgatggatccacggatgtacagcagagagcctggaggtccaaccgccgtagacaggaagggctgaggtccatttgtatgcacacaaagaaaagagtttcttcctttcgaggaaataaaattgtcctgaaagacgtcattactctacggagacatgtggaaacaaaagttagagctaaaatccgtaagaggaaggtgacaacgaaaatcaaccatcatgacaaaatcaatggaaagaggaagaccgccagaaaacaactctctcaacattcaatttctcatgtgttggctttttcagatccccccttctgcaagaaaggctctttgcaactggctccaccctcagcagatgataatatcaagatacctgctgagcgtctgcggattccgcttccaccatcagccgatgataatctcaagacaccttccgagcgtcagctcactccccttccaccctcagctccaccctcagcagatgataatatcaagacacctgccgagcgtctgcgggggccgcttccaccctcagcggatgataatctcaagacaccttccgagcgtcagctcagctccccttccaccctcagctccaccctcagcagatgataatatcaagacacctgccgagcgtctgcgggggccgctttccaccctcagcggatgataatctcaagacaccttccgagcgtcagctcaacttcccctttccaccctcagctccacccttcagcagatgataatatcaagacacctgccgagcgtctgcggggggccggcttccaccctcagcggatgataatctcaagacaccttccgagcgtcagctcactcccctttccaccctcagctccaacctcagcagatgataatatcaagacacctgccgagcgtctgcgggggccgcttccaccctcagccgatgataatctcaagacacctcccttagctactcaggaggctgaggcagaaaaaccacgcaaacccaagaggcagagggcggctgagatggaaccacctcccgaacccaagaggcggagggtcggtgacgtgggaaacgtcagcgcaaacccaagaggcggagggcccgctgacgtggaaccatcatcacccgaacccaagaggcggagggtcggtgatgtggaaccgtcacgcaaacccaagaggcggagggccgctgacgtggaaccatcatcacccgaacccaagaggcggaggttgagctgagaagaggccagtgcactcaagcctgagcaataagaataaaaccgagtagaacaaaataaaaaattcaaaaaacaaaacaaaacccacactccaaaaactaacaaagaataaataaataatataaaaat

SEQ ID NO: 20534 - DNA, 1203 bp, Homo sapiens
  SIMILAR (1061)..(651): 911254mologous to Homo sapiens nuclear pore complex interacting protein NPIP,accession number AF132984,Smith-Waterman Score=655.
aggactgcagtattcattttatttttatattatttatttattcttccttagtttcttgagattatcatccgctgagggtggaaggggagtgaagcagacacactcaggaggtgtcttgcagattatcatccgctgagcgtggagctgagggtggaacgcgagtgagcagacactccggagctgtcttgagattatcacccgctgagggtggaaggggatagagcaggcactccgcaggtgtcttgagattatcatccgctgagggtagaactgggtagagctgagggtggaagggggagtgagcagacactcggaaggtgtccttgagattatcatccgcttgaaggtggaaaggggattagagcacacacttcggaaaggtgtctttgaggcctcaggggagttatcaatttatagaatgttggttggagttggaggaggtggctggtggccccatcctgttttttaaagtttcagcttgtgaggtagggccaagtaggggcaatcctgaagaatgaacgatgctaccactgccgccattgctgaacccggttggcaaagaaggctttccttgcagaaggggtgattttgcatctgtagtagtcctctgcccgccgccgcaacgcttgcgcacgttgaaacatttcctgttctttggcggtcttcctctttccattgattttgtcatgacggttgacttttgttgtcaccttcatcttacggattttagctcgaactttggtttccacctgtctccataaagtaaagatgtcttccaggacaattttaattccttcctgtctacggcggttggacctcctggctctctgctgtacatccgtggatccatcatgtccattgtgagacgggaagatagtcttcaggaaagacacacaaaggtaagttgtgcagagggagatggcaaatttataacttctcagaaacacagtaatgataagtaaccaaggacttccaccaaagtcagtcccacgatgacgatggtcagccagagtattgataacccaaaggtaagttgtgcagagggagatggcaaatttataacttctcagaaacacagtaatgataagtaaccaaggacttccaccaaagtcagtcccacgatgacgatggtcagccagagtattgataacctcagcgtggaggcctgagaacgtgaggaaggagctgtccagcacggacgag

SEQ ID NO: 20535 - DNA, 5810 bp, Homo sapiens
  SIMILAR (147)..(893): 991254mologous to Homo sapiens KIAA0220,accession number D86974,Smith-Waterman Score=1311.
  misc_feature (1)...(5810): n = a,t,c or g
gtttcattttttatttttattttttattgtttgagatgtttgaaaaaccaagagaaaaccaatgtaagaagactaggcttttaacttttttttgtttttgttgttttttttttttaatggacagtcaactgtatattttgtgtttcaggaaactgttaatgacttgggctttggaagtagctgttgtaatgaagaagtccgaaacatatgcacctttattctgtcttccgtctttccataaattttgcaaaggccttttagccgacactctcgttgaagatgtgaatatctgtctgcaggcatgcagcagtctacatgctctatcctcttccttgccagatgatcttttacagagatgtgttgatgtttgccgtgtccaactagtgcaccgtggaacttgtattcgacaagcatttggaaaactgttgaaatcaattcctttaggtgttttcctaagcgataacaatcacacagaaattcaagaaatttctttagcattaagaagtcacatgagtaaagcaccaagtaatacattccacccccaagatttctctgatgttattagttttattttgtatgggaactctcatagaacagggaaggacaattggttggaaagactgttctatagctgccagagactggataagcgtgaccagtcaacaattccacgcaatctcctgaagacagatgctatcctttggcagtgggccatatgggaagctgcacaattcactgttctttctaagctgagaaccccactgggcagagctcaagacaccttccagacaattgaaggtatcattcgaagtctcgcaggtcacacattaaaccctgatcaggatgttagtcagtggacaactgcagacagtgatgaaggccatggtaaccacccaacttagacttgcttctcttctgcagtatctggaaaatctggagaaaattaatgctaaatgctcacgaggcgatgggctatatggcttaactttaccctcctcaaggctattaaaaacttttttgtataccaatcgccaaacttgtcaggactggctaacgcggattcgactctccatcatgagggtaggattgttggcaggccagcctgcagtgacagtgagacatggctttgacttgcttacagagatgaaaacaaccagcctatctcaggggaatgaattggaagtaagcattatgatggtggtagaagcactatgtgaacttcattgtcctgaagctatacagggaattgctgtctggtcatcatctattgttggaaaacatcttctgtggattaactcagtggctcaacaggctgaagggaggtttgaaaaggcctctgtggagtaccagggaacaccctgtgtgccccatgacaggtgttgattggctgcatctcccagctttgacaaatcgggtgctcacccttagcccagtgctggggtgtaaggagtgcccagcctggaaacattgtctggaatgggtgaatcccagaaaaagtgtgctgtcccaaacccgacttgactcttccccctgagggttattaaattatttaggaaacaaagcatgtgagtgctacatatcaactagccgattgggctgctgtgcaggaaatggcagaacgctatccatgacttgaaaaagagtaccagtagcacttccctcaacctgaaagctgacttcaactatataaaatccattaaggcagctttgagtctggaaaatttgtcaaatgtacccgagcaattagaattgttaccaggacgaaaatatcaatctacttgctggaggatcaaaagaaaaaaatagacatgaaaaaactgcttcgtaacatgtgaagtccagatccaagggaacctcagaaatccattgaagttccattgttaagaagttctgtttgtttggcaactgctttaaaacccgatagaacaagatcagaagtggcagtctataactgaaaatgtgttattgtacttgaagcaaacatcccgcatcgctattggacctctgagactttctactttaacagtttcacagtctttgccagttctaagtaccttgcagctgtattgctcgtctgctttggagaccacagtttctaacagactttcaacagaggactgtcttattccactcttcggcgaagctttacgttcatgtaaacagcatgacgtgaggccgtggatgcaggcattaaggtatactgtgtaccagaatcagttgttggagaaaattaaaggtatgatctcgtgaaatcttgagagaaactgaatgacgaatgaaactattgttcctgtttcacacagaagaaaactgaggttggcactcatcatgagcccctgttctcattctgcaaatggtgaagctctctattgtcctgaccccacagttcctgtcccatgaccagggccagctcaccaaggagctgcagcagcatgtaaagtcagtgacatgcccatgcgagtacctgaggaaggttatcaatactctggctgaccatcatcatcgtgggactgactttggtggaagtccttggttacatgtcattattgcgtttccgacaagttataaagttgtcattaccctctggatagtttacctttgggtgtctctcctgaagactatcttctggtctcgaaatggacatgatggatccacggatgtacagcagagagcctggaggtccaaccgccgtagacaggaagggctgaggtccatttgtatgcacacaaagaaaagagtttcttcctttcgaggaaataaaattggcctgaaagacgtcattactctacggagacatgtggaaacaaaagttagagctaaaatccgtaagaggaaggtgacaacgaaaatcaaccatcatgacaaaatcaatggaaagaggaagaccgccagaaaacagaaaatgtttcaacgtgcgcaagagttgcggcggcgagcagaggactaccacaaatgcaaaatccccccttctgcaagaaaggctctttgcaactgggtcagaatggcggcagcggagcatcgtcattcttcaggattgccctactggccctacctcacagctgaaactttaaaaaaacaggatgggccaccagccacctcctccaactcaacaacattctataactgataactccctgagcctcaagacacctcccgagtgtctgctcactccccttccaccctcagcggatgataatctcaagacacctcctgagtgtctgctcactccccttccaccctcagcggatgataatctcaagacacctcccgagtgtctgctcactccccttccaccctcagcggatgataatctcaagacacctcccggagtgtctgctcactccccttccaccctcagcggatgataatctcaagacacctcccgagtgtctgctcactccccttccaccctcagctccaccctcagctccaccctcagcggatgataatctcaagacacgtgccgagtactctgctccatccccttccaccctcagcggatgataatctcaagataccttccgagcatcagctcactccccttccaccctcagctccaccctcagcagatgataatatcaagacacctgccccgcgtttgccgcgggccgcttccaccctcagcggatgataatctcaagacaccttccgagcgtcagctcagctaccccttccacccctcagctccaccctcagcagatgataatatcaagacacctgccgagcgtctgcgggggccgcttccaccctcagcggatgataatctcaagacaccttccgagcgtcagctcagctccccttccacccttcagctccaccctcagcagatgataatatcaagacacctgccgagcgtctgcgnggagcgtctgcgggggccgctttccaccctcagcggatgataatcttcaaggacaccttccgaggcgtcagctcaacttcccctttccaccctcagcttccaccctcaggcagatgataatatcaagacacctggccgaggcgtttgcggggagcgtctgcgggggccgcttccaccctcagcggatgataatctcaagacaccttccgagcgtcagctcactccccttccaccctcagctccaccctcagcagatgataatatcaagacacctgccttccaccctcagcggatgataatctcaagacaccttccgagcgtcagctcactccccttccaccctcagctccaccctcagcagatgataatatcaagatacctgctgagcgtctgcggattccgcttccaccatcagccgatgataatctcaagacaccttccgagcgtcagctcactccccttccaccctcagctccaccctcagcagatgataatatcaagacacctgccgagcgtctgcgggggccgcttccaccctcagcggatgataatctcaagacaccttccgagcgtcagctcgactccccttccaccctcagctccaccctcagcagatgataatatcaagacacctgccgagcgtcatgcgagggccgcttccaccctcagcagatgataatctcaagacaccttccgagcgtcagctcactccccttccaccctcagctccaccctcagcagatgataatatcaagacacctgccgagcgtctgcgggggccgcttccaccctcagcggatgataatcatcaagacaccttccgagcgtcagctcactccccttccaccctcagctccaccctcagcagatgataatatcaagacacctgccgagcgtctgcggggaagcttctgcgggggccgctttccacccttatcggatgataatcttaaaacaccttccgagcgtgagctcactccccttccaccctcagctccaccctcagcagatgataatatcaaggacacctggcgagccgtctgcggggggccgctttccaccctcagcggatgataatctcaagacaccttccgagcgtcagtaacctcccccttccaccctcagctccaccctcagcagatgataatatcaagacacctgccgagcgtctgcgggggccgcttccactccttagcggatgataatctcaagacaccttccgagcggcagctcactccccttccaccctcagctccaccctcagcaagatgataatatcaagacacctgccgagcnttctgcggtgggccgctttccaccctcagcccgattgataatctcaagacaccttcccttagcttactcaggaggctgaggccagaaaaaccacgcaaaccccaagagggcagaggggcggccttaagatggaaccccaccttccccgaaccccaagagggcggaggggtcggtgacgtgggaaccgttcaaggcaaacccccaagagggcggacgggccgttggaacgtgggaacccttcattcacccgaaccccaagagggcgggagggttcggtgatgtgggaaccgttcacggcaaacccaaggagggcggaggggggggggggggggcccccccggcttgaancggtggaacccatcatcacccgaaccccaagaggcggagggtcggtgaccgtggaacccttaacgcaaacccaagaaggcggagggccgctgacgtggaaccatcattacccgaacccaagaaggcggaggttgagcttgagaagaggccagttgcactcaagccttgagcaataagaataaaaccgagttagaacaaaataaaaaattcaaaaaacaaaacaaaacccacactcttaaaactaacaaagaataaataaataatataaaaataaaataaatactgcagtccttaaaaaaaaaaa

SEQ ID NO: 20536 - DNA, 3630 bp, Homo sapiens
  SIMILAR (2112)..(2465): 461254mologous to Homo sapiens oxidation protection protein,accession number AF309387,Smith-Waterman Score=306.
atttttcacattggccagtgtaaacttttaagtttacaggtgctttgttatcttttcttacagggttacgactcactgattaaaaagagggactttttcaaatactttgcacttttgattgtgtattatggataccaaggaagagaagaaggaacggaaacaaagttattttgctcgactgaaaaagaaaaaacaagccaaacaaaatgcagagacagcctcagctgtagctacaaggactcatactgggaaggaagataataatacagtagttttagagccagacaagtgcaacattgctgtgggaagaggaatatatgactgatgagaaaaaaaagagaaaaagtaatcagttaaaggagatcaggcgtacagaactaaagagatattatagtattgtagagttactgatggtcctgtgctgtcagcctcctgaacccccttcagatgctcttatgatagaaatagatggaggagagagctggtcgttcatggatgacaatcaaaacaaaacacatgataaaaaagagaagaagatggtggttcagaagccccatgggactatggaatacactgctggaaaccaggacaccctaaactccatagcactgaaatttaacatcactcccaataaattggtggaactgaataaacttttcacacatactattgttccaggccaggtcctttttgtgccagatgccaactctccttccagtaccttaaggctatcatcatccagtcctggtgctactgtctctccttcatcatcagatgcagaatatgataaattgcctgatgctgacttagcacgaaaggccttgaaacccattgaaagagtcttatcgtctacttctgaagaagatgagccaggtgtggtgaaatttttaaaaatgaattgtcgatacttcaccgatggaaagggtgtggttggcggtgttatgatagtgactcctaacaacatcatgtttgaccctcataaatctgatcctctggttattgaaaatgggtgtgaggagtatggtctcatctgccccatggaagaggttgtttccattgcgctctacaatgacatttctcacatgaagatcaaagatgccttgccatcgcctggagaatgggaagacctggcttcagaaaaggatatcaacccattcagtaagttcaaatctatcaacaaggaaaaacgacagcagaatggagagaaaattatgacttcggattccagaccaatagtacctttggagaagtccacaggacatacacctacaaagccctcaggcagctctgtgtcagagaaattaaagaaactggactcctctagggagacatcccatggttctcccacagtgactaagctcagcaaggaaccttccgacacttcttctgcatttgaatctacagccaaagaaaactttctaggggaagatgatgattttgttgacttggaagaactttcttctcaaactggtggtggaatgcacaaaaaagacaccttgaaggagtgcctttctcttgacccagaggaacgaaagaaagctgagtcacaaataaacaattctgccgtggaaatgcaggtgcagtcagccctagcctttttgggaacagagaatgatgttgaactgaagggggcgctagatttagaaacctgtgagaagcaagatataatgccagaagtggacaagcagtctggttcgccagaaagccgagtagaaaacacactgaacatacatgaagatttagataaagttaaactcattgaatattacctgactaagaacaaagaagggccacaggtatctgaaaatttgcagaaaacagaattaagtgatggaaaaagtattgaaccagggggaatagacattacccttagtagttctctttcccaggcgggtgatcccataactgagggcaataaagagccagataagacctgggtgaaaaagggagagcccctcccggtaaaactgaactcttctacagaagcaaatgtgattaaagaggctctagactcctctttggaatctactctggacaacagctgtcaaggtgcacaaatggataataaatctgaagttcagttgtggctgttaaagagaattcaggtacccattgaagatatacttccttcaaaagaagaaaaaagcaagaccccacccatgttcctgtgcatcaaagtgggaaaaccaatgagaaaatcctttgccactcacactgcagccatggtccagcagtacggcaaacggagaaagcagccagagtactggtttgctgttcctcgggagagggtggatcatttgtacacattctttgttcagtggtctcccgatgtctatggaaaagatgccaaagagcaaggctttgtggtggtggagaaggaagaactgaacatgattgacaacttcttcagtgagccaacaaccaagagctgggagatcatcactgttgaagaggcaaagcgcaggaagagcacatgcagctactatgaagacgaggacgaagaggtgctgcctgtcctacggccccacagcgcgctcctggagaatatgcacatcgagcagctggcccgacgccttccttgcaagggtgcaagggtatccatggagactggcctatagcacgttagagcacgggaccagcttaaagacgctctaccggaaatcggcatcactagacagtcctgtcctattggtcatcaaagatatggataatcagatttttggagcatatgcaactcatcctttcaagttcagtgaccactattatggcacaggcgaaacttttctctacacattcagccctcattttaaggtctttaagtggagtggagaaaattcatactttatcaatggagacataagttctttagaacttggtggtggagggggacgatttggtttatggctagatgctgatttataccacggacgaagcaactcttgcagcactttcaataatgatattctttccaaaaaggaagacttcatagttcaggatctggaggtgtgggcatttgattgaaattcagactgccttaaaatataacattaaaaagactgggttcgatcagccctcctaaagctggctggaaaaagaagccccagcccagcctgcctcatcccaccccaatgcttcctttctgccatcatctcagagcatgatcacattgcagaaagattctggaaggtccatgtagagggcagacattgaagaaaagaaacttaaaatccaggttgttgaaaagactttgtactcccacttcctccaaatccatacagtgaggaatcagagtgtttatagatatatgagttgaatgcaatttttatttttggtaactgtgaaaaataagatactgtggatatatacatgccttgtgtatttatcagcataattttcattaccaaaatgtacagctattatttgccatggaaaaggttagtctcatttagaaaaatcgaaagtgcacagcacttaaagggaatatatgaggttttttttttaaaaaaaaaaaacttttatttattatttgtagtatattgtctgaaatgtgtcggcagttttttttcttttaatgtgtcaaatcttgaaatattaaatgtatacattttgtgctaaaaaaaaaaaaaaaaa

SEQ ID NO: 20537 - DNA, 397 bp, Homo sapiens
  SIMILAR (266)..(307): 501254mologous to Mus musculus PES1 protein,accession number AF289539,Smith-Waterman Score=36.
aacgtgaagcgatgggaggccttgagaagaagaagtatgaacgaggctcggccaccaactacatcacccggaacaaagcccggaagaagctccagctgagcttggctgacccctcatgctctctggctgggccagtgggcagccctcgcttcccttggatggagctgccctgctggtgcctggtcagagaagaggcctctgtgcccagcctgattctctgctcccaggagccagtgacatgaggtgcagaggcccacccagccccctacctactgcccccattcatcctggctttccacagccccctcccacacagttggacccgtgattctcagggtgctgtgatggggtgagggtagggggagcatttgttattaaatgactggacttttgtgcc

SEQ ID NO: 20538 - DNA, 510 bp, Homo sapiens
  SIMILAR (1)..(198): 681254mologous to Homo sapiens pescadillo,accession number U78310,Smith-Waterman Score=216.
  misc_feature (1)...(510): n = a,t,c or g
gccctggaaaagccagagattgaggggaaaaaccacaggggttgtcacggcgcctttaagtttgaggattaacaacggctggcccaagaggaagaaaattaggcccagcgcctggcccttattattattaaaaagcgggagaagtacctgtaccagaagatcatgtttggcaagaggcgaaaaatccgagaagccagccctgacccctcatgctctctggntgggccagtgggcagccctcgcttcccttggatggagctgccctgctggtgcctggtcagagaagaggcctctgtgcccagcctgattctctgctcccaggagccagtgacatgaggtgcagaggcccacccagccccctacctactgcccccattcatcctggctttccacagccccctcccacacagttggacccgtgattctcagggtgctgtgatggggtgagggtagggggagcatttgttattaaatgactggacttttgtgccaattgcaaaaaaaaaaaaa

SEQ ID NO: 20539 - DNA, 434 bp, Homo sapiens
  SIMILAR (31)..(102): 1001254mologous to Homo sapiens pescadillo,accession number U78310,Smith-Waterman Score=118.
  misc_feature (1)...(434): n = a,t,c or g
gaggcgaaaaatcccgagaggccaacaagnctggcggagaagcggaaagcccacgatgaggcggtgaggtctgagaagaaggccaagaaggcaaggccggagtgagtgcctgcggcccctcacagggctgaggcctgacccctcatgctctctggctgggccagtgggcagccctcgcttcccttggatggagctgccctgctggtgcctggtcagagaagaggcctctgtgcccagcctgattctctgctcccaggagccagtgacatgaggtgcagaggcccacccagccccctacctactgcccccattcatcctggctttccacagccccctcccacacagttggacccgtgattctcagggtgctgtgatggggtgagggtagggggagcatttgttattaaatgactggacttttgtgccaattgcaa

SEQ ID NO: 20540 - DNA, 356 bp, Homo sapiens
  SIMILAR (44)..(94): 761254mologous to Homo sapiens pescadillo,accession number U78310,Smith-Waterman Score=63.
atggagttcatgcactacatcatcgctgctagtgccctgccacaaggtcttcctgtccatcaaaggcatttactaccagacatggactacagggtcatggccaccttcaccgagttctacagcaccctgctgggcttcatcaacttccacctctaccagtggctcaacctccactacccactgaagctcgagggtcaggcccaagaagaggcaaaggccagtgagggcacccatgcattggactctgagagctccatggagaaaatggctgccctcactgccagcctggcccgcgtggtggtgcctgccacagaggaggagcccgaggtggatgagtttcctgccaatggggagat

SEQ ID NO: 20541 - DNA, 2597 bp, Homo sapiens
  SIMILAR (1496)..(2116): 671254mologous to Homo sapiens pescadillo,accession number U78310,Smith-Waterman Score=624.
atgaagctgccaaccttcaagtatgaacgaggctcggccaccaactacatcacccggaacaaagcccggaagaagctccagctgagcttggctgactttaggcggctgtgcattctgaagggcatttatccccatgaacccaaacacaagaagaaggttaacaagggttctacagcagcccgaacgttttaccttatcaaagacatcaggtttctcctccacgaacccattgtcaacaagttccgtgaatacaaggtgttcgtccggaagctccggaaggcttatgggaagagcgagtggaacactgtagagcgtttaaaggacaataagcccaactacaaactcgaccacatcatcaaggaacgacatgtccaagggatgagaggcatggaagacataacctacgctggcgaccggtggccaggcccagtcataagtgctgctgaggggaagcagcccccaccccgctccctgctccaccagggcagcttcggtttcccattttccattttggacctccctgtagagtgtctgtgcactaaagtttccaccttcaaagagagtcatagagcccctgactccgtctaccgtcgtgcaccacaaaatccgcacgtgggtcaaggctgggtctttgagcctagtgggcgcatcctggttaagtggttcctcctaggggctgtggtcagctgtggggaagctgctcctgccaggtatcccacgttcatcgattgccctgcgggacctgggacgattgccctcttccatgtgcttcctgttttccaactttcccgcggacttggcaagtgccacgtgcagaccattcagctgtgccgccggctcactgtggagttcatgcactacattatcgctgcccgtgccctgcgcaaggtcttcctgtccatcaaaggcatttactaccaggccgaggtactggggcagcccatcgtgtggatcactccctatgccttctcccatgaccacccgacagacgtggactacagggtcatggccaccttcaccgagttctacaccacgctgctgggctttgtcaacttccgcctttaccagttgctcaacctccactatcccccgaagctcgagggtcaggcccaagcagaggcaaaggccggtgagggcacctacgcgttggactccgagagttgtatggagaaactggcagccctcagtgccagcctggcccgcgtggtggtgcctgccacagaggaggaggccgaggtggatgagtttcccaccgatggggagatgtcagcgcaggaggaagaccgcaggaaggagctggaggcgcaggagaagcacaagaagctttttgagggcctgaagttcttcctgaacccgagagttgcccccgtgagcccctggctttcatcatcaggagttttggtggggaagtgtcctgggacaaatcttttgtgcattggggccacctatgacgtcacagactcccgcatcacccatcagattgtcgatcggcctgggcagcagacctcagtcattggcaggtgctacgtgcagccccagtgggtggtttgactcagggaacgccaggctccttctccccgtggcagagtacttctctggggtgcagctgcccccacacctttcaccctttgtgaccgagaaggaaggagattacgttccacctgagaagctgaagctgctggctctgcagcggggagaggacccaggaaacctgaatgagtcagaagaggaggaggaagaggacgacaacaacgaaggtgatggtgatgaagagggagaaaatgaggaggaggaggaagatgcagaggctggttcagaaaaggaggaagaggcccggctggcagccctggaagagcagaggatggaggggaagaagcccagggtgatgggcaggcacctgaaagctggaggataagcagcggctggcccaggaggaggagagtgaggccaagccgcctggcccattatgatgatgaagaagcgggagaagtaccctgtaccagaagatcatgtttggcaagaggcgaaaaatcccgagatgccaacaagctggcggagaagcggaaagcccacgatgaaggcggtgaggtctgagaagaaaggccaagaaggcaagggccggagtgagtgcttgcggcccccttcaccaggcttgaggcccagccccttagcagctggatgtggcagaggcaggcccagaggaccctaaaatgtgaatggaaccaaaaatcacttcttccttccttccttttttccagcccagccctgaccccctcaatgctcctctggcatgggccaagtgggcagccctcgccttccccttggaatggagctgcccttgctggtgccctggtccagagaagaggcctctgttgcccagcctgattctcctgctccccaggagcccagtgacatgaggtgcagagggcccacccagccccctacctactgcccccattcatcctggctttccacagcccccctcccacacagttggacccgtgattctcagggtgctgtgatggggtgagggtagggggagcatttgttattaaatgacgtggacttttgtgccaattgaaaaaaaaaaaaaaaaa

SEQ ID NO: 20542 - DNA, 506 bp, Homo sapiens
  SIMILAR (181)..(207): 661254mologous to Homo sapiens T-cell surface antigen CD97 EGF-like repeat 4,accession number W48754,Smith-Waterman Score=39.
tttcagcattcatcatatcatttattcaggctcctgagagattccacttaagccgatgaaacagatttttatcatcagttgacctcttctctctccactccctttacaaatcccaacagaaatggagatcttcacccttttcaacaaaccgaagagccatcagaagtgccggcaatactaccctgtcaccattcctctccatgtctccaagaatggccagatagtgagcggtttggacgccaactggttagagcacatgagcgaccacttccggaaaggaggcatgctggtgaacgcagtcttctaccttggaatagtgaatgggtgtcgaagtgcagacagactacgtgcccctgctgaactcgctggcggcctatggctggcagctcacctgtgtgctaccaactcccgtcgtcaagactaccagcgaggggagtatatccaccaagcagattgtctttcttcagagaccgtgtctacctcagaaaatcaagaagaacgaatcg

SEQ ID NO: 20543 - DNA, 657 bp, Homo sapiens
  SIMILAR (465)..(533): 501254mologous to Oncorhynchus mykiss metallothionein,accession number M18104,Smith-Waterman Score=52.
  misc_feature (1)...(657): n = a,t,c or g
tgtcatacaggagccctgcctgtgaatggctgtgaagtggtggaatttcctcctggtgaccacttgctgctggctctcctgaatgggtgcagttttgaactgtgctgtatcacagggatgtctatgtggtggtgctttggaaagcagcccctgtgtgcagagatggcaggatctcagaaaactgatcttcacaatgaaggctacatcttggaattagattgctgttcctccttagaccacccgacagaccagaaactcatcccagagttcattaagaagatccaggaggctgcaagccagggcctgaaattcgttggtgttatacctcagtaccattcctctgtgaactcggcaggcagcagtgctccggtgtctactgccaacagcaccgaggatgccagagatgcaaaaaacgcacgtggggatcacgcgtcactggagaatgagaaaccggggactggggatgtgtntgtaccagcagggcttctcgctggcggccctgcaccccttcgtgcagcccacccatgagcgggagaagacgcccctggagcacatctttagagccatcctgatcaagaaaaccgacagatctcagaaaactgatcttcacaatgaaggctacatcttggaattagattgctgttcctccttagacca

SEQ ID NO: 20544 - DNA, 517 bp, Homo sapiens
  SIMILAR (516)..(334): 801254mologous to Homo sapiens The ha2022 gene product is novel,accession number D42043,Smith-Waterman Score=247.
gtccttcctaggcgcttctgagcctgcagagcctacgacccccaacaggctgctccgaagtgcctctccctacatcgctccaggaatgactcccctacacccgttccccgcaaaaaaaagttggcccaagatccaggcgtcccaaggatcagcccaggtccccatccgacgcgggccagggggtgctgctctggcagctccggagccccggcaaagagcaacctgcagggaggcgccacgcgcggttcccactacccgccagagacccggtccatggggccaaacggaggggcctgtgccggtcgacacccacaagccctgtcgcgccccccccgccgcctaccgtatgggaccggcggaggagaacggcgcggtcgcgggttccttgaggcagcgtgttcgttcccgggaggaaagtttgtgccatacaaaggaggcggcgcggggaggacttgggcgccggtgggtggaggcgtgggcggtggcgccgcgtggtcgtgtgtctgatcctccggcg

SEQ ID NO: 20545 - DNA, 2971 bp, Homo sapiens
  SIMILAR (73)..(222): 431254mologous to Mus musculus p140mDia,accession number U96963,Smith-Waterman Score=78.
tttcgtgccgcgggctccggcgagggacagacgcaccgatcgccgtagggacagacacacgaccacgcggcgccaccgcccacgcctccacccaccggcgcccaagtcctccccgcgccgcctcctctgtatggcacaaactttcctcccgggacggaacacgctgcctcagggagcccgcgaccgcgccgttctcctccgccggtcccatacgcagctgctgaaaatgggttgcggaattgaaacaagttaaaaaaaacgtgaatgaaaaaacggcctgggaaatatttattcaaactttgaagaggcctcaaggtggaaaaccaagataagatgtgtcctatggaataccgcttcctgggagttcacgactctgagtgctgcggagctccctgggtcctcaccagtgaggctggcctccctgcgtgacctgcccgcccagctactgggagctgttaccagcagggcttctcgctggcggccctgcaccccttcgtgcagcccacccatgagcgggagaagacgcccctggagcacatctttagagccatcctgatcaagaaaaccgacagatctcagaaaactgatcttcacaatgaaggctacatcttggaattagattgctgttcctccttagaccacccgacagaccagaaactcatcccagagttcattaagaagatccaggaggctgcaagccagggcctgaaattcgttggtgttatacctcagtaccattcctctgtgaactcggcaggcagcagtgctccggtgtctactgccaacagcaccgaggatgccagagatgcaaaaaacgcacgtggggatcacgcgtcactggagaatgagaaaccggggactggggatgtgtgcagtgctccggctgggagaaaccaaagccacagagcccagctcacggcccacgaggggaggtgcccctcgccaagcagcccagctcaccctccggagagggagatggtggagaactttcaccacagggggtgagcaagacactggatggaccggagagcaaccccttggagggtgcatgaagagccccctctcaggggaaaatggagatcttcacccttttcaacaaaccgaagagccatcagaagtgccggcaatactacccctgtcaccattcctctccatgtctccaagaatggccagacagtgagcggtttggacgccaactggttagagcacatgagcgaccacttccggaaaggaggcatgctggtgaacgcagtcttctaccttggaatagtgaatgattccttacatggcttgacagatgcagtattcatctttgaagctgtttccacagaagatagcaaaaccatacagggctatgatgctattgtggttgaacaatggacagtcctggaaggtgtcgaagtgcagacagactacgtgcccctgctgaactcgctggcggcctatggctggcagctcacctgtgtgctaccaactcccgtcgtcaagactaccagcgaggggagtatatccaccaagcagattgtctttcttcagagaccgtgtctacctcagaaaatcaagaagaaggaatcgatttttcagtgtgttattctccagagaagaaatgcacaacaggcagatgaggaaatcaaaaggtaaactcagtgccagagacaaacaacaagcagaagaaaatgagaagaacttagaagaccagtcttccaaagctggagacatgggaaactgtgtttcaggacagcagcaggagggtggagtctccgaggagatgaagggccctgtccaagaggacaagggagaacagctgtcccctggtggcctgctgtgtggggtgggtgtggagggtgaggctgtccaaaatggtcctgccagccacagcagggccctggaggggatttgcactgggcactccaatcctggagaggatgccagggacggcgatgctgaagatattaaaaagctttgtaccggagaataaaaactgaacctgtggaattttgtgctaaaactaggtgagttgccaaacccaaggcatcttaccaacagctggtttgggggctggtttccctggtgttgtgtgttacctaccctttggcttggcttgacctctccttgtgagctcacctgagccctcccagggccaggttcctgacagtgttggtttttgcacatccactggaaaggtgtcattaatgacccagtggtagaatgcaagaggtcaggttattctagccctcatggctgaaggcccagtcctggctccaccactcctccagccagagggtctggaccatccagtgcctgtcctcgccacagggcctccagggagcattcgggtcaattccatggacaccctgggctacaaaccaaggctgctgttcatcccacatcgtgtggggcagtgtccatcccctgcagctacttggtgacttaacaactccaggagccctgtcagctgccctcctccacctaaaccccttcgactcttctgctttgacaaagaaaatgacatttagggaggggaggtgctccgcctcccagcttttctcaaaatagtcctatagatactggtaatcaagggattatgaagtaattctgtctctgcacctacttttgcagaatgttcaaggaagtattctgtgttagtattaatgccaaaaagttgtttttaaaggttttgtactcagcacatcatacaaaccacattacttctgtcacttcagggcatcgggcactggctgggcgcccttgttatgtgctattttaatcagtgtaacattggtcaagttgttacccatgtatgctgtgtttatcatgtgtatatcgtctagaaagtattaaggctttaggtagatgcaactggcgaaccttggagagggaatgctgattgtcttgaccaaacccacagcctgtctcttctcttgtttagttacttacggcaataaatcatctatgagttagtgcaccgtga

SEQ ID NO: 20546 - DNA, 710 bp, Homo sapiens
  SIMILAR (282)..(473): 381254mologous to Homo sapiens Human HUPF-I mutant protein fragment 34,accession number Y21386,Smith-Waterman Score=94.
ggagaagaaaatggctttccagatagcactggagatcctcttccagggtggggaacccgtagagccctcaggggcagctatcatcagcccagagatcagcaaggacaactcctgcaaagaaaactgtacttgttcctcctgcttgctccgggcccccaccataagtgacttgctcaatgatcaggacttactagacgtgatcaggataaagctggatccgtgtcacccaacggtgaaaaactggaggaattttgcaagcaaatgggggatgtcctatgacgaattgtgcttcctggagcagaggccacagagccccaccttggagttcttgctccggaacagtcagaggacggtgggccagctgatggagctctgcaggctctaccacagggccgacgtggagaaggttctgcgcaggtgggtggacgaggagtggcccaagcgggagcgtggagacccctccaggcacttctagagctcttcttcttccttcattggcctctccggatgttgaaacaaccacaggtcaagaaggaatgtgaatctgttgttttataagagtttaggacaaggacgtggaacagtggacactggttttccccaaagctggcagttttgtggaggggtagcttgtttcggtggtggatctctgtttatttttgcacatctgttataatttaatattcaaatctggaattaagaaaacatat

SEQ ID NO: 20547 - DNA, 2540 bp, Homo sapiens
  SIMILAR (702)..(1328): 941254mologous to Homo sapiens 3-hydroxy-3-methylglutaryl coenzyme A synthase,accession number L25798,Smith-Waterman Score= 1014.
tttcgtcggagtcgggtgggttggcggctataaagctggtggcgaaggggaggcgccgcggactgtcctttcgtggctcactccctttcctctgctgccgctcggtcacgcttgtgcccgaaggaggaaacagtgacagacctggagactgcagttctctatccttcacacagctctttcaccatgcctggatcacttcctttgaatgcagaagcttgctggccaaaagatgtgggaattgttgcccttgagatctattttccttctcaatatgttgatcaagcagagttggaaaaatatgatggtgtagatgctggaaaagataccattggcttgggccaggccaagatgggcttctgcacaaatagagaagatattaactctctttgcatgactgtggttcagaatcttatggagagaaataacctttcctatgattgcattgggcggctggaagttggaacagagacaatcatcgacaaatcaaagtctgtgaagactaatttgatgcagctgtttgaagagtctgggaatacagatatagaaggaatcgacacaactaatgcatgctatggaggcacagctgctgtcttcaatgctgttaactggattgagtccagctcttgggatggacggtatgccctgggtagttgcaggagatattgctgtatatgccacaggaaatgctagacctacaggtgggagttggagcagtagctcttgctaaattggggccaaatagctccttttaattttttgaaacgaggggtttcgtggggacacatatgcaacatgcctatgatttttacaagcctgatatgctatctgaatatcctatagtagatgggaaactctccatacagtgctacctcagtgcattagaccgctgctattctgtctactgcaaaaagatccatgcccagtggcagaaagagggaaatgataaagattttaccttgaatgattttggcttcatgatctttcactcaccatattgtaaactggttcagaaatctctagctcggatgttgctgaatgacttccttaatgaccagaatagagataaaaatagtatctatagtggcctggaagcctttggggatgttaaattagaagacacctactttgatagagatgtggagaaggcatttatgaaggctagctctgaactcttcagtcagaaaacaaaggcatctttacttgtatcaaatcaaaatggaaatatgtacacatcttcagtatatggttcccttgcatctgttctagcacagtactcacctcagcaattagcagggaagagaattggagtgttttcttatggttctgggtttggctgccactctgtactctcttaaagtcacacaagatgctacaccggggtctgctcttgataaaaataacagcaagtttatgtgatcttaaatcaaggcttgattcaagaactggtgtggcaccagatgtcttcgctgaaaacatgaagctcagagaggacacccatcatttggtcaactatattccccagggttcaatagattcactctttgaaggaacgtggtacttagttagggtggatgaaaagcacagaagaactttacgctcggcgtcccactccaaatgatgacactttggatgaaggagtaggacttgtgcattcaaacatagcaactgagcatattccaagccctgccaagaaagtaccaagactccctgccacagcagcagaacctgaagcagctgtcattagtaatggggaacattaagatactctgtgaggtgcaagacttcagggtggggtgggcatggggtgggggtatgggaacagttggaggaatgggatatctggggataattttaaaggattacatgttatgtaaatttttatgtgactgacatgggagcctggatgactatcgtgtacttgggaaagtctctttgctctatttgctgacatgccttcctgttgtggtctggccaatgcccaaatgtacctcgaatgatgttaagggctctgtaaaacttcatacctctttggccatttgtatgcatgatgtttggtttttaaacatggtataatggaattgtgtacttctgtcagaaggaaagcagaggtactaatctccaattaaaaaattttttaacatgtaagaattttgtactttggaacaacaaggttacaggaaagtacctgtgggtttttgggaaaacatttctaggcttgggggaatgtgacaacattccccagtgtgggtaaaattggggtaaaatgtggtaaaatgtgatacgcacaaaccctttgaaaatagcataacaaacatgccctttttctaaaattgataaatcctaaagaggaagaaaagagctgggacaataaaacactggctctggaatctggaatgttaagtccaggccagcagtgacaaaagttattgtaatgacctctgaacagagaaacactgccattgaagaggcttctggtatagaaaacatggtacattcaggagctgtgaatatagctctaggtgtgctccctgaatcagttc

SEQ ID NO: 20548 - DNA, 467 bp, Homo sapiens
  SIMILAR (139)..(2): 1001254mologous to Homo sapiens cICK0721Q.5 (polypeptide from patented cDNA EMBL:E06811),accession number AL021366,Smith- Waterman Score=228.
  misc_feature (1)...(467): n = a,t,c or g
cagagaccgagcccggaacgtagccagagccggaatccgaggccggcgagggctgggtcggagggcttccagaggccatggtcagcaagactcggggtagcaacaaaaggcgggaggccacaggcagcagcgccggcatccaaacaaaagacaggagcagagaggcctgagagcaggaggcgaattcgatctctcctcacaaacagcccaggaaattacacccggggaagccttcgcttagatcctcaggctctgccctccctctgatgcacccccgaagaatgccccactccgccgagcaggaccgcgggagcccgccccccactcatgcggcctacgctggtacaggagagttgatctcaaaggccacacgtcacacggagaaacaaccccaggaagagcggcctcttcttacctgggtggcaggaattccacagcgctttcaaatgtctcagtttnntaaacca

SEQ ID NO: 20549 - DNA, 361 bp, Homo sapiens
  SIMILAR (78)..(119): 1001254mologous to Homo sapiens cICK0721Q.5 (polypeptide from patented cDNA EMBL:E06811),accession number AL021366,Smith- Waterman Score=64.
  misc_feature (1)...(361): n = a,t,c or g
atttcctgggctgtttgtnaggagagatcgaattcgcctcctgctctcaggcctctctgctcctgtcttttgtttggatgccggcgctgctgcctgtggcctcccgccttttgttgctcggtctctgcagcctttgttacttgccccaacgagaaggtcgccaaggagatcgccagggccgtggtggagaagcgcctagcagcctgcgtcaacctcatccctcagattacatccatctatgagtggaaagggaagatcgaggaagacagtgaggtgctgatgatgatttaaaaccccaagtttccttggtcccaagttttganaagatttttgttccgttntgtgcacccttacgaanggg

SEQ ID NO: 20550 - DNA, 455 bp, Homo sapiens
  SIMILAR (229)..(351): 971254mologous to Homo sapiens cICK0721Q.5 (polypeptide from patented cDNA EMBL:E06811),accession number AL021366,Smith-Waterman Score=206.
gggaagccctccgacccatgccctcgccggcctcggattccggctctggctacgttccgggctcggtctctgcagcctttgttacttgccccaacgagaaggtcgccaaggagatcgccagggccgtggtggagaagcgcctagcagcctgcgtcaacctcatccctcagattacatccatctatgagtggaaagggaagatcgaggaagacagtgaggtgctgatgttctgtgcacccttacgaagtggccgaggtaattgcattgcctgtggaacatgggaactttccgtacctgcagtgggtgcgccaggtcacagagtcagtttctgactctatcacagtcctgccatgatgagccctgttcctgctcatcatgaagatccccgcgatacttcaacgccttctgacttccaggtgatgactgggcccccaataaatcccgtctttgggtca

SEQ ID NO: 20551 - DNA, 432 bp, Homo sapiens
  SIMILAR (169)..(357): 1001254mologous to Homo sapiens cICK0721Q.5 (polypeptide from patented cDNA EMBL:E06811),accession number AL021366,Smith- Waterman Score=314.
tttcgtcacccaggtaagaagaggccgctcttcctggggttgtttctccgtgtgacatgtggcctttgagatcaactctcctgtaccagcgtatgccgcatgagtggggggcgggctcccgcggtcctgctcggcggagtggcctctctgctcctgtcttttgtttggatgccggcgctgctgcctgtggcctcccgccttttgttgctaccccgagtcttgctgaccatggcctctggaagccctccgacccagccctcgccggcctcggattccggctctggctacgttccgggctcggtctctgcagcctttgttacttgccccaacgagaaggtcgccaaggagatcgccaggtagggacctcgatgtgcagcgagaaaggatgatcatgaagggacagctgggggtggggcagaagagtgctgcttt

SEQ ID NO: 20552 - DNA, 885 bp, Homo sapiens
  SIMILAR (517)..(543): 1001254mologous to Homo sapiens brain acetylcholinesterase putative membrane anchor,accession number AF230924,Smith-Waterman Score=47.
  misc_feature (1)...(885): n = a,t,c or g
gcgctgttttctaatcacgtggctgccacccaggtaagaagaggccgctcttcctggggttgtttctccgtgtgacgtgtggcctttgagatcaactctcctgtaccagcgtaggccgcatgagtggggggcgggctcccgcggtcctgctcggcggagtggtgagtgaccggccccgccccgccccttccggtcctcgaagcctcgaccgctacccgcaccctaaatcccagaggttggccccctgaggtgtgagtgaaatgagcttttgctttattttccaagtttctctctcaccttcaggggcattcttcgggggtgcatccagagggagggcagagctgtaggatctaagcgaaggctttccccgggtgtaatttcctgggctgtttgtgaggagagatcgaattcgcctcctgctctcaggcctctctgctcctgtcttttgtttggatgccggcgctgctgcctgtggccttcccgccttttgttgctaaccccgagttttgctgaccaatggcctctggaagccctccgacccaagccctcgccggccttcggattccggcttctnggctaacgtttccggggctcgggtctctgcagcctttgttaacttggccccaacgagaaggttcgccaaggagatcgccagggccgtggtggagaagcgcctagcagcctgcgtcaacctcatccctcagattacatccatctatgagtggaaagggaagatcgaggaagacagtgaggtgctgatgatgattaaaacccaaagttccttggtcccagctttgacagattttgttcgttctgtgcacccttacgaagtggccgaggtaattggcattgcctgtggaacagggaactttccgtaccttggca

SEQ ID NO: 20553 - DNA, 1339 bp, Homo sapiens
  SIMILAR (301)..(798): 381254mologous to Homo sapiens cICK0721Q.5 (polypeptide from patented cDNA EMBL:E06811),accession number AL021366,Smith-Waterman Score=103.
acatggtgcgcgctgttttctaatcacgtggctgccacccaggtaagaagaggccgctcttcctggggttgtttctccgtgtgacgtgtggcctttgagatcaactctcctgtaccagcgtaggccgcatgagtggggggcgggctcccgcggtcctgctcggcggagtggtgagtgaccggccccgccccgccccttccggtcctcgaagcctcgaccgctacccgcaccctaaatcccagaggttgggccccctgaggtgcctctctgctcctgtcttttgtttggatgccggcgctgctgcctgtggggcttcccgcctttttgtttgctaaccccgagtctttgttgaccatgggcctctgggaagcccatccgacccaagccctcgcccggcctcggattccggctctggctaacgttccgggcttcggtctcttgcagcctttgttaatttgcccccaacgagaaaggttcgccaagggagatcgccaggggccgtgggtgggagaaggcgccttagcaagccttgcgtcaaaccttcatcccctcagaattacatcccatctatggagtgggaaaggggaagattcgagggaagacagttgaggttgctggatggatggatttaaaacccaaaagtttccttgggttcccagcttttggacagattttgtttcgttctgtgcacccttacgaagtgggccgaggtaattggcattgcctgtggaacagggggaactttccgtacctgcagtgggtgcgcccaggtcacgagagtcagtttctgactctatacacagtcctgccatgatgagccctgttcctgctcatcatgaagatccccgcgaatacttcaaaggctttcttgactttccaggtgatgacttgggcccccaataaatcccgtctttgggtctctctgccttttgcctgttttttgtcatgtatgcaaatttggtgggagaatataagcgcttctagtccctgtattctctacatctttcagaatgactcacagctgctagagttggttatttctctttatttcaatcatacagaggccggcatcccttatcatcctccctgctcaggctctgcccccagggggtaaataattttagaaaatatttactgagctgtctcaatatatcataaagggacatgggagggatgggaggggacttctctttatatcgagcgtacagaggagggcgtctcttacaatcccccctcctgaatctctgcccgcgggggtgggataactaccccatatattttcagggccgtgccaccttaacatcacgggaaagggccaggtatggaggggccccgtcct

SEQ ID NO: 20554 - DNA, 1524 bp, Homo sapiens
  SIMILAR (1105)..(1287): 911254mologous to Homo sapiens Colon cancer associated antigen precursor sequence,accession number Y07103,Smith-Waterman Score=287.
atggtgcccaagaaaatgggatttgcaacagttcttgctgaagcagttacgtccctggatctgcctgtggccattattaatctaaaagaatatgatccagatgatcatctgatagaagaggtgactagtaaaaatgtctgtgtcttcctggttgcgacatacactgacggcctaccaaccgaaagtgcagagtggttctgcaaatggttagaggaagcatccattgattttcgatttggcaaaacttacctgaagggtatgagagatgcggtatttggcctgggaaattctgcctatgctagccacttcaacaaggttggcaaaaatgttgacaagtggctctggatgcttggcgtgcatcgtgtgatgagtcgaggggagggcgactgcgacgtggttaaaagcaagcacggcagcattgaggccaacttcagagcatggaagaccaagttcatctcccagctgcaggcacttcagaaaggggagagaaagaagtcctgtggcggccactgcaagaaaggcaaatgtgaatctcaccaacatggctcagaggagagggaggaaggatctcaagagcaggacgaattgcatcacagagacaccaagagccgacaggagactaggatctcggacctggagagcccaaaggttcgcactggtactgcgagacgcaccgagctacctcgcggcgttagcgccgtaccgagtggctgcagaactgtgggcagctacgacgctgccaggcccgtcctgattggttcagaggacgaagaggtgggcccagaggaaagcccggagctccgggaaaggaagccagtgcccgccgcgatgtcgatcttcacccccaccaaccagatccgcctaaccaatgtggccgtggtacggatgaagcgcgccaggaagcgcttcgaaatcgcctgctacagaaacaaggtcgtcggctggcggagcggcttggactggcattccgtggcagcagctgtctgcaccccacccttgtgtttcttacgtcctcccatgacatttttctccagtcaggttgccaagaaggaagatctcatcagtgcgtttggaacagatgaccaaactgaaatctgtaagcaggcggacaaatgtgtgactcctgaaacaaagagaccatacaccgtgatccttattgagagagccatgaaggacatccactatttggtgaaaaccaacaggagtacaaaacagcaggctttggaagtgataaagcagttaaaagagaaaatgaagatagaacgtgctcacatgaggcttcagttcatccttccagtgaatgaaggcaagaagctgaaagaaaagctcaagccactgatcaaggtcatagaaagtaaagattatggccaacagttagaaatccaagcggcaggacctacaccaaatccccggcattttggcaacagcactggtcatgctagggaaaaagttcaagatttcaacttccaagacccagggaagcctctcacaatttctaaagggcagggcagaagagatctttga

SEQ ID NO: 20555 - DNA, 536 bp, Homo sapiens
  SIMILAR (223)..(279): 891254mologous to Homo sapiens Colon cancer associated antigen precursor sequence,accession number Y07103,Smith-Waterman Score=81.
ctgccagacacgctgtggcggctgcctgaagctagtgagtcgcggcgccgcgcacttgtggttgggtcagtgccgcgcgccgctcggtcgttaccgcgaggcgctggtggccttcatgctggacggcgcgggtcagccctggtttgccggcttctgggtctttgaacagccgcgatgtcgatcttcacccccaccaaccagatccgtctaaccaatgtggcccgtggtacggatgaagcgcgccaggaagcgcttcgaaatcgcctgctacagaaacaaggtcgtcggctggcggagcggcttgtctggttgccaagaaggaagatctcatcagtgcgtttggaacagatgaccaaactgaaatctgtaagcagattttgactaaaggagaagttcaagtatcagataaagacacacacaactggagcagatgtttaaggacattgcaattattgtggcagacaaatgtgtgactcctgaaacaaagagaccatacaccgtgatccttattgagagagccatgaaggacatccact

SEQ ID NO: 20556 - DNA, 792 bp, Homo sapiens
  SIMILAR (289)..(651): 721254mologous to Homo sapiens CGI-97 protein,accession number AF151855,Smith-Waterman Score=387.
actctcattacgccaagcttggcacgagggcgccgcgcacttgtggttgggtcagtgccgcgcgccgctcggtctttactcgcgaggcgctggtggccttcaggctggacggcgcgggtcaaccctggtttgccggcttctgggtctttgaacagccgcgatgtcgatcttcacccccaccaaccagatccgcctaaccaatgtggccgtggtacggatgaagcgcgccaggaagcgcttcgaaatcgcctgctacagaaacaaggtcgtcggctggcggagcggcttattttgactaaaggagaagttcaagtatcacataaagacacacacaactggagcagatgtttagggacattgcaattattgtggcagacaaatgtgtgactcctgaaacaaagagaccatacaccctggatccttattgagagagccatgaaggacatccactatttggtgaaaaccaacaggagtacaaaacagcaggctttggaagtgataaagcagttaaaagagaaaatgaagatagaacgtgctcacatgaggcttcagttcatccttccagtgaatgaaggcaagaagctgaaagaaaagctcaagccactgatcaaggtcatagaaagtaaagattatggccaacagttagaaatccaagcggcaggacctacaccaaatccccggcattttggcaacagcactggtcatgctagggaaaaagttcaagatttcaacttccaagacccagggaagcctctcacaatttctaaagggcagggcagaagagatctttga

SEQ ID NO: 20557 - DNA, 1740 bp, Homo sapiens
  SIMILAR (1537)..(1142): 591254mologous to Homo sapiens CGI-97 protein,accession number AF151855,Smith-Waterman Score=324.
  misc_feature (1)...(1740): n = a,t,c or g
cccctcgagggatactctagagcggccgccctttttttttttttttgtctagaaacacaagccatagtttaataaacataagagtggttttattgattacatacaattttagctatattaatatatattataaactttaagaattagaaataagtgacttttattttttaaccaagaataatctaagttatggcagcatgttcaacgaaaattatttaagtccgacacaatttttctatatctgtttcctcagattaatcaggaacatcatcccaagctttacattacgatacccataatgaccctcaggaacacaagttcccantaagtaggaaatgaaggcatcatatgtttttcttttttaggggaagacccccccttttgttgtatagacataccccctaataatctttactctacttgtaccaaataactttttcaccccacaagagctgcctcaagtaactttcattttggaaagctatcaaggcatggagaccagagtaggcaaaatgccactctggactttggcatcttggagtttcaattttggctttagggatttaggaccccagtttataattaaaaaccaaatgcatttcccacatttattataacttatgttaggaaaggccttggcggtgtccactgttaacacaaagatagaaaatgtcaaatagtttaagcaagtatttggcagaccacagacatgaaacagtgccgtcggaaacggaaacactttagtgttttagaggtgaagagattgatgggtgtcattcaaatttctcatctccttcttctacatctttcagattgagtacttccaaagaacctttgcctttagtttccttttttattagctcatcaatttctcggaagcagcccgggtcaatcagacatacgatttctaactgttggccataatcttcactttctatgaccttgatcagtggcttgagcttttctttcagcttcttgccttcattgactggaaggatgaaccgaagcctcatgtgagcacgttctatcttcattttctcttttaactgctttatcacttccaaagcctgctgttttgtactcttgttggttttcaccgaatagtggatgtccttcatggctctctcaataaggatcacggtgtatggtctcttttgtttcaggaagtcacacattttgtctgccacaaataatttgcattgtccctaaacatctgctccagttgtgtgtgtctttctttatctgatacttgaacttctcaattagtcaaaatctggtacacagatctcagtggggtcatctgttccaaaacgcactgatgagatcttcctttttggcaacctgacctttaagaaacatttacaaacactgagtgggtcttgcagaacttcatcggaggtctttttccacggccgctccgccagccgacgaccttgtttttgtagcaggcgatttcgaagcgcttcccggcacgcttcattcgtaccacggccacattggttaggcggatctggttggtgggggtgaagatcgacatcgcggctgttcaaagacccagaagccggcgaaccagggctgacccgcgccgtccagcctgaaggccaccagcgcctcgcggtaacgaccgatcggcgcgcggctctgaaacaaccaacagtgcgcggcgccgcgactcactagcttcaggcagccgtcacagtgtgtctggcaggcttacttactgcgcaggcgtcaggtgga

SEQ ID NO: 20558 - DNA, 1752 bp, Homo sapiens
  SIMILAR (865)..(1299): 771254mologous to Homo sapiens brain my048 protein,accession number AF063606,Smith-Waterman Score=583.
tttcgtggctggcagtaggagtagggaggggcggagaaaggatccgggagactggtgaggagggggaagcggagcgggcggaggcaagggcgggggagcctggcccgccttctcgacgaccccctgcactgagccgtccatccattttagtactggaaatggagtacgggggggcaaccccgcagtgcaacagtgaaacgtagacatattctggaaataaccgcctctcacaatctgctcccatggaaacatctgacctccgcaaaaacggggtggcgctgggacaggttgcctccaggggaaggggacacagagacaaacgcagtttggaaagcatcctggtttggtgcccgaggcctggaaagaaatggcggctggggtgcgggggaggtaggggaggaaaacggtctgcgcgtctgttgttcccagcgctctgagaggcctgaaaaggaagagcaacctgtccagaatccccgcaggtccgtgaaagcagggggctgcatggacaggggcccacaagggttgagagtgtggagggcacagtcagggccgaattggggcccctgcccatccccttacctacatgaacacacaccttaccaggctgaaccagtgcagagaaggtggcagggcctgccagggaacagctggctcacgtgtgtgggaggagtggtgggctacgtggtgggcagaaggccctcttggaggcccagtcagcttaggggaaccctcaccaggggtgagatgcaagtagtatccagacctgcattccaccccatgccctcagtctcccatgtctcctctttgtctcctcttccctccacacccatcccccaggaaaggaaaaggaggggaaatctcgacatggaaaaactcttcaatgaaaatgaaggaatgccttcgaatcaaggaaagatagacaatgaagaacagccaccgcacgagggaaagccagaagtagcttgtattctggaagacaagaagttagaaaacgagggaaacacagaaaacacgggcaagagagttgaggaaccgttaaaggataaagaaaagccagagagtgcgggaaaggcaaaaggagaaggaaagtcagagaggaagggaaagtcagagatgcagggaggatcaaagacagagggaaagccagagagagggggaagggcagagggtgaaggagagccagacatgggtaagagagccagagagtgagggagagccagaaagtgaaacaagggctgcaggaaagcgcccagctgaggatgatatacccaggaaagccaaaagaaaaaccaacaaggggctggctcagtacctcaagcaatataaggaagccatacatgatatgaatttcagcaatgaggacatgataagagaatttgacaacatggctagggtggaggataaaaggagaaaaagcaaaccagaaattgggggcgtttttgtggatgcaaagaaatttacaggaccccttctatcctaggggtccaagggaattcaaggggtggcttcaggggccccacgaaggggacactggaagacattccttatgtgtagtgtccctggcaggcatttgtcaggccatatgttttaaccttatggtaatactttgctttagtcgttcctcctgctaccagtagcgttttgacccacctgccagtgtttgcttgctctatgtttcagtagcagattttcacacatgtgcattgcagagacgtcatgattcgtggaaaaataaagcagcttataatatca

SEQ ID NO: 20559 - DNA, 442 bp, Homo sapiens
  SIMILAR (32)..(232): 981254mologous to Mus musculus SHYC,accession number AF072697,Smith-Waterman Score=336.
tttcgttcgcatcattcattttgtggcttttcaggtcatgggatttggtctgtacctgatggatgggagtgtcagtaacatctataagttggatgccaagaaaagaataaacttatccaaaatcgacaagtacttcaagcaactccaggtggttccgctatttggggacatgcaaatagaactggcaagatatatcaagaccagcgcccactacgaggaaaataaatctcggtgatcgccatgatcaaaggcctgcaggtgctgatgggcaggatggagagcgtgttcaaccacgccatccggcacaccgtctatgccgcactgcaggacttctcccaggtgacccttatggagccgctgcggcaggccatcaagaagaagaagaacgtcatccagagtgtcctgcaggccatcaggaagaccgtgtgtgactgggagacgg

SEQ ID NO: 20560 - DNA, 414 bp, Homo sapiens
  SIMILAR (1)..(315): 651254mologous to Homo sapiens Similar to selective hybridizing clone,accession number BC001306,Smith-Waterman Score= 269.
  misc_feature (1)...(414): n = a,t,c or g
aaggtaaggccaggaagtttgcttcttaataaacggttaccgatccagaatgcaagaatcaggaagccacggtttccccccctccccgttaacccgttnnagagacgctgctgaagcagaggcatgtgcagctcctcggcagatcaaatagacctcaatcgtctgatcaccccaggcgtctcagcagccatgtataagtccctagaactggcgattggacgatttgaaagtgaagatttgacctccatagttgagctggatggcctgttggaaatcaaccgcatgacccacaagctgctgagccggtacctgacttcctgcccaactactgctacaacggctctaccaaccggtttgttcggacagtgttaccattttctcaggaatttcaaagagataagcagccgtcgacgc

SEQ ID NO: 20561 - DNA, 883 bp, Homo sapiens
  SIMILAR (1)..(207): 1001254mologous to Mus musculus SHYC,accession number AF072697,Smith-Waterman Score=357.
atggcggcccaggtgactctggaggacgcgctgtccaacgtggacctcctggaggagctgcccctgcccgaccagcagccctgcatcgagcccccgccatcctcgctgctctaccagccaaatttcaacactaactttgaagacagaaatgcatttgttactggcatcgcaagatacattgaacaagccaccgtccactctagcatggtcatgggatttggtctgtacctgatggatgggagtgtcagtaacatctataagttggatgccaagaaaagaataaacttatccaaaatcgacaagtacttcaagacagatgcacattattccatactgtcacttcttctgtgtctgtcagactctccttcaaacagcagttatgtggagacaccaagaaataaagaagtggaaaagaaagatgatttcgactggggaaaatacttgatggaagatgaagaaatggacattggtccgtacatggacacaccactgtggttccgagagttcttcctggagctgaccatgggcaggaggatccagttccccattgagatgtcgatgccctggatcctgacggaccacatcctggagaccaaggaggcatcgatgatggaaaacaaaaatgttccagttaatcacagagacttctggtatgcaacttacacgttatatagcgtatcagaaaagacagaaaatgaagaaaaaatgagtgataacgctagtgcgagttccggcagtgaccaggggccctccagcaggcagcacaccatggtgtccttcctcaaacctgtcctgaagcagatcataatggctggcaagtcgatgcagctgctgaagaacctgcagtgtgcggagagcaccacctgccaggcaggagccagag

SEQ ID NO: 20562 - DNA, 4642 bp, Homo sapiens
  SIMILAR (262)..(1737): 901254mologous to Homo sapiens p53 inducible protein,accession number AF160973,Smith-Waterman Score=2337.
  misc_feature (1)...(4642): n = a,t,c or g
tttcgtcttcgcttgacgatttcgtaggggaggaggccgagtgtttcctggcgcattcccggccagcccgagtgactcactcggccaaggaaactcccagggcccgcccaggacccccaagccgccgcggacgcagaatgtggctcagctgcccctggtcccatcccagggcagagctcctcctgagtacccttgagactggagcagattcagcagaaggcagattgccccctctccctggagctggctctgaagcccaggatggcggcccaggtgactctggaggacgcgctgtccaacgtggacctcctggaggagctgcccctgcccgaccagcagccctgcatcgagcccccgccatcctcgctgctctaccagccaaatttcaacactaactttgaagacagaaatgcatttgttactggcatcgcaagatacattgaacaagccaccgtccactctagcatgaacgagatgctggaggagggccaagaatatgctgtcatgctgtacacctggaggagctgctcccgggccatcccacaggtgaaatgtaacgagcagcctaacagagtggaaatctacgagaaaaccgtggaggttctggagcctgaggtcacaaaactgatgaatttcatgtacttacagagaaatgccattgagcgtttctgcggggaagtgaggcgcctgtgccatgccgagaggaggaaggacttcgtgtcagaagcctacctgatcacactgggcaaattcatcaacatgttcgctgtgctggacgagctgaagaacatgaagtgcagtgtgaagaacgaccactcagcgtacaagagggccgctcagtttttacgtaaaatggcagatccacagtccatccaggaatcgcagaatctgtccatgttcctggccaatcataacaagatcacacagtctctgcagcagcagctcgaagtgatttctggctacgaagagctcctggcagatattgtgaatctgtgtgtggattactacgagaacaggatgtatttgacgcccagtgagaaacacatgcttctcaaagtcatgggatttggtctgtacctgatggatgggagtgtcagtaacatctataagttggatgccaagaaaagaataaacttatccaaaatcgacaagtacttcaagcaactccaggtggttccgctatttggggacatgcaaatagaactggcaagatatatcaagaccagcgcccactacgaggaaaataaatctcgatggacgtgcacatcctccggcagcagccctcagtacaacatctgcgagcagatgatccagatccgcgaggaccacatgcgcttcatttcggagctggcgcgctacagcaacagcgaggtggtcacgggctcgggccgccaggaggcccagaagacggacgcggagtaccgcaagctcttcgacctggcgctgcagggcctgcagctgttgtcgcagtggagcgcgcacgtgatggaagtgtattcctggaagcttgtgcaccccaccgacaagtactccaacaaggactgccccgacagcgctgaagagtacgagcgtgccacgcgctacaactacaccagcgaggagaagtttgccctagtggaggtgatcgccatgatcaaaggcctgcaggtgctgatgggcaggatggagagcgtgttcaaccacgccatccggcacaccgtctatgccgcactgcaggacttctcccaggtgaccctatagggagccgctgcggcaggccatcaagaagaagaagaacgtcatccagagtgtcttgcaggccatcaggaagaccgtgtgtgactgggagacggggcatgagcccttcaatgacccagccttgcggggcgagaaggaccccaagagcggctaagacataaaagtaccacgccgcgccgtgggaccctccagcactcagctttacatggtgagaaccatgctagagtccctcattgcagacaaaagtggttccaagaaaaccttgagaagtagccttgaggggcccaccatattggacatagaaaaatttcatcgagagtcattcttctacactcacttgataaatttcagtgaaacgctgcagcagtgctgtgacctttcgcagctgtggttccgagagttcttcctggagctgaccatgggcaggaggatccagttccccattgagatgtcgatgccctggatcctgacggaccacatcctggagaccaaggaggcatcgatgatggagtacgtgctctactccctggacccgcacatcgatagccgcctcactacagcgctcaccaggttcaacaagcagttcctgtacgacgaaattgaggcccgaggtgaatctatgttttgaccaatttgtttacaatgctagcagaccagatatttgcctattataaggttatggcaggaaagtttgcttcttgataaacggttacgatcagaatgcaagaatcagggagccacgatccacctcccgccagtctaaccgctacgagacgctgctgatagcagaggcatgtgcagctcctcggcagattcaatagacctcaatcgtctgatcacccagcgcgtctcagcagccatgtataagtccctagaactggcgattggacgatttgaaagtgaagatttgacctccataagttgagctggatggcctgttggaaatcaaccgcatgacccacaagctgctgagccggtacctgacgctggacggcttcgacgccatgttccgggaggccaaccacaacgtgtcagcgccctacggggaggatcacccctgacgtcttctgggagctcaactatgacttcctgcccaactactgctacaacggctctaccaaccggtttgttcggacagtgttaccattttctcaggaatttcaaagagataagcagcctaatgcacagcctcagtatctgcatggatccaaggctttgaacttggcctactccagcatttacggcagctaccggaacttcgtgggacactacacactttcaagtcatctgccggcttctcggctaaccagggtatcgccgtggtcatggaggagctgctgaaggtcgtcaagagcctgctgcaaggcacaatcctgcagtacgtgaagacgctgatggaggtgatgcccaagatctgccgcctgccccggcacgagtacggctcttctggtatcctgggagtttttccaccaccagctgaaggacatcgtggagtacggcagagctgaagacggtgtgcttccagaacctgcgggaggtggggaacgccatcctcttctgcctgctcatcgagcagagcctgtctttagaagaagtgtgtgacctgctgcacgcggctcctttccagaacatcttgccgcgagtccatgtgaaagagggggagagacttgatgccaaaatgaaaagactagaatcaaagtacgccccgctgcatcttgtcccactgattgaaagactggggacccctcagcaaattgccatcgcaagagagggggacctgctgacaaaggagcgcctctgctgcggcctgtccatgtttgaggtcatcctgacacggatccggagctttctggatgaccccatctggcgcgggcctctgcccagcaatggggtcatgcatgtggacgagtgtgtggagtttcacagactgtggagtgccatgcagtttgtctactgcattcccgtggggacacacgaagttcacagtcgaacaagtgctttggtgatgggctacactgggctggctgtattgatcatcgtacttcttgggcagcaccggcgttttcctgtgctgggaatttctgctaccatctaattnaaaagttccagaaacatgatgggcaaagatgagattattaaaaatgtgcctttgaagaagatggtggagagaattcggcaagttcaggatcctcattgattagatcatcaccatcctgggattaagtacctgaaagtcaggcgacgggggagggcacgccagtggaagccatgtgcgctggctttccagccgcccattccaccagtcccttcgccagccagctgaggggcacgcgctgcactcccttaactcaacatgggcatgcctttctctccgtaaactatttagttgagatttttagggactatttttcaagtatctctgtacctgttaaaggggggtgcttttcgatctaaaaactttaattttaataaaattgacttatttttctagactaaaattggtatatgcttttgggtaattaggaactcttggagaatattggctgctgattgttgccatcaacgttcctacaaaattgtttttctatgggatgttctggcagctgtgtcataaaatgctgctgggttcattcattcattcccataagaaacttaataccagcaaatgcattaaatcccttgccagttaccattaactgtaactatttagcttttgtttagggatctttctgatggtcttttatgagcaatcttagttctaagtcattgttcccatccctttttttttgtgtttcagaaaatagtgaacttgattcccctgcttccactaaatccagttgtgacaaaatctaacgtgacatcgagatcgaaaggttatagaaataaaactaatgagatctaaaaa

SEQ ID NO: 20563 - DNA, 395 bp, Homo sapiens
  SIMILAR (1)..(249): 1001254mologous to Homo sapiens Human SH3D1A protein,accession number Y32156,Smith-Waterman Score=443.
ccttggagagccaaaaaagacaaccacttaaattttaacaaaaatgatgtcatcaccgtcctggaacagcaagacatgtggtggtttggagaagttcaaggtcagaagggttggttccccaagtcttacgtgaaactcatttcagggcccataaggaagtctacaagcatggattctggttcttcagagagtcctgctagtctaaagcgagtagcctctccagcagccaagccggtcgtttcgggagaagggctctggaactgctgggaaaacagggagtttaggaaaaaaacctgaaattgcccaggttattgcctcatacaccgccaccggccccgagcagctcactctcgcccctggtcagctgattttgatccgaaaaaagaacccagggg

SEQ ID NO: 20564 - DNA, 702 bp, Homo sapiens
  SIMILAR (184)..(609): 971254mologous to Homo sapiens intersectin long form,accession number AF064244,Smith-Waterman Score=707.
atgacccgtcacgaaagtccaggcttttgttgcccccatggctttccaaatggccctgttgaaaacatcccctttgaccctccaaaccactttatggaaaggtccattttcatcatgggagtccctcctcagagagagtcagaacccacatctggtgcccactgtggcatcgtgggcccacggtgttcagacttacatctcttggatatgttgaccccaactgaaagaaagcgacaaggatacatccacgagctcattgtcaccgaggagaactatgtgaatgacctgcagctggtcacagagatttttcaaaaacccctgatggagtctgagctgctgacagaaaaagaggttgctatgatttttgtgaactggaaggagctgattatgtgtaatatcaaactactaaaagcgctgagagtccgcaagaagatgtccggggagaagatgcctgtgaagatgattggagacatcctgagcgcacagctgccgcacatgcagccctacatccgcttctgcagccgccagctcaacggggctgccctgatccagcagaagacggatgaggccccagacttcaaggagttcgtcaaactggagcaggtcccggtccctggagacagttatcaggtctcagggctccagtcaatgcagctgcccgtttctaaggcattaaaccagaccacagcctttgacagctaa

SEQ ID NO: 20565 - DNA, 1347 bp, Homo sapiens
  SIMILAR (373)..(1236): 951254mologous to Mus musculus Ese1L protein,accession number AF132481,Smith-Waterman Score=1440.
atgggaccattcactgcttcccgcaatgccacccactggagccatcaaggagtggccgtcatctgctacgtgattgccatgtgggtgctcagagctgcgattgctcaagtgggcgccgtccatgaaaggatgatcctggaaaacacccctgaaaaccacccggaccacagccacttgaagcacgccctggagaaggcggaagagctctgttcccaggtgaacgaaggggtgcgggagaaggagaactctgaccggctggagtggatccaggcccacgtgcagtgtgaaggcctgtctgagaacctagtggaggtgatggacccccgagaggtgttagagccgcgtttcagcgcccaccgtgtctctaagggtcagtggagggagggagctgttcccttcctgtttgctgagcggcaacttgtgttcaattcagtgaccaattgcttggggccgcgcaaatttctgcacagtgggaagctctacaaggccaagagcaacaaggagctgtatggcttccttttcaacgacttcctcctgctgactcagatcacgaagcctttggggtcttctggcaccgacaaagtcttcagccccaaatcaaacctgcagtataaaatgtataaaacacctattttcctaaatgaggttctagtaaaattacccaccgacccttctggagacgagcccatcttccacatctcccacattgaccgcgtctatactctccgagcagaaagcataaatgaaaggactgcctgggtgcagaaaatcaaagctgcttctgaactctacatagagactgagaaaaagaagcgcgagaaagcgtacctggtccgttcccaaagggcaacaggcattggaaggttgatggtgaacgtggttgaaggcatcgagttgaaaccctgtcggtcacatggaaagagcaacccgtactgtgaggtgaccatgggttcccagtgccacatcaccaagacgatccaggacactctgaaccccaagtggaattccaactgccagttcttcatccgagacctggagcaggaagtcctctgcatcactgtgttcgagagggaccagttctcaccagatgattttttgggtcggacggagatccgtgtggcggacatcaagaaagaccagggctccaaaggtccagttacgaagtgtcttctgctgcacgaagtccccacgggagagattgtggtccgcttggacctgcagttgtttgatgagccgtggatggacagcatcatctcctggaaccaggtttgctgtgaccatgagagcctgaagatgtggctcattcggatccaggcctggactaatctggaaagagggactttctag

SEQ ID NO: 20566 - DNA, 2874 bp, Homo sapiens
  SIMILAR (1)..(1545): 1001254mologous to Homo sapiens Human SH3D1A protein,accession number Y32156,Smith-Waterman Score=2669.
gctgcaaaacgggaacttgaaaggcaacgacaacttgagtgggaacggaatcgaaggcaagaactactaaatcaaagaaacaaagaacaagaggacatagttgtactgaaagcaaagaaaaagactttggaatttgaattagaagctctaaatgataaaaagcatcaactagaagggaaacttcaagatatcagatgtcgattgaccacccaaaggcaagaaattgagagcacaaacaaatctagagagttgagaattgccgaaatcacccatctacagcaacaattacaggaatctcagcaaatgcttggaagacttattccagaaaaacagatactcaatgaccaattaaaacaagttcagcagaacagtttgcacagagattcacttgttacacttaaaagagccttagaagcaaaagaactagctcggcagcacctacgagaccaactggatgaagtggagaaagaaactagatcaaaactacaggagattgatattttcaataatcagctgaaggaactaagagaaatacacaataagcaacaactccagaagcaaaagtccatggaggctgaacgactgaaacagaaagaacaagaacgaaagatcatagaattagaaaaacaaaaagaagaagcccaaagacgagctcaggaaagggacaagcagtggctggagcatgtgcagcaggaggacgagcatcagagaccaagaaaactccacgaagaggaaaaactgaaaagggaggagagtgtcaaaaagaaggatggcgaggaaaaaggcaaacaggaagcacaagacaagctgggtcggcttttccatcaacaccaagaaccagctaagccagctgtccaggcaccctggtccactgcagaaaaaggtccacttaccatttctgcacaggaaaatgtaaaagtggtgtattaccgggcactgtacccctttgaatccagaagccatgatgaaatcactatccagccaggagacatagtcatggtggatgaaagccaaactggagaacccggctggcttggaggagaattaaaaggaaagacagggtggttccctgcaaactatgcagagaaaatcccagaaaatgaggttcccgctccagtgaaaccagtgactgattcaacatctgcccctgcccccaaactggccttgcgtgagacccccgcccctttggcagtaacctcttcagagccctccacgacccctaataactgggccgacttcagctccacgtggcccaccagcacgaatgagaaaccagaaacggataactgggatgcatgggcagcccagccctctctcaccgttccaagtgccggccagttaaggcagaggtccgcctttactccagccacggccactggctcctccccgtctcctgtgctaggccagggtgaaaaggtggaggggctacaagctcaagccctatatccttggagagccaaaaaagacaaccacttaaattttaacaaaaatgatgtcatcaccgtcctggaacagcaagacatgtggtggtttggagaagttcaagaatttattgccatgtacacttacgagagttctgagcaaggagatttaacctttcagcaaggggatgtgattttggttaccaagaaagatggtgactggtggacaggaacagtgggcgacaaggccggagtcttcccttctaactatgtgaggcttaaagattcagagggctctggaactgctgggaaaacagggagtttaggaaaaaaacctgaaattgcccaggttattgcctcatacaccgccaccggccccgagcagctcactctcgcccctggtcagctgattttgatccgaaaaaagaacccagtgtgccaggtgattgggatgtacgactacaccgcgcagaatgacgatgagctggccttcaacaagggccagatcatcaacgtcctcaacaaggaggaccctgactggtggaaaggagaagtcaatggacaagtggggctcttcccatccaattatgtgaagctgaccacagacatggacccaagccagcaatttccaaaaatacccaagagaatttttatggaaatgacattggatgccaatggtcccaaaaatgcaaggaaaaatagctccttctttgaaatgtctggtattcggggtctgatttgccctaccaatccgtgcacgaaccctggcccccttcctgatagcaggaggcccaccggtggaagcaagcagctttttaaacgccttcgctgcactcctgcaatgtgcagagacctctggaccaaagaccagagcctactcagcagactcttggttgatgtggacaagctgcctgtgtttcacacggtcgacgggtgttcagacttacatctcttggatatgttgaccccaactgaaagaaagcgacaaggatacatccacgagctcattgtcaccgaggagaactatgtgaatgacctgcagctggtcacagagatttttcaaaaacccctgatggagtctgagctgctgacagaaaaagaggttgctatgatttttgtgaactggaaggagctgattatgtgtaatatcaaactactaaaagcgctgagagtccgcaagaagatgtccggggagaagatgcctgtgaagatgattggagacatcctgagcgcacagctgccgcacatgcagccctacatccgcttctgcagccgccagctcaacggggctgccctgatccagcagaagacggatgaggccccagacttcaaggagttcgtcaaactggagcaggtcccggtccctggagacagttatcaggtctcagggctccagtcaatgcagctgcccgtttctaaggcattaaaccagaccacagcctttgacagctaa

SEQ ID NO: 20567 - DNA, 7435 bp, Homo sapiens
  SIMILAR (263)..(2356): 661254mologous to Rattus norvegicus EH-domain/SH3-domain containing protein,accession number AF132672,Smith-Waterman Score= 2106.
tttcgtgagcgaaggaggtatagaagagtggatgcgccaggggagggagcgtagcttggttgctccgtagtacggcggctcgcgaggaagaatcccgagcgggctccgggacggacagagaggcgggcggggatggtgtgcggggctgcggctcctgcgtccctcccagcggcgcgtgagcggcactgatttgtccctggggcggcagcgcggacccgcccggagatgaggcgtcgattagcaaggtaaaagtaacagaaccatggctcagtttccaacaccttttggtggcagcctggatatctgggccataactgtagaggaaagagcgaagcatgatcagcagctccatagtttaaagccaatatctggattcattactggtgatcaagctagaaactttttttttcaatctgggttacctcaacctgttttagcacagatatgggcactagctgacatgaataatgatggaagaatggatcaagtggagttttccatagctatgaaacttatcaaactgaagctacaaggatatcagctaccctctgcacttccccctgtcatgaaacagcaaccagttgctatttctagcgcaccagcatttggtatgggaggtatcgccagcatgccaccgcttacagctgttgctccagtgccaatgggatccattcccagttgttggaatgtctccaaccctagtatcttctgttcccacagcagctgtgccccccctggctaacggggctccccctgttatacaacctctgcctgcatttgctcatcctgcagccacattgccaaagagttcttcctttagtagatctggtccagggtcacaactaaacactaaattacaaaaggcacagtcatttgatgtggccagtgtcccaccaagtggcagagtgggctgttcctcagtcatcaaagactgaaaatacaggcaaattattcaatagtcatgacaaaacctaatgagtggacactttaacaaggtccccaagcaagaactattcttatgcagtcaagtttaccacaggctcagctggcttcaatatggaatctttctgacattgatcaagatggaaaacttacagcagaggaatttatcctggcaatgcacctcattgatgtagctatgtctggccaaccactgccacctgtcctgcctccagaatacattccaccttcttttagaagagttcgatctggcagtggtatatctgtcataagctcaacatctgtagatcagaggctaccagaggaaccagttttagaagatgaacaacaacaattagaaaagaaattacctgtaacgtttgaagataagaagcgggagaactttgaacgtggcaacctggaactggagaaacgaaggcaagctctcctggaacagcagcgcaaggagcaggagcgcctggcccagctggagcgggcggagcaggagaggaaggagcgtgagcgccaggagcaagagcgcaaaagacaactggaactggagaagcaactggaaaagcagcgggagctagaacggcagagagaggaggagaggaggaaagaaattgagaggcgagaggctgcaaagaggcagctatgaaaggcactgacctggagagtgggagaggcatcgagagtccgaactactaaatcaaagaaacaaagaacaagaggacatagttgtactgaaagcaaagaaaaagactttggaatttgaattagaagctctaaatgataaaaagcatcaactagaagggaaacttcaagatatcagatgtcgattgaccacccaaaggcaagaaattgagagcacaaacaaatctagagagttgagaattgccggaaatcaccccatctacagcactaatttacatggaatctcagcaaaatgctttggaagaacttattccagaaaaacagatactcaatgaccaattaaaacaagttcagcagaacagtttgcacagagattcacttgttacacttaaaagaagccttagaagcaaaagaactagctcggcagcacctacgagaccaactggatgaagtggagaaagaaactagatcaaaactacaggagattgatattttcaataatcagctgaaggaactaagagaaatacacaataagcaacaactccagaagcaaaagtccatggaggctgaacgactgaaacagaaagaacaagaacgaaagatcatagaattagaaaaacaaaaagaagaagcccaaagacgagctcaggaaagggacaagcagtggctggagcatgtgcagcaggaggacgagcatcagagaccaagaaaactccacgaagaggaaaaactgaaaagggaggagagtgtcaaaaagaaggatggcagaggaaaaaggcaaacaggaagcacaagacaagctgggtcggcttttccatcaacaccaagaaccagctaagccagctgtccaggcaccctggtccactgcagaaaaaggtccacttaccatttctgcacaggaaaatgtaaaagtggtgtattaccgggcactgtacccctttgaatccagaagccatgatgaaatcactatccagccaggagacatagtcatggttaaaggggaatgggtggatgaaagccaaactggagaacccggctggcttggaggagaattaaaaggaaagacagggtggttccctgcaaactatgcagagaaaatcccagaaaatgaggttcccgctccagtgaaaccagtgactgattcaacatctgcccctgcccccaaactggccttgcgtgagacccccgcccctttggcagtaacctcttcagagccctccacgacccctaataactgggccgacttcagctccacgtggcccaccagcacgaatgagaaaccagaaacggataactgggatgcatgggcagccaggcccttctctcaccgttccaagtgccggccagttaaggcagaggtccgcctttactccagccacggccactggctcctccccgtctcctgtgctaggccagggtgaaaaggtggaggggctacaagctcaagccctatatccttggagagccaaaaaaagacaaccacttaaattttaacaaaaatgatgtcatcaccgtcctggaacagcaagacatgtggtggtttggagaagttcaaggtcagaagggttggttccccaagtcttacgtgaaactcatttcagggcccataaggaagtctacaagcatgggattctggttcttcagagagtcctgctagtctaaagcgagtagcctctccagcagccaagccggtcgtttcgggagaaggaatttattgccatttacacttacgagagttctgaggcaagggagatttaaccttttcagccagggggatgtgattttggttaccaagaaagatggggacttgtggacaagaacaagtgggcgacaaggccggagtcttcccttctaactatgtgaggcttaaagattcagagggctctggaacttctgggaaaacagggagtttaggaaaaaaacctgaaattgccccaggttattgcctcatacaccgccaccggccccgagcagctcactctcgcccctggtcagctgattttgatccgaaaaaagaaccccaggtggatggtgggaaggagagctgcaagcacgtgggaaaaagcgccagataggctggttcccagctaattatgtaaagcttctaaaccctgggacgagcaaaatcactccaacagagccacctaagtcaacagcattagcggcagtgtgccaggtgattgggatgtacgactacaccgcgcagaatgacgatgagctggccttcaacaaggggccagatcatcaacgtcctcaacaaggaggaccctgactggtggaaaggagaagtcaatggacaagtggggctcttcccatccaattatgtgaagctgaccacagacatgggacccaagccagcaatggtgttcagacttacatctcttggatatgttgaccccaactgaaagaaagcgacaaggatacatccacgagctcattgtcaccgaggagaactatgtgaatgacctgcagctggtcacagagatttttcaaaaacccctgatggagtctgagctgctgacagaaaaagaggttgctatgatttttgtgaactggaaggagctgattatgtgtaatatcaaactactaaaagcgctgagagtccgcaagaagatgtccggggagaagatgcctgtgaagatgattggagacatcctgagcgcacagctgccgcacatgcagccctacatccgcttctgcagccgccagctcaacggggctgccctgatccagcagaagacggacgaggccccagacttcaaggagttcgtcaaaagattggaaatggatcctcggtgtaaagggatgccactctctagttttatactgaagcctatgcaacgggtaacaagatacccactgatcattaaaaatatcctggaaaacacccctgaaaaccacccggaccacagccacttgaagcacgccctggagaaggcggaagagctctgttcccaggtgaacgaaggggtgcgggagaaggagaactctgaccggctggagtggatccaggcccacgtgcagtgtgaaggcctgtctgagcaacttgtgttcaattcagtgaccaattgcttggggccgcgcaaatttctgcacagtgggaagctctacaaggccaagaacaacaaggagctgtatggcttccttttcaacgacttcctcctgctgactcagatcacgaagcctttggggtcttctggcaccgacaaagtcttcagccccaaatcaaacctgcagtataaaatgtataaaacacctattttcctaaatgaggttctagtaaaattacccaccgacccttctggagacgagcccatcttccacatctcccacattgaccgcgtctatactctccgagcagaaagcataaatgaaaggactgcctgggtgcagaaaatcaaagctgcttctgaactttacatagagactgagaaaaagaagcgcgagaaagcgtacctggtccgttcccaaagggcaacaggcattggaaggttgatggtgaacgtggttgaaggcatcgagttgaaaccctgtcggtcacatggaaagagcaacccgtactgtgaggtgaccatgggttcccagtgccacatcaccaagacgatccaggacactctgaaccccaagtggaattccaactgccagttcttcatccgagacctggagcaggaagtcctctgcatcactgtgttcgagagggaccagttctcaccagatgattttttgggtcggacggagatccgtgtggcggacatcaagaaagaccagggctccaaaggtccagttacgaagtgtcttctgctgcacgaagtccccacgggagagattgtggtccgcttggacctgcagttgtttgatgagccgtaggcagcgggctcagggtgtgctcagcagggtcccagcccacggccacacatgctgtctggaaattgtattccttttctaagaaaccaccatttggtattcagtcacagggatatgggatggcaaagacaggcccctcaaagctcctaggaatcattctcgacaatcctccctgccccgaaacaatttcctgtttcatgaaacaaagctgtgttttcctttgtcctcactacaggtctcattatggcttctagggtcgctgaaatcccatagccctcaacagggtgcagctgggagtctagccccttcccgggcttgagggatgggtctggttactataaaatagatttataaatgcaatgtctatatttttggagaactcatgtaaccctcctgtttcttacatccaccagtccccaagtagacttcttggcctacaatgcccagtccttggtgtgagtttagaaacaattatgacggtcctgtcattgcttcagaatcccatctctcctgcagggaaatgctgcctagagctgatcactcggtgagacggtctgatcaggccctggcttagctctttgaagagctggtctatggaagtttccagcatgtgcaccgttatagccgttccttccccctctaggccttgtattaatatatgtcaatgaaaacacactggtgtattgttgcgtggattcagttctgattcccagcatgcttagaatatggtcacagaaagtcattatctagaaagtcacccctctgctggatcagatcactacaggtcactggaaaggcaactttacaatgttgggtcactgggtctcggttggcagccatgttggaaaaatctcttttggctcggaggcctgtgatatttcatagcagcagtcgttgctggtgacctgttctgtgcttgaatgtgctgaatcctgattgttgtaggacatttcaacagctctttttggtacgttccccaaaaagccatgtcctagatccccaaggcgtgaaaaggaaaaatatcaagctggaggttgggaaagaaaatgaaggcagtccattatgtggtgggtgaaagaccctaggaggatgcaagccccgcacatcccggggcaaagacctaagacacttttccaccctccaccaccccaacctcacataatatgcttgttgcaagagtcaggactttatgactatgtgccaagctgtttggtttgagttctttaatttttttttcccttaaatgccaggagatcatctggttagttagatagtaacttgatttgctaatgaaaagtgggggccgtgttttgtttgcatgttaatattctcataatcctagtttgttgtggtcatgaaatgccctttgcatgttctgttggtactggagtctagctttcctgtactagatggtgttctctttgattgtaggtccttagactttaattagggttatcaaagtgctttctaaatgatagcatcagcgttgtggcagagtacctcctttgctgggaactgaatgtgtagggttatcatttcccatgagagcccggtcatacttcaagcaatttttttaaaagtgtgtgttggaaaggacaacaaagtttacatttcatacttttaagaaatactttattatttatttattgaagatagtgtagaattttgtatcaagaacaacagacataagtattttttgaaacaagcaaatataccctgtagttagaaactttcaactgaacatgttagagaccaagtttaacttcaggcatgcatttgtttaccatttcccagcagaaaacatggttaaaatactttaagtttatattttttgatgttgttaagaaacttttaaattaaatctataaatagacatgcaactcatgctttcctatttctataaccaacaccgtttgtttagtgtatttatgaaagatatgctaccatggtagaaagaaaagtattcaatgtgtaaatt

SEQ ID NO: 20568 - DNA, 2154 bp, Homo sapiens
  SIMILAR (97)..(183): 1001254mologous to Homo sapiens dinG,accession number Y10571,Smith-Waterman Score=150.
  misc_feature (1)...(2154): n = a,t,c or g
gcggnggaattcgcggcgccggcgtccgcggcagctgataccagagtcttgctccggccgcggccattggagccctgggctggggcaggagccgcaatgtctcaggctgtgcagacaaacggaactcaaccattaagcaaaacatgggaactcagtttatatgagttacaacgaacacctcagtgactctcttacagaaggcaataacagatggcttagaaattgtggtttcacctcgaagtctgcacagtgatttaatgtgcccaatttgtttggatatgttgaagaacaccatgactacaaaggagtctttacatcgtttctgtgcagactgcaacatcatagcccttagaagtggcaacaaagaatgtcttacctgttggaaaaaactagtttccaaaagatcaccaaggccagacccaaagtttgatgcactcatcagcaaaataaatccaagtcgtgatgaatatgaagctcatcaagagagagtattagtcaggatcaacaagcacaataatcagcaagcactcagtcacagcattgaggaaggactgaagatacaggccatgaacagactgcagcgaggcaagaaacaacagattgaaaatggtagtggagcagaagataatggtgacagttcacactgcagtaatgcatccacacatagcaatcaggaagcaggccctagtaacaaacggaccaaaacatctgatgattctgggctagagcttgataataacaatgcagcaatggcaattgatccagtaatggatggtgctagtgaaattgaattagtattcacgcctcatcccacacttatggaaaaagatgacagtgcacagacgagatacataaagacttctggtaacgccactgttgatcacttatccaagtatctggctgtgaggttagctttagaagaacttcgaagcaaaggtgaatcataccagatgaaccttgatacagccagtgagaagcagtataccatttatatagcaacagccagtggccagttcactgtattaaatggctctttttctttggaattggtcagtgagaaatactggaaagtgaacaaacccatggaactttattacgcacctacaaaggagcacaaatgagcctttaaaaaccaattctgagactgaacttttttatagcctatttctttaatattaaagatgtactggcattacttttatggacagatcttggatatgttgttcaattttctttctgagccagactagtttacgctattcaaatcttttcccctttatttaagatttcctttttggaagggactgcaattattcagtatttttttctttcctttaaaaaaatatatctgaagtttcttgtgttttttttttttccccacaaagtgtgtttccacttggagcaccattttgacccaggaattttgcatagttccggtattctaataaaaggacagttggctgtccttttcctgctcccctcaaaagatttttagtcatacagaatgttaaatattatgtattctgaccttttttttttcccccggagtcttggtatatttatagttttctatataaactgtagtatcttccatgaaggacccaagggctcaaatttactgtccttaaaaacaattctcataggattattcttttcatggtattttcttccataatatctcattttaaaaagaagttctttatgaacttagtgtccattgtcatgcaatgttttttttttttttccattctttttccctgtaattttggaatttctggtcctgggaagaatcaaacaaaatcttaagttctatgagaacttggttcattgacatattctgctgaagaaagaaaaattaaattggtagtaaaatatagtcttcaagtataccgtttgagagtgcttttttttgtattaagttctgctgtcacttcatttcctgtattatatgtgatgttttttcccccattaaaaataccagagataatgggggatattttgcactttagccttgatgaaaagtacaagatatgttcaaagcttccctaatttttttcttatttgtagccacataagtttcaagaataacatggcacacagaacaatggaaaaaagtttctttccattggaaaattatatcattttgggttgccg

SEQ ID NO: 20569 - DNA, 367 bp, Homo sapiens
  SIMILAR (332)..(54): 361254mologous to Human herpesvirus 4 BKRF1 encodes EBNA-1 protein, latent cycle gene,accession number V01555,Smith-Waterman Score=109.
  misc_feature (1)...(367): n = a,t,c or g
ttttttttcaacttcacgacttttatttgtggtgcctgtgctttacaggcccacctggctgaggctggcgggactcttggcacattcttggatccctgctcaggaggggaggggtgacggggtggcatcacacgtgagatggggacctccaggcggccactctggtcctggctactgatccttgcccttcttggtcctcagttccttcctggtcccgtctgtggccctggtcccctctggcaacgtccccctgcttggctcggcctcctacctccatcctggcctcgggtggccccctcggctcctggggactctgctcccctcccagntccgaggtcccaggggggctatggcttctctgagactt

SEQ ID NO: 20570 - DNA, 445 bp, Homo sapiens
  SIMILAR (327)..(208): 611254mologous to Homo sapiens myosin binding subunit 85,accession number AF312028,Smith-Waterman Score=100.
cggggagggggcagcaaaaaatagaagacgtccctccctattgcacatggaccctatatacaggcccacctggctgaggctggcgggactcttggcacattcttggatccctgctcaggaggggaggggtgacggggtggcatcacacgtgagatggggacctccaggcggccactctggtcctggctactgatccgtgcacttcttggtcctcagttccttcctggtcccgtctctggccctggtcccctctggcaacgtccccctgcttggctcggcctcttcaagctgcacgggactcttagggctggggtgcggcggggaggaggtcggggtaattctggcaagacggagctccttggcctgagtggaggtcccttccagccaggaggaggaagccgagcgctgcagcccagccccaggggcctcgtccgaattcggcagg

SEQ ID NO: 20571 - DNA, 1086 bp, Homo sapiens
  SIMILAR (1)..(321): 1001254mologous to Homo sapiens myosin binding subunit 85,accession number AF312028,Smith-Waterman Score=550.
atgtccggagaggatggcccggcggctggcccgggggcggcggcggcggctgcccgggagcggcgacgggagcagctgcggcagtggggggcgcgggcgggcgccgagcctggccccggagagcgccgcgcccgcaccgtccgcttcgagcgcgccgccgagttcctggcggcctgtgcgggcggcgacctggacgaggcgcgtctgatgctgcgcgccgccgaccctggccccggcgccgagctcgaccccgccgcgccgccgcccgcccgcgccgtgctggactccaccaacgccgacggtatcagcgccctgcaccagcttgtggcctgggtcacctctacggctggcccagatccttccctgccgcctccttcaggttccgtcttcctccactccctcttccccttgctctctgctgtgttgctgcccaaggatgctctttccggagcacttccttctcggcgctgcaccacgcaggtccccaagcatcgcccccctgctgtggctgttcccaagttcttagggtaccccacgtgggtttatcaaccacttgggcacgtgcggccccttcacagcccgagtttccatgacctcatgctcttggccctcgtagctccctcccgcctcctccagatgggcagctttggagaggcctgcattgatgagaacctggaggtggtgcgcttcttggtggagcagggcgccactgtgaaccaggcagacaacgagggctggacgccactgcacgtggccgcctcctgtggctacctagatatcgccaggtacctcctgagccacggggccaacatcgccgccgtcaacagtgacggggacctgcccctggacctggccgagtcggacgccatggaggggctgctgaaggcggagatcgcccgccgagctctgcctgtgactggtgactccaggcacgtccctgaagcttgcttccctgatttcctaaaacaggaccactggtgccgcttcatggggtggttgtcagggtctggctgggttggagtggaagggtgtgagcatggttcccggcagactccaggggaccgtgtggaaggaaagggagactga

SEQ ID NO: 20572 - DNA, 505 bp, Homo sapiens
  SIMILAR (3)..(143): 951254mologous to Homo sapiens myosin binding subunit 85,accession number AF312028,Smith-Waterman Score=226.
gcaccgtccgcttcgagcgcgccgccgagttcctggcggcctgtgcgggcggcgacctggacgaggcgcgtctgatgctgcgcgccgccgaccctggccccggcgccgagctcgaccccgccgcgccgtcgaccgcccgcgcctgtgttggactccaccaacgccgacggtatcagcgccgtgcaccaggcctgcattgatgagaacctggaggcggagcgcttcttggaggagcagggcgccactgtgaaccaggcagacaacgagggctggacgccactgcacgtggccgccttctgtggctacctagatatcgtcaggtacctcctgagccacggtgccaacatcgacgtcgtcaacagagacggggacctgcccctggacctggccgagtcggacgccatgagaggggctgctgaaggcggagatcgcccgccgaggtgtggatgtggaggcagccaagcggacataagaggaattgctccttcatgacacgaggtgctgg

SEQ ID NO: 20573 - DNA, 731 bp, Homo sapiens
  SIMILAR (302)..(463): 1001254mologous to Homo sapiens myosin binding subunit 85,accession number AF312028,Smith-Waterman Score=282.
tggttttatattaaaaataataaaaatacggtgaaatttctggttgaaatggggaaaaggcttgtgatctccgttttcccaagtgcttagcgctgactcagagaccctgagtgggacacacgactgcatggagtacagttgggaaacaactgggctagtctgggcctcctgagtctcagaggggagcagggggaagagctctgggcaagtcactgggctgaaccctggccagcccagtgtatgaccctgggtatttcaggtcatggggtgtgagtcctacctcgtgcctcttatcctcctaggtgtggatgtggaggcagccaagcgggcagaagaggaattgctccttcatgacacgaggtgctggctgaatgggggcgccatgccagaggcccggcacccccgcacaggcgcctctgccctgcacgtggctgctgccaagggctacattgaggtgatgaggtgagttgggccagtctgttccatcttgctgtcttataccttcctgtggatcttgtcctttccctttctttttaaatgtatgtaccgaaggctatgtatttccctctaaatacagccttagctgtacccacaagttttgatgtgcagtcttttttttattgtcattcagtgtaaaatatttcccaatttgtaatcttttattatttatttattttgagacagggtatagaactcgtgccgaattcttggctcgaggagggatttcaatg

SEQ ID NO: 20574 - DNA, 2943 bp, Homo sapiens
  SIMILAR (256)..(714): 981254mologous to Homo sapiens myosin binding subunit 85,accession number AF312028,Smith-Waterman Score=783.
atgcgtgacctgcccggttctcagtggccaccctgcgctaccctctcccagaacctgagctgctctgacgcggccgtctggcaggtccccaagcatcgcccccctgctgtggctgttcccaagttcttagggtaccccacgtgggtttatcaaccacttgggcacgtgcggccccttcacagcccgagtttccatgacctcatgctcttggccctcgtagctccctcccgcctcctccagatgggcagctttggagaggcctgcattgatgagaacctggaggtggtgcgcttcttggtggagcagggcgccactgtgaaccaggcagacaacgagggctggacgccactgcacgtggccgcctcctgtggctacctagatatcgccaggtacctcctgagccacggggccaacatcgccgccgtcaacagtgacggggacctgcccctggacctggccgagtcggacgccatggaggggctgctgaaggcggagatcgcccgccgaggtgtggatgtggaagcagccaagcgggcagaagaggaattgctccttcatgacacgaggtgctggctgaatgggggcgccatgccagaggcccggcacccccgcacaggcgcctctgccctgcacgtggctgctgccaagggctacattgaggtgatgaggttgctccttcaggctggctacgacccagagctccgggacggggaacgggtggactcccctgcacgcagcggcacactggggcgtggaggatgcctgccgcctgctggccgagcatggcgggggcatggactcactgacccatgcggggcagcgtccctgtgacctggccgatgaggaagtactgagcctgttggaggaactggcccggaaacaggaggacggaaggggtgaagacggtggtgaactgcgtggggaaggggtgaagacggtggtgaactgcgaactgcgcggggtaggggtgaagacggtggtgaactgcgcggggaagcttcggaaccaaaaagaagcttcccagagccggggccaggagccccaagcgccctctagcagcaaacacagaaggagctctgtgtgtcgtctgagcagtcgcgagaagatttccctccaggacttgtccaaggagcgccggcctggtggggctggggggccccccatccaggacgaggatgagggggaagaaggtcccaccgaaccaccccctgcagaacccagaaccctcaatggcgtctcctccccgccgcaccccagccctaagagtcccgtgcttgaagaggcccccttctccaggcgctttggcctcctgaagacagggagttctggtgccctgggtccccctgaaaggcggacagcggagggagcccctggggctgggctgcagcgctcggcttcctcctcctggctggaagggacctccactcaggccaaggagctccgtcttgccagaattaccccgaccccctccccgaagctgccggagccctctgtcctgattccggagcctgtaatccccagcgaagccaaacgtccccacagcctccacggggcccccagcggactcccgggaccgacggaggtcctaccagatgcctgtgcgggatgaggagtcggaatcccagagaaaagctcgctcccgtctcatgcgccagtctcggaggtccacacagggtgtgactcttacagacctgaaggaggcagagaaggctgcagggaaggccccagagtcagagaagccggcgcagagcctggacccttcccgaaggccccgcgttccctgggagtggagaactctgacagccctgcccagagagcagaggcgcccgacgggcagggtccgggaccgcaggcggccagggagcaccgcaaggtcggaaaggagtggagggggcctgcggagggggaggaggcggagccggctgaccgcagccaggagtccagcaccctggagggcggcccctcggcccgcaggcagcggtggcagcgggacctcaacccagaacctgagccagaatcggaagagccagacggaggctttaggacgctgtatgcagagctgcgcagggagaacgagcggcttcgcgaggccctgaccgagaccacgctgcggctggcgcagctcaaggtggagctggagcgggccacgcagaggcaagaacgcttcgctgagaggccagccctcctggaactggagagattcgagcgcagggccctggaacgcaaggccgcatagctggaggaggagctgaaggccctgtctgacctccgcgctgacaaccagcgcctcaaggatgagaatgcagcgttgatccgcgtcatcagcaaactctccaagtgacccggagggactttcccgcacccgtatttatacagctgcttctgccaccaccgsaccccttcccccgtgtgaacacgagtgacagggctccgggggaagtctcagagaagccatagcccccctgggaacctccggactygggaggggagcagagttccccaggagccgaggggggccacccgaggccaggatggaaggtgggaagccgagccaagcaggggggacgttgccagaggggaccagggtccagagacggggacccaggaagggaactgagggaccaagaagttgcaaggtttcagtagccagggaccagagttggccgcttgggagttccccatctcacgtgtgattgccaccccgtcacccctcccctcctgagcagggatcccaagaatgtgcgcaagagtccccgccagcctcaagccaggtgggccttgtatatagggtccatgtgcaatagggagggacgtcttctattttttgctgccccctccccgcccacttgtctggggcagggggagaaggtattttcgagataaaagcacaggcaccacaaataaaagtccgtgaagttgccactcaaaaaaaaaaaaaaaaag

SEQ ID NO: 20575 - DNA, 456 bp, Homo sapiens
tgagcatagtgacttagagactctgtgtatcagttttgccaataagactgtggacttcatgattgttgttgaacttctgggtcaaaactcaaattacttgcttgagccttaatcaatgtggttttattcaatggtttgttctttgaatggttgcaaaaactgtagataatcttactgaggactgtacaaacatgaaggtgtggtatcaaacttcaggttgaaactgtttgaagcattataaacattcatttcacaactagattgtataaggatattagctgtgatgagactcactgcattattttttttagtgaattttatgaaatccccgttccattcaacaggcacatgtttaaaagagctttgtcgttggtgttaatgggggaatgtgttccttcattgtatttgggccttttgtattgcactcttgatattaaatttaatgtgccttgaaat

SEQ ID NO: 20576 - DNA, 412 bp, Homo sapiens
  SIMILAR (233)..(367): 931254mologous to Homo sapiens Wilms' tumour 1-associating protein,accession number BC000383,Smith-Waterman Score=212.
cccacgcgtccgcccttactgagcttgctgagctccggggcccgcggagctcgcgccaggctcctgggaaaggacggggagtgttaccggggagcagctgctccattgtgcctcgaggccccgatcgggctaggccgacggcctccctcccttcacctttcctctcctggcggggttcggcggcgggcgagtgactgcggccacgcctgaaaggcgactctcctgattcaagatgaccaacgaagaacctcttcccaagaaggttcgattgagtgaaacagacttcaaagttatggcaagagatgagctaatcctaagatggaaacaatatgaagcctacgtacaagctttgggggggcaggacaccagaccttaacctctaagaaggaacctggcccaaaaaaaagcccgg

SEQ ID NO: 20577 - DNA, 2016 bp, Homo sapiens
  SIMILAR (1072)..(197): 401254mologous to Plasmodium lophurae histidine-rich protein,accession number X01469,Smith-Waterman Score=716.
atgaggcagggtccctatggtggagggtatagaggctatgatgactatcgtggctgtaatgatggatatggctttaggtctgatagatttggaaaagaccgcaattactgtttttcaggaatgtctgatcatagatacggagataagcagtgtgagtggtggttatggaggtggttatggaggtcagagcagctgagtggtggttatggaggtggttatggaggtctgagcagtgtgagtggtggttatggaggtggttatggtgatcagagcagtgtgagtggtggttatggaggtggttatggagctgagtggtggttatggaggtggttatggaggtctgagcagccgagtggtggttatggaggtggttatggaggtctgagcagtgtgagtggtggttatggaggtggttatggaggtctgagcagtgtgagtggtggttatggaggtggttatggtgatcagagcaatgtgagtggtggttgtggaggtggttatggtgatcagagcaatgtgagtggtggttatggaggtggttatggtgatcagagcaatgtgagtggtggttgtggaggcggttatgagctgttgagtggtggttatggaggtggttatggaggtcagagcagtgtgagtggtggttatggaggtggttatggaggtcagagcagtgtgagtggtggttatggaggtggttatggtgatcagagcaatgtgagtggtggttgtggaggtggttatggtgatcagagcaatgtgagtggtggttgtggaggtggttatggtgatcagagcaatgtgagtggtggttatggaggtggttatggtgatcagagcaatgtgagtggtggttatggaggtggttatggtgatcagagcaatgtgagtggtggttgtggaggcggttatgagctgttgagtggtggttatggaggtggttatggaggtcagagcagtgtgagtggtggttatggaggtggttatggaggtcagagcagtgtgagtggtggttatggaggtggttatggtgatcagagcaatgtaagtggtggttgtcgaggcggttatggaggcactaaagaaacatttttcaatgttataaacgatattaaagttggtctgactctcctttgcacagaactgaatgacttcatcatccagcttgatgaagaagtagagggtatgcagagtaccattctagttctgcagcagcagctgaaggagacacgccagcagttggctcagtaccagcagcagcagtctcaggcctctgccccaagtaccagcaggactacagcttctgaacctgtagaacagtcagaggccacaagtaaagactgcagtcgtctgacaaacggaccaagttatggagagtcgcctttcaggcgtggccgcagtcactcgcccgccgccgaaccccgccaggagaggaaaggtgaagggagggaggccgtcggcctagcccgatcggggcctcgaggcacaatggagcagctgctccccggtaacactccccgtcctttcccaggagcctggcgcgagctccgcgggccccggagctcagcaagctcagtaagggaagcggccgaggggaggggcgggccagcgaggtcggaggtcagccccagggcatcacgggaagggaaggtggaagtactcgccggggccacctgcggctgcggggctgcctcgtgcggagggatctgggcgaaggcggcgcgtgattggccgctctgtgttcgtgacgctcatccgttgatgcttcagcgtgtcggaggaccaggtgccacctcaagatataggccgtgggcggcgagccgcgggcgtttactcttagcagaagctcaccttcgtgaggcgcagtctcctggccgctgggttcgttcctccttgacatctctggagacgcatcgaggagctattgttctctggcgtcggaggttgcgctgtgtccgcggcgttgagggccccttgctaactggaacacggggaaggcggccctgtgaggtttag

SEQ ID NO: 20578 - DNA, 3028 bp, Homo sapiens
  SIMILAR (1789)..(1908): 671254mologous to Homo sapiens Wilms' tumour 1-associating protein,accession number BC000383,Smith-Waterman Score=104.
  misc_feature (1)...(3028): n = a,t,c or g
ttttttttttttttttttaattccctgactcttttaaatggtgcaattgtgtcctactgtatggatgcaccattcccaatcagttccctattaacggatatttgggttatccctaacttttgctatgacaaatagcactgcaataaccttgtatacctattgtttccatgtgtggagctgcaccttcagaataaggttagggttagaagtataactgcaaggtataagaataaacacaagtaattttgtactccgtggaacttgaaccatttttccactcccaccaggaaaggtaatttcaacgtgtatttccattgtaagtgaggtggagcgactttctatgtttaaagaccattacggtattttttctgagaatcatctgttcatgtccttccccattttctcctttggcttttgcactttttgttttcaatttttgagagctcttgtgatnccgagttgcaaagattttctccagaccgatctgattcactggaaatatactacgacccatcttggaatgtactttaatcttatcctaataaatcacctttacttacaagacacttcttttggggatgaacaggttcgataaagccggctaaggacagaccaatcaaaagaattacgtgctcttctagtaagtgtttagagacttgtttcacgttctccagggtaaacacgccattactcggcggtccagatggcagtcttgcttcagggagtctactccacttgcaggacctctttgattgagttcactaaacctcacagggccgccttccccgtgttccagttagcaaggggccctcaacgccgcgggacacagcgcaacctccgacgccagagaacaatagctcctcgatgcgtctccagagattgtcaaggaggaacgaacccagcggcccaggagactgcgcctcacgactgatgagagggaaggcatcggtttctaagttctcaaaacttacaggtgagcttctgctaagagtaaacgcccgcggctcgccgcccacgggctctctctcgtgaggtggcacttggtcctccgacacgcggaagcatcacggatgagcgtcacgaacacagagcggccaatcacgcgccgccttcgcccagatccctccgcacgaggcagccccgcagccgcaggtggccccggcgagtacttccaccttccctttccgtgatgccctggggctgacctccgacctcgctggcccgcccctcccctcggccgcttcccttactgaaaaaaataagctccggggcccgcggagctcgcgccaggctcctgggaaaggacggggagtgttaccggggagcagctgctccattgtgcctcgaggccccgatcgggctaggccgacggcctccctcccttcacctttcctctcctggcggggttcggcggcgggcgagtgactgcggccacgcctgaaaggcgactctcctgattcaagatgaccaacgaagaacctcttcccaagaaggttcgattgagtgaaacagacttcaaagttatggcaagagatgagttaattctaagatggaaacaatatgaagcatatgtacaagctttggagggcaagtacacagatcttaactctaatgatgtaactggcctaagagagtctgaagaaaaactaaagcaacaacagcaggagtctgcacgcagggaaaacatccttgtaatgcgactagcaaccaaggaacaagagatgcaagagtgtactactcaaatccagtacctcaagcaagtccagcagccgagcgttgcccaactgtagatcaacaatggtagacccagcgatcaaccttgtttttccctaaaaatgaaaggtgaacttggaacagacttaaggacaaacttgggaacaagcccataatgaactgagtgcctgggaagtttacggctgataggtaaacaaatcatactccccagtcaagacttccctgacagtcccacttacgagaaagctgtggtgggacagccaagtactcgtttccacaccaagactcagactttttgagccaaaaaaaaagccacattcttacattgtccagcttgtaatggttaatgtaaaacttaccagatgaaccttgtgtttcagcttttttcttttccccttccccttgcttcaaaggcctgatggcgtcggactattccgaagaagtggccacctccgaaaaattccccttctagaacatgtatgtcacttgagaaatgtttctgtttgaagaaaatagagggagaaacagaagtcttaagtctgtgggcacactgtgtcttcagacagtttgaagggaatgaaaacctaggagattttaaatcatggaattggaacatgttaaaattcccagttaaaatgttaaaaacgggattatggcattcgctctttaaccttgaggcattagtgacttaggaggacactgtgtattcagtttttgcccaataaggactgtgggactttcatggattgttgttggaacttctgggggtccaaaactccaaatggagggtgaattttgccctttaaagggtttatttgctgagaaccaactttcaatagtcatgagagaatcaaataatagatgtccgtacaagtagcgcatatatttaacccatttagtttggggctctatattacttgcttgagcccntaatccaatgtgggttttattccaatggtttgttcccttgaatggttgccaaaaactgtagataatcttacctgaggactgtacaaacatgaaggtgtgggtatcaaacttcaggttgaaactgtttgaagcattataaacattcatttcacaactagattgtataaggatattagctgtgatgagactcactgcattattttttttagtgaattttatgaaatccccgttccattcaacaggcacatgtttaaaagagctttgtcgttggtgttaatgggggaatgtgatccttcattggatttgggccttttgtattgcactccttgatattaaattaaatgtgccttgaaataaaaaaaaa

SEQ ID NO: 20579 - DNA, 1059 bp, Homo sapiens; identical to SEQ ID NO: 806
  SIMILAR (328)..(459): 881254mologous to Homo sapiens calbindin D28K,accession number S46006,Smith-Waterman Score=211.

SEQ ID NO: 20580 - DNA, 933 bp, Homo sapiens; identical to SEQ ID NO: 3053
  SIMILAR (715)..(852): 511254mologous to Human T-cell lymphotropic virus type 2 gag protein,accession number X89270,Smith-Waterman Score=147.

SEQ ID NO: 20581 - DNA, 930 bp, Homo sapiens; identical to SEQ ID NO: 9694
  SIMILAR (226)..(384): 791254mologous to Homo sapiens Human secreted protein, SEQ ID NO: 5210,accession number G01129,Smith-Waterman Score=220.

SEQ ID NO: 20582 - DNA, 248 bp, Homo sapiens
  SIMILAR (248)..(123): 831254mologous to Homo sapiens Human secreted protein, SEQ ID NO: 5576,accession number G01495,Smith-Waterman Score=174.
tgtccctcaaccactttctcctttccactcttcaatctcttccttctcttaatttcaattcctttcattttctggtagagacaaaggagacacgttttatccgtggacccaaaactctggcgccagtcatggaccggcagccactcccagagcccctggaactctggcccaaggctctcagactccttcccagatcttcttggcttagcggctgaagactgacgctgcccaatcgcctcggaagcccc

SEQ ID NO: 20583 - DNA, 408 bp, Homo sapiens; identical to SEQ ID NO: 808
  SIMILAR (372)..(271): 581254mologous to Homo sapiens reverse transcriptase homolog= pol {retroviral element},accession number S61070,Smith-Waterman Score=96.

SEQ ID NO: 20584 - DNA, 1134 bp, Homo sapiens; identical to SEQ ID NO: 20378
  SIMILAR (150)..(1): 721254mologous to Homo sapiens Human secreted protein, SEQ ID NO: 7420,accession number G03339,Smith-Waterman Score=170.

SEQ ID NO: 20585 - DNA, 525 bp, Homo sapiens; identical to SEQ ID NO: 2009
  SIMILAR (316)..(447): 511254mologous to Human T-cell lymphotropic virus type 1 Gag,accession number S74562,Smith-Waterman Score=146.

SEQ ID NO: 20586 - DNA, 696 bp, Homo sapiens; identical to SEQ ID NO: 2107
  SIMILAR (217)..(327): 831254mologous to Homo sapiens Human secreted protein, SEQ ID NO: 5576,accession number G01495,Smith-Waterman Score=154.

SEQ ID NO: 20587 - DNA, 675 bp, Homo sapiens; identical to SEQ ID NO: 814
  SIMILAR (64)..(219): 731254mologous to Homo sapiens Human secreted protein, SEQ ID NO: 5576,accession number G01495,Smith-Waterman Score=180.

SEQ ID NO: 20588 - DNA, 1107 bp, Homo sapiens
  SIMILAR (168)..(302): 731254mologous to Homo sapiens Human secreted protein, SEQ ID NO: 5576,accession number G01495,Smith-Waterman Score=153.
atggagcaagatggcagaatagaagtctccactgattgtcttccccacaacgacaccaatgtaacaattatctatacacagccaagcaccttcataagaaccaaaaatcaggtgaacactcacagtacctggttttacttcatagcgctgaaagaagcactgaagagggcgattccaaggcgatcgggcagtgtcagtcttcagccgctaagccaagaagatctgggaaggagtcagagagccttaggccagagttccaggggctctgggagtggctgccagggaaggcccatggcctgctatgttagtccattttctattatgatagctgaataccgcagactgggtaatttacagagaaaagaaagtttttttcagctcatagttctagagctgctaagttcaagagcgtggcactggcatctggtgagggtcatcccatggcagaaggctggaaggaaagatatagtatcactctgtgatattcctgttacaaatgcacagtctgaatctaagcacaaggaaacatcagacaaatccatattaaaggacactttgcaaaataaatggcttgtgtttgcccacaatttcaacatcatgaaagacaaagaaaagaatatagatctaggaggaagagtgaatgatcattgtgttctggatggcaaaaatgttttcctcacaacttgcagtggcagtctgtgtggctgtgttgagaaagattctgatgacatggtacatgagcctgaagacactgtggccaccaagaggacacaagtgatttccaggggtgtggcagatgaaggccatcagctaacagtcatcatcccaacaggttctctcttgagggaaatatccctagaacttaatcatcgagcagaactaaaattttacacccatcgaacaacaactctccactttcccagtccccaacccctggaaaccactattgtattctatgcttctggcagaccttctatcttatttgcctttaccatctgctgtctccccaccctcactccaggggcattagagattctgatcactaacaaaactgaagatgttgggacaggtgacttacaaggcttacagacagcaagccttctgtga

SEQ ID NO: 20589 - DNA, 774 bp, Homo sapiens; identical to SEQ ID NO: 2012
  SIMILAR (2)..(88): 721254mologous to Homo sapiens putative p150,accession number U93564,Smith-Waterman Score=107.

SEQ ID NO: 20590 - DNA, 203 bp, Homo sapiens
  SIMILAR (168)..(1): 371254mologous to Arabidopsis thaliana extensin-like protein,accession number AL049608,Smith-Waterman Score=82.
tggtggattatcattagttcttacaggttttgggatagggggtgaagagccatgttttgcaggcaggggtggatctcacaaagtacattctcaagggtggggagaattacaaagaaccttcttaagggttggggagattacaaagtaccttcttaagggtgggggagattacaaagtacattgaagagttagggtggggcaga

SEQ ID NO: 20591 - DNA, 420 bp, Homo sapiens; identical to SEQ ID NO: 448
  SIMILAR (106)..(219): 841254mologous to Homo sapiens Human secreted protein, SEQ ID NO: 5576,accession number G01495,Smith-Waterman Score=161.

SEQ ID NO: 20592 - DNA, 1347 bp, Homo sapiens
  SIMILAR (1239)..(1346): 971254mologous to Homo sapiens p40,accession number U93566,Smith-Waterman Score=184.
atggggagtcaggaggcaaatggagtgaagagtaagcacggccacagcctctattgtggcttccgtggaaggaatgggggaaccaggggggcttccgaggcgatccggcagcgtcagtcttcagccgctaagctgagaagatctgggaaggagtcagagagccttgggccagagttccaggggctctgggagtggctgccagccttgggctcctgtctacagcagcccaaggcaattccacttggtcaccccgataagtctccatcatccaaatggctgggaccacattcaactcctctttctcctcagccagcatctgtccacacttgcctgtttctagcctttcttcttccggacactcaagaaaattttcttaatcttatattccatactacaaaaactaacaatggattgcattcctccttgtgtttgctttactgggtgtctacttcacctaaagattcttatgagatccagccccaggggccattaaactgccagagccttttgttctggggctccctcaaaagtgagatgacccaaggtctgtgcagatccaccagcacaccattccacggtggagaggaacagaacgtgccatcacagtgggtggcccaatcccacaggagggagaacagaacggtgggaggtgaagccttcccaggtcaccctcctgcaagtgccatcacagtgggtgacccaatcccacaggatggacaacagaatgttgggaggaggaaattcaaaccaaaaggtgaagaagttgaaaactttgaaaaaaatttagacgaatgtataactagaataaccaatacagagaagtgcttaaaggagctgatggagctgaaagccaaggctcaagaactatgtgaagaatgcagaagcctcaggagctgctgtgatcaactggaagaaagagtatcaatgatggaagatgaaatgaatgaaatgaaaccaaatctgcgtctgattggtgtacctgaacgtgactgggagaatggaaccaagttggaaaacactctgcaggatattatccaggagaacttccccaatctagcaaggcaggccaacattcagattcaggaaatacagagaacgccacagagatactcctcgagaagagcaactccaagacacataattgtcagattcaccaaagttgaaatgaaggaaaaaatgttaagggcagccagagagaaaggtcgggttacccacaaagggaagcccatcagactaacagcgatctctcggcagaaactctacaagccagaagagagtggggcccaatattcaacattcttaaagaaaagaattttcaacccagaatttcatatcctgccaaactaa

SEQ ID NO: 20593 - DNA, 411 bp, Homo sapiens; identical to SEQ ID NO: 447
  SIMILAR (109)..(222): 861254mologous to Homo sapiens Human secreted protein, SEQ ID NO: 5576,accession number G01495,Smith-Waterman Score=172.

SEQ ID NO: 20594 - DNA, 793 bp, Homo sapiens
  SIMILAR (202)..(321): 771254mologous to Homo sapiens Human secreted protein, SEQ ID NO: 5576,accession number G01495,Smith-Waterman Score=163.
atgccccgtgtgctctcacaacctaaacagtcggtgaggctagagtttctccatcctggtgctcctcttctgcgttacacgggtactgtccctgtcccacctgaaacatgtgacagaaacatacatgttaaaccagcaaagagttcaggatatcaaaaccttctttttttcctggttgtaattcatgcatttggagaacgcattgagggggcttccaaggcgatcgggcagcatcggtcttcagccgctaagccaagaacatctgggaaggagtcagagagccttgggccagagttccaggggctctgggagtggctgccaggtgagttggacagtccgatttccagtggggtcccacacagatgggatgtggcttaggaggaatcctgggctgcaggcattccttggcccggtggccagatttctggaacttgtagcaagctcctcggggaggaggttctggaggaacacctggctgctgcagttcaggcgtttggaagttcttgtgtgctggagatgtggctggggtttgtctcacagtggaggcaaggaactgcaacttttttctattattgtacaccttgaaggtgaggttaattaaatccttgactatgcctttagctccagccacctttttaagagtaaattgctgggcaggagggggagggctagtcatggaaggaaactgtaagccggaccaggtgtgaggaggggaggcgataaaaggattatagggtggaggagcggaggctgaggaagaattgggacctagctcggtctggcgaggagcagc

SEQ ID NO: 20595 - DNA, 1634 bp, Homo sapiens
  SIMILAR (1632)..(1561): 871254mologous to Homo sapiens Human secreted protein, SEQ ID NO: 5576,accession number G01495,Smith-Waterman Score=112.
aaggcggaggtttcagtgaccgagatcgcaccatcgcactccagcctgggcaacaaatatggatgtggggaataggcaagcaggtaggtggatgtggctggctgcgtggaaagaacagggtggtgggggcagccaaggatcaatcaggcactggtgagaagttctacttcatcccgaaggcaatgggagccatggagggctctggacagaggagaacattgccagacccaggtgctcacaggaacccttctgggggctacagcgcaacagattgtgaagggagccggcctgcaccaggtgaaataaacagccatgcttctcacacaaagcctgtttggtggttcttcacacagacgcgcatgaaatttggtgccgtgactcggatcgggggcctcccttgggaggtcaatcccctgtcctcctgctctttgctccgtgagaagatccacctaccacctcaggtcctcagtccaaccagcccaaggaacatctcaccaattttaaatcaggagcttgctacacgtgccggaaatctggccactgggccaaggaatgcccgcagcccgggattcctcctaagccgcgtcccatctgtgcgggaccccactggaaatcggactgttcgactcacctggcagccactcccagagcccctggaactctggcccaaggctctctgactgactccttcccagatcttctcggcttagcggctgagactgacgctgcccgatcgcctcggaagccccgtagaccatcacggacgctgagcttcgggtaactctcacagtggaggcagtttaaattctagtgaagtgatggaatatagagcaggggaaaggacagagggagtttgcgagtcgacaaggcagaaactggagtacacgagtgctggaaccagctggctgctttggcactggcaggagcgaactccatgcactctgacctgctatgttccacccctcatgggagggagcatgcagcctctctcactgtccctcaaccactttctcctttccactcttcaatctctcccttctcttaatttcaattcctttcattttctgggagagacaaaggagacacgttttatccgtggacccaaaactccggtgccggtcacggactgggaaggcagccttcccttggtgtttaatcattgcagggacacctctctgattatacacccacgtttcacgggtgtcagaccacgcagggacgcctgccttggtccttcacctttagcggcaagtcccgcttttctgagggaggggcaagatttaactaacctcgccttcaaggtgtacaataatagaaaaaagttgcaattccttgtccccactgtgagacaaaccccagccgcatctccagcacacaagaacttccaaacgcctgaaccgcagcggccaggtgttcctccagaacctcctcccccaggagcttgctacaagtgccagaaacgtggccaccaggccaaggaatgcctgcagcccaggattcctcctaagccacgtcccatctgtgccggaccccactggaaatcggactgtccaactcacctggcagccactcccagagcccctggaactctggcccaaggctctctgactgcttcccagatcttcttggcttag

SEQ ID NO: 20596 - DNA, 886 bp, Homo sapiens
  SIMILAR (695)..(363): 341254mologous to Bovine leukemia virus gag polyprotein,accession number M10987,Smith-Waterman Score=144.
atgatcgggtcagagaaaaagcacaaggcagctcagaggtattacttctcagtatggcatccccatttgaaacagctgcaaaacaagccacagcttgggaatgtggcaaggtttcagcagcgtggaggtgaaaggcaagagttgcatggacagattctctgcaaggtgctgagcaaggtagcagacatgccaggtcttgagtgcattgtgtctagaggtagagcacagaggaggaaaagggggattctgaggcgatcgggcagcttcagtcttcagccgctaagccaagaagatctgggaaggagtcagtcagagagccttgggccagagttccaggggctctgggagtggctgccaaggtgagttggacagtccgatttccagtggggtcccgcacagatgggacgcagcttaggaggaatcccgggctgcaggcattccttggcctggtggccagatttctggcacttgtagcaagctccttccagaaaagcgggaaaggggttgggtcgtggaaataaggggttggggtgcagagataagaggtcggggcatggaaataagggattggggcacagagatataagaggttggggtgcagaaataagggattgggccacagagataagaggtcggggcgtggaaataagggactggggcacagagatacgaggttggggtacttgctcctctagaaaagcggacttgccactcagggtgaaggagaaggggttgggtgtttcttgccccccagaaaggcggagaaggggtagagacacagagagaaggggttggggtacttgccccttccccagaaaagcgggacttgccgctaagggtgaaggaccaaggcaggcgtccctgcgtggtctgacacctctgaaac

SEQ ID NO: 20597 - DNA, 1713 bp, Homo sapiens
  SIMILAR (1118)..(1156): 761254mologous to Homo sapiens calbindin D28K,accession number S46006,Smith-Waterman Score=45.
tagacgctcctttttattaggccccagtctcattccagacaccagaccaacttagactgtggcccaaaaaacttgtcatccctactatcttctgtctagtcatactcctattcaccgttctcaactactcatacatgccctgctcttgtttacactgccggtttacactgtttctccaagccaatcacagctgatatctcctggtgctatccccaaaccgcccaccactcttaactccctcttaaagtaaataaataatctttactggcagggctatgctgaacctccttgggcactcatctaatcagatatcctgagtcgtcccaattcttagaccttttatacctgtttttctcctcttattcggaccttgtgtcttccgtttagtttttcaattcatccaaaaccggtatccaggccatcaccaatcattctatatgacaaatgtttcttcttacatccccacaatatcaccctttaccacaagacctcccttcagcttaatctctcccactctaggttcccacgctgcccctaatcccacttgaagcagccctgagaaacatcgcccattctctctccctaccacccctcaaaaattttcaccaccccaacacttcaacactattttgttttatttttcttatgtaatataagaaggcaggaatgtcaggcctctgaggcccaagccaagccatcgcatcccctgtgacttgtgcgtatacgtccaggatgggcctgaagtaactgaagaatcacaaaagaagtgaatatgccttgccccaccttaactgatgacattccaccacaaaagaagtgtaaatggccggtccttgccttaactgatgacattaccttgtgaaagtcctcttcctggctcatcctggctcaaaaagcacccccactgagcaccttgagacccccactcctgcccgccagagaacaaaccccctttgactgtaattttcctttacctacccaaatcctataaaacggccccacccttatctcccttcactgactctcttttcggactcagcccgcctgcacccaggtgaaataaacagctttattgctcacacaaagcctgtttggtggtctcttcacacggacgcacatgaaatttggtgccgtgactcagatcggcggacctcccttgggagatcaatcccctgtcctcctgttctttgctccatgagaaagatccacctacaagctcaggtcctcagaccgaccagcccaaggaacatctcaccaattttaaatcggagaaaaaggagacacgttttatccgtggacccaaaactccggcaccggtcatggactagggaaggcagccttcccttggtgtttaacctttgcagggatgcctctctgattattcacccaggtttcagaggtgtcagaccacgcagggacacctgccttggtccttcacccttagcagcaagtcccacttttctgggggaaggggcaagagcttgctacaagtgccagaaatctggccaccaggccaaggaatgcctgcagcccaggattcctcctaagctgtgtcccatctgtgcgggaccccgctggaaatcggactgtccaactcacctggcagccactcccaaagcccctggaactctggcccaaggttctctgactccttcccagatcttcttggcttagcagctgaagactgacgctgcccaatcgcctcggaagccc

SEQ ID NO: 20598 - DNA, 1476 bp, Homo sapiens
  SIMILAR (1076)..(597): 761254mologous to Homo sapiens neutral protease large subunit,accession number M27826,Smith-Waterman Score=582.
  misc_feature (1)...(1476): n = a,t,c or g
tttgtgtgagcaataaaaaatgtttatttcacctgggtgccggtgggctgagtccgaaaagagagtcagtgaaggaagataggggtggggctgttttataggatttgggaaggtaataaaaaattacaatcaaagggggttgttctctggtgggcaggggtggatctcacaaagtacattctcaagggtggggagaattacaaagaaccttccttaagggtggggggagattacaaagtacattgaatcagttagggtggggccaggaaaacaaatccacaatggtggaaatgtccatcaagttaaaggctgtttttaccttccttttgtggaaccttccagttaacttccaggcccatcctggatgttacacgtgccaagtccacagggggatgcgatggccctggcctggggcttcagaggccttgacattcctgccttctgatattaataagacaaataaaacaaaatagtgttgaagtgttggagcggcgaaaatttttggggggtggtatggagagagaatgggcgatgtttctcagggctgcttcaagtgggattaggggcggcgtgggaacctagagtgggagagattaagctgaagggaggtcttgtggtaaggggtgatattgtggggatgttagaggacacaaaggaggctttggattgggaaaaaaggccaccaatgagatgttagctgtactccccggaatagtcagggaagccagataatttggttaaaatatttcggcccctaataaggaaaatgggnccaggtggggaataactaaaaaagagtgcataaaagagtgttgtcccaattggcacccagagtgggggagttttccaggggttttgaagcttggccgtcaataccccacaacagttatgggggcaagggaaacaggcccttgaaaagaaggcaacgtggagtgggtagcccccgtatcgattaaacaggggatggacttaccctccactgtgagagttacccgaagctcggcttctgtgatggtccaggggacttccgaggcgatcgggcagcgtcaatcttcagtcgctaagccaagaagatctgggaaggagtcaaagagccttgggccagagttccaggggctctgggagtggctgccagaaatttatttctcacagttccggaggctgggaaatccaaaatcaaggcaccagcagattcaatgtctgatgggggcctgctttgtggtaacagaaagactctccttccaggattctctagacctggcagaaccaagacattcctatcctctccaggtgaaaaggctagatctcccaacagttctagaaactgaaacagatctagaaaagctagatccttttacaacaatcccttctccagtggaaactctccaatgcctttttgtctcactcagaataaaatccagagtccctatcatggacttgaaggcccttagtgatctgacccctcttgatccctga

SEQ ID NO: 20599 - DNA, 397 bp, Homo sapiens
  SIMILAR (3)..(395): 651254mologous to Rattus norvegicus myosin I,accession number X71997,Smith-Waterman Score=478.
acgaggcctgtatctctgctggcaccatcactgaccgtatcttcctgcagaccctggacacgcaccaccgccatcatctacactacaccagccgccagctctgccccacagacaagaccatggagttcggccgagacttccggatcaagcactatgcaggggacgtcacgtactccgtggaaggcttcatcgacaagaacagagatttcctcttccaggacttcaagcggctgctgtacaacagcacggaccccactctacgggccatgtggccggacgggcagcaggacatcacagaggtgaccaagcgccccctgacggctggcacactcttcaagaactccatggtggccctggtggagaaccttgcctccaaggagcccttctacgtccgctg

SEQ ID NO: 20600 - DNA, 333 bp, Homo sapiens
  SIMILAR (108)..(218): 541254mologous to Rattus norvegicus myosin I,accession number X71997,Smith-Waterman Score=103.
gggcagggcgggggcggtggggcctcccgtagccttccctccccctctccttcactgtccttccagcaggcacaggaaggtgaggcaaggtgtttccagccggcaggatggaggacgaggaaggccctgagtatggcaaacctgactttgtgcttttggaccaagtgaccatggaggacttcatgaggaacctgcagctcaagggagagtggggcagggaagacagaagccagtaagcacatcatgcagtacatcgctgctgtcaccaatccaagccagagggctgaggtggagagggtcaaggacgtgctgctcaagtccacctgtgtgctg

SEQ ID NO: 20601 - DNA, 3588 bp, Homo sapiens
  SIMILAR (2412)..(3143): 471254mologous to Rattus norvegicus myosin I,accession number X71997,Smith-Waterman Score=586.
gataccgctccggaatttccgggtcgacgattctcgagccgacccacggagtcttgtctcctgcttgtgggtggaggggagcttccgaaggaggccagcgaagaaccctgcaaagctggggaggacccagcatccggcccctcgcccctggcgagcaaacgggtcagaccgttaggcacagcctccttgtggagcgcacggacaggaagcagggtttatagcacctagagggggaaggagtggcaagtgcggagggcagcccctcccaggactagaacccacttcctactttacaccagcactggaggaggctggtggggcagggcgggggcggaggagcctcccctagccttgcctccccctctccttcactgtccttccagcaggcacaggaaggtgaggcaaggtgtttccagccggcaggatggaggacgaggaaggccctgagtatggcaaacctgactttgtgcttttggaccaagtgaccatggaggacttcgtgaggaacctgcagctcaggttcgagaagggccgcatctacacctacatcggtgaggtgctggtgtccgtgaacccctaccaggagctgcccctgtatgggcctgaggccatcgccaggtaccagggccgtgagctctatgagcggccaccccatctctatgctgtggccaacgccgtctacaaggcaatgaagcaccggtccagggacacctgcatcgtcatctcaggggagagtggggcagggaagacagaagccagtaagcacatcatgcagtacatcgctgctgtcaccaatccaagccagagggctgaggtggagagggtcaaggacgtgctgctcaagtccacctgtgtgctggaggcctttggcaatgcccgcaccaaccgcaatcacaactccagccgctttggcaagtacatggacatcaactttgacttcaagggggacccgatcggaggacacatccacagctacctactggagaagtctcgggtcctcaagcagcacgtgggtgaaagaaacttccacgccttctaccaagccttggacagtgatgagcagagccaccaggcagtgaccgaggccatgagggtcatcggcttcagtcctgaagaggtggagtctgtgcatcgcatcctggctgccatattgcacctgggaaacatcgagtttgtggagacggaggagggtgggctgcagaaggagggcctggcagtggccgaggaggcactggtggaccatgtggctgagctgacggccacaccccgggacctcgtgctccgctccctgctggctcgcacagttgcctcgggaggcagggaactcatagagaagggccacactgcagctgaggccagctatgcccgggatgcctgtgccaaggcagtgtaccagcggctgtttgagtgggtggtgaacaggatcaacagtgtcatggaaccccggggccgggatcctcggcgtgatggcaaggacacagtcattggcgtgctggacatctatggcttcgaggtgtttcccgtcaacagtttcgagcagttctgcatcaactactgcaacgagaagctgcagcagctattcatccagctcatcctgaagcaggaacaggaagagtacgagcgcgagggcatcacctggcagagcgttgagtatttcaacaacgccaccattgtggatctggtggagcggccccaccgtggcatcctggccgtgctggacgaggcctgcagctctgctggcaccatcactgaccgaatcttcctgcagaccctggacatgcaccaccgccatcacctacactacaccagccgccaggtgcccccggctgtcccagtgccaccacagtgggctgacaagaccatggagtttggccgagacttccggatcaagcactatgcaggggacgtcacgtactccgtggaaggcttcatcgagcgagaacagagatttcctcttccaggacttgaagcggatgctgtacaacagcacggaccccactctacgggccatgtggccggacgggcagcaggacatcacagaggtgaccaagcgccccctgacggctggcacactcttcaagaactccatggtggccctggtggagaaccttgcctccaaggagcccttctacgtccgctgcatcaagcccaatgaggacaaggtagctgggaagctggatgagaaccactgtcgccaccaggtcgcatacctggggctgctggagaatgtgagggtccgcagggctggcttcgcttcccgccagccctactctcgattcctgctcaggtgtggggtgggcagggtgggctccatcatctctcccccaggcctgggccacactgccctgtccttgtggtgacaggtacaagatgacctgtgaatacacatggcccaaccaccttgctggggctccgacaaggcagccgtgagcgctctcaaggagcagcacgggctgcagggggacgtggcctttggccacagcaagctgttcatccgctcaccccggacactggtcacactggagcagagccgagcccgcctcatccccatcattgtgctgctattgcagaaggcatggcggggcaccttggcgaggtggcgctgccggaggctgagggctatctacaccatcatgcgctggttccggagacacaaggtgcgggctcacctggctgagctgcagcggcgattccaggctgcaaggcagccgccactctacgggcgtgaccttgtgtggccgctgccccctgctgtgctgcagcccttccaggacacctgccacgcactcttctgcaggtggcgggcccggcagctggtgaagaacatccccccttcagacatgccccagatcaaggccaaggtggccgccatgggggccctgcaagggcttcgtcaggactgggactgccgacgggcctgggccctagactacctgtcctcaggccactgacaatcccacagcatcaagcctgtttgctcagcgactaaagacacttcgggacaaagatggcttcggggctgtgatcgttttcaagcccatgtccgcaaggtgaaccgcttccacaagatcctgaaccgggccctcctgctcacagaccagcacctctacaagcttgaccctgaccgtcagtaccgggtgattgcgggcccgtgccccttgaggcggtgaccgggctgagcgtgaccagcggatgagaccagctggtggtgctgcacgcccgcggccaggacgacctcgtggtgtgcctgcaccgctcccggccgccattggacaaccgcgttggggagctggtgggcgtgctggccgcacactgccaagggggagggccgcaccctgggaggttgcgcgtctccgaactgcatcccacttaagccatcgcggggtccggcgcctcatttccgtggagcccaggccggagcagccagagcccgatttccgctgcgctcgcggctccttcaccctgctttggcccagccgttgagcgcccgcacccgccgcaccccgaggccgccaattgtccgccccgccagcgctgcaaataaaccttttgagtcagcaaaaaaaaaaaaaaaaaaaaaaaaaaaaa

SEQ ID NO: 20602 - DNA, 276 bp, Homo sapiens
  SIMILAR (113)..(3): 971254mologous to Homo sapiens M1 subunit of ribonucleotide reductase,accession number X59543,Smith-Waterman Score=185.
ttcaggcgatctttattggccagaacaatatccaatgttgacttggccaccatgggagagtgtttgccattatgtggatttatgtagttatagaggtcttccatcacataggatcaacaaaatccatattgagtccataacaaagcttctggattcgagatgtaattttgtcaaacatgactcgttcttggcggccatctcgcttgatcacatgcatcgcagctagtggctgaggctctgaaggatccaagactggactgcggctctaaagcgccg

SEQ ID NO: 20603 - DNA, 477 bp, Homo sapiens
  SIMILAR (1)..(264): 941254mologous to Homo sapiens M1 subunit of ribonucleotide reductase,accession number X59543,Smith-Waterman Score=414.
atgtttgacaaaattacatctcgaatccagaagctttgttatggactcaatatggattttgttgatcctgctcagatcaccatgaaagtaatccaaggcttgtacagtggggtcaccacagtggaactagatactttggctgctgaaacagctgcaaccttgactactaagcaccctgactatgctatcttggcagccaggatcgctgtctctaacttgcacaaagaaacaaagaaagtgttcagtgaactacacaaggcactgccacaggtccaggctgccagggaagtttctctgctacttgggccatctgatccatcagatccagtggtgcttgaagtggcagtggcagatagagatgctcattggaggctttggcagacccctgtaagtgaatcacaggacaggcccttaggattttggaccgaagccctgccatcatcccctgtgggtaactactctccttttgagaaatag

SEQ ID NO: 20604 - DNA, 1926 bp, Homo sapiens
  SIMILAR (1745)..(1924): 801254mologous to Homo sapiens putative p150,accession number U93564,Smith-Waterman Score=242.
atgagcataccagaaattcctgatgacctgaagcaactttataaaactgtgtgggaaatctctcagaaaactgttctcaagatggcagctgagagaggtgctttcattgatcaaagccaatctttgaacatccacattgctgagcctaactatggcaaactcactagtatgcacttctacggctggaagcagggtttgaagactgggatgtattatttaaggacaagaccagcggctaatccaatccagttcactctaaataaggagaagctaaaagataaagaaaaggtatcaaaagaggaagaagagaaggagaggaacacagcagccatggaagactgcatcagcacattaccttgcctgctggctttcagtggcttcagccaaatttcactccccactagagtaggaggttgggagaacactgaggtcagggagttggttcccctggctccctctctgccagatgcccatgttctacttccctgggaatatgaagaaagcggaggtcagagtcatgtgcttgctggcactgaagatgaagaaagatgggggaagaggacaccagacaaggaatctgggcagcctctggaagcagctaaaggcaaggaaacaggttctcccctaagtcctccagaaaggaatgcaaatcctgccgacaccttggttttagcccactgttttcttctgagtatgaaagatgacagcattgaaggcatttatgacactctaaagcaatgtgcattgatttctaagtctgctggaggaattggtgttgctgtgagttgtattcgggctactggcagctacattgctgggactaatggcaattccaatggccttgtaccgatgctgagagtatataacaacacagctcgatatgtggatcaaggtgggaacaagagaataaaatacctaggaatccaacttacaagggatgtgaagcacctcttcaaggagaactacaaaccactgctcaatgagataaaagaggacacaaacaaatggaagaacattccatgctcatggataggaaaaatcaatatcgtgaaaatggccatattgcccaagattcagtgccatgcccatcaagctaccaatgaattttttcacagaattggaaaaaactactttaaagttcatatggaaccaaaaaagagcctaagccaaaagaacaaagctggaggcatcatgctacctgacttcaaactatactacaaggctacagtaaccaaaacagcatggtaccggtaccaaaacagagatctagaccaatggagcagaacagagccctcagaaataataccacacatctgtaaccatctgatctttgacaaacctgacaaaaacaagaaatggggaaaggattccctatttaataaatggtgttgggaaaactggctagccatatgtagaaagctgaaactggatcccttccttacaccttatacaaaaattaattcaagatggattaaaaacttacatgttagacctaaaaccatgaaaaccctagaagaaaacctaggcaataccattcaggacataggcatgggcaaggacttcatgtctaaaacaccaaaagcaatggcaacaaaagccaaaatggacaaatggagtctaattaaactaaagagcttctgctcagcagaagaaactaccatcagagtgaacaggcaacctacagaatgggagaaaagttttgcaatatactcatctgacaaagggctaatatccagaatctacaaagaactcaaacaaagttacaagaaaaaaccccatcaaaaagtaggcgaaggatatgaacagacacttctcaaaagaagacatttatgcagccaacagacacatggaaaaatgctcatcgtcactggccatcagagaaatgcaaatcaaaaccgcaatgagataccatctcacaccagttag

SEQ ID NO: 20605 - DNA, 1242 bp, Homo sapiens
  SIMILAR (52)..(921): 641254mologous to Homo sapiens M1 subunit of ribonucleotide reductase,accession number X59543,Smith-Waterman Score=817.
  misc_feature (1)...(1242): n = a,t,c or g
atgaacaagagattcaggagcatggtggatgaagatctgactgtgcctggtcgtcctggggcatttgctatttacctggagccttggcatttagacatctttgaattccttgatttaaagaagaacacaggaaaggaagagcagcgtgccagagaatcttcttcttcgccctttgggattccgggatctctttcatgaaaccggttggcacctaatcaggactcggtctttgatgtgtccaaatggatgctcctggtctggatgagggtttgggggagagggaatttgagaaacctatatgcaagttatgagaaacaagggtcgtgtccgcaaaagttgtaaaagctcagcagctttggtatgccatccattgagtcttcagacgggaaacggggcacccccgtatatgcctcctacaaagattccctgtaatccgnaaagagcaacccagccagaaccccgggaacccatcaaatgccagcaaccctgtgccacagaaatagtggagtacacccagcaaagatgaggttgcctgtttgtaatttgggcttccctgggccctggaatatgtatgttcacattcaggaacacacatacgactttaagaagttggctgaagtcactaaagtcgttgtccgaaacttgaataaaattattgatataaactactatcctgtaccagaggcatgcctatcaaatggacgccatcgccccattggaattggggtacaaggtatggcagatgcttttatcctgatgagatacccttttgagagtgcagaagcccagttactgaataagcagatctttgaaactatttattatggtgctctggaagccagctgtgaccttgccaaggagcagggcccatacgaaacctatgagggctctccagttagcaaaggaagctggggagtgacagtgcctttggtagtactaactgcaaaagccgatttctgccggacagcagtgattcgacacttcacctgtgagtgcattgcactgctgagcatagcttgtggagacctgaccttcaacaactggctggggctggctatgtgtttggtcactgtaatctctgatatggccctgctggggacctcctacacccacatcatctatgctgccttccggatctcttcttggggagcccaagccaaggccttacacacgtgtggctcccacctactggtcatcctctccatctacgtctctggtctttccacttccatcaccttctga

SEQ ID NO: 20606 - DNA, 3188 bp, Homo sapiens
  SIMILAR (1722)..(1102): 571254mologous to Variola major virus homolog of vaccinia virus CDS I4L (ribonucleotide reductase, large subunit); putative,accession number L22579,Smith-Waterman Score=567.
ttttttttttttttttttcacttagaaatgtttatctttatttcagaataacctataggaccatatccagataaaggtcctatcagtacttctcatgagttatcactcagttttgcatctagaggacccaccagtcaaagcagtaaaactaaatctccttatacaatactgaagtcttcagaaaagcagtgctaaatgggtgatgaaacctgacttaaccacttccctgtatggcaagatgacttattttgcattcctaaaagcttctactttgattctcaatatatccgtttttttttctctttttttcaaaagcattattttggggggaaaatcccaatatatgagtttaaaaaaaaaatcattatcatcattaacagtacctttaaatcaattactccttttggcctgcaaacagggtccagcaaagccattaccgcctcgagcaaacccacgtatacctatctatgctcaagaaagtattttggcttactgaaacatggctggtgctcttccaagtctttcctcaggatccacacatcagacattcatctctattctccaaagaggcacaccatgggctgctgtgttcctctccttctcttcttcctcttttgataccttttctttatcttttaggcttctccttatttaggagtgaactgggattgggattaggctgctgggtctcgtcccttaaaataattacatcccaggtttttcaaaaccctggcttccaagccgtagaagtgcatactaggtgaggttggccatagttagggctcagcaatgtggatgttcaaagattgccttttgatcaatggaaagcacctctctcaggctggccatcttgagaacagttttctgagagatttcccacacaggttttataaagttggcttagggtcatcagaaatttctgggtaggctctgaatagaaggcaatgcatgcaataaatctggtttttcatctcttcatgccataggccccggctccggtagatcttttcaataggtgaggatttacaatctgaaattctccctgacaagaccttgcaaagtttagagttgctggtgtaaggttcaatggactcattattcccccaggatctgaggcagtggaagctgtagggcatcgggggcaataagtaaactgtttcttataccatactttgcaatcttctccttgagaaccttccagtcccataggtctgtaggagtaacattccacatatcatactgaagaattcctttgctaactggagagccctcataggtttcgtatgggccctgctccttggcaaggtcacagctggcttccagagcaccataataaatagtttcaaagatctgccttaatccagtaaactgggcttcctgcactcctcaaaagggtacctcatcaggataaaagcatctgccaagaccttgtaacccccaattcccaatgggggcgatggccgtttaatttgaataggccatgccctctggtacaggatagtagtttatatcaataattttattcaagtttcggacaacgactttagtgacttcagccaacttcttaaagtcgtatggtgtggttctgatgtgacataccatattcagggccagggaagccaaattacaaacagcaacctcatctttgctggtgtactccactatttctgtgcacaggttgctgcatttgatggttccccaggttctgctggttgctctttcgattacaggaaatctttgtagagcatatacggggtgcctgtttccgtctgagactcaatgatggcataccaaagctgctgagcttttacaactttgcggacacgaccttgtttctcataacttgcatatagtttctcaaattcctctccccaaacctcatccagaccaggacactcatttggacacatcaaagaccagtcctgattagtctccactcgtttcatgaagagatccggaattcaaaagagcaaagaaaagatttctggccacgctgctcttcctttcctgtgttcttctttaaatcaaggaattcaaagatgtgtaaaatgccaaggctccaaggtaaatagcaaatgcccccaggacggcttgttcccaccttgatccacatatcgagctgtgttgttatatactctcagcatcggtacaaggccattggaattgccattagtcccagcaatgtagctgccagtagcccgaatacaactcacagcaacaccaattccttccagcaggacttagaaatcaatgcacattgctttacgacgtgtcataaatgccttcaatgctgtcatctttcatactcagaagaaaacagctagaaagttgtgggcggttggtaccagcattgaagagagtgggcgaagcatgagtaaaccacctctcagaaagaagattatatgtttcaattgctgcatcaatgtcttctttgtggatcccaacagatactctcatcaacatatgttgtggtctttcagccacttttccattgatcttcaacaaataagaccgctctagcgtcttaaagccgaagtaattgtaagagaaatctcggtcatagataatagcagaattcaggcgatctttattggccagaacaatatcccaatgttgacttggccaccatgggagagtgtttgccattatgtggaatttatgtagttataggaggtcttcccatccacatccactgaaacaactttcctttgtttcctttgtgcaaagtttagagaacagcgaaccctggcctgcccaggaataaccatagtccagggtgccttagtagtccaaggttgccagctgtttcagcagcccaaagtatcctaagttcccactgtggtgacccccactgtacaagccttggattactttcatggtgatctgagcaggatcaaccaaaatccatattgagtccataacaaagcttctggattcgagatgtaattttgtcaaacatgactcgttcttggcggccatctcgcttgatcacatgcatcgcagctagtggctgaggctctgaaggatccaagactggacctgcggctctaaagcgccggcgggatcgagaaggtgacagagtgggaagggttaggttccaggcgctgctcatggggaaatgaactggagttggagccagacagcactttcttcagagcagaggcgcaacaatccaaatccccttcccc

SEQ ID NO: 20607 - DNA, 591 bp, Homo sapiens
  SIMILAR (63)..(284): 1001254mologous to Homo sapiens dihydropyrimidinase related protein-1,accession number D78012,Smith-Waterman Score=375.
gacgctgcgcatccgccgccccgcgccccgcttacctgcccctcggccgggacaatggccagagtgaccgactcctcatcaaaggtggacggatcatcaacgatgaccaatccctttatgctgacgtctacctggaggatggacttatcaaacaaataggagagaacttaatcgttcctggtggagtgaagaccattgaagccaacgggcggatggttattcccggaggtattgatgtcaacacgtacctgcagaagccctcccaagggatgactgcggctgactgagacacgatgccgagacctcaagccctgaggggcagtcccaaaacccttacagtgaagatgtttactcattgcccccacctctggtccacactagaaagaagctcgccccacctccacctgtgagatccgtgaattctcggaatggcaggggaagccttgcactaggttgcagagaagcatcctccacatcctgtgtcagaaaccctggtctacgtggcacttgtaactcaccgtgctgtcttctggtctgtgtgtgttcttcaagccagctctaggcttcaggccgagccaggttcacactcag

SEQ ID NO: 20608 - DNA, 413 bp, Homo sapiens
  SIMILAR (48)..(200): 961254mologous to Homo sapiens hCRMP-1,accession number U17278,Smith-Waterman Score=259.
aggatttgccttcaaaatgaactagggtctgaactctaccttgttttgtccttgccagtggggacttgcaggtcacaggcagcggccactgtccctacagcactgcccagaaggcggtgggcaaggacaactttaccctgatccccgagggtgtcaacgggatagaggagcggatgaccgtcgtctgggacaaggcggtggtaaggctggatctcttctcaggagcattctagaaacactctacctgccctgtgaaagccgatgcattatgcacgctgggttcttaaaagttcccttcttacatggaggcggaagcagatatactaggagggcgcaggagggaatgcataacttgagagatagtagctcaagtccgggagaggcctctgcatttgtggatgtcacccttgtcc

SEQ ID NO: 20609 - DNA, 1176 bp, Homo sapiens
  SIMILAR (982)..(1167): 831254mologous to Gallus gallus CRMP-62,accession number U17277,Smith-Waterman Score=270.
atgcaccagctgctggtgacttatgtttcctgttctggagccggggaaacatgcacgccagcttgtgggtgcttcctggacgtgcagagcctgggcctctttttcccattggtcccggattgccgtcaagaggcttgctgtgatgcctttctctccatcttcacccattcatctgtcaagaatcagttcagtcacccaggcagccagccaggctgtgtccaagatgccggagagacagcagtgaagaaaacggacaaagtccgttgcctccgtggagctcacggtctaagtgaccgactcctcatcaaaggtggacggatcatcaacgatgaccaatccctttatgctgacgtctacctggaggatggacttatcaaccctgcttatgacaacccaggtgtcttagccagcgctggctgccggaatggaatgccacaggctgggtggcttaaacagcagaagtttatttctcatagttctggaggctggaagtcccggatcaagctgccgtcagggttggttcttcctgaggccttcctgaacttcttcctgaggttcttccttggcttgcagacaccaccttctggcttgcagacaccaccttctggctgtcctcacagggccctttctgtgtcacgtgagctgctgtctgttgcagccactgtcacactgcatcgctccttgaccagggccttgcctcgtggccccccgccctggggcccagcacctgtaggtcctggagcaccgattcagggaaagcgcaaacaaatgaatgctggccatcaggtggtgaggatgctcctgtcagcctcagggcacctggatcccgaatgctcttggcaagcccacacgtttggagaggatggcagaaggactggggaagaaaggatttccctaagtcaagttggacattctggtgttattattagtagtggtggtggacattctggggaaccaaggctgtctctgttgtttgcctccagacaaataggagagaacttaatcgttcctggtggagtgaagaccattgaagccaacgggcggatggttattcccggaggtattgatgtcaacacgtacctgcagaagccctcccaggggatgactgcggctgatgacttcttccaagggaccagggcggcactggtgggcgggaccacgatgatcagtgagtga

SEQ ID NO: 20610 - DNA, 777 bp, Homo sapiens
  SIMILAR (583)..(768): 961254mologous to Homo sapiens dihydropyrimidinase related protein-1,accession number D78012,Smith-Waterman Score=309.
atggagaacaaagttgaggttcaagtgtccctggagagggagcttcgtggctttggcccttaccaggggcaatgcccaaatgcagattctcctcagctctatgaagcctttaccttccttaagggcctgggagctgtgatcttggtccatgcagaaaatggagatttgatagctcaggtgagtggcaagaatttccactccttctacctcagtctgattctccttgttgcaaaagcacgtgagctgctgtctgttgcagccactgtcacactgcatcgctccttgaccagggccttgcctcgtggccccccgccctggggcccagcacctgtaggtcctggagcaccgattcagggaaagcgcaaacaaatgaatgctggccatcaggtggtgaggatgctcctgtcagcctcagggcacctggatcccgaatgctcttggcaagcccacacgtttggagaggatggcagaaggactggggaagaaaggatttccctaagtcaagttggacattctggtgttattattagtagtggtggtggacattctggggaaccaaggctgtctctgttgtttgcctccagacaaataggagagaacttaatcgttcctggtggagtgaagaccattgaagccaacgggcggatggttattcccggaggtattgatgtcaacacgtacctgcagaagccctcccaggggatgactgcggctgatgacttcttccaagggaccagggcggtactggtgggcggaaccacgatgatcagtgagtga

SEQ ID NO: 20611 - DNA, 2009 bp, Homo sapiens
  SIMILAR (715)..(1023): 931254mologous to Homo sapiens dihydropyrimidinase related protein-1,accession number D78012,Smith-Waterman Score=494.
atgcaccagctgctggtgacttatgtttcctgttctggagccggggaaacatgcacgccagcttgtgggtgcttcctggacgtgcagagcctgggcctctttttcccattggtcccggattgccgtcaagaggcttgctgtgatgcctttctctccatcttcacccattcatctgtcaagaatcagttcagtcacccaggcagccagccaggctgtgtccaagatgccggagagacagcagtgaagaaaacggacaaagtccgttgcctccgtggagctcacggtctaagtgaccgactcctcatcaaaggtggacggatcatcaacgatgaccaatccctttatgctgacgtctacctggaggatggacttatcaaggccaagatagcttccctcgtccggaagtgccgggagaggaaccgcctgatcacccacctgctgcaggagctgcacagacatgggctggggaacctcctgctctccgagctggcgcagaacatgctcaacgacgtggcactggctgagtacacggccaccttcctggctccgggagtcccagagacaagccaccacctggacgtcaagtctgagatgacggcagctttaagagctccaggttttgtgctgagcatgtttcgtatgctcgctcatctgatcagcgtagtaactctgcagtacaagcaccgttatccccagtgtacagaagaggagactgaggaacaaaagcggatcctggagatgggcatcacgggtcccgagggccatgccctgagcagacctgaagagctggaggccgaggcggtgttccgggccatcaccattgcgggccggatcaactgccctgtgtacatcaccaaggtcatgagcaagagtgcagccgacatcatcgctctggccaggaagaaagggcccctagtttttggagagcccattgccgccagcctggggaccgatggcacccattactggagcaagaactgggccaaggctgcggcgtttcgtgactttccctcccctgagcccggaccctaccacggccgactacttgacctccctactggcctgtggggacttgcaggtcacaggcagcggccactgtccctacagcactgcccagaaggcggtgggcaaggacaactttaccctgatccccgagggtgtcaacggggataaaggagcggatgacggtcgtctgggacaaggcggtggctactggcaaaatggatgagaaccagtttgtcgctgtcaccagcaccaatgcagccaagatctttaacctgtacccaaggaaagggcggattgccgtgggctcggatgccgacgtggtcatctgggaccccgacaagttgaagaccataacagccaaaagtcacaagtcgagcaaatcctgggaagtaacactgaggctgttggtgcaggcggtggagtacaacatcttcgagggtatggagtgccacggctccccactagtggtcatcagccagggcaagatcgtctttgaagacggaaacatcaacgtcaacaagggcatgggccgcttcattccgcggaaggcgttcccggagcacctgtaccagcgcgtcaaaatcaggaataagctccccactccttccccctttctggaaccatctcccaacaaactatctgccccccgaatctttgcctcgctgttgacttctacaagaacatacatgaagatgggcccgttgctgctgccttgtctgggactcaggggtcctttccgggggtgggtttttggattgcaaggggtttccaggggcatgtatgacggtcctgtgtacgaggtaccagctacacccaaatatgcaactcccgctccttcagccaaatcttcgccttctaaacaccagcccccacccatcagaaacctccaccagtccaacttcagcttatcaggtgcccagatagatgacaacaatcccaggcgcaccggccaccgcatcgtggcgccccctggtggccgctccaacatcaccagcctcggttga

SEQ ID NO: 20612 - DNA, 3177 bp, Homo sapiens
  SIMILAR (923)..(1978): 491254mologous to Homo sapiens dihydropyrimidinase related protein-1,accession number D78012,Smith-Waterman Score=609.
  misc_feature (1)...(3177): n = a,t,c or g
tcgccgatccgggcggtgctggcagccggagcggcggcgggcgggccgagcagccggggcagccgcgcgtgggcatccacgggcgccgagcctccgtccgtgtctctatccctcccgggcctttgtcagcgcgcccgctgggagcggggccgagagcgccggttccagtcagacagccccgcaggtcagcggccgggccgagggcgccagagggggccatgtcgtaccagggcaagaagagcatcccgcacatcacgagtgaccgactcctcatcaaaggtggacggattatcaacgatgaccaatccctttatgctgacgtctacctggaggatggacttatcaaacaaataggagagaacttaatcgttcctggtggagtgaagaccattgaagccaacgggcggatggttattcccggaggtattgatgtcaacacgtacctgcagaagccctcccaggggatgactgcggctgatgacttcttccaagggaccagggcggcactggtgggcgggaccacgatgatcattgaccatgttgttcctgaacctgggtccagccttactgacctctttcgagaagtggcacgaagcagctgacaccaaatccctgctgtgattactcccctccacgtggacatcacaagctggtacgatggcgttcgggaggagctggaggtgctggtgcaggacaaaggcgtcaattccttccaagtctacatggcctataaggatgtctaccaaatgtccgacagccagctctatgaagcctttaccttccttaagggcctgggagctgtgatcttggtccatgcagaaaatggagatttgataccttaagaaccaaaagcggatcctggagatgggcatcacgggtcccgagggccatgccctgagcagacctgaagagctggaggggcgaggcggtgttccgggccatcaccattgcgggccggatcaactgccctgtgtacatcaccaaggtcatgagcaagagtgcagccgacatgatggctcgggccaggaggaaagggccgctagtgtttggagagcccattgccgccagcctggggaccgatggcacccattactggagcaaagacttgggcaaagattgcggcgttcgtgacttcccccttccctgagcccggaccctaccacgcccgactactttgacctccctactggccttgtggggacgttgcaggtcacaggcagcggccacttgtccctacagcactgcccagaaggcggtgggcaaggacaactttaccctgatccccgagggtgtcaacgggatagaggagcggatgacggtcgtctgggaaaaagacggtggctactggcaaaatggatgagaaccagtttgtcgctgtcaccagcaccaatgcagccaagatcttttaacctgttacccaagggaaagggcggatttgccgtggggttcgggatgccgacgtggtcatctggggaccccgacaagtttgaaggaccattaacagccaaaagttcacaagttcgggcggtgggagttacaacatctttcggaggggtatgggagttgccaagggtttccccattagttggttcattcagcccaggggcaagattctttttgaagacggaaacatcaacgtccaccaagggcatgggcccgcctcaattcccgcggaaggcgttcccggagcaacctgtaccagcgcgtcaaaatcaggaataaggtttttggattgcaaggggtttccaggggcatgtatgacggtccctgtgtacgaggtaccagctacacccaaatatgcaactcccgctccttcagccaaatcttcgccttctaaacaccagcccccaccccatcaagaaaccctccaccagtccaacttcagcttatcaggtgcccagatagatgacaacaatcccagggcgcaccgggccaccgcatcgtggcgccccctgggtggcccgcctcccaaacatcacccaaccctcggttgaaaacgtggaagccgcggaaggaacctaaccctgaaaggaatcctggggaaaccatgtcccatccccttttccctgtcaagtgtttttgaaaccccacagttttagttggtgctgatggagggagggggaagtcgaaggatgctctttcccttttctgtttagggaagaagtggtacttagtgtgggtgttgtttgcttgggaaattccttggccccacagttgttgtttcatgctgaaatccaccttcgggagcatgggtgtttttcaattcccccttcctagttgaaccacaggtttttaggcattgtctttgtttctgttcccttccacttctaactccactgggctccatgattctctagacgacggttccctttcctccctgtagatgttctaggatagttgatgcatgttactaaattacgcatgcacgactgcgagtgcggcctgagcggacctcaccacggactgactgacacacgatgcagagacctcaagccctgaggggcagtcccaaaacccttacagtgaagatgtttactcattgccccccacctctggtccaaaactagaaagaagctcgccccacctcccacctgtgagaataccgtgaaattctcggaaatggccaggggaaagccttgcaacctaggttggcaagaagaaagcatccctcccacatccctgtggtcaagaaacccctggtcctcccgtgggcacttgtaaactcacccgtgctgtctttcttggtcttgtgttgtgttctttcaagcccagctcttaggctttcaggccgaggccagggtttcacactcaggaaaggagggtcttccccattccccatttcgggggcttgacggatggggggggctgatggcttgccccttgggtggcctgagttctggtccctttgaggcagttgacggggcagtcagatttttaaagaagttttgtacaaagttttcctttgtaatcactcccatttttacttaacaaccaacttgttgtggctcttatttctgaattcaaagcttgtgaaaaaataataaagaaaatgaactgcccacnnnnnnnnnnnnnnnnnncttcggggggcgtttttagggtaccctgggggggccaagaattaaccgtgcgcgggaggttagaattttttccctttaggggggggttttaaaaacg

SEQ ID NO: 20613 - DNA, 1993 bp, Homo sapiens
  SIMILAR (437)..(1030): 471254mologous to Homo sapiens alpha-CP1,accession number U24223,Smith-Waterman Score=271.
  misc_feature (1)...(1993): n = a,t,c or g
gctcgccccctccgccgccgccgcccgcccctgcgactacgctgcggcctcccgcccgctcccgctcgctcccgcggccctcgctcgcctcgcgccggcagttttgggcctacacctcccctccccccgccagccgccaaagacttgaccacgtaacgagcccaactcccccgtaacgccgcccgccgctcgccatggatgccggtgtgactgaaagtggactaaatgtgactctcaccattcggcttcttatgcacggaaaggaagtaggaagcatcattgggaagaaaggggagtcggttaagaggttccgcgaggagagtggcgcgcggatcaacatctcggaggggaattgtccggagagaatcatcactctgaccggccccaccaatgccatctttaaggctttcgctatgatcatcgacaagctggaggaaagaatatcaacagctccatgaccaacagtaccgcggccagcaggcccccggtcaccctgaggctggtggtgccggccacccagtgcggctccctgattgggaaagagcgggtgtaagaacaaagagatccgcgagagtaccggggcgcaggttcaaggttggcgggggatatgcctgcccaactccaccgagccgggccatcaccatcgcttggcgtgccgaagtcttgtcaccgagtgtgtcaagcaagattttgcctgggtcatgctggagacgctcttcccagttttccgcaagggaggagttcatggaccatttccgttaccagcccatgccggccagcttccccagttcatcttgcgccgggcgggccaagattcggtgcagcgacgctgggggctaacccccattgccaacccattgacctgggaagggaccacctcttagatgcctacttcgatttcaagggacaacacaccattttttccgttcgattttgggccaagcttgaaccagggtgggcaagacaacagttttcattttttgccattgattgcacggcggggaaccggatttcggccggaattgactccaagctctcccagagggtgaaagggtaattgggcaaggttgggatgcatctactcaaaccacccatgcaactcaccatttccaaataacttaatttggctggcataaattcccgggggcgccaaaggcgccaaccattaatgaggatccgccaagatgtcccgggggcccaggatcaaaatttgcccaaccccagtggaaaggctccctctggttagggcaggtttactattcactgggctcttgcttgccagttatttagttttgggcccagtattctaattcaatgcccagggctttcctctgagaagggcatggggtgcagctaggaacagtgtaggttccctcaataacccctttctgctgttctcccatgatccaactgtgtagggttccctccaattaaccccctttcctgctgttcttccccccccatgatccaaactgtgtaattttctgggtcagtgatcccccaggtttttaaataatttgtaaagtgttcaggtttctaacacaacttttatcatcccgctaaagaatttaaaaaatcacattcttctgttccagctgttaatgctggggatcccatattttagtttttataagccttttcccctgtttttaagttttgttttggggtttttttgggctcatggaattttatttctgttttgtcgattaagaaatggtaagagtggaatgcttaataaattttcagmtttagattctgctaatgctcaagaatttaagcaattaaaaaacgggattggtttaaaaaatgctccagaaacagaacaaaaaaaaggactgggggggggccttttaaaagatcccttggggggcccaattttaccgggggtggggaagaaaatattttctcctttttggggggggtttttaaaagtnnnnnnnnnnccggtttttaaaaaggctgggagggaaaaaccgttccctggggatttttg

SEQ ID NO: 20614 - DNA, 435 bp, Homo sapiens
  SIMILAR (126)..(266): 931254mologous to Homo sapiens Human NSPLP protein B,accession number W53948,Smith-Waterman Score=227.
tttcgtctcggagcaggcggagtaaagggacttgagcgagccagttgccggattattctatttcccctccctctctcccgccccgtatctcttttcacccttctcccaccctcgctcgcgtagccatggcggagccgtcggaggccactcagtcccattccatctcctcgtcgtccttcggagccgagccgtccgcgcccggcggcggcgggagcccaggagcctgccccgccctggggacgaagagctgcagctcctcctgtgcggattcctttgattcttcctcttcctctcagcctgtatctctattttcgacctcacaagtgcacgatctgattttctggagagatgtgaagaagactgggtttgtctttggcaccacgctgatcatgctgctttccctggcagctttcagtgtcatcagtgtggtttctc

SEQ ID NO: 20615 - DNA, 4135 bp, Homo sapiens
  SIMILAR (2734)..(3915): 991254mologous to Homo sapiens transmembrane receptor,accession number M97675,Smith-Waterman Score=2108.
aaattcccgggtcgacgatttcgtctgtcctcggagcaggcggagtaaaagggacttgatcgagttcagttgccggattattctatttcccctcccatctctcccgccccgtatctcttttcacccttctcccaccctcgctcgcgtacgcattggcggagccgtccggcgtccacatcagtcccattccatctcctcgtcgtccttcggagccagagccagtcccgcgcccggctggcgagcgggagcctcaggaagcctgccccggccctggggacagaagagctgcagctccgtcctgtgcggtgcacgatcctgatttttctggagagatgtgaagaaccactgggcttgtctttgggcaccacgctgatcatgctgctttccctggcaagctttcagtgtcatcagtgtggatttcttacctcaatcctgggcttcttctctctggcaccatcagcttcaggaatctacaagttcgtcatccaagctgtacagaagtcagaagaaaggccatccatttcaaaagcctaactggaacgtagacattactctgtcctcaaaaagcttttccataaataacatgaatgctgccattttgcacatcaacatgttcctgaaactcattattcgcctctttctggtagaaagatctggttgactccttgaagctggctgtcttcatgtggctgatgacctatgttggtgctgtttttaacggaatcacccttctaattcttgctgaactgctcattttcagtgtcccgattgttctatgaaggaagtacaagacccagattgattcactatgttgggcatcgcccgaggatcagaccaagtcaattgttggaaaagatcccaagcaaaactcccctgggaatcgccaaaaaaaagggcaggaataagttacatggggaaaccaggaaatggcaacagttactagaacaccatttaattagttattaacgtcgttacttgtactatgaaggaaaatactcagtgtcagcttgagcctgcattccaagcttttttttttaatttggtgttttctcccatcctttccctttaaccctcagtatcaaggcacaaaaattgatgggactgataaaagacctattcttagacctcagaagaagaaagaatcaaatttcataggataagtcaatacctttaatgggtgggtagagcctttacctggtagcttgaaaggggaaaagattggaggttaagagagaaaatgaaaggaacacctctgggtcccttctgtccagtttttcaggcactagtcttactcaggctatccattataggttttgccccttaaggaagtcatgattaacttatggaaaaaattatttgggggacagggagtgtggataccttccttgggtttttttttggcagccctcaaatccctatcttcctggccccacaattgtggagcagcctacccctggatactccttgttctttaatggatttaacctatcaaccttggataaaataaccttaatagggtgatagtgataattcctgattccaagaatggccatctggataaaaaagaataggaaatgggaaagtggggacttgaggagggagttcagccaggcatgcctgcggttgggcggtgcactcccctctggccactattccccaggggaagggaaaggctccgccgatttggggaaagttggtttcttacgtcactggacaccggttctgagcattagtttgagaactcgttcccgaatgtgctttcctccctctcccctgcccacctcaagttttaataaaataaggttgtacgttttcttactatgaaataaatgtcttgtaactgctgtgcactgctgtaaacttgctagagaaaataaataacctggsatgtgggctcctcagttattgagtttttgtgatcctatctcagtctgggggggaacattctcaagaggtgaaatacagaaagcctttttttcttgatcttttcccgagattcaaatctccgadttcccatttgggggcaagttttttytcttcaccttcaatatgagaattcagcgaacttgaaagaaaaatcatctgtgagttccttcaaggttctcacttcataggtcatgaatcccttcagaagggaattatggcactgggcgagtttaaaagtaaggggctatggatatttggatgggtccccaaagtacgggcagctgccaaaagtagttgggaggggaattgtctacgtgtctttggggaaaattaggttaggggatttgggatgggggtaaaagggtacccctttgcccttacttcccatcttaatttttcttaggcccccttttgagtgtttttaactgggtttcatgtcctaataaggaagtgcattctcccatccctcatcctctggcccctccccaaggaagtcagtgattgtctttttgggcttcccctccaaaggaccttctgcagtggaagtgccacatccagttcttttcttttgttgctgctgtgtttagataattgaagagatctttgtgccacacaggattttttttttttttaagaaaaacctatagatgaaaaattactaatgaaactgtgtgtacgtgtctgtgcgtgcaacataaaaatacagtagcacctaaggagcttgaatcttggttcctgtaaaatttcaaattgatgtggtattaataaaaaaaaaaaaaaaaaactcgctcgtgccgaattcggcacgaggaacaacctgtgtgcatgctttttgagtatattaatcagggggatctccatgagttcctcatcatgagatccccacactctgatgttggctgcagcagtgatgaagatgggactgtgaaatccagcctggaccacggagattttctgcacattgcaattcagattgcagctggcatggaatacctgtctagtcacttctttgtccacaaggaccttgcagctcgcaatattttaatcggagagcaacttcatgtaaagatttcagacttggggctttccagagaaatttactccgctgattactacagggtccagagtaagtccttgctgcccattcgctggatgccccctgaagccatcatgtatggcaaattctcttctgattcagatatctggtcctttggggttgtcttgtgggagattttcagttttggactccagccatattatggattcagtaaccaggaagtgattgagatggtgagaaaacggcagctcttaccatgctctgaagactgcccacccagaatgtacagcctcatgacagagtgctggaatgagattccttctaggagaccaagatttaaagatattcacgtccggcttcggtcctgggagggactctcaagtcacacaagctctactactccttcagggggaaatgccaccacacagacaacctccctcagtgccagcccagtgagtaatctcagtaaccccagatatcctaattacatgttcccgagccagggtattacaccacagggccagattgctggtttcattggcccgccaatacctcagaaccagcgattcattcccatcaatggatacccaatacctcctggatatgcagcgtttccagctgcccactaccagccaacaggtcctcccagagtgattcagcactgcccacctcccaagagtcggtccccaagcagtgccagtgggtcgactagcactggccatgtgactagcttgccctcatcaggatccaatcaggaagcaaatattcctttactaccacacatgtcaattccaaatcatcctggtggaatgggtatcaccgtttttggcaacaaatctcaaaaaccctacaaaattgactcaaagcaagcatctttactaggagacgccaatattcatggacacaccgaatctatgatttctgcagaactgtaaaatgcacaacttttgtaaatgtggtatacaggacaaactagacggccgtagaaaagatttatattcaaatgtttttattaaagtaaggttctcatttagcagacatcgcaacaagtaccttctgtgaagtttcactgtgtcttaccaagcaggacagacactcggccagaaaaaaaaaaaaaaaaaaaaactcgagggggggcccgtacccgatcgc

SEQ ID NO: 20616 - DNA, 1104 bp, Homo sapiens
  SIMILAR (70)..(789): 371254mologous to Arabidopsis thaliana putative protein,accession number AL365234,Smith-Waterman Score=374.
atgagcgaaagcttcctgaagcccttgccagaagtagatgctggtgccatccttcttgtacagcctgcagaactaattcaagaggaacgtgatgagagacataaaacaaaaggcagattatttcgatttgaacctcctcagtcagattctgatggtcagcgtcgttctattcttgatgattacgcacctggctcacatgatgtaggagatccaagcactactaatttataccttggaaacattaatccacagatgaatgaagaaatgctgtgccaagaatttggaagatttggaccgttagccagtgtgaaaatcatgtggcctagaactgatgaagaaagagccagagagagaaattgcggctttgtggcctttatgaatagaagagatgctgaaagagctttaaaaaatttgaatggaaaaatgattatgtcttttgaaatgaagttaggttggggtaaagctgtacctattcctccacatccaatatacattccgccttctatgatggaacatacgcttcccccacctccatccggactgccttttaatgcgcagcctagagagcggttaaaaaaccctaatgctcctatgttaccgccacctaaaaacaaagaggattttgagaagactctgtcgcaagccatagtcaaagtggttatcccaacagaaaggaatttgctcgccctgatacatcgaatgatagagtttgttgtacgtgaagggccaatgtttgaagctatgattatgaacagagaaatcaacaatcctatgttcagtaatttcattactcagggtgaggatgctccagaagaaaaatttgaagctagcagtgattggtttttgaggtttaaggaaagaagccatcttcataatataaaagttcaaggtgaagcagcaagtgctgatgtagatgctgtagcaaattatccagaagatctgaggtcattgatgaaggtggctacactaaatcacattgtcagtgtagacaaagcagccttttattctaccaccaccctaaccttcagctaccaccaccctgatcagttggccatcaacattgaggcaaaaccttccaccagcaaaaatgctatgactcactga

SEQ ID NO: 20617 - DNA, 531 bp, Homo sapiens
  SIMILAR (75)..(215): 381254mologous to Arabidopsis thaliana extensin-like protein,accession number AL035656,Smith-Waterman Score=91.
ctttaaaaaatttgaatggaaaaatgattatgtcttttgaaatgaagttaggttggggtaaagctgtacctattcctccacatccaatatacattccgccttctatgatggaacatacgcttcccccacctcaatccggactgccttttaatgcgcagcctagagagcggttaaaaaaccctaatgctcctatgttaccgccacctaaaaacaaagaggattttgagaaggtaatttaaaaaatggacataaggccgcatctaatttgtaaatactaaagctgtggtagtatttcttttcaacaattttatagaaaatgtgtgtgtaattctgtttggcaacttttaaagaaataagtagatgtgttccctgccttagcccatggaaaccctatatttgaaatactaggtcatatttttatttgtggctaccattccttttttgaccacttgttaagttttttttcctttgtccagtgttgtatccagatttgcttaagtgtattaactaaatttactttgttctgagaaa

SEQ ID NO: 20618 - DNA, 1440 bp, Homo sapiens
  SIMILAR (1)..(900): 981254mologous to Cloning vector pZC320 SopA,accession number U26464,Smith-Waterman Score=1556.
atgaaactcatggaaacacttaaccagtgcataaacgctggtcatgaaatgacgaaggctatcgccattgcacagtttaatgatgacagcccggaagcgaggaaaataacccggcgctggagaataggtgaagcagcggatttagttggggtttcttctcaggctatcagagatgccgagaaagcagggcgactaccgcacccggatatggaaattcgaggacgggttgagcaacgtgttggttatacaattgaacaaattaatcatatgcgtgatgtgtttggtacgcgattgcgacgtgctgaagacgtatttccaccggtgatcggggttgctgcccataaaggtggcgtttacaaaacctcagtttctgttcatcttgctcaggatctggctctgaaggggctacgtgttttgctcgtggaaggtaacgacccccagggaacagcctcaatgtatcacggatgggtaccagatcttcatattcatgcagaagacactctcctgcctttctatcttggggaaaaggacgatgtcacttatgcaataaagcccacttgctggccggggcttgacattattccttcctgtctggctctgcaccgtattgaaactgagttaatgggcaaatttgatgaaggtaaactgcccaccgatccacacctgatgctccgactggccattgaaactgttgctcatgactatgatgtcatagttattgacagcgcgcctaacctgggtatcggcacgattaatgtcgtatgtgctgctgatgtgctgattgttcccacgcctgctgagttgtttgactacacctccgcactgcagtttttcgatatgcttcgtgatctgctcaagaacgttgatcttaaagggttcgagcctgatctcaaagttatgaagtttcaggatgaattggaatctgggaaaagacctaaaaaaccaggccagagttttcaggagcaagtagaacactacagagataaacttcttcaacgagagaaagagaaagagttagaaagagaacgagaaagagacaagaaagataaagaaaaattggaatctcgctccaaagacaagaaggaaaaagatgagtgtactccgacaaggaaggaaaggaagaggcgacacagtacatcccccagcccatctcgcagtagcagtggtagacgagtgaaatccccatcaccaaaatcggagcgatcagagcgttcagaaaagatctcattaaagagagctcacggtccaggtcatcttcacaaagattctcctaggagatgttaggcaaaaaagccaaaagttcaccatctggtttcaaggacacctaaaaggtctaggcgatcacggtctagatctcctaaaaaatcaggaaagaagtccagatcccagtccagatctccacacaggtctcataaaaagtcaaagaaaaacaaacactga

SEQ ID NO: 20619 - DNA, 8019 bp, Homo sapiens
  SIMILAR (1307)..(2230): 391254mologous to Arabidopsis thaliana putative protein,accession number AL365234,Smith-Waterman Score=519.
  misc_feature (1)...(8019): n = a,t,c or g
atggggcagggcccagaaaaaacaccgttaagttctcattccagtccacggaactggcagcctggcccccagacttcaggtcatccctggcttgaaggagcctttctgcttctggccaccattcagagcacccaggccgttcatgctgaggggcacctgcaggctcatgccaggctgcccttagccccacttcagcctcccttccatgatcgtcaacacccaaagtccagaaggggccgagccagcatctttgcagcaactgctccaaatgggctgctgctgccatcatatatgtggaccctaagttgtggcaaagtgggcactgccaaaggaattcaagaggaacgtgatgagagacataaaacaaaaggcagattaagtcgatttgaacctcctcagtcagattctgatggtcagcgtcgttctactaataaaactgagcaaaggcagtctctgacttatgaaaagattgtgatacaaagtaaatgttcacaggaccagcaagttttagagaggcatgcaactgcccagaataaagactacatttcccaccctcccttgaaactggatgtggtccacgtccaagttctggctagtgagaagaaaacagcgttatgcgtatattctcaggtctgtgtccttaaagggtgtgtccttcctccttgtcttttccgcttcctgctgaccggaatgtggatgagttcattcctacgaagacagccactctctaggagagccccgaccaggaaagaagttagtttcaggtgcatccgactgggggagacacagaggaggcctctcaacaaaacagatggatgcatctggaccctcagatagtgatatgccaagtcggacacgacctaagagcccaagaaaacataattataggaatgaaagtgcccgtgaaagcctttgtgattctcctcatcagaatctctcaagacctcttctggaaaacaaacttaaagcattcagtattggaaaaatgagtacagctaagcgaactttaagtaaaaaggaacaggaagaattaaagaaaaaggaggatgaaaaggcagctgctgagatttatgaggagtttcttgctgcttttgaaggaagtgatggtaataaagtgaaaacatttgtgcgagggggtgttgttaatgcagctaaagaagaacatgaaacagatgaaaaaagaggtaaaatctataagccatcttcaagatttgcagatcaaaaaaatcctccaaatcagtcttccaatgaaagaccaccatctcttcttgtgatagaaaccaaaaaacctccacttaaaaaaggagagaaagaaaagaaaaaaagcaatttggaactcttcaaagaagaattaaagcaaattcaagaggaacgtgatgagagacataaaacaaaaggcagattaagtcgatttgaacctcctcagtcagattctgatggtcagcgtcgttctatggacgcgccttcaagaagaaatagatcatctggtgttcttgatgattacgcacctggctcacatgatgtaggagatccaagcactactaatttataccttggaaacattaatccacagatgaatgaagaaatgctgtgccaagaatttggaagatttggaccgttagccagtgtgaaaatcatgtggcctagaactgatgaagaaagagccagagagagaaattgcggctttgtggcctttatgaatagaagagatgctgaaagagctttaaaaaatttgaatggaaaaatgattatgtcttttgaaatgaagttaggttggggtaaagctgtacctattcctccacatccaatatacattccgccttctatgatggaacatacgcttcccccacctccatccggactgccttttaatgcgcagcctagagagcggttaaaaaaccctaatgctcctatgttaccgccacctaaaaacaaagaggattttgagaagactctgtcgcaagccatagtcaaagtggttatcccaacagaaaggaatttgctcgccctgatacatcgaatgatagagtttgttgtacgtgaagggccaatgtttgaagctatgattatgaacagagaaatcaacaatcctatgttcaggttcttatttgaaaaccagacaccagcccatgtttactataggtggaagctttattctattctgcagggagattctccaactaaatggcggacggaagattttcgtatgttcaaaaatggatctttttgggaggccaccaccattaaatccgtacttgcatggaatgtcagaagagcaagaaacagaagccttttgtagaggaacctagtaaaaagggagcacttaaggaagaacagagggattaaattggaagaaatcttgcggggatttaactccaagggaagaatgattattggaggttgcaatggttttcttgtcttnaaataattctgaagcttgcttgaaggaattagtggattgcattacctgagtcgttgtccatcttaaagacaccccttcctaaaaagattgccagattatatttggtttctgatgttttgtacaactcttcaaccaaaggtggttaatgcttcatattatagaaaattttttgaaacaaagttatgtcagatattttcagacctcaatgccacctattggtccaattcaagggccatttacaatctgaaagctttaagcaacgggtaatgacttgcttcagagcatgggaagattgggcaatttatccagaaccatttttgatcaaactacaaaatattttcttaggacttgtaaatattattgaagaaaaggaaacagaggatgttccagatgaccttgatggtgcccccatcgaggaagagcttgatggtgcacctctggaagatgtagatggaattcctattgatgctactcccatcgatgatcttgatggagtccctataaaaagtcttgatgatgatcttgatggagtgcctttggatgcaactgaagactcaaaaaagaatgagcctatatttaaagttgcccccatcaaaatgggaagctgtggatgaatctgaattggaagcacaggctgttacaacttctaaatgggaattattttgaccagcatgaagaatcagaagaagaagaaaatcaaaatcaagaagaagaaagtgaagatgaagaagatactcaaagttccaaatctgaagaacatcatttgtactctaatccaatcaaagaagaaatgactgagtctaagttctctaagtactctgaaatgagtgaggaaaaacgagccaaacttcgtgaaattgagctcaaagttatgaagtttcaggatgaattggaatctgggaaaagacctaaaaaaccaggccagagttttcaggagcaagtagaacactacagagataaacttcttcaacgagagaaagagaaagagttagaaagagaacgagaaagagacaagaaagataaagaaaaattggaatctcgctccaaagacaagaaggaaaaagatgagtgtactccgacaaggaacggaaacggaagaggcgacacagtacatcccccagcccatcttcgcagtagcagtggtagaccgagtgaaatccccatcaccaaaatccggagccgatcagagcgttcagaaaggatctcataagaggagctcaccggtccaggtcatcttacaaaggattcttcctagagatgttagccaaaaaagccaaaggatcaccatctggttcaaggacacctaaaaggtctaggcgattcacggtcttagatctccttaaaaaattcagggaaagaagttccagatcccagttccaggttttccacacaggtctccataaaaagttcaaaggaaaaacaaacactggccgtaaattttttaagatgctggtcacttattggaaatgcgatttgtttttgtgccctgaacggtctgtttttttaaaaaaacaaaaaatccaaatgaaagagcattccctggggttttttgtttgtttgtgtatgcatgtgtaaactcatgagcaactgcatctgtagatctgtcattgttttatattgtgtaaattactttcattgtggctatttctcaagatgaaatttttattgttctaatggatttcgatcagaaatgtgtataatggatctgctgacagtagtagtattttgttttaggatgttgtgacttagcaaaaataatacagatgtcttccccccttttgtagctttgacaatttgaattagatttcaaataaaatctgaacagaaaactataatgttgtttttttgccccaccggtgatattaagtcccttaaagtcctactgagtttcacactactgttgtgcttcttatacctgatgcactttataagccccagtgttcaagtagcttaagttttatatttactaagatgactatccaaattaagggacctgagactccctatttggtggttggctaacccatttgctttggataagtttctctggggtaatactaataccccggttatccaaagactaggtagatatggcatggcgttttgttagtggaatgcctggctaaaacatttttttcacagaagcaatatgatttccgatacatccaacccatgttctgagcaactacttacttttagggggaaattaaatatcttttcatttcctcttctattatgaaagaagtttatttgtaaaacaaattttctaacaaggtttggccatagaattctcttgtatgattggttgaccttttataaccttctgtaggctatctttcaaacactggcatcagaatattttttataagtttgtgtttaaacagcttagttggtccccccccccactcccaagagacttgggtttagttatagctttaagtaaaatttaaaaataaaatgtttttcaggaaacttcgtatctaatggtttgtaaattcaaggtgcaaaaagttgatttaaaccatttgcagagttgaactctattatgaaaataaatttgctacggtatgaggaagaaataaaacttgtgtaatgttggtcataatactgctataaatataataaagggttatgtagaattgaactgacactattatttgtgaatcttgatttcagttttttatgtaggcacttcatacactggtttgatgggttttttttttcctccctaaaagagaaagtagaaaactattctaacaatggattattttgatttagcttgctttttaaaaaaatcttttcaacttgttttacttaatcttgcctagtcacaaaataagatgtgcacccatggtttggagagttcctatattagctgagcagtgagatacactatttccaaacggtgcacacctacagtagctttggaaatgagccaatcactgttttacttaatggttcttatcagcatgcaaatattgcttgaaagttatttccttattcactgttttgttagtccattttgttaggaaacattaattcctaaaaatttgttcagaataattaaaagtgaacatttggtgctgatactcaaaaacctacaaatgtagccatttaaaaagtaacatgtttttctcccctgctcattgcctgggagaatggaattttatataactacctttctttgcaaaaataacggtcgtgtcgagttggtggtgattttggcattccatcttgcactggtttctagtataggcttagaaataattggtcaggtaataatctttccagtcaagttgcaagggatgcttatttctcttcaaaaaaagacatcctgcgggattgagtagaaaattttaggtcagttttgggtgcttatttgtaatatttttcctactacattggagtttagcagttctttttttctggatccagatacaagtgtcatggtttatcttacagtgggtgaaactgactttcttttggttgggtgggtgaggatttcttaggcctgatagaatatatattctgtgaagtttgttaatgtacatattagattgtattggatttttttttcttgaattgcaaatggtattattagataggttatttccagttttacttcatgacaaattacctagagtaaacctacttaatactccaatggattctatgaaagtttaatgggatcagaaattggtgacttataagggggaagatattctaccatatttttataatagcttattattcatgtttcttgtctgaagggacacttcaagttacagagcaaaatttctatagggttgacttaggaatgtttcataaggcatgggtcttccagttggcagggaaagatccatgttctatctgtggacacttactgtcctctaccacagctacgtgccagagttgttttccacagttcttataaagggcatgacttaggctctttaccctccaacttaatgtttatacacagggattgtttactaggttaatgacatttaactcccctctcttctgtaggtgagagaaaataagtaagtcttgatctgtttcttaccaaagagagacagacctatgatggaaaatgatcacgtctctgaattttttctttaacgttatagttccttattacagatagtaagcatatgggaatttctgagctataacatgttgagaagttagaaattaaaactaacacaacaaaaggcgctgaatcaaaagatctttgcttttatttggctcagaatgtttttggcttttctgctaaagatggcagaaattactctacacagacctgatttttctttattgcagaccattcttgtgggcttaccctgagacttttatcccaattagtgaatcttggagggaatacttgcttatttatgacttaagtatttccccccaaactttaatattcttgagcacttgaaaatacttttgagaaattttaactgtgattaaatttaggtttattagaaatattctgtacacatttgcctccatggtggtgtaagttctgaaaaattatatgaccgtgacaatagtttatcatcatcattattgttattcaaaataagggtaaataaatctctgtattgccaaagtgacttaaactgttctgatgaccacacagtgtgatttctttagcagagaaagttggttttaaaaataaatagtaccacttttctaagactgtacagtttacaaataaggtttttttctttgttgttttcctcttctattaagttttagtgaaaagcctaattacagaaaattgtgcagatactagtgaagatactagtataagtttaaaaggaacacgtgactgtaaaatctcacatttaacaaagtgcctggaactcttccatatttccacacgcatgttttagaatagattttagggagtgtttaattcattatccttttgacttaaaatttttgttaccaacttcctaggacttagataatatataaataagtacaaatcccaggggaagtgttgtgatgcctagactaaaaggtgggaatgtgctgctgttccgtgagccttgttccattgttgaaaatttgatgccctcagtgtttattcagtacccacctcatggagcttcaatgtaaaatgggattatatgtataattggtaatttggtatagttttgtagattgtagattaaatgcactccatccatgtccacatggtaattggtgcttgggagtatttggtggttttattccttttacttccaacggggttcttgtctgttacatctctggtgatttgaaatatcaggaaagacagtttgtcagaaatgagaataatatagttgaaatcagttgggctaaaatattctacagcaagacaatttcttttgggtgaactgattctataatttacttacttttaatgtaaggattagatttattgttgagctgctttccagatcagactgtcactttatagtttttctatctcacagattctatagttgcacccaccggttgtgaaatttcccttttgttgtttttgacttttaattaataaaagtacattgttttcatagcaaacttaaaaaaaaaaaaaaaaa

SEQ ID NO: 20620 - DNA, 2846 bp, Homo sapiens
  SIMILAR (157)..(2160): 591254mologous to Homo sapiens P1 Cdc46,accession number X74795,Smith-Waterman Score=1622.
ccaatcgctggccgcgaggctccggcgaaccaatgggagcgcagcggctgcggcgtccgaacaccgcctcttgtttttcccgcgaaactcggcggctgagcgtggaggttcttgtctcccctggtttgtgaagtgcggaaaaccagaggcgcagtcatgtcgggattcgacgatcctggcattttctacagcgacagcttcgggggcgacgcccaggccgacgaggggcaggcccgcaaatcgcagctgcagaggcgcttcaaggagttcctgcggcagtaccgagtgggcaccgaccgcacgggcttcaccttcaaatacaggtgcggctcctgcggggccgggggctcgagttccagtgtggccgctcacacgcgtctaccagcctgcagctttgatgaggacctggccgactacttgtacaagcagccagccgagcacctgcagctggtgagtgggaccccatccctgagcttcccagggctgctctgccccagttactaatagcctgtgcccttccaggacatccaggtcatgctcaagtcggacgccagcccttccagcattcgtagcctgaaggtgggtcggagggcagtggctgctgcatggtgcagagggctttggatgcagccagacctgagtgctaaggccacccgcatctctatccagtgccgcagctgccgcaacaccctcaccaacattgccatgcgccctggcctcgagggctatgccctgcccaggaagtgcaacacgtgagtctgtggcccagagggactgtgggaggtgacctgagtgaagatcagaaaggatgagaacaaggtggacttccagaccctgaagctgcaggagctgcctgatgcagtcccccacggggagatgcccagacacatgcagctctactgcgacaggtgaggcagacgggctgggaggtgggcatctacgacggtggatgtcccagctgtggccctaacccgatttggcctgactaccagcaggggccgtgacagggtgggcgtgggcatccgaagctcctacatccgtgtcctgggcatccaggtggacacagatggctctggtgagttggctttggggtcctggcttagccctgctaaaaggctgtgcttgcatacttctggtaacagaaatgtctatgaggtcatctccaagagcatcgccccctccatctttgggggcacagacatgaagaaggccattgcctgcctgctctttgggggctcccgaaagaggtaggggcttgagttcccttgggtttggggaggcggctgatgatggggctcacagtaggataattacaagtcccagcttctgaagtttgtggagaagtgttctcccattggggtgagtggcctgggatacctttgccaccttggcttgcagggaggaaggctgcagggcagggcctctgcccggaatttcatcatggagggcggagccatggtcctggccgatggtggggtcgtctgtattgacgagtttgacaaggtgagtctgatgaggtgggtagtagccaaaaggtgggtggcaccagggtatgtgacttcctgtgctctgagtggccctccatggagagcccagcctgcagcagcccagcgtggcccaaccgtcctcaggctgcgctgggatgagacgaagggggaggacaacattgacttcatgcccaccatcttgtcgcgcttcgacatgatcttcatcgtcaaggatgagcacaatgaggagagggatgtggtacgtccaggggcagggctggtggccatgggacctgcctccaggcaggcttgtgattgtgtgggaaagattgacctggccaagctgaagaagtttattgcctactgccgagtgtgagtcctggacgcaggcccacgggggtgaggttgcccagcttccctgggtgggagagaacccagtagcggggcccgtcagcacgagagggacagtgaccgccgctccagcatccccatcactgtgcggtgagcaggcgggcagggctgggccatggcagatggggcttgctttacacagcagggtgtgcttggcgaggcagatgtggaggaggccctgcggctcttccaagtgtccacgttggatgctgccttgtccggtaccctgtcaggtgagcagatgcaggggccatggtctcaattgatctgggttccctggctcggagctctgtgggcaggagccaggtgagcagtcagtcctgcccatgttagaaatgagacagctgacactcgaaggggcctttccctggtggatgatggcagggccaggtgtgttggaaaaggaggacgtgctctttcccatggagtgagtgggcatggcctctgcaaggaggtgatgtctctgctgcgctgggccccgggctgctttttgaatgagacaggtgtgttcctgcctctgtgactttgtgcttggcctggagtgtccccacatgtgccatatcctgtctcccgctttgccattggctcccaggtgtctgagcacagcatcatcaaggacttcaccaagcaggtgagcctgccttggagtgggggtgtgagccggcacggggtgcaggtcttctgctggttcccacccagcatgcagcgcaaggttctctaccgcctcaagtgagtcgcgccgcctcactggactcatggactcgcccacgcctcgcccctcctgccgctgcctgccgggtttgtgcactcggtgacctgtcacctccatcgtgccctcatggcagggtaagtgtgagggaacagggtctggaggcagactggccagggtttctgacttggatctgccactcagacttgtgggtaagtcacgtgacttgagtgctccgg

SEQ ID NO: 20621 - DNA, 533 bp, Homo sapiens
  SIMILAR (9)..(533): 1001254mologous to Homo sapiens chromosome-associated protein -G,accession number AB013299,Smith-Waterman Score=874.
ggcacgagtcagaattaaaagaagaaataaaagcattagaagatgccagaataaaccttttgaaagagacagagcaacttgaaattaaagaagtccacatagagaagaatgatgctgaaacattgcagaaatgtcttattttatgctatgaactgttgaagcagatgtccatttcaacaggcttaagtgcaaccatgaatggaatcatcgaatctttgattcttcctggaataataagtattcatcctgttgtaagaaacctggctgttttatgcttgggatgctgtggactacagaatcaggattttgcaaggaaacacttcgtattactattgcaggttttgcaaattgatgatgtcacaataaaaataagtgctttaaaggcaatctttgaccaactgatgacgttcgggattgaaccatttaaaactaaaaaaatcaaaacacttcattgtgaaggtacagaaataaacagtgatgatgagcaagaatcaaaagaagttgaagagactgctacagctaagaatgttctg

SEQ ID NO: 20622 - DNA, 637 bp, Homo sapiens
  SIMILAR (635)..(90): 991254mologous to Homo sapiens chromosome-associated protein- G,accession number AB013299,Smith-Waterman Score=903.
gttctgattttgactagggtaacttcttctttattaaagcaaataactggacataatcttaaaggattccacctccatcgtctttcctaacttagatcttcattgagaaattgggcaaggttaagtttacttttttctagtgctgcggttttggctcgtcttggtagtctcatcttcatttctgattctggttctggaacttcatgatcactttcagagtcggcttcagcagtctgacacctcctgttcgtcctagctgaaactgtcacttttttctgtcctctgttagtctttagctgagtagactttgatgcttgggttgcttttacacccctgagtggagtcatatatacttctttattcttttcatcttcattttggaaagtagttgtagtcaaggtggcatcctgtgctgcttcagcttggtcaccaaattctttatttcctttttctaactgaatcttgattttctccaaagctctcagacatgtcctatcttttacttgctccagaatctcattcaatagaaccagaagatcttttgcaagatggctactgagttctaaagaactcaaggcttttgtatagactcgaatttctggcgagcacggacttgttaagatctcattgcaaattt

SEQ ID NO: 20623 - DNA, 660 bp, Homo sapiens
  SIMILAR (358)..(236): 901254mologous to Homo sapiens Similar to chromosome condensation protein G,accession number BC002337,Smith-Waterman Score=187.
cccacctcagattgtgataaatctgtgtgactgactgatgcacactttttctggactataataactgatgctgctctactgctttaatacaggccaaagtaacgtggaagcgcacagcagaaaatcttcagaaagacatcaggtttgttctgattttgacaagggtaacttcttctttattaaagcaaataactggacataatcttaaaggattccacctccatcgtctttcctaacttagatcttcattgagaaattgggcaaggttaattttacttttttctagtgctgcggttttggctcgacttggtaggctcatcttcatttctgattctgggtctggaacttcatgatcactaaatagatgttgaaaatacacgaatttaaatacaagctttaaaaccagtttatttataaataaaacttttttgtttctgactcacattctatcagtgtttaattgatagcctgattccattgacttagcttaaaactaaaatctcaatgtcaaaaaaacactgacttggctatctagcaaagtgaatcagggaaaatctagctaatgattttatatactataacagaacctggtgttatacaggaaaaaaagccacaaacttgtaatgaagcttgtaattaaacgacgaccataactgtccg

SEQ ID NO: 20624 - DNA, 2934 bp, Homo sapiens
  SIMILAR (2716)..(2931): 901254mologous to Homo sapiens chromosome-associated protein- G,accession number AB013299,Smith-Waterman Score=323.
aattcccgggtcgacgatttcgtcgggctggcaggctgtagccgagcgcgggcaggactcgtcccgtcagggttccagagccatgggagcggaaaggaggctgctgtcgattaaggaggcctttcggctggcgcagcagccgcaccagaaccaggcgaagctggtggtggcgctgagccgcacctaccgcacgatggatgataagacagtttttcatgaggagttcattcattaccttaaatatgttatggtggtctataaacgtgaaccagctgtggagagggtaatagaatttgcagcaaagtttgttacctcatttcaccaaccagatatggaagatgattgggaagaggaagatggtggccttttaaattatttgtttacttttctcttaaagtctcatgaagcaaacagcaatgcagtgagatttagagtgtgcctgctcataaacaagcttttgggaagtatgccagaaaatgctcagattgatgatgatgtgtttgataaaattaataaagccatgcttattagattgaaagataagattccaaatgtgagaatacaggcagttgtggcgctttcacgacttcaggatcccaaggatgatgaatgcccagtggttaatgcatatgctactttgattgaaaatgattcaaatccagaagttagacgggcagtgttatcatgtattgcaccatcagcaaagactttgccaaaaattgtagggcgcaccaaggatgtgaaagaggctgtcagaaagctggcttatcaggttttagctgaaaaggttcatatgagagctatgtccattgctcagagagtaatgctccttcaacaaggtcttaatgacagatcagatgctgtgaaacaagctatgcagaagcatcttcttcaaggctggttacggttctctgaaggaaatatcttagagttgctccatcggttggatgtagaaaattcttctgaagtggcagtctctgttctcaatgccttgttttcaataactcctctcagtgaactggtgggactctgtaaaaacaatgatggcaggaaattgattccagtggaaacattaactcctgaaattgctttgtattggtgtgccctttgtgaatatttgaaatcaaaaggagatgaaggtgaagaatttttagagcagattttgccagagcctgtagtatatgcagactatttattgagttacatccagagcattccagttgttaatgaagaacacagaggtgatttttcctatattggaaatttgatgacaaaagaattcataggtcaacaattgattctaattattaagtctttggataccagtgaagaaggaggaagaaaaaaactgctggctgttttacaggagattcttattttacccacaatcccaatatccctggtttcttttcttgttgaaagactactccacatcattatagatgataataagagaacacaaattgttacagaaattatctcagagattcgggcgcccattgttactgttggtgttaataacgatccagcttgatgtaagaaagaaagaactcaagatgggtgaaataaaagttaagcttatcgaagccaaagaagctttggaaaattgcattacctgacaggattttattcgggcgtcagaattaaaagaagaaataaaagcattagaagatgccagaataaaccttttgaaagagacagagcaccttgaaattaaagaagtccacatagagaaggtacagaatgatgctgaaacattgcagaaatgtcttattttatgctatgaactgttgaagcagatgtccatttcaacaggcttaagtgcaaccatgaatggaatcatcgaatctttggttttgcaaattgatgatgtcacaataaaaataagtgctttaaaggcaatctttgaccaactgatgacgttcgggattgaaccatttaaaactaaaaaaatcaaaacacttcattgtgaaggtacagaaataaacagtgatgatgagcaagaatcaaaagaagttgaagagactgctacagctaagaatgttctgaaactcctttctgatttcttagatagtgaggtatctgaacttaggactggagctgcagaaggactagccaagctgatgttctctgggcttttggtcagcagcaggattctttctcgtcttattttgttatggtacaatcctgtgactgaagaggatgttcaacttcgacattgcctaggcgtgttcttccccgtgtttgcttatgcaagcaggactaatcaggaatgctttgaagaagcttttcttccaaccctgcaaacactggccaatgcccctgcatcttctcctttagctgaaattgatatcacaaatgttgctgagttacttgtagatttgacaagaccaagtggattaaatcctcaggccaagacttcccaagattatcaggccttaacagtacatgacaatttggctatgaaaatttgcaatgagatcttaacaagtccgtgctcgccagaaaattcgagtctatacaaaagccttgagttctttagaaactcagtagccatcttgcaaaagatcttctggttctattgaatgagattctggagcaagtaaaagataggacatgtctgaagggctttggaaaaaaatcaagattcagttagaaaaaggaaataaagaatttggtgaccaagctgaagcagcacaggatgccaccttgactacaactactttccaaaatgaagatggacagagaaaagtgacagtttcagctaggacgaacaggaggtgtcagactgctgaagccgactctgaaagtgatcatgaagttccagaaccagaatcagaaatgaagatgagactaccaagacgagccaaaaccgcagcactagaaaaaagtaaacttaaccttgcccaatttctcaatgaagatctaagttag

SEQ ID NO: 20625 - DNA, 395 bp, Homo sapiens
  SIMILAR (293)..(150): 891254mologous to Homo sapiens paraplegin,accession number Y16610,Smith-Waterman Score=222.
  misc_feature (1)...(395): n = a,t,c or g
acaaacaacaggaatccgttcagnaagtttctgcaagagaaacttaaaatnatgaaaaagggtcatcaatcaaacagatctcagaagtcactgtgcagggactactgtttactncctctgggcgtcgatccacctctgcggtgcgatnattttcttcggcnatggggcggcgggccaatgagagcctcaatgtcctcatagtttatcacttccttttccagaagggcgtttgccagcgcctgcaacttgtccaggttgtcctgcagcaccttctcggtgtgtctgtagccttggccaccagcagtcttgcttcatggtccatcatctgctgcaggccttggctgaaaggcgccgcccgatgcccatgaggccctcctgcgcctcagggaaggaga

SEQ ID NO: 20626 - DNA, 510 bp, Homo sapiens
  SIMILAR (2)..(250): 981254mologous to Homo sapiens paraplegin,accession number Y16610,Smith-Waterman Score=418.
gcacgtcttcattgatctccccacgctgcaggagaggcgggagatttttgagcagcacctgaagagcctgaagctgacccagtccagcgccttttactcccagcgtctggcagagctgacaccaggattcagtggggctgacatcgccaacatctgcaatgaggctgcgctgcacgcggcgcgggagggacacacttccgtgcacactctcaacttcgagtacgccgtggagcgcgtcctcgcaggtacagggggcgcgccctgggtgaaggccctccttagcagggcttgaaccccagaaatacccaggcaggtattgagaggtgaggtggatggaaccatcacacaggaaggaacacacgttgcgtttcagttctgcgtaactcatgtctttatgataccttgtacttttccttagtttaaaatatcacagatttacctaagagtagacgctcgtccaacagaaataaaaaatgccttgccaaagaaagtgaaaaaaaaaaaaaaaaa

SEQ ID NO: 20627 - DNA, 2935 bp, Homo sapiens
  SIMILAR (1848)..(2108): 981254mologous to Homo sapiens paraplegin,accession number Y16610,Smith-Waterman Score=460.
tttcgtcttgtggcctggggggccagcacggcctcggcgctgcccgtgtgcggagcctctttaaggaagcccgagcccgggccccctgcatcgtctacatcgatgagatcgacgcggcgggcaagaagcgctccaccaccatgttcggcttctccaacacggaggaggagcagacgctcaaccagcttctggtagaaatggatgtgttctacgcaaaaatagaagagctgaaactggtaaatagaagagctgaaactggtgtatccttatcacggtgttctacgcagaaatagaagagctgaaactggtgtatccttatcacggtgttctacgcagcaatagaagagctgaaactgatgtatccttatcatggggttctatgcagcagtagaaggaaactttcttcctgcagcaacaaggaaatgacgcaaagtgagaagagccaggcttagtatcgtatgactccacttggaatgggtaccacagaccatgtcatcgtcctggcgtccacgaaccgagctgacattttggacggtgctctgatgaggccaggccgactggaccggcacgtcttcattgatctccccacgctgcagagaaagggtgttgcgctgtcacccaggctggagtgcagtgctgcgatcaccactcactgcggcctcaaccttcagggctcaagctgaggagctaggactactatgggcgtgcgccgccgtgctggttaatttttaacagagtctcgctgtgttgccaaggctggagtgcaggccgcgatctcggctcactgcaaccaccatctcccaggagaggcgggaagatttttgagcagcacctgaagagcctgaagctgacccagtccagcaccttttactcccaacgtctggcagagctgacaccaggattcagtggggctgacatcgccaacatctgcaatgaggctgcgctgcacgcggcgcgggagggacacacttccgtgcacactctcaacttcgagtacgccgtggagcgcgtcctcgcaggtccccarggctttcagctttgggaaagcagtgggttcctgccagaggagtgggggcagctgctgtgccagacactgcaaaacacacctggcttctctccgacagccctgcggggtcgagaggactggcgctgcctgtgtcttactgaaaatttattttcgtgtaaccatttacttttatgtggaaatcgaaaagctttttataatagtagcaaagcaggaaggactgagtgggaaccacaagccagttgaaagaaaatacatgacgtacttgagtgctcaggaccacgagctgattcaagttgtacagaatggacacttacagatgtgtggaaaatctgagacaggaaatgaagcctcaccaggactgccaaaaagagcaagatcctgtccaaggaagaacagaaagtggttgcgtttcatgagtcgggccacgccttggkgggctggatgctggagcacacgaggccgtgatgaaggtctccataaccccctcggacaaaacgccgccctgggctttggtcagattgctccccaaagaccagcacctcttcacccaaggagcagctttgagcggaggttcattgccctgggaggacgggcctcgggaacacttttccctcaacgaggtcacttcctggggcacaggacgacctgaggaaggtcacccccatcgcctactccatggtgaagcaggttgggatggcacctggcatcgggcccatctccttccctgaggcgcaggagggcctcatgggcatcgggcggcgccccttcaaccaaggcctgcagcagatgatggaccatgaagcaagactgctggtggcccaaggcctacagacacaccgagaaggtgctgcaggacaacctggacaagttgcaggcgctggcaaacgcccttctggaaaaggaagtgataaactatgaggacattgaggctctcattggcccgccgccccatgggccgaagaaaatgatcgcaccgcagaggtggatcgacgcccaggaggagaaacaggacttgggcgaggaggagaccgaagagacccagcagcctccacttggaggcgaagagccgacttggcccaagtagttgggaggtgttggctgcacgtgcgggtggtccgggaagtgagggctcactcagccaccctgagttgcttttcagctgaggtttgcacttcctctcgcggccctcagtagtccctgcacagtgacttctgagatctgttgattgatgacccttttcatgattttaagtttctctgcagaaactactgacggagtcctgtgtttgtgagtcgtttcccctatggggaaggttatcagtgcttcccgagtgagcatggaacacttcgagttcccagggttatagacagtcgttcccagtgtggctgaggccacccagaggcagcagagcattcagactccaaacagacccctgttcatgccgacgcttgcacgaccgccccagttcctgtggctccctcggaatgctaaggggatcggacatgaaaggaccctgtgagccgattgtcctatctccagcggccctgtcatccagctcactcatcaatggggccacacagtcaggcccaggcactgggctccggaggactcaccactgccccctgctgccatgtggactggtgcaagttgaggacttcttgctggtctagtcacgcatgcagtgttggggatgccttggtttttactgctctgagaattgttgagatactttactaataaactgtgtagttggaaaatctaagaaacaaaaaacaattaataatgaaagggggggggccctttttaaagattccttgggggggccaaattttaccggggatgggaaggaaatatttttttccttatggggggccgaattaaaacctccctgggaatttttggaaagaa

SEQ ID NO: 20628 - DNA, 3154 bp, Homo sapiens
  SIMILAR (14)..(454): 1001254mologous to Homo sapiens paraplegin,accession number Y16610,Smith-Waterman Score=778.
  misc_feature (1)...(3154): n = a,t,c or g
ctttcaggccaacatggccgtgctgctgctgctgctccgtgccctccgccggggtccaggcccgggtcctcggccgctgtggggcccaggcccggcctggagtccagggttccccgccaggcccgggagggggcggccgtacatggccagcaggcctccgggggacctcgccgaggctggaggccgagctctgcagagcttacaattgagactgctaacccctacctttgaagggatcaacggattgttgttgaaacaacatttagttcagaatccagtcagactctggcaacttttaggtggtactttctattttaacacctcaaggttgaagcagaagaataaggagaaggataagtcgaaggggaaggcgcctgaagaggacgaagaggagaggagacgccgtgagcgggacgaccagatgtaccgagagcggctgcgcaccttgctggtcaatcgcggtggtcatgagcctcctgaatgctcttcagcaccagcggaggcagcatttcctggaacgactttgtccacgagatgctggccaagggcgaggtgcagcgcgtccaggtggtgcctgagagcgacgtggtggaagtctacctgcaccctggagccgtggtgtttgggcggcctcggctagccttgatgtaccgaatgcaggttgcaaatattgacaagtttgaagagaagcttcgagcagctgaagatgagctgaatatcgaggccaaggacaggatcccagtttcctacaagcgaacaggattctttggaaatgccctgtactctgtggggatgaccgcagtgggcctggccatcctgtggtatgttttccgtctggccgggatgactggaagggaaggtggattcagtgcttttaatcagcttaaaatggctcgtttcaccattgtggatgggaagatggggaaaggagtcagcttcaaagacgtggcaggaatgcacgaagccaaactggaagtccgcgagtttgtggattatctgaagagcccagaacgcttcctccagcttggcgccaaggtcccaaagggcgcactgctgctcggcccccccggctgtgggaagacgctgctggccaaggcggtggccacggaggctcaggtgcccttcctggcgatggccggcccagagttcgtggaggtcattggaggcctcggcgctgcccgtgtgcggagcctctttaaggaagcccgagcccgggccccctgcatcgtctacatcgatgagatcgacgcggtgggcaagaagcgctccaccaccatgtccggcttctccaacacggaggaggagcagacgctcaaccagcttctggtagaaatggatggaatgggtaccacagaccatgtcatcgtcctggcgtccacgaaccgagctgacattttggacggtgctctgatgaggccaggccgactggaccggcacgtcttcattgatctccccacgctgcaggagaggcgggagatttttgagcagcacctgaagagcctgaagctgacccagtccagcaccttttacttcccaacgtctggctgagctgacaccaagattcagtgtggctgacatcgccaacatctggcaatgaggctgcgctgcacgcggcgcgggagggacacacttctcgtgcacactctcaacttcgagtacgccgtggagcgcgtcctcgcagggactgccaaaaagagcaagaatcttgtccaaggaagaacaagaaagtggttgcgtttcatgagtccggcccaccccttggtgggctggatgctggagcacacggaggccgtgatgaaggtctccataacccctcggacaaacgccgccctgggctttgctcagatgctccccagagaccagcacctcttcaccaaggagcagctgtttgagcggatgtgcatggccctgggaggacgggcctcggaagcactgtccttcaacgaggtcacttctggggcacaggacgacctgaggaaggtcacccgcatcgcctactccatggtgaagcagtttgggatggcacctggcatcgggcccatctccttccctgaggcgcaggagggcctcatgggcatcgggcagcgtcccttcagtccaaggcctgcagcagatgatggaccatgaagcaagactgctggtggccaaggcctacagacacaccgagaaggtgctgcaggacaacctgggacaagttgcaggcgctggcaaacgcccttctggaaaaggaagtgataaactattgagggacattgaggctctcattggcccgccgccccatgggccgaaggaaaatgatccgcaccgcagaggtgggatccgacgcccagagggagnaaacaggacttggggcgaggaggagaccgaagagacccagcagcctccactttggaggcgaaagagcccactttggccccaagttagtttgggaggtgttggctgcacgtgcgggtggtccgggaagtgagggctcactcagccaccctgagttgcttttcagctgaggtttgcacttcctctcgcggccctcagtagtccctgcacagtgacttctgagatctgttgattgatgacccttttcatgattttaagtttctctgcagaaactactgacggagttctgtgtttgtgagtccgtttcccctatggggaaggttatcagtgctttccgagtgagcatggaacacttcgagttccccagggtttatagacagtccgttcccagtgtggcttgtggccacccaagaggcaagcagagcattcaagcctcccaaacagaccccctgtttcatgccgacggtttgcacgaaccgccccagttcctgtggctccctcggaatgctaaggggatcggacatgaaaaggaccctgtgaagccgattgtcctatctccaagccggccctgtcatccaagctcactcatcaatggggccacacagtcagcgccagggcacttgggttccggaagacttcaccacttgccccctgctggccaatgttgggacttggtgcaaagtttgaggacttctttgctggtctaagtcacgcatgcagtgtttggggatgccttagtttttactgctctgagatattgttgagatactttactaaaaaaactgtgtagttggaaaatctaaaaaaaaaaaaaaaaaaa

SEQ ID NO: 20629 - DNA, 368 bp, Homo sapiens
  SIMILAR (178)..(366): 981254mologous to Homo sapiens dJ1013A10.3 (related to DBI (diazepam binding inhibitor (GABA receptor modulator, acyl-Coenzyme A binding protein))),accession number AL033383,Smith-Waterman Score=329.
gaacagacaggaaatcaactgggtttgaaactctggtggtgacctccgaagatggcatcacaaagatcatgttcaaccggcccaaaaagaaaaatgccataaacactgagatgtatcatgaaattatgcgtgcacttaaagctgccagcaaggatgactcaatcatcactgttttaacaggcaacatttcatacaccatttagtcacctaggccaaagtccggaaggatgctcctcttacacttttccgaagataatgagcccagccaaggcaacagagatgcttatttttggaaagaagttaacagcgggagaggcatgtgctcaaggacttgttactgaagttttccctgatagcacttttcaaaa

SEQ ID NO: 20630 - DNA, 2190 bp, Homo sapiens
  SIMILAR (6)..(77): 411254mologous to Homo sapiens peroxisomal D3,D2-enoyl-CoA isomerase,accession number BC002668,Smith-Waterman Score=52.
atggtgctgggcgccaaaaccatcaagacgttcacagctctcagacaccagcgatcaaatcagaatcacgctgtcagtgctttggtagaagcacccaaagggactttgagagcagaggagagagaattctcagtcaggctggggcatctggaatcttccagaagctgcattgtggagggtgagagcacagaatctggctctgacgaactcaggcaagatggaaccacatttgaaagaatctatgaagacagacttggcaaaggcaggagtcacggcaaatcaagggatctggctagcaaggactcacaggcaagcccacagcaggctcggtgcagcagcaaaagaggccagcaacaggaatctgcaggagctacagctctgagggagagaaaccttgctctcagttcagaagaaccgcagctccaagaagatgtaatacataaacgagaaaggaaacctactgaaccattacaccctgaagatatatctggagtccaggatttcactgagaactggatagctgggcatgccaattgtatcttcaatggctctctgcttgctctcagcacggaatccaaactccttagcacagatacaatgatcttcaagctcagggctggccctcgggatgcagcgacccctcctcgccaggctccgcgggactccgggcagggcgctcagtgctccggcagccacagggttcgcagagctgagagccgcccaagggatggcgatggcgtacttggcttggagactggcgcggcgttcgtgtccgagttctctgcaggtcactagtttcccggtagttcagctgcacatgaatagaacagcaatgagagccagtcagaaggactttgaaaattcaatgaatcaagtgaaactctttgaaaaaggatccaggaaacgaagtggaagctaaaactctacgcgctatataagcaggccactgaaggaacttgtaaaatgccccaaaccagggtgtatttgacttgatcaacaaggccaaattgggacgcatggaatgcccttggcagcctgccccaaggaagctgcccagggtagaactatgtggatttggtgtccagttttgagtccttccattgggaatcctcctagtccaggtggagcctggaacagaaagggataaccaactgggctttgaaactctggtggtgacctcccgaagatggcatcacaaagatcatgttcaaccggcctcaaaaagaaaaatgccataaacactgagatgtatcatgaaattatgcgtgcacttaaagctgccagcaaggatgactcaatcatcactgttttaacaggaaatggtgactattacagtagtgggaatgatctgactaacttcactgatattccccctgggtgggagtagaggagaaagctaacactaatgcccgttttactgaggggaatttgtggggctgttttataggattttcctaagcctcttgattgcagtgggtcaatgggtcccagctgtggggcatctccagtcaccctccttggggcttattcgatgcccgtgttattgcatcttgacaggggcacattttcatacaccgtttagtcaccttaggcccaaagtccgggaaggatgactcctcttacacttttccgaggataatgagccccagccaagggcaaccagaagatggcttattttttgggaaagaagttaaccagcgggtagagggcatgtgcctcaagggacttgtttactgaaggttttccctggatagcacttttcagaaagaaagtctggacccaggctgaagggcattttgcaaaagcttccccccccaaatggccttggaggaattttcaaaagaggtaatcaggaaaagagagagagaaaaactacacgctgttaatgctgaagaatgcaatgtccttcaaggaaaaatggctatcagatgaatgcaccaaaatgctgtggtgaacttctttatccagaaaatcaaaaactgtgatgaccacttacagcagcaccaaagcatgtccaaggaaggatgtgctgttccctctgtctttccagtactggaactaaataacgcttcattgtgccttcttgtaggtgctagagatatcaattacacaatgatgagtatttccactcacaagctctgaatgaaataaaaaggttttggtaaaacaagcttaagaattcacacaaaa

SEQ ID NO: 20631 - DNA, 387 bp, Homo sapiens
  SIMILAR (385)..(188): 871254mologous to Mus musculus Septin6,accession number AB023622,Smith-Waterman Score=297.
tgactgttggcttcttgaccagcggccagacatcaccctcagattctcaggtttctataaaccttggcaggaagagaggagagggcgcgggttggattgtatgccccccaggcatgttaagggggaaattagagaaagggaggcccagctctgttgcgcaggaaaagggtgtctacaggaagcccaaatttttcttctctttgtctctcttcagagtctgtgagcctccagcctgggagccctgggactggagcagctcagccgccgtctttctttgcttgaaagcattcacttcatcatccagggatttcttcttatcctccagtttattcttctcgtcctggtgcagtttcttcagacggtcaaacttctcgtgcagctcttcga

SEQ ID NO: 20632 - DNA, 494 bp, Homo sapiens
  SIMILAR (365)..(156): 681254mologous to Homo sapiens Human cell division regulator (HCDR) 2,accession number Y23783,Smith-Waterman Score=251.
  misc_feature (1)...(494): n = a,t,c or g
ggcaccccaaaggaaagctgtcagttaaaataggaacctcggcttaaaaggctaaatggagtccagtccagctgtagcggggaatactattcagtacacagccatggattacaggaccctgggtcncatgcagcatgcagcaaacagcagagttaatttttcttctctttgtctctcttcagagtctgtgagcctccagcctgggagccctgggactggagcagctcagccgccgtctttctttgcttgaaagnattcacttcatcatccagggatttcttcttatcctccagtttcttcttctcgtcctggtgcagtttcttnagacggtcaaacttctcgtgcagctctttctctgcctctttgantccgcttctttctctttgactcgctggacgaacatctgtctcatctcctcttcttttttctggagttcccctaggaactcgttccttttggcctcatatgtctcctgtaaactgaagggtttgctg

SEQ ID NO: 20633 - DNA, 3451 bp, Homo sapiens
  SIMILAR (1562)..(2503): 991254mologous to Homo sapiens transcription factor NRF,accession number AJ011812,Smith-Waterman Score=1655.
ctacaagcctatcgtggaattcatcgatgcacaattcgaggcctacctgcaggaagagctaaagatccgaagagtgctacacacctaccatgactcccgaatccatgtctgcttgtatttcattgcccccacgggtcattccctgaagtctctggacctagtgactatgaagaagctggacagtaaggtgaacatcatccccatcattgccaaagcagatgccatttcgaagagtgagctaacaaagttcaaaatcaaaatcaccagcgagcttgtcagcaacggagtccagatctatcagtttcctacagatgatgagtcggtggcagagatcaatggaaccatgaactacacccgagatgtgtttgttatcaccatcaccatcttagacaaatctggctcaagggcccacctgccgtttgctgtcattggcagcacagaagaactgaagataggcaacaagatgatgagggcgcggcagtatccttggggcactgtgcaggttgaaaacgaggcccactgcgactttgtgaagctgcgggagatgctgattcgggtcaacatggaggatctgcgggagcagacccacacccggcactatgagctgtatcgccgctgtaagctggaggagatgggcttcaaggacaccgaccctgacagcaaacccttcagtttacaggagacatatgaggccaaaaggaacgagttcctaggggaactccagaaaaaagaagaggagatgagacagatgttcgtccagcgagtcaaagagaaagaagcggagctcaaagaggcagagaaagagctgcacgagaagtttgaccgtctgaagaaactgcaccaggacgagaagaagaaactggaggataagaagaaatccctggatgatgaagtgaatgctttcaagcaaagaaagacggcggctgagctgctccagtcccagggctcccaggctggaggctcacagactctgaagagagacaaagagaagaaaaatgcgtcaaaggcccgtagtcgtcactggagggaaaaaagtacgtcgcgcgagattctgcgacgggatttggaagttagggaacagccgcggcgcaagcgcactggcctcacaaccccggacggcacgcggtcggcttcgtccctggggtccctgcttgggggcggagaagatggctggaggacgtctgctgttggggggcgacttcctgtcgcgccgccgctgccccccctcccgccgccgccgctgccgcccctcccgccgcccccgcccgagccagtgctggagcagtggcgctatagccacgaaagtgactggcagtgggctctgcggcgcagcttcatctgtcggcacctgcacagctatcccggggctgccctcgaccagctcctcgcgctctccgccgcctggaccaaccacgtcttcctgggctgcaggtacagcccacgcttgatggaaaaaattctccaaatggctgaaggtattgatattggggagatgccttcatatgatctggtgctgtccaaaccttccaaaggtcaaaaacgccacctctcaacatgtgatgctagtagttcaaaagatgaaagacaggaagatccttatggccctcaaacaaaagaggtaaatgaacaaacacattttgccagcatgccaagagacatctaccaagattatactcaagactctttcagtatacaagatgggaattctcagtattgtgattcatcaggattcattctcacaaaagaccagcctgtaacagccaacatgtattttgacagtgggaaccctgccccaagcaccacatcacagcaggcaaactctcagtcaactcctgagccttcaccatcacagacatttcccgagtctgtggtagccgagaagcagtattttattgaaaaattaacggcgacaatctggaagaacctttctaatccagaaatgacttctggatctgataaaattaattatacatatatgttaactcgttgtattcaggcgtgtaagacaaatcctgagtatatatatgctcctttaaaggaaattcctcctgccgacatccccaaaaataaaaaacttctaactgatggctatgcttgtgaagttagatgccaaaatatctacttaactacaggttatgctggcagcaagaatgggtccagggatcgagctacagagctagctgtaaaactcttgcagaaacgtattgaagttagagttgtccggcggaaattcaagcatacatttggagaggacctcgtggtgtgtcagattggcatgtcctcctatgaatttcctccagctctgaagccaccagaagacctggtggtgctgggtaaagatgcttccgggcagccaatttttaatgcttctgccaaacactggaccaattttgtcattacagaaaatgcaaatgatgcaattggtatccttaacaattctgcctcattcaacaagatgtcaattgaatacaaatatgagatgatgccaaatcgcacatggcgttgtcgagtgtttttacaagatcactgcttagctgaaggttatggaaccaagaaaacaagtaaacatgcagctgccgacgaggctttgaaaattcttcaaaaaacacagcccacttatccatctgtcaaaagttcacaatgccatacaggctcttcacccagaggatctggaaagaagaaagatataaaggatcttgtagtttatgagaattcttcaaatcccgtgtgcacgctgaacgacacagctcagtttaaccgaatgacagttgagtatgtctatgaaaggatgacaggcctccgctggaaatgcaaagtgattctagagagtgaagtaattgcagaagcagttggggtgaagaaaactgtcaaatatgaagctgctggggaagctgtgaaaaccctcaaaaagacccagccaactgtcattaacaacttgaagaaaggagctgttgaagatgtgatttcaagaaatgaaattcagggccgctcagcagaggaggcttacaaacagcaaatcaaagaagataatattggaaatcagctgctgagaaagatgggttggactggtggtggtttaggtaaatctggtgagggcatacgggagcctatctcagtgaaagagcagcataagcgggaagggcttggtctggatgtagagagggtgaataaaattgccaagagagatattgaacagatcatcagaaactacgcccgctccgagagccacacagatttgactttctctagagagctgactaatgatgaacggaagcaaatacatcagattgcccagaagtatggtcttaagaagagactcacagcaactctccattatagctttcacacggtttggatgtgcagcacatccaaggcaaccacagctgtggtagagcttggtaaaagactgaagatacattggtgctttgatgaaaagataaatcaagtataa

SEQ ID NO: 20634 - DNA, 4979 bp, Homo sapiens
  SIMILAR (448)..(1608): 711254mologous to Mus musculus Septin6,accession number AB023622,Smith-Waterman Score=1315.
tttcgtcccgccccccttcgtagaagcctatggctggggttgcaggaagaactggaactgggctggccatagggggaagcggcgcgttaaatccgccccctctccataccctactttcaaggggtgggcggtagaggggaggttggggttggagcagcggcgagggggcccctcccttgcacctccccccaccggacttggtcgcgcccgaagtgtaacactttctctttgtcggaggagctcctctgtttcctgtgcagtagctcccgttgcggcggcacccgtggcagccctggcggacgcaggagcgatggcagcgaccgatatatctcgccaggtgggtgaaggttgccgaactgtccccctggctggacatgtggggtttgacagcttgcctgaccagctggtgaataagtccgtcagccagggcttctgcgttcaacatccttgttcgtgggagagacaggtttgggcaagtcccaccctcatgggacaccctgtttcaacaccaaatttcgaagggggagccagccacccacacacagccgggtgtccagctccagtctaatacctatgacctccaagagagcaacgtgaggctaaagctcacgatcgttagcacagttggctttggggaccagatcaacaaagaggacagctacaagccatatcgtggaattcatcgatgcacaatctcgaggccttacttcaaggaggacccaaaagttcggaagagtgctacagacctaccatgactcccgaatccatgtctgcttgtatttcattgcccccacgggtcattgcctgaagtctctggacctagtgactatgaagaagctggacagtaaggtgaacatcatccccatcattgccaaagcagatgccatttcgaagagtgagctaacaaagttcaaaatcaaaatcacccagcgagcttgtcagcaacggagtccagatctatcagtttccttacagatgatgagtcggtggcagagattcaattgaacccatgaacgccccaccttcccgtttgctgtcattggcagcacagaagaactgaagataggcaacaagatgatgagggcgcggcagtatccttggggcactgtgcaggttgaaaacgaggcccactgcgactttgtgaagctgcgggagatgctgattcgggtcaacatggaggatctgcgggagcagacccacacccggcactatgagctgtatcgccgctgtaagctggaggagatgggctttaaggacaccgaccctgacagcaaacccttcagtttacaggagacatatgaggccaaaaggaacgagttcctaggggaactccagaaaaaagaagaggagatgagacagatgttcgtccagcgagtcaaagagaaagaagcggagctcaaagaggcagagaaagagctgcacgagaagtttgaccgtctgaagaaactgcaccaggacgagaagaagaaactggaggataagaagaaatccctggatgatgaagtgaatgctttcaagcaaagaaagacggcggctgagctgctccagtcccagggctcccaggctggaggctcacagactctgaagagagacaaagagaagaaaaattaaactctgctgtttgctgcatgctgcatgagacccagggtcctgtttgggcttcctgtagacacccttttcctgcggcaacagagctgggcctccctttctctaatttcccccttaacatgcctggggggcatacaatccaacccgcgccctctcctctcttcctgccaaggtttatagaaacctgagaatctgagggtgatgtctggccgctggtcaagaagccaacagtcatgtggctcgcagatgcatcctgcatcccagtccccctcccagcacccccagccatcccccctgtcttcccccacatctttgccagaggtgtgacatggtcagggggcccatctgctactctttcccaccagctcccctgttccagttctggttgctgtttagtttcccctggaggtatttgcaacccacccatggctggggtaacccaccgaatcagcacagctggtccccttgggtctcctgttattcccagttcattagttcctcctgggggtccaccccaccctcatcctcaggagccacagccatttcttagagggtttcaaaaaggacagcctttggcgccttttccttctaacctttgagtccagccctttccagttttcattcactcgaagtaactgcacttcaagctgcgctcaaaatcggcaacgcatttatttacaccaagcccttcccataaaacacaactgctgaagaaaatagcagacgtatcccctctctctaactctgggtatcccacagatgcaaaagggagaataaacctgaatattattaccagcctagagtcttgaatgatagccttaccgaattcttcttgcgaggtatttcagcatctcggcgggtaatttccggaagggctccatactgtcccaataaggtgaggccagtagcaggaataataaatcccactttgtaggctggaaaactgagctgtcaaaagaatcaagtgtttgggggtttgctctgatgagtcttctagttcatttggtgaatgtcatgatgatttttaacatgcattttgcatgcatcccccaataagaagagatgagactcggccggagagaagaaaaggcccttaactttctttccaatttaaggagttgagagtttaaaaatattccagccctaacgtttttatcatgggtcccatctgatagtggctttgggaacctctgtgaagtagagagccctcccttgtcagggttatgaggcacagtggcctttggtgtttggccagtgacagtgtgagagatggagttgacctggcaatgatctgtggctaaacatgccgttctctctgccctatcctttgcagtaatccatggctgtgtactgaatagtattccccgctacagctggtactggactccatttagccttataagccgaggttcctattttaactgacagctttcctttggggtgccaggcagcgaggccccccacccctatcctgccatgtacttcaagctcacttcttctttttgagttccgcaacttgctcctgcctcccagccccactggcactgaccatgaccacctacttctattttttttttagagtttctttttttgatcacttactttcaaaagcacacagtcaaacaaggttatgccaaatttccaggcctttttgaagtattgagaaggggaaggggatttctcacttccaattatagatcataataggaagcaaaaagaaaaaaatgaaaagcaaacatatgcacgcacttttcttgttgacaaagcaagaatgtaggtttgctgtgtaggtttggtgctctattgattgggtgagtgaccagagcaagtatgaaggttgatgctgccaaagcacaagcctttttgaagtattgagaaggggaaggggatttctcacttcaattatagatcataataggaagcaaaaagaaaaaaatgaaaagcaaacatatgcacgcacttttcttgttgacaaagcaagaatataggtttgctgtgtaggtttggtgctctattgattggtgagtgaccagagcaagtatgaaggtgatgctgccaaagcacaagccagtttcttgggaaaattcaagttacagtggagtatttttttgaagaccatatgcttggaggtagaaacaaaccaacgaccaaaaaaaaaaaaaaaaaaaaaatctgctcagatactcagccagtagctcagagagatgctgagttaggcctgtcaggtctccttgggaaaggcttcatatttgcaactttgatgattctatgtccagcttcagagctgctttcccagaaattcacgcttaaacaaccaaccggtaaccaccacttccccacaccgccgcctggtaattatttgcattacaaaccggaggcgccctcatttgcatttgtgtacagattaactagttaaggcttgagaagctctgaataattcaaaagtattagacccacacagccttggagagaccttcagaaactaaggaggagttttatattaagggagacattttagtcagtaagacgatataacctacttactccgtaaggggaaatgaaggcccagagaagggaagggacttgaccgaggtcccacttctgtttcgaggcagaagccagactaattttcatgcctcctgactcccaatcagtttcacaaagggattcaatctgtttatatacgttacattcctggatacgaggtcttttgatgttcagagtaactgactagttagtattagaagaccctcgaggtttttttccacagaaaaacatctgaagatggattgggtgagggctggcaaaacgaaggcatgccgggccagctccttaacccaatgacccagtgatgctgcaaggctggaacggggtccaggagactgtgtgtaacaggtgccctaggtgacccttataatcagggaagtttggtgaacaaaaatcgaacccatgagtgaacataaattaaaaagttgatcaacctattaaaatgtgtatttcattgggtagcttttctcactgtagacagattttttccttcttcaatgaaaaggcttttaaattagtacaactgttactatttaaaaaaaaaataccctaagtactctgtttacttctggtgaaacaaaaccagtcattagaaatggtctgtgcttttattttcccagactggagtggcttttctgaaacacacacacacacacacacacacacacacacgtacacacatccctcacttctcttaagccaagaagtttgctttccctagctgcagtgtagatggctcttgtttttgtttttttgttttaatcatttggcattcacatgtggctgttaatatgtgcttgtttttaattaaaacaagaagcttt

SEQ ID NO: 20635 - DNA, 1242 bp, Homo sapiens
  SIMILAR (1007)..(1240): 971254mologous to Homo sapiens Human PRO1780 (UNQ842) amino acid sequence SEQ ID NO:282,accession number Y99419,Smith-Waterman Score=412.
atggtgggcatccctcccccagcctcgctgctgctttgcagtttggtctcagactgctgtgctggcaatgagaaagggaattcccctgaccccttgcgcttcctgggtgaggcgatgccttgccccctggcctttccaaggccttccaatggggcatttggggttggcttggccatgggccaaaccccctcttatcctttggtttcccccggagaacctaacctttccgcttcccccaaggttttaaaaaagaatgggaagaaaacggccgcaacaaggttatccccgggaaaacgccgcaacggggtttcgggaaacccagggaagaccgccccacagcggaagggggacgcctttcacaagggggggggaaaaaactgcccctggggccagtttgggccccagaaaggtccaaatttaaaattgccaaagccttggcgccaaccggaaccaaggtgttttgtgcacccggaacctttgggaaaaaaggccgggggaccaaggttggaaggccggccacaaccggcacaaatgttaaaaattggttccttttgtgtcaagcctaagctgctgatagctgtcattgaatgctgcttccacccttctgtttctgcaaacaggtacaagtctgcagccctggccaccagcatcatcaggtgctcccaaaccttgagcccaccagtggccggattttcaggatctccgcaggtcattaagcggatgatggatgtcattcaggagatcgaacgccagttgctgatggtgctgttggaaaacatcccggaacaggagtcgcgtccaaaacgtgaaaaccagagtttgcttaatggacctcaggtcgataccagcaaagccggtgtggtagccagtcaggatcaggatgcaggctggaatgacaaacgtatttctgatgcgctgaagcagggtgatacacgttacgtcaatattcggcagtcgattccggtgaatctctactacctgacggcctttgttggtgcagatggtcgtacccagtatcgacttggagaacttcattgccaagtttggggactctggttttgtccttgtgaccttgggctccatggtgaacacctgtcagaatccggaaatcttcaaggagatgaacaatgcctttgctcacctaccccaaggggtgatatggaagtgtcagtgttctcattggcccaaagatgtccacctggctgcaaatgtgaaaattgtggactggcttcctcagagtga

SEQ ID NO: 20636 - DNA, 2721 bp, Homo sapiens
  SIMILAR (2479)..(2342): 781254mologous to Homo sapiens Human PRO1780 (UNQ842) amino acid sequence SEQ ID NO:282,accession number Y99419,Smith-Waterman Score=187.
  misc_feature (1)...(2721): n = a,t,c or g
ttttttttttttttgggagggtggggagagataacgctgtaaacttttatttttcaggaaatctggaaacctacagtctccatgcctgctcagccaagaaggagctcactgtgggcaccagagacagggacccaatgtggaaaggatgatttttggccatttttcctgttcttcaagaaaacaggagataactagaaggactagagaatggggctgccagaactagtgggaagctccctagaaatggtgacatcgcccaccaaacagaccccgccaaggctgcacctggccttatgtctccttcacctttctggccccacgcagccaccagacagccatgcccagcagcttcccacaaagccatagagtccccagagtgagccccagcagaaacacaaaaacgtcgagcaggtactgctcatgccagggctgctgaaagacatagggcttgaggtgcgtcgcgccccctgtctggaggacgtggtcaatccagcccaccagccgctgtgtggggcctgagcgggtgggaacgcaggatgacactggcaagccactgcccgcggacttgtatctcttgtccttcccatgatttgtttcatcttaaagagccaatgtctctgccttgagcttctttaactgaatagaaacaccaaactttttggcttctactcggaccatgttttcaggctggtctccaaagagagggatccccaccatgggcacaccatgctggatggcctccattatgctattctgcccgccgtgggtgacaaacagacggatgcttgggtgagccaggaggtcactctgaggaagccagtccacaattttcacatttgcagccaggtggacatctttgggccaatgagaacactgacacttccatatcaccccttggggtaggtgagcaaaggcattgttcatctccttgaagatttccggattctgacaggtgttcaccatggagcccaaggtcacaaggacaaaaccagagtccccaaacttggcaaggtgtttaccgtctttgggtgtatgcttgttattagtgccccatgttccgggttgtttgctgccccacccttcttggtatctttgtagctggtgcggtatgtttgtggttgggaattgtgtttcggtttcaatgtggtgctgctcgggtaagcccctttgattgggtgattgatgaacctggactgcagtgttcataaccacggcacagggggcacgcctttgtttttttgtgctactcaccgggggggttgttccgttgtgtggggggcgcccgctgttttgtgttctgtggtcgggctgctgttcggggggccgcttatttgggtgttgtgcgtcggggccgctgtgtgccataagtgccaagtgggggtttctgtttcggtgtgtttgtcctgctttggtaccggcgtttaatttgcctcccccatgggaaatttttgccttttgtggggtgctatcatccgcggtgatcgtggaacgccagcacccttgtttggattgggtgaactgacttgctagtgcatgcaaagcttgtgcactggcctgtctgtttataccaactgtctgttgcacttgggcaaaacccatggctgttaccctaacattcaatctgccatatgcaaagcaaccatcccccccatattctgcaccagccttgtgcatgtcaatcagctgcacatgcatgtgccctgcaacactgcattctggcccatatccttgtggtactggtttaataggtttttccatcaagcctccaatataaacagtgttgggaagcaggggccgggcaaaatcaaaggcaaaatcagagttaacaaaccacaactctgctttcagtagaagatgagacaaaactggcctagagccttctgggaaatgctccttgatggtgttgtcaaatgtagactgcatgtcccattggctcctggagaaactaaagaacatcagaaaattcttcactcggccccagaagtccatgtgatcagtcagcaaggaagggaatactggaacataagacaaggggcttggtagcccaaaatccaaagagccgaatgtggtgggaagaatggccacaaatggtttcacaagcttctcagcaatcaggaaagaacagaaatcaaatgcttcaacaaataccagatcatagttctcattctttaaggaatccattatatcctttctgcttagcaaataactacattgagtcccaaatatttccattagctttacaagggcttcagattcttttctgccatccaatgctgtttctatgtagctatcaaaatgcttcttaattcttttttgatgatcttcaggtgaaaaccacccggataacttggtatgatttttcctcctctttaatatctgggatcaaaaactttccactctgatgaagcatagtcacattatgaccatgctcttgaagaatctgagacacccggtccaacagtaggtaatggcttccacctcagcaatagaggcccctctctgccccacggctagattggcttctccctcctccagccaggtccgcaagcccagcctggaaaatcgcctggataactctgatcaatcgccgttcgctggagccctggcagtgcggngatccgggacgcgcctgtctgggaattctccggccaagcactcacccagtgtagatattgtcaggattttggcagcctctgagagcaggaccccagaaagaaggaa

SEQ ID NO: 20637 - DNA, 541 bp, Homo sapiens
  SIMILAR (72)..(464): 911254mologous to Homo sapiens FLJ00017 protein,accession number AK024428,Smith-Waterman Score=634.
tttcgtgcctgatacagtctaggtgacgcatccttgccgggccagcccgagcagaagctgggtcggcaagcgacaggagcacgggtcatcttttccccagaggcgtcggaatggacctgtgccacccacagcccgcggagctgagcagcggggagacggatgagttaccgaggatctagtggcaccgaaagcagctcctggaggacatccagaaactgaaggatgagattgcggatgtgtttgcccaaatcgactgcttcgagagtgcgggggacagccggatggcccataaagagaatgagctgtgtattgggcgcaagaagttcaacatggaccccgcccagggtatccagtatttgattgagcacaagctgctgacccctgacgtccatgacattgcacggttcctgtataaaggcgagggcctcaacaagacagccattggtacctacctgggggagaggtaagaacgagtggagccttagcgaggcaggaaatgaaggtgtgcaggtgtgtacaggtgtgtggatgtgcaggtgag

SEQ ID NO: 20638 - DNA, 1400 bp, Homo sapiens
  SIMILAR (650)..(979): 511254mologous to Homo sapiens dJ63G5.1 (human SEC7 homolog B2-1 (cytohesin-2, Arno, ARF exchange factor) LIKE),accession number Z94160,Smith-Waterman Score=236.
cagctgggtcggcaagcgacaggagcacgggtcatcttttccccagaggcgtcggaatggacctgtgccacccaggtaagcaactgccgtcaacctctctgggcctcagggtgctctcttttagaatgggacagcagcccctgcctcacccatgggccaaggtaccaatatgggctcaagtaccagcgatgtccattccaattctacatctgtaggccaggaaagtggccatgaggacatccaggtgagtgcacactcgtgtccacacacgtgtccatgcccacactcctgcacgcttgtacgcaccccaccagctccttgggtggggacccccagaaactgccatggttgcttcccaaggatgtcatacaccttgaatgagggctgtggagggcccgggccacagggtgtgggggctgcatgggagcacctgcctggtgtcctctcgcgcgagggcctcaacaagacagccattggtacctacctgggggagaggtaagaacgagtggagccttagcgaggcaggaaatgaaggtgtgcaggtgtgtacaggtgtgtggatgtgcaggccctcaggtgagtagtcctggggcagggtcccggccctcaagggtggcacagccccagtggctgggggtgtcgcgatccacgatactgcctctgcaacccaggcgtcttccagtccacaggtgccaggaggggagtgggacccagggctccgggaccccttcagcattgccaggcatagatttcacagaccccgccgccttttgagcgctttgtgtccatgaaccgcggcatcaacaatggtagcgacctgcccgaggaccagctgcgggtgagagaggcgcagcccacccagcctggccccggggaatccaggagggacctgtccttagatggatggcccgtcttcaatccagaccgggagggttggctgctcaagctaggtgagagaccgacagacacacgtcgtcgcacacacactcatgcacgcgcgggcacacatcgttgcatgcacaccactgtgagcagggttctcctgggccttcccctgcccccgcctctccccgcacaacccacttcccaactcccactgataggtgttcaggttgcaggatcccgaggctggagccactgggaaatttcctaaacagaacgtggggagaggggggtggtggagggcaagcacgaatcgtaccgcatctcagccaccagtgccgaggaacgtgaccagtggatcgagtccatccggtaaggggtgcccaggtctggggacggcttcccgtcaccttccagaaggccctgcttcttttgggtcttgcttgattcctggaggtggcactgggggctggtcaccctgagagtcccatcgcctgcagcacctggagacccacctc

SEQ ID NO: 20639 - DNA, 364 bp, Homo sapiens
  SIMILAR (85)..(2): 751254mologous to Homo sapiens chromokinesin,accession number AF277375,Smith-Waterman Score=98.
cctggtattggtactgaatgggctgcagttggctgtcattctgagtcatcttccttagccagggcctctttcagtgcaagcgctttattcaactcaaccagctccttagacatctgcgcttgacggagagcatgctgagtggtaaaagcgtcagaagacctgctcgtctctggactggtttctacttgctggaaaaaaatcaggataatgatttataagagaaacaagcaaatggagttccttaggcactatttcatcaagtctcacaggcacttctccattaacaatatctctgttcctttacaacagtggctctgcatacatttgttttaagtatctgaaataaatagctagcctagttccc

SEQ ID NO: 20640 - DNA, 4550 bp, Homo sapiens
  SIMILAR (152)..(2371): 791254mologous to Gallus gallus chromokinesin,accession number U18309,Smith-Waterman Score=2901.
  misc_feature (1)...(4550): n = a,t,c or g
gttgcgctacccgtccggaatttccgggtcgacgatttcgtccgggacggatttgaaacttggcggttaaagctctcggctgggacagggcggcgggaggcccagggagaacggggaagggacatttagtttgagacggtgctgagataggatcatgaaggaagaggtgaagggaattcctgtaagagtggcgctgcgttgtcgccctctggtccccaaagagattagcgagggctgccagatgtgcctttccttcgtgcccggagagcctcaggtggtggttggtacagataaatccttcacctacgattttgtatttgatccctctactgaacaggaagaagtcttcaatacagcagtagcgccactcataaaaggtgtatttaaaggatataatgcaacggtcctggcctatgggcagactggctctggaaaaacctattcaatgggaggtgcatatactgcagagcaagagaatgaaccaacagttggggttattcctagggtaatacaactgctcttcaaagaaattgataaaaagagtgactttgaatttactctgaaagtgtcttacttagagatttacaatgaagaaattttggatcttctatgtccatctcgtgagaaagctcaaataaatatacgagaggatcctaaggaaggcataaagattgtgggactcactgagaagactgttttggttgccttggatactgtttcctgtttggaacagggcaacaactctaggactgtggcctccacggctatgaactcccagtcgtcccgatctcatgccatcttaacaatctccttagagcaaggaaagaaaagtgacaagaatagcagctttcgctccaagctgcatcttgtagacctcgctggatcagaaagacagaagaaaaccaaggctgaaggggatcgtctaaaagagggtattaatattaaccgaggcctcctatgcttgggaaatgtaatcagtgctcttggagatgacaaaaagggtggctttgcgccctacagagattccaagttgactcgactgcttcaagattctctaggaggtaatagccatactcttatgatagcctgtgtgagtcctgctgactccaatctagaaggaaacattaaataccctttcggctatgctgacagagcaagcaagatcaagaacaaaccctaattggttaaatattggatccccagacagcttgaacttaatcatctaaagcaacaggtacaacagctacaagtcttgttgctacaggcccatggaggtaccctgcctggatctataactgtggaaccatcagagaatctacaatccctgatggagaagaatcagtccctggtagaggagaatgaaaaattaagtcgtggtctgagcgaggcagctggtcagacagcccagatgttggagaggatcatttggacagagcaagcgaatgaaaaaatgaacgccaagctagaagagctcaggcagcatgcggcctgcaaactggatcttcaaaagctagtggagactttggaagaccaggaattgaaagaaaatgtagagataatttgtaacctgcagcaattgattacccagttatcggatgaaactgttgcttgcatggctgcagccattgatactgcggtggagcaagaagcccaagtagaaaccagtccagagacgagcaggtcttctgacgcttttaccactcagcatgctctccgtcaagcgcagatgtctaaggagctggttgagttgaataaagcgcttgcactgaaagaggccctggctaggaagatgactcagaatgacagccaactgcagcctattcagtaccaataccaggataacataaaagagccagaattagaagtcatcaatctgcaaaaggaaaaggaagaattggttcttgaacttcagacagcaaagaaggatgccaaccaagccaagttgagtgagcgccgccgcaaacgtctccaggagctggagggtcaaattgctgatctgaagaagaaactgaatgagcagtccaaacttctgaaactaaaggaatccacagagcgtactgtctccaaactgaaccaggagatacggatgatgaaaaaccagcgggtacagttaatgcgtcaaatgaaagaagatgctgagaagtttagacagtggaagcagaaaagagacaaagaagtaatacagttaaaagaacgagaccgtaagaggcaatatgagctgctgaaacttgaaagaaacttccagaaacaatccaatgtgctcagacgtaaaacggaggaggcagcagctgccaacaagccgtctcaaggatgctctccagaaaccaacgggaggttgcagataagcgggaaagagactcagagccgtgggaatggaaggcactgcagctcgagtgaagaattggcttggaaacgaaattgaggttatggtcagtactgaggaagccaaacgccatctgaatgacctccttgaagatagaaagatcctggctcaagatgtggctcaactcaaagaaaaaaaggaatctggggagaatccacctcctaaactccggaggcgtacattctcccttactgaagtgcgtggtcaagtttcggagtcagaagattctattacaaagcagattgaaagcctagagactgaaatggaattcaggagtgctcagattgctgacctacagcagaagctgctggatgcagaaagtgaagacagaccaaaacaacgctgggagaatattgccaccattctggaagccaagtgtgccctgaaatatttgattggagagctggtctcctccaaaatacaggtcagcaaacttgaaagcagcctgaaacagagcaagaccagctgtgctgacatgcagaagatgctgtttgaggaacgaaatcattttgccgagatagagacagagttacaagctgagctggtcagaatggagcaacagcacccagagaaggtgctgtaccttctcagccagctgcagcaaagccaaatggcagagaagcagttagaggaatcagtcagtgaaaaggaacagcagctgcaaagcacactgaagtgtcaggatgaagaacttgagaaaatgcgagaagtgtgtgagcaaaatcagcagcttctcccgagagaatgaaatcatcaagcagaaactgaccctcctccaggtagccagcagacagaaacatcttcctaaggatacccttctatctccagactcttcttttgaatatgtcccacctaagccaaaaccttctcgtgttaaagaaaagttcctggagcaaagcatggacatcgaggatctaaaatattgttcagagcattctgtgaatgagcatgaggatggtgatggtgatgatgatgagggggatgacgaggaatggaagccaacaaaattagttaaggtgtccagggaagaacatccaagggtgttcctgcaagggctggtgtggaaacaagcaatgtgggtgcaggaagcaaaagtcagactgtggtgtggactgttgctgtgaccccacaaagtgtcggaaccgccagcaaggcaaggatagcttgggcactgttgaacggacccaggattcagaaagctccttcaaactggaggatcctaccgaggtgaccccaggattgagcttctttaatcccgtctgtgccacccccaatagcaagatcctgaaagagatgtgcgatgtggagcaggtgctgtcaaagaagactcccccagctccctccccttttgacctcccagagttaaaacatgtagcaacagaataccaagaaaacaagggctccgggaagaaaaagaaacgggctctggccagcaacaccagcttcttctctggcctgctccccctatcgaagaagaggcccactgaagttgggagtcatcatctctaccccccagtctggcttgggagatgctttcagggttgcagccagaaggggtttttttaaatgacttcctctggatttcaggtttctggctgttgaaaaaaggaacaaagcgttactgaaaaagaaaggtaaccctttgttggaatgtgggcccttaagcctcccaggtcccagactaactactctatgttctcccagaagggtgctaaagtcacctactgaagagagaacccaactgacttttcctattgactcatcaggaaccagtcctcaagtctggtcaagttgtttcttatttgtgagcagttcaggctaatcntcctgatggggatgaggcccaaaggcttttcttaatcttttggttgtctctgcttaatggaggagcctggcctaggatggaggcctggcttagatctttcattccacctcaggaatgaggttgtgatctttcctgtcctgaccctctctgaattatgtttcaatagtacttcttgattgtctgccatgttgttgaagcaaatgaattatttttaaatgttaagtaagtaaataaaccttagcccgtctactgtttgggaagatccttctgtgttagagggagaaataaaatttcaacctgtgttcctcagcccctgaggaagctattaaggggattcattac

SEQ ID NO: 20641 - DNA, 2529 bp, Homo sapiens
  SIMILAR (87)..(31): 471254mologous to Nicotiana alata PRP3,accession number A31038,Smith-Waterman Score=43.
atgcgggatgccgggggcgcgcccagtccgggttgtagccgcgcgcggagcccgagggggccgagcaccgtgcaggggcggggacggcgtcccccttctcctggacgcccttccgactgcgctcgcagggaccccgctctcgccgcgccttccgccgtgccccgcctcgggctgcgctcgcagctccttactccagtgcccgcccgggaacccgggagctcctcgcgccggggccaacgtgcggcgctcctcgccggctacagcgggcgggagacgcgaggcggcgcgggagcaggggaaggaggggaaggagcgggggaggaggggacggacgaaggcagcacgcagtgggcggcggcagggcggaaggagctgagaaagggatcggcccggaagaatctgaatccctgctcggccctcctccctcggccgggagctcggtccctgcaggcagtaagcggtttgtcagcacccactatggccaggcctcggctacgcgctttgttagcaccatcccacatccgcctccgacaacccagcaattcaatactatttctatcaaaccgcctctggacttttaagcagagtggtcagggaagcttcactgagctgacaccagaaggaactctaaaaggcagtgaggaagttggctgcacagatgtcaggaatgaaagtattgcagacagaggaagcagccagtgccaaaaccccaaggcaggagggcacatgacttcctctgggaactgcagggggccacagaggctagaatgtgtgaagcagaagatggagcagatgaaagagatgagagcagtccctgggcagatgtgtctgaggtttaggagagaagttgacaataggaattacaatttgggagtcctgagcatattgatgatgtttaaggccctgagattggagaaggttttcttggagatgcaaggatcaaccctaggactccaacaggaagaggccagggagatggagaaggcagccagcttagacagaaagggatgggaaggaagagccctcgcagaggcagggattgagagagagctggatcaactgcctttggcgaaggaatacctgcctccgagaatagctgtgagaattaaatgcctagaaggattaccagcacctgccctgctggagaggacagcactccgaggagtagcagaggaaccagatggaagtagccatggtctgggacaacctcatgtagcaaaacggccctcctggcctggacagacagctgagggtgcaagccccgagaaatgcgagccatggctcttcatggctgaaggaattggtcacctaacactgacacggtctggaagaattattttgaatagtaggcctgagattcgtctgacagtagctattagcaagctctcctgggaaaaccaccagggagtaaagaagtggaaccaggaaggaaaagaccagcagcaaatatgtgatatcaagccaagtctccagagaaatcccaagggggagcttggggacactatgaattatcctgcagacacatttattctttcaaccactgtcctgttccagagggtccgctccctaccagtcctgcaccaaagcaacaatctccaaaaagcggctagtgacagaaataagcctgcagatcctgagggccaacgtatgctgacaaatgaattagacaagacagcatcctggggcagtgcacacagtggagtaggcagggctcataacagtggacttcacacctggtccctgccttcatggaatttgaagtctagtaagggaatcacagacataagcccacaagtagagttcataatgcacaccataagaggacacaaagtacaacagtgcaggtttgtcttcggccctcacatggtcagggctcaagaggtaccatcaacctacaatcctgaatcacctgaccccggggcaggctccttcttggatgtgtctttgtcttcgtgggtgcagaatggttctggcagatgctgtctcacttcagcagaaacagatctgggtttatggaaatgttttgcagatgggccttttcatatccccctccgcagctactcccactctgcttgtgtgtgcatgactcatcattcgtcatttcaattactgaggcctccattcatcggcctatccatctgccaggcactctctcgccagccagcagccaccactactgagaggtcctcatggaggttccaaagccaccatgaactcaacagatccaaagcagaatgcaggatgagtggtctcaacgttcactggtcctatatgtgcaaaacctgggactcatccttgactcctttctccccttaccccacatccggtctttcatcagttgggataccttacacatccgtggcctcttgccccatccaaggtggtgcaagttatccgagtgatgaactggaaaaggaatggcaccagcatactgatgctcactgtgccctctctgtggagtctgactttagggagtggcctctcttctgctccttcttgccagaagcttttcaggaccagctgccatga

SEQ ID NO: 20642 - DNA, 382 bp, Homo sapiens
  SIMILAR (65)..(298): 291254mologous to Phalaenopsis sp. SM9108 glycine-rich protein,accession number U34746,Smith-Waterman Score=84.
cacacgaactgctcaaaggcttggagcgggtctagtaaggcgaacggactgcttccggccagaggtcccgggcggaggaggaagctgtggctgccggcggtgggacgccccggccgctcagcccccgggcactgctgtggggcgttcagctttccacacttggggcaaagcaagccgcgaggaggaaccagacagtcctgttagttgtggccagccctcattccctggaaatggcaaacaaggggaacaagaagcgtcggcagttctctctggaggagaaaatgaaagttgtgggagctgtagactcaggcaagaggaaaggtgatgtggcaaaaggaattttggtatcactccctcttactttaatctacattcttaaagg

SEQ ID NO: 20643 - DNA, 2123 bp, Homo sapiens
  SIMILAR (1625)..(717): 311254mologous to Homo sapiens CENP-B,accession number X05299,Smith-Waterman Score=413.
ctcaagtgatcctaatttgcagacaagtttggaaacccttggatgaatcaaaatacatcttgaatcaaggaccagagacagccaaaaacaaaagaaaagaaaacacacatattagtcaaattccattcaaagaagtttcctggctatttcagagtactggaatgttgtcacaataacattgctttacttaaattggctcaacaacctatctaaagaaatctttattcttgtaaactacattttctgaaataaattcctgcattattttgtttggaggaaatctgtaattttggaatcaataagggtttgtgtcactcttttcattaaatattcatctatgccatttaattgtccaaaaatgggcatcaggaatgtctacacaagtggaaaggaactgtctaagtttctgtacacttgatatggcttctgtgatggtgacttttggttgctctggtaaagatacctccccttcatcttcacttcctgcttcaactgggtattttcgccagccacccatgtccctggatgatgtctgtgtcctgagagataatgaggatcatcatctgcagtaacaaagtccctggaaatttacttcatttgggacacagggtgggcaatagcccctggtggtggccacaaacttttcaatgggcaatgtctgggttcactgggctggctgattctgtgtcacattctgcaaattccatagggacgatgcctgccttctgccaacatttcaccactgtggatggcttgactgaccaccacgctgcagcaatcatgtcgatggcctgcttgatgtccacctcttcttgatcctcactgctgttgagcttgaggaggatctgttttagaaggtggctctggtacagtactttcatggtgtgaattatgccaagattcagtggctgcaggacagcagtacagttggagggcagatacccaacctgaatcctttccaagtgtggaagcatgttatgagcagagcagttgtctatgagcaagaggatccggcgttccgccctcttcatcctggcatccacttgcatcagccactcattaaacagatcccttgtcatccaagcccactggttggctcggtaatcacaagggagggaatgaatgttcttgaggcagtgtgggctggctgacctaccaacaatcaatggtctcattttttcagtccccgaggcattgcaacaaaagagtgctgtcaaccgctgctttgctttcttgccccctctacagtggtctcctttagcagcaagtgtgtgctggggaagcaactggaaaaacactcctgtctcatcagcattaaagatatcatctgggctgtagtcagcaatcagttttataatttcccctgcatgccactcattaatcttatctattcctagaccattcattaacctgtcactatcttctctacagactgctttcaaagcaattccgtggcgatctctaaatctgttcagccagcccacacttgcttgaaaattgtcatagccaagcatgttggccaagtttagtgcttttttccgaatgacagaaccagtcacaagaatgtttttggcatggatttcttgaacccaaggcaaaaaccagccttatccaatgtcatcataaaagagcgctcctcatcctttttccgctggggtcccacggatgcctcccgcaccttttcttcaaatttggtgcgatcctttaagaatgtagataaagtagagggagtgataccaaattcttttgccacatcacctttcctcttgcctgagtcttacagctcccacaactttcattttctcctccagagagaactgccgacgcttcttgttccccttgtttgccatttccagggaatgagggctggccacaactaacaggactgtctggttcctcctcgcggcttgctttgccccaagtgtggaaagagtgcaaaatgatcaatctgactgcttcgtggagaatggattgtagaggggatgtggggagaactacatcagtccaggcaggagatgatggtggctagaaggttggtgatggcggtagatgcagagaagtaggcagactggaatacagtgagggttgtgcgggaacttgtacaaatgtggacaactttcatt

SEQ ID NO: 20644 - DNA, 1395 bp, Homo sapiens
  SIMILAR (163)..(405): 641254mologous to Homo sapiens dJ108K11.3 (similar to yeast suppressor protein SRP40),accession number Z85986,Smith-Waterman Score=283.
atgcaagctgagactgcagccgggccagttggtgcaggcccagcatcctggctgtggatttgggcctgccttcttagattctgggagcctctgatggtttctgcccaggggagtgtcattccaaaggtggtgctggctagagtgtatacgtttggacccaagcttaacttttccaatgtggaatcctgggccttcattggtgccctaatgcatgagttatcaaatgatggtgctcgtagacaatttgaattttatctggaagaaatgatcctccctctcatggtagctagtgcccagagtggggaacgggaatgtcatatagtggtgcttacagatgatgatgtggttgattgggatgaagaatatccaccacagatgggagaagaatattcacaaaaatgttacccctgcacttacaccctcttcatctgttccatcccccaatcaacttccaccatatgcaatactttatcctcctcacatactcacacaggagtcgcatatgccactagtagtacagagtcctcagaaaatcccaaaaatattttgcctctctgcaagaaaaaaagggccctaggatttaatgtggccacagttgtgggaactgtctcactcttgccacttggaggttttacttaccatgaaatcacactacaagaacttaccgcctcccttgacatagccttagcaaaaactggcacaagtatatcagcgatagaaaagtctttagactcactaggaggaatggttttttgtaatggacaagctcaaaattacctcctagctgaacaaagaggaatctgtgctgtcatcaacaaaacttgttgcacctacattaatgtatctgaaaaaatggaaactgatacacacacttttccaaaaaaccacagtccagggcagacggaccatcatgacctgccatgggcagtcatcctcagagtgtgtgcagatcaagaggaccaggagaagggcagctggctctgccctgagagacaaagggggcccctttccttgaagaaggacaacaaaggggttgagtgtggactgggaggaggttcagaccggatatggagatccgggtgtcttcaagacagaggtgagtggtggatgagctcacccagggaggacgttaaggatgacgtgaaagggaccaagccaaaccagaagctaaggacaaagaacagagaaccagcagagcaggctgtggaggctggaatctcagcagctggaggagaaccgggagccgacccaggagaggcacgctcagcagagctgaagaaagcgaggcctgaggtgggagttctcgctgcagggagcagtcagctgggcattggcaatggcagccaagtaaaacaattaaaacaaggtgctgacagcgcagctgacaatctgtag

SEQ ID NO: 20645 - DNA, 2328 bp, Homo sapiens
  SIMILAR (1682)..(2095): 301254mologous to Homo sapiens dJ108K11.3 (similar to yeast suppressor protein SRP40),accession number Z85986,Smith-Waterman Score=99.
  misc_feature (1)...(2328): n = a,t,c or g
ctattttcctgtaggtcttgccccgggggtgtaagcttcgaaggcggagactgtgtcttttacattttttcccgtttttattgcccagccagcccatgtaggtgactctcggtgtttcctaggcggccaaactgaaggagtttcagctggcacaggggttcccgccaaccgagcgtttaaaaataagcagcgggggacgttagggaacagagggtgtccctcacgacgaccgactctcatcaggtccacgccggcagaagcgattttgcagtttgctttgatgaggaaaacgctctccctgaagagtccctgcactatttctccaactctgtgaccgagacgctgtccacttttctccgtggccgccgcgccctcaactgccttctccttcggtgccccgcccacccctgggcggagagcaccgttctcgcgagaacgctgctggcctcgcctcttcgcattgtgagctctcgcggtaagaggctgaggagccggcctgcaacctgccggggcggctccgctacgcgcagccgcctcagtggcattcctgcacagccacctccggaggattctggctgaggaggaagtggaggtgtcactggcccccgccttttgcccaatcttgtgtgggcactgaaggggggactacaggttcgagagttatgggtgctacatgtgtgctttcagagcagtagtgtgaggaagcttggagtgggatggcaggacggcctcatccctatgatggtaactccagtgatccagagaattgggatcggaaattgcatagtagacctcgtaaactttataaacattcaagtacttcctcgcgtattgctaaaggaggagttgaccacaccaaaatgagtctacatggtgctagtgggggacatgagagatcaagagatagacgaaggtcaagtgacagatcacgagattcatctcatgaaagaacggagtctcagctcactcctttgtattagaaatgtgacttctccaacacgacagcaccatgttgaacgagaaaaagatcacagttcctctcgtccaagcagtccgcgtcctcaaaaagcatccccaaatggttccattagcagtgctggtaacttgcagcagaaacagtactcagtcaagttcagatggtagctgtaagacagctggggagatggtgtttgtatatgaaaatgcaaaagaaggagctcggaatataagaacgtcagaacgagtgacactaatagtgggataacactagatttgttgtagacccatccatttttacttgcacagcccaaatacaatgttggggcaggatgtttggatctggccgagaacataactttacacgacccaatgagaaaggagagtatgaggtggcagagggaattggttccactgtgtttcgagcgattctggattactataaaacaggaataatccgttgtcctgatggcatatctattcctgaactgagagaagcatgtgactatctttgtatctcttttgaatatagcactattaaatgtagagatctcagtgccctaatgcatgagttatcaaatgatggtgctcgtagacaatttgaattttatctggaagaaatgatcctccctctcatgggtaggctagtgcccagagtggggaacggggaatgtcatatagtgggtgcttacagatgatgatgtgggttgattgggatgaaggaatatcccacccacagatggggaaagaataattcacaaattattttatagcacaaaaattttataaaattttcaaagtatattgaaaacagagatgtggccaagtccagttttgaaggagaggggtcttaagaaggatttagattgggaatagaagggttatcctacctacaaagaaaaagtaaagaaaaggcctggaggccgcccagaagtgatctacaactatgtccaaagaccctttattcgaatgtcctggggagaaggaaggaaggaaagagtcggcatgtaggacttttcagtgtgtaaagagtaaatctattcaccaatcttgcagcagctgcagcaggacattccccagggaccagctggtagttcattgcatcccacttccacaagttggatggagctgggtatttttcccctattccatcccccctttttgggcaacagttgaccttcgatcccttgattgcacaggattcccattgctgttgttgctgttctttccttggaaaccctaggcttgttattttttcaccagtgacgttgtantctcntcattttgcactgcagggccattttcttcatgtgaggtgcacttacatgtttgggtttgcgtgtgggtttttaa

SEQ ID NO: 20646 - DNA, 481 bp, Homo sapiens
  SIMILAR (481)..(377): 971254mologous to Rattus norvegicus p105 coactivator,accession number U83883,Smith-Waterman Score=176.
  misc_feature (1)...(481): n = a,t,c or g
nnnnnnnnnnnnnnnnnnnnnnnnnnnnnnnngcagacagcacgtactattttattgggcctcaaaagctttaaatacagaatgggctggccagagcgaagatgtgaacacactggcatttgagaatggacgtatcaaaaaaatcacataatcaacagttggacagagagctgggacgagggcagtctgggatagaggcaggtgccagctggcggccagcctgggtgttaggattactccctccactaggacatagtctttgatgtttcttcctgatttgaggactttttttttttaaaaaaagcccacaaacctccaaataaaaccaactggcagagactgtggatagcagtgcccatcatcccagaggacaagggtctgcatcatcagctcgaaagtctccatagcgccacaggttcagcctggcgctcttggctgactcttgggcattcaggtattctgggatcactttctggaactg

SEQ ID NO: 20647 - DNA, 1461 bp, Homo sapiens
  SIMILAR (373)..(945): 981254mologous to Homo sapiens 100 kDa coactivator,accession number U22055,Smith-Waterman Score=987.
atgggcaagatgtttgcaggtgaagagttagatgccggtgaaaaaggaaatcgggaaggtgatgacagaaagagctgtaataaaagggaacagagccccatgggcgacagctttatcgccatctacaacccaggatggattcggtggcagcactgtgcccaaggccagagatttctttcatctgcggctggctgggcccagggacttgtcaagcccaagttagcatatcgattgcaggcgacaggctggttaagtgtgaagctggtgctcacctgcgcaggagagcccggctgcaccctgcagtgttggccccaggtgtggctgctcattgctgggttccttctcatgttaaggagaatcccgtttgccccggtggaggtggaggtggagagcatggacaaggccggcaactttatcggctggctgcacatcgacggtgccaacctgtccgtcctgctggtggagcacgcgctctccaaggtccacttcaccgccgaacgcagctcctactacaagtccctgctgtctgccgaggaggccgcaaagcagaagaaagagaaggtctgggcccactatgaggagcagcccgtggaggaggtgatgccagtgctggaggagaaggagcgatctgctagctacaagcccgtgtttgtgactgagatcactgatgacctgcacttctacgtgcaggatgtggagaccggcacccagttggagaagctgatggagaacatgcgcaatgacattgccagtcacccccctgtagagggctcctatgccccccgcaggggagagttctgcattgccaaatttgtagatggagaatggtaccgtgcccgagtagagaaagtcgagtctcctgccaaaatacatgtcttctacattgactacggcaacagagaggtcctgccatccacccgcctgggtaccctatcacctgccttcaagcactcgggtgctgcccagctcaagccacggagtatgccttcgctttcatccaggtgccccaagatgatgatgcccgcacggacgccgtggacagccgtagtttcgggatattccagaacactcagtgcctgcttcaacgtgggaacacctggagttgccggcttgcccccatgtcaacctggcagttttgcagatttccaagggcgatgtgggggttggggttggtgaaggaagggctggtcatggtggaggtgcgcaagaagaaacatcaaagactatgtcctagtggagggagtaatcctaacacccaggctggccgccagctggcacctgcctctatcccagactgccctcgtcccagctctctgtccaactgttgattatgtgatttttctgatacgtccattctcaaatgccagtgtgttcacatcttcgctctggccagcccattctgtatttaaagcttttgaggcccaataaaatagtacgtgctgtctgcagcccttattgatc

SEQ ID NO: 20648 - DNA, 3566 bp, Homo sapiens
  SIMILAR (2219)..(2007): 731254mologous to Mus musculus p100 co-activator,accession number AB021491,Smith-Waterman Score=249.
tttttttttttgtgatcaataagggctgcagacagcacgtactattttattgggcctccccaagctttaaatacagaatgggctggccagagcgaagatgtgaacacactggcattttgagaatggacgtatcagaaaaatcacataatcaacagttggacagagagcttgggacgagggcagtctcgggatagagcgcaggtgccagctgcgcgcgccagctgagcgtgttaggattactccctccactagggacataagtctttgatgtttcttccctgatttgaggactttttttttttaaaaaaaagccccacaaacctccaaataaaaccaactggcaggagacttgtggataggcagttgcccattcattcccagagggacaagggttttgcccccaggaaagcccttgggggtccccaccccggcaggccccggatgccacccccacgaggactttttcccacacattgaaggcaaagttgggacccaatctacaacccctctctggggttttgggagtttgaaaacaccctcccggcagagggaagaggggactggcgtgacggggggcttggggccaaaacccgatttccctccttaagcggctgtagcaaaattggtctggcatcatcagctcgaaagtctccatagccgccccaggttcagccctggcgctccttggctgactctttgggcatttcagggtattcctggatcacttttttggaactgggtctcctttgcgcacctccaccatgaccagccccttccttaaccaaggcccagcccccacattggcctttggaatctgcaaactgcagggggacatggggggcagccggcactcaggtgttccacgttgagcaggcactgagtgttctggatatcccgaactacgctgtccacggcgtccgtgcgggcatcatcatcttggggcacctggatgaaggcgaaggcaatactccgtggcttgagctggcagcacccgagtgctgaaggcaggtgatagggtacccaggcgggtggatggcaggacctctctgttgccgtagtcaatgtagaagacatgtattttggcaggagactcgactttctctactcgggcacggtaccattctccatctacaaatttggcaatgcagaactctcccctgcggggggcataggagccctctacaggggggtgactggcaatgtcattgcgcatgttctccatcagcttctggaactgggtgccggtctccacatcctgcacgtagaagtgcaggtcatcagtgatctcggtcacaaacacgggcttgtagctagcagatcgctccttctcctccagcactggcatcacctcctccacgggctgctcctcatagtgggcccagaccttctctttcttctgctttgcggcctcctcggcagacagcagggacttgtagtaggagctgcgttcggcggtgaagtggaccttggagagcgcgtgctccaccagcaggacggacaggttggcaccgtcgatgtgcagccagccgataaagttgccggccttgtccatgctctccacctccacctccacctctcgctgcagcaccagttccttggtgaaaagtgtagcttcctcgctgaagggctctccttcctgcaccaagccctgggaggtttcgggctcctctggggcattcaatgcctgcaagcaaagaggtgataagggcagtttcctttggcaaatagagtttgagacgagaaccactggaagacgtattcacccacagcttcagaacgacctgcccgctgaagaaaaggcaggaactgctttgctttttgggtatccccagatatatctgcaacacggtggataggcacttccttcttgttatgcaaatcctatcacattattaatagctttggcctctgcagcaagcagttcatcgtagtgtgatgatctctggtcatcatcctgccggtatctgatcactgtgggtagaactttggttacaaaaaccttaaccaatgtttaatccctcccaatggtgaacagtggcacaggtacgcctctgaaaaaggcaggcactgtctctgtggctgggctggctggtcctaatgtagtccaccgtcacattgaccttcttcccaataagcttttttcgaagaaattcccgggcctcaaacatgtaaggaatgtcatacaggggacgcagtttcttgttcttatcctgggtgttctaaacccaaaagcctcggtggacggatgctggacaggtgaatcgtgttgtggtcgcctgagttcagcttcacaacaatggcatcagcattcagaacctgcatcaccttggcaacaaactgcttgtccttttggtccaaattagctgtgggagccacatagtctctccatattctcagcctgcgctctttggcaaacctctctgccgccctcagcttttctgcgccccgggtgtaaactgcaatcgaccagtccacacagcgtgcgaaaccttccttcaggaggagctctgtgatgttgccatttggatgaaggatggtacccagaatgttctggttgtggcagctctccagaatgatctgaacatctctctgaagcagtcgcgactcagtgaaaaatttggcttctgcagcaaaaggctctgaagtttcactgccatctgcttcccgtagaaaagttgggcacttgatgcctgacagcatgactgtaaccaggtagtaatctgggaggaagcagggccctgaccacactgccgtcccgcacatgctcgatgatagcattaacaggcttctggtggtgtgagtccacaaagtgccttgggttttcaatggtatacttgagatcccggatagtatgtgaaccgttcccctcactccacatccctttcttggctgcctttgcttgttcttcacattctgaaagccggttctgctcaggattattagctctcatgccttctctccgggtggctaagccctctgcaaccagtgattctgcaatgttttccccattggtatcttttccaaggtagatcatgccatactctcgcccctggggagtcttgttttctatcgtgaaacagacttccttcccaatcagcttctttcgaaggaactctcgagctggaaatgcccagggctcatcaggggtatcctttgcatcaggttgtgtggcggctgcccggcgagcaagatttccagcacgaatgttgctgaggttgatctaccgctcaggaggaggcccaccacgaggctgacctcggacaatgatggcgcaccctgagaggaccatcttgatgatgccccgctgcacggtggggaccgcgggtcccccggaggagccgccgctctgcgcggaggacgccatgtgtggagatgcaaaggcaacgagtggagcggctggccggactggaggtgtcaatgtgggtgtcggtgttggtgaaagggagtcgaggcgaggggcaggctggctaccagctgcggacggtggacgggacggactcgccgggcgctcacaggagcagcagcgggacacggagcgaaagagacgcgatctccgccgcacgaaa

SEQ ID NO: 20649 - DNA, 403 bp, Homo sapiens
  SIMILAR (70)..(2): 951254mologous to Homo sapiens Similar to S.cerevisiae hypothetical protein N0330 (S55864),accession number D87464,Smith- Waterman Score=107.
caatatccgccatcttcctccttttagttattaacacaatataatagccttataagaacctgacaaaaccctgtcatcaattatgaccaaatcttttggttctgttctatcaatcttcaagacacgatatttcgtttctgcattattgctcccaactagaaagtatctagctctagtctcatgcagaaccagcttctggaccgagctgatgatgggggcggcggccgtgggcatggcggcggcaaatgggggccccacaacagggcacgagcctccggaccgccccaggagactcggcgagaaaacccctcagcccctggacatcaagtccagccaggaaaaacaaacattaggcactaaacctatagatgatcaggacgaaatcgtcgacccgggaattcag

SEQ ID NO: 20650 - DNA, 621 bp, Homo sapiens
  SIMILAR (199)..(507): 771254mologous to Homo sapiens Similar to S.cerevisiae hypothetical protein N0330 (S55864),accession number D87464,Smith- Waterman Score=386.
atggctgagggggcgggggaggccctgctggtgactgtgcatgcagtcatcatggtgatcctgttagcacaggggcagggcactggtagggggatgagtgtccctggctgtgctccactacaaacgctcccataccaaaccctctgggctctgcataagccagcgtgttgcccctaccacttctctgagcagctcttcctgccaactcgagtgtctgtgatggtcagggagtctccttctgtcaggattccagaggccttggcgagaagatactttctagttgggagcaataatgcagaaacgaaatatcgtgtcttgaagattgatagaacagaaccaaaagatttggtcataattgatgacaggcatgtctatactcaacaagaagtaagggaacttcttggccgcttggatcttggaaatagaacaaagatgggacagaaaggatcctcgggcttatttcgagcggtttcagcttttggtgttgtggtaaaggttttggatggaaagcccagagctgtcagcagttgtgtttcctaccacatgatccagagaagtggaggagcttggtctatggagagagagaagaatggagtagatgttcagagacatcttgactag

SEQ ID NO: 20651 - DNA, 633 bp, Homo sapiens
  SIMILAR (328)..(504): 361254mologous to Homo sapiens p8 protein,accession number AF216972,Smith-Waterman Score=57.
atgggggcggcggccgtgggcatggcggcggcaaatgggggccccacaacagggcacgagccttcggaccgccccaggagactcggcgagaaaacccctcaggccctggacatcaagtccagccaggaacaacacccattaggcactaaacctatagatgatcaggcaagccccgcccctcacgtcgggagcggggctggaggacgtatcatagagaggtcgggtagaggctcccgggacctgcgtgctgccgagagaggaagcgaagggcaccatctttggtccaaagtgactatttcgaattggaaaagaaatgacaaagaactacagccccgcctcccgaggccccgccccaccaagcagcaggtgcgtggcggccagaggtctccccggcaaccgcccgacagccccgcggagtccctggaggcagttgcttccctgaggagggtccggctgcggccaggtaaggagccttccggcggcccgctgggtcgtggtccgccctggaggcatcttggtatctgttgcacggaaccccgcctcctgcggggacccccagaccagcttcttttcttgcaaaacggtctctttgtaaatccactttttaaaaccacgtctcctttcaacgactga

SEQ ID NO: 20652 - DNA, 3605 bp, Homo sapiens
  SIMILAR (629)..(946): 281254mologous to Saccharomyces cerevisiae NO330,accession number Z46259,Smith-Waterman Score=115.
  misc_feature (1)...(3605): n = a,t,c or g
tcagtcgttgaaaggagacgtggttttaaaaagtggatttacaaagagaccgttttgcaagaaaagaagctggtctgggggtccccgcaggaggcggggttccgtgcaacagataccaagatgcctccagggcggaccacgacccagcgggccgccggaaggctccttacctggccgcagccggaccctcctcagggaagcaactgcctccagggactccgcggggctgtcgggcggttgccggggagacctctggccgccacgcacctgctgcttggtggggcggggcctcgagaggcggggctgtagttctttgtcatttcttttccaattcgaaatagtcacttttgtacctaatttggcatttataattataatacactcattttcacaacaaagatggtgcccttcgcttcctctctcggcagcacgcaggtcccgggagcctctacccgacctctctatgatacgtcctccagccccgctcccgacgtgaggggcggggcttgcctgatcatctataggtttagtgcctaatgggtgttgttcctggctggacttgatgtccagggcctgaggggttttctcgccgagtctcctggggcggtccggaggctcgtgccctgttgtggggccccccatttgccgccgccatgcccacagtcagacgtccccatctatcagctcggtccagaagctggctctgtatgagactagagctagatactttctagttgggagcaataatgctgaaacgaaatatcgcgtctcgatgattgatagaacatatccaaaagattcggccataaatgatgacaggcatgtctatactcaacaagaagttagggaacttcttggccgcttggatcttggaaatagaacacatatgggacagaaaggatcctcgggcttatctcgagcggtttcagcctttgggtgttgtgggttgtgtcaggttcttacaaggctattatattgtgttaataactaaaaggaggaagatggcggatattggaggtcatgcaatctataaggtcgaagatacaaatatgatctatatacccaatgattctgtacgggttactcatcctgatgaagctaggtatctacgaatatttcaaaatgtggacctatctagcaatttttactttagttacagctatgatttgtcccactcacttcaatataatctcactgtcttgcgaatgcccctggagatgttaaagtcagaaatgacccagaatcgccaagagagctttgacatctttgaagatgaaggattaattacacaaggtggaagcggggtatttgggatctgtagtgagccttatatgaaatatgtatggaatggtgaacttctggatataattaaaagtactgtgcatcgtgactggcttttgtatattattcatgggttctgtgggcagtcaaagctgttgatctatggacgaccagtgtatgtcactctaatagctagaagatccagtaaatttgctggcacccgttttcttaaaagaggtgcaaactgtgagggtgatgttgcaaatgaagtggagactgaacaaatactctgcgatgcttctgtgatgtctttcactgcaggaagttattcttcatatgtacaagttagaggatctgtgcccttatactggtctcaggacatttcaactatgatgcctaaaccacctattacattggatcaggcagatccatttgcacatgtggctgcccttcactttgaccagatgttccagaggtttggctctcccatcatcatcttgaatttagtgaaggaacgagagaaaagaaagcatgaaagaattctgagtgaagaacttgttgctgctgtgacctatctcaaccaatttttgcctcctgagcacactattgtttatattccctgggacatggccaagtataccaaaagcaagctgtgtaatgttcttgatcgactaaatgtgattgcagaaagtgtggtgaagaaaacaggtttctttgtaaaccgccctgattcttactgtagcattttgcggccagatgaaaagtggaatgaactaggaggatgtgtgattcccactggtcgcctgcagactggcatccttcgaaccaactgtgtggactgtttagatcgcaccaacacagcacagtttatggtgggaaaatgtgctctggcctatcagctgtattcactgggactgattgacaaacctaatctacagtttgatacagatgcagttaggttatttgaggaactctatgaagatcatggtgataccctatcccttcagtatggtggttctcaacttgttcatcgtgtgaaaacctacagaaagatagcaccatggacccagcactccaaagacatcatgcaaaccctgtctagatattacagcaatgctttttcagatgccgatagacaagattccattaatctcttcctgggagttttccatcccactgaagggaaacctcatctctgggagctcccaacagatttttatttgcatcacaaaaataccatgagacttttgccaacaagaagaagttatacttactggtggacaccagaggtgataaagcatttaccattgccctatgatgaagttatctgtgctgtgaacttaaagaagttgatagttgaagaaattccacaaatatggagaagagatttatatccacaatgagttctttcggccatatgagttgagcagctttgatgataccttttgcttggctatgacaagctcagcacgtgactttatgcctaagaccgttggaattgatccaagtccatttactgtgcgtaaaccagatgaaactgggaaaatcagtattgggaaacaaaagcaatagagaagaagctgtattacagcggcanaacggcagccagcgccccgccgccccccagcgaggaggctgtgtccagcagctctgaggatgactctgggactgatcgggaagaagagggctctgtgtctcagcgctccactcccgtgagagatgactgatgcaggagacagtgccaaagtgaccgagaatgtggtccaacccatgaaggagctatatggaacttaacctctcaagatggccttctcagaagaagatttctccattttattcaaagattttgttcaagcttggggcaagagtcaacattaaaacaagaccaagaattagcccagccagcccctgttcctagggtgcctcaagatgggaggttataaaaactaacacccccatctcgggctttctcgcaaagataacatcctatgaaagttcagccccccaagagtagacagaaaatcttacagagatcttcccaagccccacatcccaggccagcccaaggtatcatgcagcccctaggaaaagaggactcctccatgtaccgagagtacatcaggaaccgctacctgtgaaaagagcgcaggtccacctggtggacacgtctgattagcttagaacctgtcttgtctcatcttcaaaaggtaacttattaaaagtcctttgcgtctgaagcctttctccttttctgtcatttgcaaattccaaattatagctaagtaaagatgactagataaaaaaaaaaaaaaagggcggccgct

SEQ ID NO: 20653 - DNA, 403 bp, Homo sapiens; identical to SEQ ID NO: 17297
  SIMILAR (65)..(3): 951254mologous to Homo sapiens unnamed protein product,accession number AK000459,Smith-Waterman Score=111.

SEQ ID NO: 20654 - DNA, 408 bp, Homo sapiens
  SIMILAR (3)..(404): 921254mologous to Homo sapiens golgin-like protein,accession number AF263742,Smith-Waterman Score=605.
cctccgtgacaatcaatcagctcaatgaaaacatagaatcattgaaacagcagaagaaacaagtggaacatcagctggaagaagcaaagaaagcaatcaatgaaatacacaaagcacaaacggagcagttagagacaatcaacatcctcacattggaaaaggcagacttgaagaccaccctttaccatactaaacgtgctgcccgacacttcgaagaagagtccaaggatcttgctggccacctgcaatacgccttgcagcgtattcaagaattggagcgggctctctgtgctgtgtctacacagcagcaggaagaggacaggtccttgagctgcagtgaagcggtcctccagtggcggttacagcggaccataaaggagcaggcactgctgaacgcacacgtgtatt

SEQ ID NO: 20655 - DNA, 398 bp, Homo sapiens; identical to SEQ ID NO: 17299
  SIMILAR (43)..(2): 921254mologous to Homo sapiens unnamed protein product,accession number AK000459,Smith-Waterman Score=65.

SEQ ID NO: 20656 - DNA, 621 bp, Homo sapiens
  SIMILAR (67)..(369): 981254mologous to Homo sapiens lysyl oxidase-like protein,accession number L21186,Smith-Waterman Score=533.
atggctctggcccgaggcagccggcagctgggggccctggtgtggggcgcctgcctgtgcgtgctggcgcggcacccattcggctttggccaggtgcccgacaactggcgcgaggtggccgtcggggacagcacgggcatggcccgggcccgcacctccgtctcccagcaacggcacgggggctccgcctcctcggtcgcggcttcggccttcgccagcacctaccgccagcagccctcctacccgcagcagttcccctacccgcaggcgcccttcgtcagccagtacgagaactacgaccccgcgtcgcggacctacgaccagggtttcgtgtactaccggcccgcgggcggcggcgtgggcgcggggggcggcctaaaagaatatcagcaaaggaagagccctggtattccagcaggagcaaagacaaaaaagaaaaaaactgacagtagccttgagacaaccacttccggtggttgccactcacctggggatattcaggacattctgaaggtgcgggtgtccaaccttaaccactccaatggggtagtgctcccccattggacaagtggaaggtcgttatttcccatttacgcaggttttacagacagaataagctga

SEQ ID NO: 20657 - DNA, 531 bp, Homo sapiens
  SIMILAR (214)..(528): 941254mologous to Plasmid F Protein D,accession number M12987,Smith-Waterman Score=491.
  misc_feature (1)...(531): n = a,t,c or g
atggaagccatcacaaacggcatgatgaacctgaatcgccagcggcatcagcgccttgtcgccttgcgtataatatttgcccatggagatggaggacaacatctggacagtgaggaggaggaggcgcctcggcccacgccaaacatcccagaggacctggagagccgggaggccacgccgcaaacactcggacttgaaagccctgctaggtggactcttaaagcacccccctgggnagtgacggacagaacggtcaggacctggattggggaggcgggtgccgccgctgatgctgacggtgtgacgttctctgttccggtcacaccacatacgttccgccattcctatgcgatgcacatgctgtatgccggtataccgctgaaagttctgcaaagcctgatgggacataagtccatcagttcaacggaagtgtacacgaaggtttttgcgctggatgtggctgcccggcaccgggtgcagtttgcgatgccggagtctgatgcggttgcgatgctgaaacaattatcctga

SEQ ID NO: 20658 - DNA, 423 bp, Homo sapiens
  SIMILAR (343)..(423): 1001254mologous to Homo sapiens golgin-like protein,accession number AF263742,Smith-Waterman Score=125.
atgggctgctggagcgggaatgagggggcgccagtggctccggaaacgggtgcaggttgtctgccctggcctctccgcaaacaatttaaatttacccaccacccaaatgcttctgcagaaaaagccagaaatgtcctagctgtggagactgtgcctggagagctggtgggagaacaagctgcaaatcagcccgccccagggcatccaaattccattaatttttactctttgaaacagtggggcaatgagctcaaggtgtcttcagatgagtcagcatgtgggctgttttactccccgctcagctcctccatgtggcctgggtcacaaatgattgtgatgattagccagtaccaagaactagcagtagccctggagtcaagctccgtgacaatcaatcaactcaatgaaaacatagaatcattg

SEQ ID NO: 20659 - DNA, 720 bp, Homo sapiens
  SIMILAR (1)..(531): 821254mologous to Homo sapiens melanoma-associated chondroitin sulfate proteoglycan (MCSP),accession number X96753,Smith-Waterman Score=742.
gtcaaccctgtcaatgacccaccccacatcatctttccacatggcagcctcatggtgatcctggaacacttgcagaagccactggggcccgaggttttccaggcctatgacccggactctgcctgtgagggcctcgccttccagctccttggcaccccgtctggcctccccgtggagtgccgagaccagcctggagagccggcaaccgagttctcctgccgggagttggaggccggcagcctagtctatgtccaccgcggtggccctgcacaggacttgacgttctgggtcagcgatggactgcaggccagccccccggcgacgctgaaggtgatggccatccagccggccatacagatccaccgcagcacagggctgcacctggcccaaggctctgccatgcccatcttgcccgccaacctgttggtggagaccaatgccgtggggcaggatgtgacagagtcactaaaacaagtccagctagagcaggacgaatatgctaaacacataaaaggagagagggcccggtggcaggagaggatgtggaaaatgtcggtggaggctcgaacattaaaggaagagaagaagcgtgacatacatcggatacaggagctgaagaggagcttgtccgaactcaaaaaccagatggcggttatcaatcacaagaaacgtaaaagtggggcgcgaatcgtccagtcaaacgacctcactgaggcggac

SEQ ID NO: 20660 - DNA, 461 bp, Homo sapiens
  SIMILAR (1)..(435): 741254mologous to Homo sapiens Human bladder tumour EST encoded protein 18,accession number Y66160,Smith-Waterman Score= 552.
ttttttttttttcctttatacttctgtttatttttcctgcttatgaaaacagccaacaattgcctttcaagggaagggaaggtaatgctgggaaaggtcctcaggagccctgagccaagttctcaagagagaagtgaggcagctggggatctgggaggccagagtccgggccagggcatcagcatcctagaaccagggctgcctcccgaagagcagttcagagggcgtgactccatacgggcagggcggctccacacaggcctggaacacccttctcctcagcccagggagctcatcagggtctgggcctgcttcagtttgcgtaggctgcagacccgcaagtgcttctgcaaggggctttgcttctcctcataacagcggcacaggctggccgcgtgctctttgggcagccccagctgctgcagttcactggacaaggattcgccatcgacactgtgctt

SEQ ID NO: 20661 - DNA, 1629 bp, Homo sapiens
  SIMILAR (496)..(705): 951254mologous to Cloning vector pSacBII SacB,accession number U09128,Smith-Waterman Score=364.
atgtttgcaaactctggagtaaacaagagtgggaagctgataaggtggctggcctaccagccagcgcggccggaggtacagaccatgtacagaccacggcgaggggtgttaggggcttctcgggataaaggcagcgagtggctgcgcattccctccccgactctttcagaggtcactcggcgatttacttccttcccccgcttcctcacagtcctccacagccctacgacttccgcttgcctcgtcgtctgggaaaccgccgacttccggccgcgcagcggagatggaggacaacatctggacagtgaggaggaggaggcgcctcggcccacgccaaacatcccagaggacctggagagccgggaggccacgagccagtaccaagaactagcagtagccctggagtcaagctcagtgacaatcagtcaactcaatgaaaacatagaatcattgaaggaaatacctgaaggcaatttgggaattgccatcaaaagaggagcgactcaagccttcgcgaaagaaaataaccaaaaagcatacaaagaaacgtacggcgtctctcatattacacgccatgatatgctgcagatccctaaacagcagcaaaacgaaaaataccaagtgcctcaattcgatcaatcaacgattaaaaatattgagtctgcaaaaggacttgatgtgtgggacagctggccggtggaatcctatccatcttcttcaccgatatggtttgtggattctgaagacccaaatctgacatcagttctggaacgtctagaagatactaagaacaacaatttgattcagccaaaagtaataccttcccttttaagattaggctccaaaagagattatgaagttgcctttgcccatccttctcctgctctttccaatgctccctatgaggaaccccagtttgccatgatgatcacagctgccaccaacaacttcgctgcatgggattttcctgatttcggaaccaccatcaaacaggatttttgcttgctggggcaaaccagcgtggaccgcttgctgcaactctctcagggccaggcggtgaagggcaatcagctgttgcccgtctcactggtgaaaagaaaaaccaccctggcgcccaatacgcaaaccgcctctccccgcgcgttggcccgattcattaatgcagctggcacgacaggtttcccgactggaaagcgggcagtgagcgcaacgcaattaatggattttgccgatttcggaaccaccatcaaacaggattttcgcctgctggggcaaaccagcgtggaccgcttgctgcaactctctcagggccaggcggtgaagggcaatcagctgttgcccgtctcactggtgaaaagaaaaaccaccctggcgcccaatacgcaaaccgcctctcccccgcgcgttggccgattcattaatgcagctggcacgacaggtttcccgactggaaagcgggcagtgagcgcaacgcaattaatgggcactgcccgggatccccagattgaaacttctcacttcttcaccctccagtcctcgagctgcagagaagcggtcctccagtggcggttacagcagaccataaaggagcaggcactgctgaacgcacacgtgacacagacacagtaa

SEQ ID NO: 20662 - DNA, 1713 bp, Homo sapiens
  SIMILAR (291)..(341): 821254mologous to Homo sapiens Human bladder tumour EST encoded protein 17,accession number Y66159,Smith-Waterman Score=70.
atggcgctgtggcgcggctccgcgtacgcgggcttcctggcgctggccctgacctggcgggaccggaaaaagaaattcccgggcgatgatgaggcaccaggggtgaagcgcacatgggctgctggagcgggaatgagggggcgccagtggctccggaaacgggttgaggttgtctgcactggccgctccgcaaacacagtgtgtgcgggcgtcagggcagcaggtctggtagagaaaagtccaccgccatccctctcccgagtggggcggaggtttcggttctgtggtgatctggactgtcctgaccgggtcctggcagagatcagcacgctggccaagatggttgagtgcacagggtctacactgggtggaggagggtataagaagatcctgaaactcacagctgatgccaagtttgtggaggagcatgagggaaagaaagacattgacagtcccaccttcctgtcctctgccagctcctggtggagcagtagcagtgcctatggctccaggaggcctgggggctttgagctgaagttaatagggcaacagggagagtcaggcgatgtgaaggccacagtggcagtgctgagtttcatcctctccggtgcggccaagcacagtgtcgatggcaaatccttggccagtgaactgcagcagctggggctgcccaaagagcacgcggccagcccgtgctgctgttatgaggagaagcaaagccccttgcagaagcacttgcgggtctgcagcctacgcacgtggtccctggcagcacgagtggcagaagggacagcagagactgtggacccctcagctgcacctaagacctctgtgtggtctagccgtgtgtgctgggggaggcttttggccaccatttccccctctgtaaatgagaccgatacctgtggcatggaggacaggaggctggtggtgtgcaggccctggcgtgcacagtgccacatgaaggcctggggctggcgccaccctgaagaaggtggcacccactctggcgccccctctgctgtcctgcaggctctggcggtggccatccagcttggtggccatctggctgatccactcctccaggtggaccctctgtcctcatgtggtgcagtaagtttggacattctgatctacttggtgttttattatagaactgctagtgtgcccgagacttacattgtgaagacactttttaaaaaacttgagagccaaagcctaatccagagcaatgtcctaactcgctccaattctatgaaggctgagagaggtgaggaagctgcaaaagaaaagtcagaagctagcagaggttggttcatgaggtttaaggaaagaagctgtctccacaacataaaaatgcaaggtgaggcagcaagtgctgatgtagaagctgcagcaagttatccaaaagatctagctaagatcactgatgaacatggctacactaaacaacaggttcgatgtatacaaaacagccttctgttggagggtaatgctgaagaagtacgtaaaattattgtttgttctatgtcccctcccttaaaaccaggtggacctgtgactctggtagaagagttcctatgtgcttctaaggcttccgtgtcagcagtttctggctggattagcaagtggaggaactggcaggagattagaaggcaagaggaaagagaagacagggcttccctccccgaccttcaggcctcagagtcgtag

SEQ ID NO: 20663 - DNA, 5154 bp, Homo sapiens
  SIMILAR (4910)..(4957): 561254mologous to Homo sapiens golgin-like protein,accession number AF266285,Smith-Waterman Score=44.
atggagcggttagagacaatcaacatcctcacattggaaaaggcagacttgaagaccaccctttaccatactaaacgtgctgcccgacacttcgaagaagagtccaaggatctggctggccgcctgcaatactccttacagcgtattcaagaattggagcgggctctctgtgctgtgtctacacagcagcaggaagaggacagggggcactgcctgagctccccagatcaaaacttctcactcttcaccatccagtcctcgagctgcagagaagcggtcctccaccggcggttacagcagaccataaaggagcgggcgctgctgaacgcacacgtgacacaggtgacagagtcactaaaacaagtccagctagagcgagacgaatatgctaaacacataaaaggagagagggcccggtggcaggagaggatgtggaaaatgtcggtggaggctcgaacattgaaggaagagaagaagcgtgacatacatcggatacaggagctggagaggagcttgtccgaactcaaaaaccagatgggtaagatggggctgctacaagatgaggccaaacacctgaggcaggaggtggaaggtctggagggaaagctccaatcccaggtggaaaacaatcaggccttgagtctccttagcaaggaacaaaagcagagactccaggagcaggaggagatgctccgagagcaggaggtgcagagagtgcgggagcaggagagactgtgtgaacaaaacgagaggcttcgggagcagcagaagacgctacaggagcagggtgagaggctgcgaaagcaggagcagaggctacgcaaacaggaggagaggctgcgaaaggaggaggagaggctgcaaaagcaggaaaagaggctgtgggaccaggaggagaggctgtggaagaaggaggagaggctacaaaagcaggaggagaggctcgcgctctcccagaaccacaagctcgacaagcagctggccgagccacagtgcagcttcgaggatctgaacaacgagaaaaagagcgcactgcagttggagcagcaagtaaaggagctgcaggagaagctagacgaggtgaaggagatgcagtacgtggccacctatcagcagctgacctctgagaaggaggcgctgcacaggcagttactgctgcagacccagctcgtggaccagctgcagcagcaggaagcttggggcaaagcggagcacctagaagctgccagccagcagaaccaacagctagagacccagctaagcctcgtggctctcccgggagaagacccccttatgctcttggtttcccaccttctgattgctctggcccctcaccccttccgggagccagtggtcagacactttgtcacctgtgaccaacagctcggcatttaccagaaggcatttgaacatcttggcaatgcactgacttatgaccctaccaactacaaggccatcagctgcctgaaacgagccaactacttggcaccctttgattggaagattctgtataatttgggccttgtccatttgaccatgcagcagtatgcatcagcttttcattttctcagtgcggccatcaacttccagccaaagatgggggagctctacatgctcttggcaggtctgcttagcacgtgtaaccctttagtaaacctgaactatgctgtgctgctgtacaaccagggcgagaagaagaacgccctggcccaatatcaggagatggagaagaaagtcagcctactcaaggacaatagctctctggaatttgactctgaggtatgtcttttattagctcccaagagtcataaccagagcaatcagacaagagaaagaaagggcatccagatcagtaaagaagaagtaaaactgtcgctgtttgctgatgacatgatcgtatacctagaaaaccttaaagactcatccaaaaagctcctagaactggttcttctttgcggtccagttggtccaaagctacatgagcttcttgatgacaatgtctttgttccaccagagtcattgcaggaagtggatgagttccacctcattttagagtatcaagcaggggaggagtggggccagttaaaagctccccatgccaaccgattcatcttctctcacgacctctccaacggggccatgaatatgctggaggtgtttgtgtctagcctggaggagtttcagccagacctggtggtcctctctggattgcacatgatggagggacaaagcaaggagctccagaggaagagactcttggaggttgtaacctccatttctgacatccccactggtattccagttcacctagagctggccagtatgactaacagggagctcatgagcagcattgtccatcagttatttgatattggctgtggacccacaaagtcacacaaggctaaaggtcagaaccagttaaatatgtttccaagggtggacagcacggaagaggcagtacatcttaacaaaatcagggttctggatgaagggaggggtggtgaatggttgctgcaatcaacagttcatacttcaatggaaagaaggtgggatttgattcctggctgcaaatcttcactctgtcacctgctatctgtgtgccctcagaaaagctccaatattcacttagatactgcagaaggaaaagagaggctgaaagggttggatcaaggaagtaggaaagggaatttctggggcatttccttcccccaatcccagaatagccacagaaatcacagtcaccaagagctgctgcttctgaataacatgacagtgatggaacaaatccagcagaaagagtatccctctcccattgctgctcaaaccaagtaccaggattacctttgcttggacctgattggcttgccttgggtcagtgtggccctggttacgcctcctctggctcagtcacacagcagccttgtaggtgactggaggtgttcgctgatgtggccccaaccctacctccctccccaccccatgatgttagaagaatctcgacagaataaattggcagcagccaagaaaaagctaaaagaatatcagcaaaggaagagccctggtattccagcaggagcaaagacaaaaaagaaaaaaactgacagtagccctgagacaaccacttccggtggtggccactcacctggggatagccagtaccaagaactagcagtagccctggagtcaagctcagtgacaatcagtcaactcaatgaaaacatagaatcattgaaacagcagaagaaacaagtggaacatcagctggaagaagcaaagaaaacaaacaatgaaatacacaaagcacaaatggagcggttagagacaatcaacatcctcacattggaaaaggcagacttgaagaccaccctttaccatactaaacgtgctgcccgacacttcgaagaagagtccaaggatctggctggccgcctgcaatactccttacagcgtattcaagaattggagcgggctctctgtgctgtgtctacacagcagcaggaagaggacagggggcactgcctgagctccccagatcaaaacttctcactcttcaccatccagtcctcgagctgcagagaagcggtcctccaccggcggttacagcagaccataaaggagcgggcgctgctgaacgcacacgtgacacaggtgacagagtcactaaaacaagtccagctagagcgagacgaatatgctaaacacataaaaggagagagggcccggtggcaggagaggatgtggaaaatgtcggtggaggctcgaacattgaaggaagagaagaagcgtgacatacatcggatacaggagctggagaggagcttgtccgaactcaaaaaccagatggtggaaaacaatcaggccttgagtctccttagcaaggaacaaaagcagagactccaggagcaggaggagatgctccgagagcaggaggtgcagagagtgcgggagcaggagagactgtgtgaacaaaacgagaggcttcgggagcagcagaagacgctacaggagcagggtgagaggctgcgaaagcaggagcagaggctacgcaaacaggaggagaggctgcgaaaggaggaggagaggctgcaaaagcaggaaaagaggctgtgggaccaggaggagaggctgtggaagaaggaggagaggctacaaaagcaggaggagaggctcgcgctctcccagaaccacaagctcgacaagcagctggccgagccacagtgcagcttcgaggatctgaacaacgagaaaaagagcgcactgcagttggagcagcaagtaaaggagctgcaggagaagctagacgaggtgaaggagatgcagtacgtggccacctatcagcagctgacctctgagaaggaggcgctgcacaggcagttactgctgcagacccagctcgtggaccagctgcagcagcaggaagcttggggcaaagcggagcacctagaagctgccagccagcagaaccaacagctagagacccagctaagcctcgtggctctcccgggagaaggagatggaggacaacatctggacagtgaggaggaggaggcgcctcggcccacgccaaacatcccagaggacctggagagccgggaggccacgagcagctttatggacctcccgaaggagaaggcggacgggacggagcaggtggagagacgagagcttggattcgtccagccttctggagtgacagacggcatgagagagtccttcaccgtatatgaaagccagggggcagtgccaaacacgcggcaccaggagatggaggatgtcatcaggctggcccagaaggaggaggagatgaaggtgaagctgctggagctgcaagagttggtgttgccccttgtgggcaaccatgaggggcatggcaaattcctcatcgctgcccagaaccctgctgatgagcccactccaggggccccagcccccccaggaacttggggctgccgccaaagcctaatccagagcaatgtcctaactcgctccaattctatgaaggctgagagaggtgaggaagctgcaaaagaaaagtcagaagctagcagagaaattgccacagccaccccaagcttcagccaccaccctgatcagccagcagccatcaacatcaaggcaaaacactctgccagcaaaaagattatgaccgtctga

SEQ ID NO: 20664 - DNA, 634 bp, Homo sapiens
  SIMILAR (37)..(633): 951254mologous to Homo sapiens Human secreted protein clone yd73_1 protein sequence SEQ ID NO:92,accession number Y73435,Smith- Waterman Score=931.
gaaaaagaaattcccgggccctggcttcttggcgcgatgaggttccggttctgtggtgatctggactgtcccgactgggtcctggcagaaatcagcacgctggccaagatgtcctctgtgaagttgcggctgctctgcagccaggtactaaaggagctgctgggacaggggattgattatgagaagatcctgaagctcacggctgacgccaagtttgagtcaggcgatgtgaaggccacagtggcagagctgagtttcatcctctccagtgcggccaagcacagtgtccgatggcgaatccttgtcccagtgaaactgcagcagctggggctgcccaaagagcacgcggccagcctgtgccgctgttatgaggagaagcaaagccccttgcagaagcacttgcgggtctgcagcctacgcatgaataggttggcaggtgtgggctggcgggtggactacaccctgagctccagcctgctgcaatccgtggaagagcccatggtgcacctgcggctggaggtggcagctgccccagggaccccagcccagcctgttgccatgtccctctcagcagacaagttccaggtcctcctggcagaactgaagcaggcccagaccctgatgagctccctgg

SEQ ID NO: 20665 - DNA, 4061 bp, Homo sapiens
  SIMILAR (1672)..(3399): 591254mologous to Homo sapiens golgin-like protein,accession number AF263742,Smith-Waterman Score=1456.
atgagaccaggcttcgtggtgtcagtgggaatggtggaaggtgtacctggagagcctgatccatacccagtgctctgctacaccccatggcctggccacgacctccctgcctccagagcagccctggcccagggaagaagctggtctctgcatcgaatgatagggcaggattctgggagacggaggagcagacgccagcatttcgcccccggcacctccagcgggctgcggtccgctcccggcctcactcgagcaggtcccgccccgccagaggccgttagtccaagtcacgtgatcgtcgactcagctgacctggcgggaccggaaaaagaaattcccgggccctggcttcctcgcgcgatgtatgaggcaccaggggtgaagcgggcatgggctgctggagcgggaatgagggggcgccagtggctccggaaacgggttgaggttgtctgcactggccgctccgcaaacacagtgtgtgcgggcgtcagggcagcaggtctggtagagaaaagtccaccgccatccctctcccgaatggggcggaggtttcggttctgtggtgatctggactgtcctgaccgggtcctggcagagatcagcacgctggccaagatggttgagtgcacagggtctacactgggtggaggagggtataagaagatcctgaaactcacagctgatgccaagtttgtggaggagcatgagggaaagaaagacattgacagtcccaccttcctgtcctctgccagctcctggtggagcagtagcagtgcctatggctccaggaggcctgggggctttgagctgaagttaatagggcaacagggagagtcaggcgatgtgaaggccacagtggcagtgctgagtttcatcctctccggtgcggccaagcacagtgtcgatggcaaatccttggccagtgaactgcagcagctggggctgcccaaaggagcccaagcccagcccccacctgctacctccagagcttctccattctacccccagagcacgcggccagcccgtgctgctgttatgaggagaagcaaagcccccttgcagaagcacttgcgggtctgcagcctacgcacgtggtccctggcagcacgagtggcagaagggacagcagagactgtggacccctcagctgcacctaagacctctgtgtggtctagccgtgtgtgctgggggaggcttttggccaccatttccccctctgtaaatgagaccgatacctgtggcatggaggacaggaggctgggtgtgcaggccctggcgtgcacagtgccacatgacggcctgggctggcgccaccctgaagaaggtggcacccactctggcgggtctcccttggagcacctggagcccaagaagctgtccctcacctttgcaatcccagggactcgccccctgatcatgatgaaggtggacccaaacccgctgaggggcctgaaggagcaaagtgagccaattctctcccctgacgcccgtaagggctccagtggtgatggagaagtacagaggaacctggtgccggccgcagtcaacccctatgtgatgatctttctacccgccctctttcgtgtcttggtgctggctgctgtctttggccagctaaaagaatatcagcaaaggaagagccctggtattccagcaggagcaaagacaaaaaagaaaaaaactgacagtagccctgagacaaccacttccggtggttgccactcacctggggatagccagtaccaagaactagcagtagccctggagtcaagctcagtgacaatcaatcagctcaatgaaaacatagaatcattgaaacagcagaagaaacaagtggaacatcagctggaagaagcaaagaaaacaaacaatgaaatacacaaagcacaaatggagcagttagagacaatcaacatcctcacattggaaaaggcagacttgaagaccaccctttaccatactaaacgtgctgcccgacacttcgaagaagagtccaaggatctggctggccgcctgcaatactccttacagcgtattcaagaattggagcgggctctctgtgctgtgtctacacagcagcaggaagaggacagggggcactgcctgagctccccagatcaaaacttctcactcttcaccatccagtcctcgagctgcagagaagcggtcctccagcggcggttacagcagaccataaaggagcgggcgctgctgaacgcacacgtgacacaggtgacagagtcactaaaacaagtccagctagagcgagacgaatatgctaaacacataaaaggagagagggcccggtggcaggagaggatgtggaaaatgtcggtggaggctcgaacattgaaggaagagaagaagcgtgacatacatcggatacaggagctggagaggagcttgtccgaactcaaaaaccagatggctgagcccccatccctggcacccccagcagtgacctctgtggtggaacagctacaagatgaggccaaacacctgaggcaggaggtggaaggtctggagggaaagctccagtcccaggtggaaaacaatcaggccttgagtctccttagcaaggaacaaaagcagagactccaggagcaggaggagatgctccgagagcaggaggcgcagagagtgcgggagcaggagagactgtgtgaacaaaacgagaggcttcgggagcagcagaagatgctacaggagcagggtgagaggctgcgaaagcaggagcagaggctacgcaaacaggaggagaggctgcgaaaggaggaggagaggctgcaaaagcaggaaaagaggctgtgggaccaggaggagaggctgtggaagaaggaggagaggctacaaaagcaggaggagaggctcgcgctctcccagaaccacaagctcgacaagcagctggccgagccacagtgcagcttcgaggatctgaacaacgagaaaaagagcgcactgcagttggagcagcaagtaaaggagctgcaggagaagctagacgaggtgaaggagatgcagtacatggccacctatcagcagctgacctctgagaaggaggcgctgcacaggcagttactgctgcagacccagttcgtggaccagctgcagcagcaggaagcttggggcaaagcggagcacctagaagctgccagccaccagaaccaacagctagagacccagctaagcctcgtggctctccctggagaaggagatggaggacaacatctggacagtgaggaggaggaggcgcctcggcccacgccaaacatcccagaggacctggagagccgggaggccacggagccagaggcagaggccccagccccagggactgggggtgagtttgtgtgtggggagagctaccgggccctgaaggaggccatggtgaagctgaaagggagagagtccttcaccgtatatgaaagccagggggcagtgccaaacacgcggcaccaggagatggaggatgtcatcaggctggcccagaaggaggaggagatgaaggtgaagctgctggagctgcaagagttggtgttgccccttgtgggcaaccatgaggggcatggcaaattcctcatcgctgcccagaaccctgctgatgagcccactccaggggccccagccccccaggaacttggggctgccggtgagcaggatgttttttatgaagtgagcctggacaacaacgtggagcctgcaccaggagcggccagggagggttctccccatgacaaccccactgtacagcagatcgtgcagctgtctcctgtcatgcaggacacctaggagcacccaggcttgcccagcaaaccctgcgtgccattcttctaccaggcagccgagaacagggagataaacatcatcatcttctaagagctggtcaagaaatttaaaacaacaacaacaacaaaaagttacggggttcatctcctacacaattcatttactccatttgaatgctagagccactcacatttatttgtgtttctaatttaccgtttaaatttatttgtaaaaagttaagggagagttggtctttccctgatgttctttctggc

SEQ ID NO: 20666 - DNA, 412 bp, Homo sapiens
  SIMILAR (2)..(340): 1001254mologous to Homo sapiens LAR-interacting protein 1a,accession number U22815,Smith-Waterman Score=571.
  misc_feature (1)...(412): n = a,t,c or g
caatcttatagagagtggtgttcacggagcacttctggccttagatgaaaccttcgacttcagtgcactggcactgctgttacagatcccgacgcagaacacacaggctcgtgctgtcttggaaagagaatttaacaaccttttggtcatggggactgatagaaggtttgatgaagatgatgataaaagctttaggagagcaccttcatggagaaaaaagtttagaccaaaggacattcgtggcttagctgctgggtcagcagagactctccctgcaaacttccgggtgacttcttctatgtcttccccctctatgcagccaaagaagatgcagatggacgtttacccacactacttctacagatgattatgcagcatttgaatccaaaatgtagntaatacttggtatatg

SEQ ID NO: 20667 - DNA, 234 bp, Homo sapiens
  SIMILAR (234)..(85): 1001254mologous to Homo sapiens enhancer protein,accession number D49354,Smith-Waterman Score=262.
ctctagccagaccacaaccgttggcccgtcccattgggcaaaaggtaaaccttgtctccgggcttcctccagcaattcatgcttccttatgtccctgatgtcctcgtggctgacggtgtgcagcgcccctttgtgcagccggtctaaccgaagggctctcggggaggaaggcggggaggtttcacactttatggttgtcttgtcatctcgtacctcttctctggaaggtggcaa

SEQ ID NO: 20668 - DNA, 469 bp, Homo sapiens
  SIMILAR (110)..(283): 981254mologous to Homo sapiens LAR-interacting protein 1a,accession number U22815,Smith-Waterman Score=298.
cggcccggaattctcgggtcgagatcagcagtcattttaaaggacatgtaactttacatctctgacctttattttttaaatgaatcttgttttttgttccttaatttaccaggatgatgataaaagctttaggagagcaccttcatggagaaaaaagtttagaccaaaggacattcgtggcttagctgctgggtcagcagagactctccctgcaaacttccgggtgacttcttctatgtcttccccctctatgcagccaaagaagatgcagatggacggtatgtgatgggtcacactaacctgtcacttgttgggagcatgagcagctttctgtctggaacattaataatgatctaaaacggcctatttaatatgttacaaggcacttgagtatggttgcatgtccaaatataaatgtttttaaattaactctaacatttgtttataaaagtttaaccataataataga

SEQ ID NO: 20669 - DNA, 1632 bp, Homo sapiens
  SIMILAR (1)..(261): 981254mologous to Homo sapiens LAR-interacting protein 1a,accession number U22815,Smith-Waterman Score=468.
atgaaccacgagtggatcggcaacgagtggctccccagcctgggcctcccccagtaccgcagctacttcatggagtgccttgtagacgccaggatgctggaccacttgaccaagaaagaccttcgagggcagctgaaaatggtcgacagttttcacagaaacagtttccagtgtggaattatgtgcctgagaaggttaaattatgaccggaaagaactggaaagaaaaagagaagaaagtcagagtgaaataaaagatttgggccccacctctggacagcacgaaccagacatgaaagcgtgtgcacctcagctactgagacagcccacccacttcctgggcaccgtcggcccccgccctcgtggtcccaaggtacggccactcacgttcatgtctgagcccgccgggaagcaccggctgctgggccgctgcttgatggtcgccaccctcggttccacagccatgttctcagcagcgcgggagggcttggaggccgggactatctcctcgggtttatctgcaatagaaccaggcctgggaaggcagaaaagcctggcccagcagggtgcttacaagagtgggggccctgtccctgtgctggtctgtacaactagctgccccagtgctcctgggacgctcctgaatgggagcgcagcccagaggcagctgtctctaggtggcagcagggagggggaagccccagaaggtgaagtttacagctgcttcacacgccaccttcgaacaaagaaaagcaccctgatcgtaaacaacagccaagacgtcatgcccctcaccagccacactgtgctgtacgcatatcctcctgctatagattcttcaaaaactaaacatctggtatacccacaaacagaaaacttaaagcctgtgtgctgcttggtggattttcacaaatccaacatccctgcccaggatgtgccagttttggtcacctacgagacggctgcagaggtcctccaggcagggctgcgaggagcccagggaggactcagtggggccagggcagtccccgtgccagctgctctgcagtctctgctgtgggaccggctcattcccatgtactcagacccacccggtttcagcacattgctggtgttggcggtgaccgctgagcttaatgcgtcaacctttgaggatgtcacccaggtgtcctctgcctaccagaagacagtacctgtcgaagctgacgtgcttgtttggagcaatgatcgagtgattcgctggatcctgtcaattggccttaaagaatatgcaaacaatcttatagagagtggtgttcacggagcacttctggccttagatgaaaccttcgacttcagtgcactggcactgctgttacagatcccgacgcagaacacacagcgggcaccgaccacagccctcaccctgcgctccaagtccatgacctcggagctggaggagctcgcccaggcctcggaggcctgtgtgagctgctccccacgtggctcagaccagaaggctccatcctccggggatctgtgtgtagatagcgtgggcttggcagagcagtctggtctgcacagcaggcttagggaacgcccggcacctttgtgtaaggtctgcaagcaacagagagaggctctggccctctga

SEQ ID NO: 20670 - DNA, 762 bp, Homo sapiens
  SIMILAR (1)..(744): 831254mologous to Homo sapiens LAR-interacting protein 1a,accession number U22815,Smith-Waterman Score=1052.
atggcccaaaaggaagatatggaagagagaatcactactcttgaaaaacgctacctcgctgcacagcgtgaagccacatctgtgcatgacctcaatgataaacttgaaaatgaaattgcaaataaagattctatgcatcgacagactgaagataaaaaccgccagttacaggagcgcttggaattggcagagcaaaagctgcaacagacactgaggaaggcagagacgctcccggaggtggaggcggagctggcccagagggtggcagcgctttccaaggctgaagagagacacggcaacattgaagaaaggttacgacagatggaagcacagttggaggagaagaatcaagaactgcagcgggcaaggcaaagagaaaaaatgaacgaagaacataataaacgtttatcagacactgttgacaagctgctttcagaatctaatgagaggcttcaacttcatcttaaagagagaatggctgctttggaagataaggatcagcttgtcctaaacattgaagcactgagggctgaactagaccacatgagactaagaggtgcttcacttcatcatgggtatggtattaaccaccgaccccacttgggcagtgtcccagatttcaggttccccatggcagacggccacacagactcctacagcaccagtgcagtgctgcggcgcccacagaaaggccggctggcagccctgcgagatgagccttccaaggcaaggtctttgtgtgaaatacctctgcttacgtga

SEQ ID NO: 20671 - DNA, 4361 bp, Homo sapiens
  SIMILAR (230)..(1909): 951254mologous to Homo sapiens LAR-interacting protein 1a,accession number U22815,Smith-Waterman Score=2635.
  misc_feature (1)...(4361): n = a,t,c or g
gaattccgggcccccggccgtccctcttaaggctcttcctccgctccgccagtgtccggccgcgggccggccttagtgactggggcggcgggccccggggccgcggcgtggggcgggcaggcggacgccggccgcgggctgctttcgtcggctcccaagctctcccggagcgagcagccgcccgcgagccgccgcggagcctcctcgcccgctcccgccggcgagcaagatgatgtgcgaggtgatgccgaccatcagcgaagcagaaggcccccctggaggaggtggaggccatggttccggctccccttcacagccagatgcagattcacattttgaacagttgatggtctccatgctagaagaaagggaccgccttcttgatacactgagagagactcaagaaacgctggccttaacccaggggaagttacacgaggttggtcatgaaagagattccttgcagagacagctcaacacggcacttccacaggagttcgcagcacttactaaagaactcaatgtatgcagggaacagctccttgaaagggaagaagaaattgctgaactgaaagcagaaaggaataacaccaggctgctgttagagcatttggaatgccttgtctccaggcatgagcggtctcttaggatgaccgtggtgaagagacaagcgcagtctccagcaggcgtgtccagcgaagtggaagtgctgaaagcactgaagtccttatttgaacaccacaaagctctggatgaaaaggtgagagagcgattacgagtagcacttgaaagatgtagtttgttagaagaggaattaggtgccacacacaaagagctaatgattcttaaagaacagaataatcagaaaaaaactctaacagatggagtgctggacataaaccatgaacaagaaaatacaccaagcacgagtggaaagagatcttctgatggttctttaagccacgaggaagaccttgctaaagtaattgagctccaagaaatcataagtaagcagtcaagggaacagagccaaatgaaagaacgcctggcttccctttccagtcatgtgacagaactggaagaggatctggacacggctagaaaagatctcatcaaatctgaagaaatgaacacaaaattgcaacgagatgtccgtgaagccatggcccaaaaggaagatatggaagagagaatcactactcttgaaaaacgctacctcgctgcacagcgtgaagccacatctgtgcatgacctcaatgataaacttgaaaatgaaattgcaaataaagattctatgcatcgacagactgaagataaaaaccgccagttacaggagcgcttggaattggcagagcaaaagctgcaacagacactgaggaaggcagagacgctcccggaggtggaggcggagctggcccagagggtggcagcgctttccaaggctgaagagagacacggcaacattgaagaaaggttacgacagatggaagcacagttggaggagaagaatcaagaactgcagcgggcaaggcaaagagaaaaaatgaacgaagaacataataaacgtttatcagacactgttgacaagctgctttcagaatctaatgagaggcttcaacttcatcttaaagagagaatggctgctttggaagataagaactctcttttaagagaagttgaaagtgcaaaaaagcagttagaagaaacaccaccacgataggattcgctttgtccttaaacattggagcacttgagggctgaactagaaccacaatgagactaagaggtgcttcacttcaatcatggccgaccccacttgggcagtgtcccagatttcaggttccccatggcagatggccacacagactcctacagcaccagtgcagtgctgcggcgcccacagaaagggccggctggcagccctgcgagatgagccttccaaggtacaaactcttaatgagcaggattgggaacgtgcccagcaagctagtgtcttggcaaatgtagcacaagcattcgagagtgatgctgacgtgtctgatggtgaagatgacagggacactctcctcagctcagttgacctcgtatccgccagcgggcaggccgacgcgcacacactagccatgatgcttcaggagcagctggacgccatcaacaaagagatcaggttgattcaggaagaaaaagaaaatacagagcagcgggcagaggagattgaaagtcgagttggcagtggaagtctagacaatcttggtcgttttagatcaatgagctccattcccccctaccctgcttcctcgcttgctagctcctcccctccgggcagtgggcgctccaccccacgaaggatccctcacagcccagctcgggaagtggacagactgggcgtcatgacccttttgccaccttccagagaagaggtacgagatgacaagacaaccataaagtgtgaaacctccccgccttcctccccgagagcccttcggttagaccggctgcacaaaggggcgctgcacaccgtcagccacgaagaccatcggggatgataaggacctccaacaggtcccaggattgttcccgtgtggcaaccccaacgagtagcaacagtagcaagaattcgctccacgaagcccgcaaagaaggaaggcacttaggtcttcaattgcccgctcttttggcagagaaagaaagaggaccgacctgaccaaaccggcaaaggaagcaataggacaacgctggtgtttccgagggggataaatacatctcaggatcccttgaacctagacaactgagggtgacaggcttaaaaaaattcgtaaacttcaaaaaaagcatgaattgctggaggaagccccggagaccaggttttacctttttgccccaatgggacgggccaacggttgtggtctggctagagctctgggttgggatgccagcctggtatgtggctgcctgccgagccaaacgtgaaaagcgggggccatcatgtcggcccctgtccgacaccagagatccagcgtgagattggcatcagcaacccccctgcacaggctgaagctgaggctggccatcccaggagatccatgtcgctgaacccagcccgtctgcccccgcccacatctagaacgacactcgcctatggggacatgaaccacgagtggatcggcaacgagtggctccccagcctgggcctcccccagtaccgcagctacttcatggagtgccttgtagacgccaggatgctggaccacttgaccaagaaagaccttcgagggcagctgaaaatggtcgacagttttcacagaaacagtttccgagtgtggaattatgtgcctgagaaggttaaattatgaccggaaagaactggaaagaaaaagagaagaaagtcagagtgaagtcagagtgaataaaagacgtgcttgtttggagcaatgatcgagtgattcgctggatcctgtcaattggccttaaagaatatgcaaacaatcttatagagagtggtgttcacggagcacttctggccttagatgaaaccttcgacttcaggtgcactggcactgctgttacagatcccgacgcagaacacacaggctcgtgctgtcttggaaagagatatttaacaaccttttggtcatggggactgatagaaggtttgatgaagatgatgataaaagctttaggagagcaccttcatggagaaaaaagtttagaccaaaggacattcgtggcttagctgctgggtcagcagagactctccctgcaaacttccgggtgacttcttctatgtcttccccctctatgcagccaaagaagatgcagatggacggtatgtgatgggtcacactaacctgtcacttgttgggagcatgagcagctttctgtctggaacattaataatgatctaaaacggcctatttaatattgttacaaggcacttgagtatggttgcatgtccaaatataaatgtttttaaattaactctaacatttgtttataaaagtttaaccataataatagaatttttaaaacacgcttgtctgggttgaatcttagcatatttttcccaactaaataaagctcagtattcgtctgtgttctcagagagagactgaggcatacttgtaaatttgtgtctgtgacaggccgtgctagaaagctctttcaggaaatagtagtgtagtagtagcttccaaaccacataatttactgctctccacaccagagaaaataactgagtacatttttaagaacacacagtttccagcttgtgtgagctctgcctatgctttctgccctccctgctgctgctgttccgtgcagtcacatgtctacccattanagggcagggaagggaggaaggt

SEQ ID NO: 20672 - DNA, 1150 bp, Homo sapiens
  SIMILAR (32)..(811): 1001254mologous to Homo sapiens mitogen- and stress-activated protein kinase-2,accession number AF074715,Smith-Waterman Score= 1349.
ccacagccaacctgaccgggcacgaggagaagcctacggcaaggtgttcctggtgcggaaggcgggcgggcacgacgcggggaagctgtacgccatgaaggtgctgcgcaaggcggcgctggtgcagcgcgccaagacgcaggagcacacgcgcaccgagcgctcggtgctggagctggtgcgccaggcgcccttcctggtcacgctgcactacgctttccagacggatgccaagctgcacctcatcctggactatgtgagcggcggggagatgttcacccacctctaccagcgccagtacttcaaggaggctgaggtgcgcgtgtatgggggtgagatcgtgctggccctggaacacctgcacaagctcggcatcatttaccgagacctgaaactggagaatgtgctgctggactccgagggccacattgtcctcacggacttcgggctgagcaaggagttcctgacggaggagaaagagcggaccttctccttctgtggcaccatcgagtacatggcccccgaaatcatccgtagcaagacggggcatggcaaggctgtggactggtggagcctgggcatcttgctcttcgagctgctgacgggggcctcgcccttcaccctggagggcgagaggaacacgcaggctgaggtgtctcgacggatcctgaagtgctcccctcccttcccccctcggatcgggcccgtggcgcaggacctgctgcagcggctgctttgtaaggatcctaagaagcgattgggcgcggggccccagggggcacaagaagtccggaaccatcccttcttccagacacacctgccagggtttgtggagcaggctgaggctctgaaggccaagggagtccaggtggtggcctgtctgagtgttaatgatgcctttgtgactggcgagtggggccgagcccacaaggcggaaggcaaggttcggctcctggctgatcccactggggcctttgggaaggagacagacttattactagatgattcgctggtgtccatctttgggaatcgacgtctcaagaggttctccatggtggtacaggatggcatagtgaaggccctgaatgtggaaccagatggcacaggcctcacctgcagcctggcacccaatatcatctcacagctctga

SEQ ID NO: 20673 - DNA, 1230 bp, Homo sapiens
  SIMILAR (1)..(1098): 981254mologous to Homo sapiens Ribosomal protein kinase B (RSK-B),accession number AJ010119,Smith-Waterman Score=1870.
atgggggacgaggacgacgatgagagctgcgccgtggagctgcggatcacagaagccaacctgaccgggcacgaggagaaggtgagcgtggagaacttcgagctgctcaaggtgctgggcacgggagcctacggcaaggtgttcctggtgcggaaggcgggcgggcacgacgcggggaagctgtacgccatgaaggtgctgcgcaaggcggcgctggtgcagcgcgccaagacgcaagagcacacgcgcaccgagcgctcggtgctggagctggtgcgccaggcgcccttcctggtcacgctgcactacgctttccagacggatgccaagctgcacctcatcctggactatgtgagcggcggggagatgttcacccacctctaccagcgccagtacttcaaggaggctgaggtgcgcgtgtatgggggtgagatcgtgctggccctggaacacctgcacaagctcggcatcatttaccgagacctgaaactggagaatgtgctgctggactccgagggccacattgtcctcacggacttcgggctgagcaaggagttcctgacggaggagaaagagcggaccttctccttctgtggcaccatcgagtacatggcccccgaaatcatccgtagcaagacggggcatggcaaggctgtggactggtggagcctgggcatcttgctcttcgagctgctgacgggggcctcgcccttcaccctggagggcgagaggaacacgcaggctgaggtgtctcgacggatcctgaagtgctcccctcccttcccccctcggatcgggcccgtggcgcaggacctgctgcagcggctgctttgtaaggatcctaagaagcgattgggcgcggggccccagggggcacaagaagtccggaaccatcccttcttccagggcctcgattgggtggctctggctgccaggaagattccagccccattccggccccaaatccgctcagagctggatgtgggcaactttgcggaggaattcactcggctggagcctgtctactcaccccctggcagccccccacctggggacccccgaatctttcaggccgggcactcagcagtagcgttatccagaagccctggtgccgagaagtacacattcgccgctgaacccctgcataacctccatctctgccaccatggccacgttgaacatggacacaatgggcaagcactgggctggctggggaaagaggataactga

SEQ ID NO: 20674 - DNA, 3165 bp, Homo sapiens
  SIMILAR (74)..(2404): 681254mologous to Homo sapiens Ribosomal protein kinase B (RSK-B),accession number AJ010119,Smith-Waterman Score=2393.
  misc_feature (1)...(3165): n = a,t,c or g
tttcgtccggagccgccatgtaaccggcgccgcccggagcccgagccgcgcgggccccagcgacccgcccgccatgggggacgaggacgacgatgagagctgcgccgtggagctgcggatcacagaagccaacctgaccgggcacgaggagaaggtgagcgtggagaacttcgagctgctcaaggtgctgggcacgggagcctacggcaaggtgttcctggtgcggaaggcgggcgggcacgacgcggggaagctgtacgccatgaaggtgctgcgcaaggcggcgctggtgcagcgcgccaagacgcaggagcacacgcgcaccgagcgctcggtgctggagctggtgcgccaggcgcccttcctggtcacgctgcactacgctttccagacggatgccaagctgcacctcatcctggactatgtgagcggcggggagatgttcacccacctctaccagcgccagtacttcaaggaggctgaggtgcgcgtgtatgggggtgagatcgtgctggccctggaacacctgcacaagctcggcatcatttaccgagacctgaaactggagaatgtgctgctggactccgagggccacattgtcctcacggacttcgggctgagcaaggagttcctgacggaggagaaagagcggaccttctccttctgtggcaccatcgagtacatggcccccgaaatcatccgtagcaagacggggcatggcaaggctgtggactggtggagcctgggcatcttgctcttcgagctgctgacgggggcctcgcccttcaccctggagggcgagaggaacacgcaggctgaggtgtctcgacggatcctgaagtgctcccctcccttcccccctcggatcgggcccgtggcgcaggacctgctgcagcggctgctttgtaaggatcctaagaagcgattgggcgcggggccccagggggcacaagaagtccggaaccatcccttcttccagggcctcgattgggtggctctggctgccaggaagattccagccccattccggccccaaatccgctcagagctggatgtgggcaaactttgcggaggaattcactcggctggagcctgtctactcaccccctggacagacccccacctggggacccccgaatctttcagggatactcctttgtggcaccctccattctctttgaccacaacaacgcggtgatgaccgatgggctggaagcgcctggtgctggagaccggccaggtcgggcagcggtggccaggagcgctatgatgcaggactcccctttcttccagcagtacgagctggacctgcggtagcctgcgctgggccagggcagcttttctgtgtgtcgccgctgccgccagcgccagagcggcccaggagttcgcagtcaagatcctcagtcgcaggctggaggcgaacacgcagcgcgaagtggctgccctgcgcctgtgccagtcacaccccaactgtggtgaatcatgactgatgtgcatcactgccagctgcacactgtacctggtcctggagctgctgctggggcggggagctgctggagcacatctgcaagaagcggcacttcagcgagtcggaagcaagccagatcctgcgcagcctcgtgtcggccgtgagcttcatgcacgaggaggcgggcgtggtgcaccgcgacctcaagccggagaacatcctgtacgccgacgacacgcccggggccccggtgaaaatcatcgacttcgggtctcgccgcggttgcggccgcagagtcccggggtgcccatgcagacgccctcattcacgctgcagtacgctgcccccgagctgctggcgcagcagggctacgacgagtcctgcgacctctggagcctgggcgtcattctgtaccatgatgctgtcggggcaggctcccttccagtgcggctctggccagggcggccagagccaggcggccgacatcatgtgcaaaatccgcgaggggcgcttctcccttgacggggaggcctggcagggtgtatccgaggaagccaaggagctggtccgagggctcctgaccgtggaccccgccaagcggctgaagctcgagggactgcggggcagctcgtggctgcaggacggcagcgcgcgctcctcgcccccgctccggaacgcccgacgtgcttcgagtcctctgggccccgcagtgcgcttcgnggtctcaacgccaccttcatggcattcaaccggggcaagcgggagggcttcttcctgaagagcgtggagaatgcacccctggccaagcggcggaagcagaagctgcggagcgccaccgcctcccgccggggctcccctgcaccagccaacccgggccgagcccccgtcgcctccaaaggggccccccgccgagccaacggccccctgcccccctcctaatccccaccactgtgacccccttccctcataggggctgtgacctgggagcccggctcactcccggaggcctctgcctgcggctgaccagaatccccaagggactgtcctttcctctcctaccccaccccactcccagacagagcagaagtatttttataagcagagaattttttatgtcttaccagatagagttgcagggaagggggggcctgctggggagtggggtttggggggccctctcccaggacactgcctcttctgggcagaaggcccctccagggggactgctccaacaggaaagagcccctcccccacttctaagcactgagttaggagtgctaactcctaaactgggaccccctaccctgttcttcccctgaggcccccgttcctgggaggggcacccctcaactgtcactttatggactgtcttgtgcaattacgtccaccaaagacccgtgttgggggtactgaaggagaggccctgggggaccctgctgaagcatttctgcctcactttatgtcatcttgcttctcccctgttggggctaaggaaggagataggtggctcctaaaagaggaggccatcttctcacccaccccttcctctttggcacagctactcctggctgggggtggggccttgggggtctgggctgggcatccatggtcactgcctcagcccagccaggctgtgcctttgactttaaaataaaagtaccacccagtgctgtgtgtggcaaaaaaaaaaaaaaaaa

SEQ ID NO: 20675 - DNA, 1719 bp, Homo sapiens
  SIMILAR (1191)..(1463): 411254mologous to Ascaris suum collagen,accession number J04657,Smith-Waterman Score=110.
atgttgcccaggctggtctcgaactcttgggctcaatcggtcctcctgcctcccacagtgctgggatcacagtccccaggaaaccttcgtgcctccagacaaacccagatcacaagtcctgcccctggggaccacagctggtcgcccagagttgaaggagttattactgaagatttggtcagccatccccccggcagggacggcttctgctgctcatccgtgccccgtgctggagacaggacagcagtgagaccactacaaagtgttacgtgcaggctccatcctggtgcaaaagaaggcagcgaggagggtgccgttcacacgccccctccttggagcccaggtcccgaaccctttatcccgctgggtaccccgacactggcccagctcaggcatccccctcagtgtacttctcagtgtctgcaggagttgcagcagatgaacaaccatgatcccaagaactggcaaggggccgtgcggctgatcaccagctctgacaggagggaggcccgaggaggcttcccagaggtgtctgctcgaaagctcctgggcagcctgcctggaatgcagacagcagaagagaaagtaaaattatcaggaatagacagctccaagaaaaggaagctcaagatggctttcaacaacacaaagctgtcccactttgctctgattaaaatcagaaccatgatgagactgtttgtcacctatctgactggcaaaggaagtctggctcaccacgagccagtgggacgaggagtagatgagaaaggaaagggaggccctgagggaggtagggacccagcgcccagaaactacccagggggaacaggtctccacggaacttctgtcaacaaaggagcctggagtgaggatgatactagcacctacttcacaggttgctgtgaagatgaagtgaggccagacgatggccggatgcatgagtgtttcattatactgaaagccctttttcccctagccaaacgtgttgaaggaataaaagtggcaaataaatcatttgtcccatggctgggcccgctccagcctccgattggtacagagcgtccaatcggagaccttcgggcagaaaatgccaagcggggattggaaattttggaaaagcgctttcccgcctgctccagctccgtctccagctgccaggatggagccgggtcgggaccatccgggaaaggggacgccctcccggaccccggctcaccctcgggggcgccggctgcccgcacgcgcctctcccgccaccagcgccgccccggtatttatgagttcgcgggtgccgaggcctcttgccgcctacagccgtcccagccccggaagagccggtcgcctcggggtgacagcctccctagacagccagggccccgggtcccacaggcgcccactcatcagctggggagccccagggcacggacaccggcccctatcctggccctgcccgatccccaggtctttcagttttcctgtgcatttgaaaatgttcataataagatgttggggaaaatgcttggggacatccacgtagttgctgttgtcgacctttatggtgaagccacagcagcaactgattcccgagtgattgacacgctgtgtgttcatttaatgaccctgacaatctttaatgcagactttagaaattttacagatggacccattttacagacgaggaaactgaggctcagcaaggctaagcaccttgtcgtgtga

SEQ ID NO: 20676 - DNA, 402 bp, Homo sapiens
  SIMILAR (209)..(325): 381254mologous to Homo sapiens Human secreted protein encoded by gene 83 clone HHFGA11,accession number W67917,Smith-Waterman Score=72.
ttttaatattagcaaagttttactttttttttttctgctcataaatgactctgaaaaagccaatacgcaagaggctaacacaactgtagtctaaaggcaacgtcgaggtcactgatatgtccctcagacaagaggcactgctcagaatccccctgtgctgggggtgagggaaggaggggacggtttaggacagaggaataaatacatgtggttgtgggagttctgccatcagggatggtggccccagccaggaccccaaaaccctgaggcggtgcagtgggctgccaaccccccagctcggggttccccaaggctgcctcagtgtttggatgggctggaaggaaatgctgacatcccgactatggtccacggccgggaatggtgggcagacggggctgctgg

SEQ ID NO: 20677 - DNA, 557 bp, Homo sapiens
  SIMILAR (556)..(383): 661254mologous to Homo sapiens NADH-cytochrome b5 reductase,accession number AJ010116,Smith-Waterman Score=218.
  misc_feature (1)...(557): n = a,t,c or g
ttttaatattagcaaagttttactttttttttttctgctcataaatgactctgaaaaagccaatacgcaagaggctaacacaactgtagtctaaaggcaacgtcgaggtcatgaggacagggatggggctgggcgtctctggtaaggaccagtaagtgccaggcaggacgtactctgaaggctcagccgtggcccatctgggacacagccctgctcccgaaggggctccaggggaactgctcagccaggtgattcaccagggcacgggcaggccaggctgaacccggggccccagtgtgcgatgtggggaagtgaccgggtgagcgtgaacagnggcgtgggtgcgcggggcgggtggccgtgtgaccgtgcccggccctcagaagaagaagcagcgctccgtggggtggcccacgtggtccaggttgggagaggcagcgtactggatcatgggtggggggccacacatcancaccagcggctcctcctcttggggtggaaagtggtccngatcatctcctattcacgaagccctggccgagtcccaagcttagggg

SEQ ID NO: 20678 - DNA, 291 bp, Homo sapiens
  SIMILAR (106)..(252): 321254mologous to Homo sapiens Similar to zinc finger protein 162,accession number BC000773,Smith-Waterman Score=54.
gcgcgacggtctcggcggcggcggcggcggcgacagagcgagcgcggcgcggggccaccatgggggcccagctcagcacggtaggcggggagggggcgccggggcaccccaccccacaagggcctgggcgagctacgtggtgaccgctacttacgccctggcagtctgcagcggggacccagccctcctgcccggggggcgcgccagagcccagcacccgggggcacctgggccctgccctggccgccgtggggccttggctgctggagggacccgtggttgtgagcgtgt

SEQ ID NO: 20679 - DNA, 1248 bp, Homo sapiens
  SIMILAR (451)..(1245): 941254mologous to Homo sapiens NADH-cytochrome-b5 reductase,accession number Y09501,Smith-Waterman Score=1312.
atggagctttttctcatggtactgagcatagaagcccagttgggccatatggtgctcttcccagtctggttcctgtacagtctgctcatgaagctgttccagcgctccacgccagccatcaccctcgagagcccggacatcaagtacccgctgcggctcatcgaccgggagggccccgtgcagagggcccaggtcacagctcagcgtgagcctgccagaccctatgtgggtatcacgttcatacacgggtgtgtggaggtgcggcacctcacacgcagcgtgcatgtgtgtgcatctgtgcttggcgtcggcgtcacgtcttacaaggacaagcaggcactggggaagggtggggacacaaaggaggaatgggatgggggctccgaggcctgggagccgccctgggaggcctctgccctggggaccgttcagcagctttgggcctctctccagatcatcagccatgacacccggcgcttccgctttgccctgccgtcaccccagcacatcctgggcctccctgtcggccagcacatctacctctcggctcgaattgatggaaacctggtcgtccggccctatacacccatctccagcgatgatgacaagggcttcgtggacctggtcatcaaggtttacttcaaggacacccatcccaagtttcccgctggagggaagatgtctcagtacctggagagcatgcagattggagacaccattgagttccggggccccagtgggctgctggtctaccagggcaaagggaagttcgccatccgacctgacaaaaagtccaaccctatcatcaggacagtgaagtctgtgggcatgatcgcgggagggacaggcctcgctcagcacgtgcgaggcccggccggctattttgcaggcatcaccccgatgctgcaggtgatccgcgccatcatgaaggaccctgatgaccacactgtgtgccacctgctctttgccaaccagaccgagaaggacatcctgctgcgacctgagctggaggaactcaggaacaaacattctgcacgcttcaagctctggtacacgctggacagagcccctgaagcctgggactacggccagggcttcgtgaatgaggagatgatccgggaccaccttccacccccagaggaggagccgctggtgctgatgtgtggccccccacccatgatccagtacgcctgccttcccaacctggaccacgtgggccaccccacggagcgctgcttcgtcttctga

SEQ ID NO: 20680 - DNA, 2143 bp, Homo sapiens
  SIMILAR (1806)..(1138): 611254mologous to Homo sapiens NADH-cytochrome-b5 reductase,accession number Y09501,Smith-Waterman Score=578.
  misc_feature (1)...(2143): n = a,t,c or g
tttttttttttttttttttaatattagcaaaagttttacttttttttttttctgctcataaaatgactctgaaaaagcccaatacgcaagacggctaacacaactggtagtctaaaaggcaacgtcgaggtcactgatatgtccctcagacaagaggcactgctcagaatcccccctgtgctgggggtgagggggaaaggaggggaacggtttaggacagaggaataaatacatgtgtgttgtgggagttctgccatcagggatggtgggccccagcccacggacccccaaaaccctgaggcgggggaagtgggctggcaacccccccaactcggggttccccaaaggctgcctcaatgggtttgatagggctggaaggaaatgctgatggtctgggggaagggccccatgggccagcccccctctttcccactctaaggccagaggaagagcccaagctccccggctgggccagggcccctggggtaagggaagcaagtgccccccaaagagggcttttcttggtgtcaaatgtcttcaatgcagcgtcaaggtggtgaggccttggccttggcccttgaggcgggagtgggggtgacaggcgaggcttggggtgggccctggcaccgtcagcttttgggctgcccatgtgtgtctgctgacatcccgactatggtccacggcacgggaatgggtcgcagacgtggctgctggcaggccttcaccttatagtgtgtgtggggggtggacgaggggtcattatggacagggatggggctgggcgtctctggtaaggaccagtaagtgccaggcaggacgtactctgaaggctcagccgtggcccatctgggacacagccctgctcccgaaggggctccaggggaagtgtatcagccaggtgattcaccagggcacgggcaggccagtctgaacccggggccccagtgtgcgatgtggggaggtgcccggtgtgagcgtgaacagggcgttgggtgcaaggggcgggtgaccgtgtgaccggtgcccggccctcagaagacgaagcagcgctccgtggggtggcccacgtggtccaggttgggaaggcaggcgtactggatcatgggtggggggccacacatcagcaccagcggctccctccctctgggggtggaaaggtggtccccggatcatctccctccattccacgaaagcccctggccgtagtccccaggcttcaggggctctgtccagcgtgtaccagagcttgaagcgtgcagaatgtttgttcctgagttcctccagctcaggtcgcagcaggatgtccttctcggtctggttggcaaagagcaggtggcaacacagtgtggtcatcagggtccttcatgatggcgcggatcacctgcagcatcggggttaatgcctgtcccttcccgcaatcatgcccacagacttcactgtccctgatgatagggtttgaactttttgtcaggtcggatggcgaacttcccttttgccctggtagaccagccagcccactggggccccggaacttcaatggtgtctccaatctgcatgctctccaggtactgagacatcttccctccagcgggaaacttgggatgggtgtccttgaagttaacccttgatgaccaggtccacgaagcccttgtcatcatcgctggagatgggtgtatagggccggacgaccaggtttccatcaattcgagccgagaggtagatgtgctggccgacagggaggcccaggatgtgctggggtgacggcagggcaaagcggaagcgccgggtgtcatggctgatgatcttgcatgaggcagtgagtgtggttcagagaaggggctctgtggacagagagaccagggtttaaattcctctgctacttcctggtggccttagcaagagacatcaccttgctttctccatctcccggtcgatgagccgcagcgggtacttgatgtccgggctctcgagggtgatggctggcgtggagcgctggaacagcttcatgagcagactgtacaggaaccagactgggaagagcaccatatggcccaacgtgctgagctgggcccccatggtggcnccgcgnnnnnnnnnnnnnnnnnnnnnnnnnnnnnnnnncgagacccgggaattcggacgg

SEQ ID NO: 20681 - DNA, 1064 bp, Homo sapiens
  SIMILAR (155)..(493): 481254mologous to Homo sapiens GEF-2 protein,accession number AJ010569,Smith-Waterman Score=170.
tggaccagcgtggtggaattccgtcgctgccgctgccgctgccgccgtcgttgttgttgtgctcggtgcgctgagctccgcgacttccgcgagcgggtgtctcgtccccttcccgccgccgccatgaagtggatgttcaaggaggaccgctggcgtggaacacagatgcgtggagtccgcgaagaattcgagcgaaatatcccgacagggttccggtgattgtggaaaaggttctcagggctctcagattgttgacattgacaaacggaagtacttggttccatctgatatcactgtgggctcagttcatgtgggatcatcaggaaaaggatccagcttccttctgaaaaggccgatcttcctgtttgtgggataagacagttcccacagttccagcctaactatggggacagctttacgaggaagggaaaaaggatgaagatgggattcttatatgtgggcctacagcgggagagtaacactttttggcttctgagggccattgctggggctaggtgcacccgtaactgccttgtgtattcttgttaaattagccagccattttcaggttattatacccagaacctcttcacatagacctattaggtgcatttggaacctggatttatttccttaatatattggaagggttttgtttccttagacctagtaaattatccataccagagttttaattttgaagtttttcctttttgtgccattgtccctcatgccctgtattccccccaggaaaccttgtcccttctggaaatcatattggaatgatatttcctatatcgaagtgaggtaggtgcggtattaaagtgaaagggaaggtgatgcatttattcctgggttatgcttgaagtgttagatggctaagtattaaaattatcccaaattaaatcccttagcagtcaagaacactctgcttcagctagaatatgccaagctgccaatcatgttggcactgagctaatcttgttcctctttcttgaaactattaaggataaaaacattacccaataaaaattcttcttataaaggccaaaaaaaaaaaaaaa

SEQ ID NO: 20682 - DNA, 618 bp, Homo sapiens
  SIMILAR (437)..(102): 381254mologous to Volvox carteri extensin,accession number X65165,Smith-Waterman Score=104.
atgcattttgagcgaccagagggtagagtattttgggctgaaatgtgtccttccccagattataactccaagtacctccaactgtgcctgcatttgcagagagccggagcccggcccagtgctccagagaaaggccgtcctgcagcacccgccgctgtcgccgaccgcccgcacatccgtcgggccggccggcgtggcgctcggcgccgaacaggccccgaggaggccgcagttaggcctagtgattatccagttgccctgagcggctgcggaggtgcgctccataagcgggcagggtgggaaaagttcgcccgtttgtccggaaggcagttgatggacctggggtcgacaccactgcggacgcagggcacggcacgggggcgagaaggcgaaggctgcaggcgcggggatggggaaaaggacggcggcggcggcggcagcgcagcctccggcgcgacggcgtgtctgcgcaacagggcgtgctcgttcccttggcggcccttgcctttgtcgccatatgcgcgcgtacgttccagacgcctgcggcagcgccacctttcggccttcccctcacagcccatccttggctgggtgcagtgtcggctacgctttaggtga

SEQ ID NO: 20683 - DNA, 386 bp, Homo sapiens
  SIMILAR (1)..(222): 871254mologous to Homo sapiens pyrroline-5-carboxylate reductase,accession number M77836,Smith-Waterman Score=342.
aagctgatggcattccagccagcccccaaagtgattcgctgcatgaccaacacacctgtggtagtgcaggaaggcgctacagtgtacgccacgggcacccatgccctggtggaggatgggcagctcctggagcagctcatgagcagcgtgggcttctgcactgaggtggaagaggacctcatcgatgccgtcacggggctcagtggcagcgggcctgcctatggagctgccaagatgctgctggactcggagcagcatccatgccagcttaaggacaatgtctgctcccctgggggagccaccatccacgccctgcactttctagagagtgggggcttccgctctctgctcatcaatgcagttgaggcctcctgtatccgaacacg

SEQ ID NO: 20684 - DNA, 460 bp, Homo sapiens
  SIMILAR (174)..(239): 901254mologous to Homo sapiens pyrroline-5-carboxylate reductase,accession number M77836,Smith-Waterman Score=100.
ggaattcccgggtcgacgatttcgtgttgcaccatcccagaagctgctgttagctcgccggtcctcggcacgccgcccgttcgcccctgcgctgtgcgcccttggcctagcgttacttccggtccctcgctgagggggttcgtgcggctcccaggaggcgtgaaccgcggaccatgagcgtgggcttcatcggggccggccagctggcctatgctctggcgcggggcttcacggccgcagaagatgggtgtgaacctgacacgcagcaacaaggagacggtgaagcacagcgacgtcctgtttctggctgtgaagccacatatcatccccttcatcctggatgagattggggccgacgtgcaagccagacacatcgtggtctcctgtgcggctggtgtcaccatcagctctgtggagaagggagctgccaagatgctgctggactcggagcagcatccat

SEQ ID NO: 20685 - DNA, 1868 bp, Homo sapiens
  SIMILAR (781)..(1236): 661254mologous to Homo sapiens pyrroline 5-carboxylate reductase isoform,accession number AF151351,Smith-Waterman Score= 431.
atggctcacgcctgtaatcccagcactttgggaggccgaggtcagatccagagctccccacaacagaccacagccaggaaaagcaaagggccctgcagtgccctggtggactatggggagggtgagtatcctgcagaggagcaggcagcattaggaagttgtgaagggaggcgttacttccggtccctcgctgagggggttcgtgcggctcccaggaggcgtgaaccgcggaccatgagcgtgggcttcatcggggccggccagctggcctatgctctggcgcggggcttcacggccgcaggcatcctgtcggctcacaagataatagccagcttccccagaaaatgaaccctgcccacggtgtccgcgctcaaggaagatgggtgtgaacctgacaccgcagcaacaaaggagacgggtgaagcacaacgaccgtccctgttttctggctgtgaagaacattattcattcccctttcattcctgggatgagatttggggccgacgttgcaagccagacacatcgtgggtctcctgtggcggctgggtgttcaccattcagcttctgtgggagaaggaagcttgatgggcatttcccagccagcccccaaagtgattcggctgcatgaccaaacacacctgtggtagtgcaggaaggcgctacagtgtacgccacgggttcccatgccctggtggaggatgggcagctcctggagcagctcatgagcagcgtgggcttcctgcactgaggtggaagaggacctcatcgatgccgtcacggggcctcagtggcagcgggcctgcctatgcattcatggctctggacgcattggctgatggtggggtgaagatgggtttgccacggcgcctggcaatccaactcggggcccaggctttgctgggagctgccaagatgctgctggactcggagcaccatccatgccagcttaaggacaatgtctgctcccctggtgggagccaccatccacgccctgcactttctagagagtgggggcttcgcttctctgctcatcaatgcagttgaggcctccctgtatccgaacacgagagcctacagtcccatggccgacccaagaaaagatctccccagctggcccttaagaagaccctcttagacagagtgaagctggaatcccccacagtctccacactggaccccctccagccccagggaagttcctcacaagaagcctgggcctggggaggcaagaaggactaaggcagcatctgtcccctctgtgattcagagcccttagttgagagcccctgccgcccctgccaccccccctgccccgctcccaccattgcccctcctcagctgttgcaagggaggaaagcattgtttagggaagttttcaggttccttgttgattaaaacctcctttaaatttgttttcaggaccaaggcaattgggagttttccttttcctgttcccatgttggaaagttgcctctgaaaggggtggtagatgctgggaagcccagaacacaacccccctgcgacgcctgcctcaagttggtggagactgggggctgggactggaaatcagccccagctgggaggaggggcctggggaggatctgccagctgaaagcccgaggcagggttggtgtgatgcccaaggcaaagtggtgaggagaaaacaaggaaacggactttctctgaattggtaaatgggaaagaagtgagcaacttaagattgtggctgttaatcacaagtggacaggattagactgggtggatattgaactgtggctgtatatgtgtgccaatttaaagagtggttatttaatgctaagtttaactgctttaatcaagtttatttttaaatatcaaaaaaaaaaaaa

SEQ ID NO: 20686 - DNA, 424 bp, Homo sapiens
  SIMILAR (184)..(306): 391254mologous to Homo sapiens Human prostate cancer- associated protein 33,accession number Y48247,Smith-Waterman Score= 72.
  misc_feature (1)...(424): n = a,t,c or g
cttgcggttgctttatatccagctgagtgagagggtttgagtcaaagcctgggtgagaatcctgcctctccccaaacattaatcaccaaagtattaatgtacagagtggcccctcacctgggcctttcctgtgccaacctgatgccccttccccaagaaggactagaaaaacttgggtctcttaccgcgagactgagaggcagaagtcagcccgaatgcctgtcagtttcatggaggggaaacgcaaaacctgcagttcctgagtaccttctacaggcccggcccagcctaggcccggggtggccacaccacagcaagccggccccccctcttttggccttgtggataagggagagttgaccgttttcatcctggcctccttttgctgtttggatgtttccacgggtctcacttataccaaagn

SEQ ID NO: 20687 - DNA, 3167 bp, Homo sapiens
  SIMILAR (362)..(1609): 841254mologous to Homo sapiens shc p66,accession number Y09847,Smith-Waterman Score=1825.
cccaaactgacggaggggccaggctgagcagcagcccctctcttacctcagctatgaatctcctgccccccaagtccaagtgcaatccactgtggaatgagtctctgtcatcgctggaggaggggccttcagggtccaccccaccagaggagctgccttccccatcagcctcatccctggggcccatcctgccccctctgcctgggaaccatagtcccactaccctgtgctccttcttcccctggatgagcaacctgaggctggccaattgggccgggggacacctggggcctaatggggagccaggaagggcagccaatgatggggagggcattgtaggggcaaccatgccagactcattcccctacccctcctccaggacatgaacaagctgagtggaggtggtgggtgcaggactcaggtggaagggggccagctggggggtgaggagtggacccgccatgggagctttgtcaataagcccatgtggggctagctgcatcccaatgacaaagtcacgagacctggggtttcctacttggtttggtacatgggctgtgtggaggtcctgcagtcaatgagtgccctggacttcaacacctggactcaggtcaccagggaggccatcagttttgtgtgtgaggctgtgccaggtgccaagggggtgacaaggaggagaaagccctgtaaccatccactcagctctatcctggggaggagtaacctgaaatttgctgcaatgacaatcactctcaccatctccaccagcagcctcaacgtcatggttgcagactgcaaacagattatcaccaaccaccatatgcaatctatctcacttgcatccagtggggatccggacacagccaagtatgtcgccaacgttgccaaagaccctgtgagtcagaaagcatgccacattctggagtgtcctgaagggcttgctcaggatgtcatcagcaccactggccaggccttcaagttgcactttaaacaatacctcagaaaaccacccaaactggtcaccccccatgacaggatgactggctttgatggcttagcttgggatgaggaggaggaagagccgcctggccatcagcactataatgacttcctggggaaggaatcccctctttggcatgtggtatacatgaggcttcgggaaggagccactccaggggctgctcgacccactccacccagtgcccagacccccagccacttgggatctacactgcctgtaggacagtctgttgggggagatccagaagtttgcaaatagatgccacctccaccaccctgtccaggcagagagctctttgatgatccctccaatgtcaacgtgcagaacctagacaaggcccggcaagcagggggtggtgctgggacccccaatcctgccatcaatggcagcacaccctgagacctgtttgacatgaagccctttgaagacactcttcacatgcctcctcttccccagttggtgtccatggctaagcagctctgaggggacccctggttccaagggaagctgagctagcagggggctgaggcactgctgcagttcaatggggacttcctggtgcaggagagcatgaccacacctggccaagtatgtgctcactgctttgcagagtggggagtccaagccatttgctactggtggaccctaggggtgtggttcggataaaggatcaccgctttggaaagtgtcagtcaccttatcagcttaccacatggacaatcacttgcccatcatctctgcgggcagcgaactgtgtctacagcaacctgtggagcggaaactgtgatctgccctagcgctctcttccagaagatgccctccaactcctttccaccctattcccctaactctcgggacctcgtttgggagtgttctgttgggcttggccttgtgtcagagctgggagtagcatggactctgggtttcatatcccagctgaagtgaagagggtttgagtcaaaaagccctgggtgagaatccttgcctcttccccaaacattaatcaatcatcaaagtattaatgtacagaagtggccccttcacctgggcctttcctgtgccaacctgatgccccttccccaagaaggtgagtgcttgtcatggaaaatgccctgtgggtgataggcccagtggaacagtcacccttctgggcaagggggaacaaaatcacacctctgggcttcagggtatcccagacccctctcaacacccgccccccccatgtttaaactttgtgcctttgaccatctcttaggtcttaatgatattttatgcaaacagttcttggacccctgaatttcaatgacagggatgccaacaccttcttggcttctgggacctgtcttctccttgcctcagcaccctctccagtttgggttgggataacagaggcaggagtggcagctgtctcctctccctgggggatattgcaacccttaggagattgccccaggagccccactcccgggccaggcagggagatgggacccctcccttgctcagtgcctcctggccgggggggggtgcctcaccaaggcgtgtgtatatacatttcataaggcctgccctcccatgttgcatgcctattgtactctacagccaaagtgcagcccttcctcctgaagcctctgccctgcctccctttctggggagggcggggttgggggtgactgaaatttgggcctcttggtacagttaactctcccaggtggattttgtggaggtgagaaaaaggggcattgaggctataaagcagtagacaatccccacataccatctgtagagagttggaactgcattcttttaaaattttatatgcatatattttagggctgtagacttactttcctattttcttttccattgcttattcttgagcacaaaatgataatcaattattacatttatacatcacctttttgacttttccaagcccttttacagctcttggcattttcctcacccaggcctgtgaggaactgggaccggcagcattatctttatacagagacctgaggcagatgaaattgattcccagctaggactagaaaaccttgggcctcggactgcgaggctgagaggcagaagtttgcctgaatgcctgtcagttcacggatgataatgcaacctacaattaatgagtacc

SEQ ID NO: 20688 - DNA, 2444 bp, Homo sapiens
  SIMILAR (1207)..(863): 421254mologous to Homo sapiens Human secreted protein clone dx146_12 protein sequence SEQ ID NO:78,accession number Y53036,Smith-Waterman Score=132.
aaaaaaaaaagccctgcaagcatgtgtaggagggaggccagcctctggttctgctgtgccctccatcaccagcaccaccacctacctccattttgttcacccggccccatggatacaaaaactctgccgtgtatttagaataagaaaggtagtaaagctatgaagactttgtcttttgggccgctattccttaaacctccccatactccctcttcaatgtgttccactatccattcatctaacagcctgattacaactccctgggtgctctccaagtaagaggggtatttagggttttgctgagtgcaggggtgatgcctaaatgggtggatgaatggacaaactgacaaagcaacagacgaaaggaaacattcccaaacccttattgaacagacttttcttcatgacacctctcggaatgtaaacagagctttggtgtgaagaagatcaatctgatggttaaagatcaagtatggcctgcgtaaggcaagtttgacaatctaacccatcccctaaacaagattttccctaaaaactctgtggaaacaaacccaaaggagaaaggcaatattcctcccctttcccaaaaaggtggggcaaatgtgcctctttccttggaaggttatttttacaagcacggggcccctgaaagcaggcagcctccccatcagccatttttggcgtgagcagttaacagctggcacacttttgcaacttgtccccgccttgaggtctgatgtcagaagagcatggtcagtccactttccactttcagagagggtttggtgggtgtcaggcaagccctgctgttccaaggttcctaatcctttgaatcacagcaattggggtctcagttttaatgggctttcttggctggatttccagcatcatgggcagggtattttaccacatctgtcacattcttataggactcaggagcctcttccatatccagtttgggtgaaggcaaacacggatccgcaaattcccccatatcctgcccaatttgtcctaagacatccctggaaatcctaaattacgtcgagattttgcctcgggacaatgcacgggcccgctcccatgacaagtttgttcccaaaggttctcagtcatgcccctgttccagtgccagtaagaacataactacaggttcccatggtgccaccaatgagcactggctgtccagtgagttggtaatcaacagcaatgagcggatggtgaggagggaaagcgcgggtggatcccttcctgtgtactaacagtgtccgttcctttccgtccaccacatgctgctccactttggcaatgttgtgagaaacatcatagatcacatgtaggtccaagtcatcaggggttgtgttgaagaccttggcgaaagcctgacgggttaagaaggtcatggaagagcggttgacccaggcatagttcccagcagctgccattcccttcagatagtcttgaccctctggggaagcgattcgagcacaagccaactgccgatcattgactataatcttgtctctcttcatggccttctccatagctaccagcgcatctgtggctacttggtggcccaagcctctgcttccactgtggatcatcacacacacctgtcccttatggtcgatgcccatttttttagcagcatactcattgaaaatctcatccacaacctggatttctgcataatggttgcctgctcccagggtccccaactgaggaaggcctcttttcttcgcccttgcagaaactttattggggtcagcctgcagcatccttccgtactcctcgcagtgctccttgtcttcagcccaggcatacccttctcttaaggaccagtccacccccatctccaaggcctcctccaagtctttggcattcattgggatgacaccttttgaccccaccccaacaggaatgtggtcaaacatagcttgggcaagttgctccttcacaggctggacatcactttcatctaaattggttcttagcaagcggacaccacagttgatgtcaaacccgacaccacctggggatactactgcttcagggtcattcatatcaaaggctgccatgttcccaatagcaaacccatatcctgaatggacatcaggaagcccaatagatcgatgaacaattccaggcagggctgccacattgccaatctgtttcatggctggcaggaagccaccaacaccaccacctcgacaggcattccttaattcctcaaacatcaatttctccagagcatcattcacatagaaaacaccttcaacctgcatgttgggcacgaagcccttcttgatcctccagcagtttttattgatcttctccaagaactgcagctcatcattatagctgcgactcatggtggcgaaaactgtagcaaaaactcccggctccgctttgaagagccgctgccgcgtagtccggcttctcagagc

SEQ ID NO: 20689 - DNA, 876 bp, Homo sapiens
  SIMILAR (794)..(874): 1001254mologous to Homo sapiens HNK-1 sulfotransferase,accession number AF070594,Smith-Waterman Score= 140.
atgggttcatggcccagtgactgtaagaagagttggagatgtggagctgccctgggaagccaaagtgaggggctgtgtctgctgaagagatcctgggtgagggaagacaaactaagcagtcaagagattccattcctgaacattcttgtgactattctccgaaaggccactcagtctatagtattttattgcggcaatccaagtagactaagaaattactaccaagaagtgggtgctgctgtaacaaataatgtggaatcagctttggaaacggatgatgtacagataatggagaagtttcagatgcatgctaacaatatggacatgaaatgtgattctgatgaggactcagatggaaaagagaggctgggcatgtttcttcagcagcagagtcagaggtacaaaaagcaaatgcccactcagccactgcccagtctcaaggtcattttcattcatggaggagggagaattctaacccggcacaagcaaccccggttgggtgctccacatcccatcatctctggctgtggctctagaagccagcggatgagctacgaggatccacattatctgcactgtgctttagagagtgtgtcccggagcctggatcttgggcagcacaggaacccctctaagctcgtggccataaagggcttctcacatgttggagtttatttcacacacgttcacggtgtttttgattatgaaccagaagcccattgtgaagtgtcaagaccaggaaataacagacacggcagttccacgagaagacattcaacctctctgtcttccagtgtacagtgccaaacaggagtttctgttcctgacaaccatgccggaagtgaggaagttgccagaagagaagcacattcctga

SEQ ID NO: 20690 - DNA, 849 bp, Homo sapiens
  SIMILAR (316)..(531): 551254mologous to Rattus norvegicus HNK-1 sulfotransferase,accession number AF022729,Smith-Waterman Score= 187.
atggatggagctggaagccgttatcctcagcaaaccaacacaggaacagaaaaccagatgctgcatattctcacttatgagtgggaactgaacaatgagaacacatggacacagggaggggaacaacacacactggggcctgtcggcggaaacacacgaagccttatacacgggcacctgagggtggtttgcgagccatccggagaaaacccaggcagcttggcaggtggtgagctccccactgcaggctgtattcaggtgtggccggataactacgtggtgggaagagtcagtgaatggctgcggtgtgacaacatgcaccaccagtggcttctgctggccgcatgcttttgggtgattttcatgttcatggtggctagcaagttcatcacgttgacctttaaagacccagatgcagggcgcctctcaggctcgcagttgggaattctctttgcctcatgtcatcatgagaggtgcagcctcaactgcttggcatgcccgtgtggtggccacatgtttgaaggtcaccctccatgcagcggaggagggtcatttaaatgtatgtcttcaggttgtcttggaggctttcttagctctcctttactgaacgtaggcattcagatgaggacggataaagagcgccaaattgggtctcagaatgctgattctacttcgtgctcttgtcatttgcttatctacatcacaatgtttcttccaccaaatggacaccctgcctgctccggcaccgcccatgattgccctgagcatgaggctgactcagagcatgaggaccctttcccacacccctatgacttcatcctcaaccaaccagcagcacccactccctag

SEQ ID NO: 20691 - DNA, 1443 bp, Homo sapiens
  SIMILAR (742)..(1440): 931254mologous to Homo sapiens HNK-1 sulfotransferase,accession number AF070594,Smith-Waterman Score= 1177.
atggggtcatgtggagaaccatctcctacacaggaatgccctcaggatgcctccagagaacaaggaggtgtgagcagcaaggggactttaactcaccgaggacagggggcctctgagcaacttctgtgtgtactggcacatctccctgtgccccctccaacccatgcacacacaaggcctctcacattacagccaactgggaaggagcttccagacagccagctcgttcagcccctggtctacatggagcgcctggaactcatcagaaacgtctgcagggatgatgccctgaagaatctctcgcacactcctgtctccaagtttgtcctggaccgaatatttgtctgtgacaagcacaagattcttttctgccagactcccaaagtgggcaacacccagtggaagaaagtgctgattgttctaaatggtgtgtgtgggtctactgaatgtccactgggaagggtcttggtggccggtgctgaggaggctggggaggacagcaaggaggagtcacaagagggctggtttgacctgaagggactggtggccgtccagacaggcctgtttttgttgtttcctgttagtgttgtgccttacaagttccctgtgctgatggttatagtcacccactctgtccgacatccccagggccccacactcgcagagccaccaggaagcctcacggtcaccctctctgcatctcagagtagagtaagtgttgctggtgttaggagttctgtttgcatgcagcgatcttcctctaatggcagatttagcccagttaggtccattgccaggggagcattttcttccattgaggagatccccgaaaacgtggtgcacgaccacgagaagaacggccttcctcggctctcttccttcagtgatgcagaaattcagaagcgattgaaaacatacttcaagttttttattgtaagagatcccttcgaaagacttatttctgcatttaaggataaatttgttcacaatccccggtttgagccttggtacaggcatgagattgctcctggcatcatcagaaaatacaggaggaaccggacagagacccgggggatccagtttgaagatttcgtgcgctacctcggcgatccgaaccacagatggctagaccttcagtttggggaccacatcattcactgggtgacgtatgtagagctctgtgctccctgtgagataatgtacagtgtgattggacaccacgagaccctggaggacgatgccccatacatcttaaaagaggctggcattgaccacctggtgtcatacccgactatccctccgggcattaccgtgtataacagaaccaaggtggagcactatttcctgggcatcagcaaacgagacatccgacgcctgtatgcccgtttcgaaggggactttaagctctttgggtaccagaaaccagactttttgctaaactaa

SEQ ID NO: 20692 - DNA, 2709 bp, Homo sapiens
  SIMILAR (1838)..(1437): 441254mologous to Homo sapiens HNK-1 sulfotransferase,accession number AF070594,Smith-Waterman Score= 176.
  misc_feature (1)...(2709): n = a,t,c or g
ttttttttttttcagggtttggcacataaattttatttaactttcacattgacacaatcaggaaaccattctgagaaaaggtagaggccgccttgaagcgaagcctgggctccctcctccaccccgggctcggcggcaccatgcaggctcaggctggcactcatcccaggaaactgtcccagttctcagcgggtcctgggctgtgggacggtatctgaaatgggtcgctgcggcttgccctgcaccagggccttaccttgttgccagggaagccgcactgctgggaggctacctggggcgctggggttttattgctgggtgaacttgggttacccacctttccagtcacatgggtccagggatgggtgggtgtgatcagaaatggtctttgggcagtgcccattttgctggagatgaaaggaattcgaaatgtattaaacttacactgaattctgtgatagttggcaggtttgcccctgctcgtcttcagccccaacatgggagctccctggagaagacaggtggagattcactgctgtccacccaggtaaggcaagtcagaactgatgcgccgggatccacagcagcctgagctccaagcccaaccagcgcccccattcctgggccatggtccttttaaggccctcaaagacactccccttctcaggtagaaaaagcctcccctcccctcaccttctaaaatcgtatgtcttgtgctgaatgaaataggcgcttggcagacacaggttcagaagcatggaccagcattacacaggcatggattctggaaagatggatccctggacaccacaccaccctctgggccatcgctgactgtctacaggaacaaaatagtcacagaaagaatgctttgcctccacaattgtcgcagcaccaagatgaaggccagaggtgccgttttactcctcagatctgatgctgcaaaagtctctgcgatttcaagcagcccccttgcttctctgtccctcctcagagtcctgggtgctgttcctgcaacccaccagtgatgggtgaagccaccccgactagccaggagaacctcaggggcatccccttccttaacacctgaaggaaacggctcctaacgctgtgtgatgcttcctccctgctgggctgtcaaactgcaaatctttagccttttcctcccctctgaggtgaacaaaaggcccagcgaacatccctaatgcacgccaggggtgtgggcagggtccctcagagcatccttacatcccaaactaagttgtaacagttggggttctgcgtcatatgccgaggcaactcacaggcctgtgggagaccccgggcgtcctcaaaggaggggtgtggtggaggaagggtcatttctgggctcagatcttcacctggttagccccaggtctaataaagatatttgaattcataggtcttatgcattagtttagcaaaaagtctggtttctggtaccccaaagaccttaaaaatcccccttcgaaaacggggcaataacaggccgtcggatgtcctccgtttgctgatgccccaggaaatagtgctcccaccttggttctgttatacacggtaatgcccggagggatagtcgggtatgacacccaggtggtcaatgccagcctcttttaagatgtatggggcatcgtcctcccagggtctcgtggtgtccaatcacactgtacattatctcacagggagcacagagctctacatacgtcacccccantgaatgaatgtggtcccccaaactgaaaggtcctagcccacctgtggttcgggatcgcccgaggtagcgccacgaaaatccttcaaaactggatcccccgggtcctctgtccggttcctcctgtattttctgatgatgcccaggagcaatctcatgcctgtaccaaggctcaaaccggggattgtgaacaaatttatccttaaatgcagaaataagtctttcgaagggatctcttacaataaaaaacttgaagtatgttttcaatcgcttctgaatttctgcatcactgaaggaagagagccgaggaaggccgttcttctcgtggtcgtgcaccacgttttcggggatctcctcaatggaagaaaatgctccatttagaacaatcagcactttcttccactgggtgttgcccactttgggagtctggcagaaaagaatcttgtgcttgtcacagacaaatattcggtcccaggacaaacttggagacaggagtgtgcgagagattcttcagggcatcaatcccctgcaagacgtttcctgaatgaagttcccaggcgctcccatgtaagacccaggggctgaacgagctggctgtctggaagctccttcccagttggcttcagttcctcaggaatgtgcttctcttctggcaacttcctcacttccggcatggttgtcaggaacagaaactcctgtttggcactgtacacatctgggtctttaaaggtcaacgtgatgaacttgctagccaccatgaacatgaaaatcacccaaaagcatgcggccagcagaagccacttggtggtgcatgttgtcacaccgcagccattcactgactcttccttctgcagcctggggctcacatttccttgctgtgtttcccctgaactgaggttcttggttcctcttgtcacctactggagcggcgctcgtccgggtccttaggctcctcccccggcacgaggcctcgtgcc

SEQ ID NO: 20693 - DNA, 426 bp, Homo sapiens
  SIMILAR (183)..(290): 801254mologous to Homo sapiens glyoxalase II,accession number X90999,Smith-Waterman Score=155.
agttttctgccacacagatttgcggaagaacctgaccgtggacgagggcaccatgaaggtagaggtgctgcctgccctgaccgacaactacatgtacctggtcattgatgatgagaccaaggaggctgccattgtggatccggtgcagccccagaaggtcgtggacgcggcgagaaagcacgggggtgaaactgaccacagtgctcaccacccaccaccactgggaccatgctggcgggaatgagaaactggtcaagctggagtcagcggatttggggattaggctcttttaggtaactggctttcctgctggtccgtgcgggaaattcagtcttgatttaaccttaattttacagcccttggcttgtgttatcggacgttttaatgcatatttataagagaagtttaacaagtatttattcccat

SEQ ID NO: 20694 - DNA, 633 bp, Homo sapiens; identical to SEQ ID NO: 9889
  SIMILAR (85)..(255): 1001254mologous to Homo sapiens glyoxalase II,accession number X90999,Smith-Waterman Score=299.

SEQ ID NO: 20695 - DNA, 444 bp, Homo sapiens
  SIMILAR (103)..(336): 881254mologous to Homo sapiens glyoxalase II,accession number X90999,Smith-Waterman Score=351.
atgttgggcaccgcagagagcccacggatcttccatggcaaacggctgagatcacaatatgccaaaacaggtgtagacagctgtcacttaagcgcccatataggtgacaccttgtttgtggctggctgcgggaagttctatgaagggactgcggatgagatgtgtaaagctctgctggaggtcttgggccggctccccccggacacagtaggcagcgcctccctgcgggccgggagagtctactgtggccacgagtacaccatcaacaacctcaagtttgcacgccacgtggagcccggcaatgccgccatccgggagaagctggcctgggccaaggcccccacatcgcctttggtcaccatgtctcactgggctcctcagggctgtgacagtgtttctggtgacctggacggttttgaggaatgctggtgtgggatcgtatag

SEQ ID NO: 20696 - DNA, 620 bp, Homo sapiens
  SIMILAR (93)..(263): 1001254mologous to Homo sapiens glyoxalase II,accession number X90999,Smith-Waterman Score=299.
tttcgtgggtgcggaaagcgctaggtccagccctgctgggagttttctgccacacagatttgcggaagaacctgaccgtggacgagggcaccatgaaggtagaggtgctgcctgccctgaccgacaactacatgtacctggtcattgatgatgagaccaaggaggctgccattgtggatccggtgcagccccagaaggtcgtggacgcggcgagaaagcacggggtgaaactgaccacagtgctcaccacccaccaccactggtaagtgccgcgtctcacctgggggtgtgggacctggctcacttctcgccccggtgggtttagggacatcaaggcctgtctccccccacggctctgtcttgtttgtgagggacaagcccccagcagacttctgagaaagactcgggactcaccgtagcccccaaggggcaagtctggtgctcagtgactctgaggccccgagggtgaggggagaaggttacagccttaccctcaggccccaccccccggctctctcctgggccatgcgggtttgtgccctggcacgttggcctcaatgttggggaggaaatgagtctacaggtgagtggtttttaaaaaaaaaaaacaaacaaacaaa

SEQ ID NO: 20697 - DNA, 1589 bp, Homo sapiens
  SIMILAR (168)..(881): 601254mologous to Homo sapiens glyoxalase II,accession number X90999,Smith-Waterman Score=610.
gctcggcagtccagcccggcccggtcatggtggtgggccgaggctgctcgcgccgcagcctcgccgcgctgggagccgcctgcgcccgccgaggcctcggtccagccctgctgggagttttctgccacacagatttgcggaagaacctgaccgtggacgagggcaccatgaaggtagaggtgctgcctgccctgaccgacaactacatgtacctggtcattgatgatgagaccaaggaggctgccattgtggatccggtgcagccccagaaggtcgtggacgcggcgagaaagcacggggtgaaactgaccacagtgctcaccacccaccaccactgggaccatgctggcgggaatgagaaactggtcaagctggagtcgggactgaaggtgtacgggggtgacgaccgtatcggggccctgactcacaagatcactcacctgtccacactgcaggtgggggtctctgaacgtcaagtgcctggcgaccccgtggccacacttcaggacacatttgttacttcgtgagcaaagcccggaggctcggagcccccctgccgtgttcacaggtgacaccttgtttgtgggctggctgcggggaagttcttatgaagggactgcgggatgagatgtgtaaagctcttcttgaggtctttgggccggctccccccggacacagtaggcagcgcctccctgcgggccgggagagtctactgtggccaacgagtacaccatcaaacaaacctcaaagtttgcacgcccacgtggaaaccggcaatgcccgccatccgggaaaaagctgccctgggcccaaggagaagtacagcatcggggagcccacagtgccatccacccctggcagagggagtttacctacaacccccttcataaaagtgagggaagaaagacggtgcaagcagcacgcaggttaatacgaaccccggtgaccaccatgcgggccgtgcgcagggagaaggaccaagttcaaagatgccccgggacctgaggccgcccctgcaccttcagcaggatttggggattaaggctcttttagacagactcttctgagtggaggggcagagcggccctgggacctaggagcaagcctggcccgaggcttgtggattgaagaggaaggctggcactgcacttctagaccacatgcatgccctccccccggaggggtcactggtctgttccgcaataactcgccagtacccctctgggatgcccacggaaagccaggccgtgtgtgaaggaggcagggcagactgctttctccggcttttcttctcccactacccccaccccagcgcaaagagtttgttctattgttcagcaaatattcttaggccagaatcttaaatgtttccattctataacaaacactgtgctcatttgtcaacatggagaaacctgatctctactaaaaatacaaaaattagctgggcgtggtggcatgtgcctgtagtcccagctactctggaagctgaggcacgagaatcgcttgaacatggaagcagaggttgcagtgagccaagatcatgccattgcactccagcctgagtgacagagtgagactttgtctca

SEQ ID NO: 20698 - DNA, 4860 bp, Homo sapiens
  SIMILAR (2089)..(3486): 991254mologous to Homo sapiens general transcription factor 2 -I,accession number AF038967,Smith-Waterman Score=2406.
atgccgctccggggcctccacgaggtgacctcgccacgcgcctcggccatgttccccccatttccagggagtggctctgtcaaaggtcgagtccgtgacgtcaaagagcctggaccaatcacagcacaccggatgcgtttttttttccgaacgcccgcagcagagtcagaagagaggtggtcgccgtgcagtagtggtgtggcgtgtattccgagcgttggtgtctggcggtttccgagcgttggtgtctggcggtttctggacggttggtgtctggcggtttccgacggttggtgtgtggcacgcgccaccctgtcttgttttggttgcgccatgctgatgtaccaggtggcaaaatatccaaagaaagggtcccaagcggtacatcgtcatagccggaaacagtcagagccaccagccaatgatattttcaatgctgcgaaagctgccaaaagtgacatgcaggactggatggtttccatgatcgtggacagagagtacagtgtggcagtggaggccgtcagattactgatacttatccttaagaacatggaaggggtgctgatggacgtggactgtgagagcgtctaccccattgtacttttctaccctgagtgcgagataagaacgatgggtggaagagagcaacgccagagcccaggcgcccagaggactttcttccagcttctgctgtccttctttgtggagagcaagctccacgaccacgctgcttacttagtagacaacctgtgggactgtgcagggactcagctgaaggactgggagggtctgacaagcctgctgctggagaaggaccagagcacgtgccacatggagccagggccagggaccttccacctcctaggtgtccagaagaagaccaaggacagaacagagactaggtttggtgagatgggacagattttgggaaagatcatgatgagccatcaaccgcagccccaggaagagcagagcccccagcggagcacctcagggtaccccctccaggaggtggtggatgatgaagtgtcgggaccatcagcccctggggtagatcccagccccccacgtaggtcccttggctggaaaaggaagagggaatgtttggatgaatctgatgatgagccagagaaggagctcgcccctgagcctgaggagacctgggtggcggagacgctgtgtggcctcaagatgaaggcgaagcgacggcgagtgtcgctcgtgctccctgagtactacgaggccttcaacaggctgcttgaggatcctgtcattaaaagactcctggcctgggacaaagatctgagggtgtcggacaagatcccatcggagcccaccatcctgggagcatcaccgaaaacccttcctccggcttctcggatttgcatccgaccttcgaatacccctccaccccgcaatttccacatgagcacagtcaccccaatgctgagctatctggccaatgacatggaggaggacgatgaggcccccaaacaaaacatcttctacttcctgtacgaggagacccgctctcatatacccttgctccgtgagctttggttccagttatgccgttacatgaacccgagggccaggaagaactgctctcagatagccttgttccggaagtatcggttccacttcttttgttccatgcgctgcagggcttgggtttccctggaggagttggaagagagaccaaaggccaatgagctaccgcagccaccagtcccggaacccgccaatgctgggaagcggaaagtgagggagttcaacttcgagaaatggaatgctcgcatcactgatctacgtaaacaagttgaagaattgtttgaaaggaaatatgctcaagccataaaagccaaaggtccggtgacgatcccgtaccctcttttccagtctcatgttgaagatctttatgtagaaggacttcctgaaggaattccttttagaaggccatctacttacggaattcctcgcctggagaggatattacttgcaaaggaaaggattcgttttgtgattaagaaacatgagcttctgaattcaacacgtgaagatttacagcttgataagccagcttcaggagcggaagccttggggagcactgaagccaaggctgtaccgtaccaaaaatttgaggcacacccgaatgatctgtacgtggaaggactgccagaaaacattcctttccgaagtccctcatggtatggaatcccaaggctggaaaaaatcattcaagtgggcaatcgaattaaatttgttattaaaagaccagaacttctgactcacagtaccactgaagttactcagccaagaacgaatacaccagtcaaagaagattggaatgtcagaattaccaagctacggaagcaagtggaagagatttttaatttgaaatttgctcaagctcttggactcaccgaggcagtaaaagtaccatatcctgtgtttgaatcaaacccggagttcttgtatgtggaaggcttgccagaggggattcccttccgaagccctacctggtttggaattccacgacttgaaaggatcgtccgcgggagtaataaaatcaagttcgttgttaaaaaacctgaactagttatttcctacttgcctcctgggatggctagtaaaataaacactaaagctttgcagtcccccaaaagaccacgaagtcctgggagtaattcaaaggttcctgaaattgaggtcaccgtggaaggccctaataacaacaatcctcaaacctcagctgttcgaaccccgacccagactaacggttctaacgttcccttcaagccacgagggagagagttttcctttgaggcctggaatgccaaaatcacggacctaaaacagaaagttgaaaatctcttcaatgagaaatgtggggaagctcttggccttaaacaagctgtgaaggtgccgttcgcgttatttgagtctttcccggaagacttttatgtggaaggcttacctgagggtgtgccattccgaagaccatcgacttttggcattccgaggctggagaagatactcagaaacaaagccaaaattaagttcatcattaaaaagcccgaaatgtttgagacggcgattaaggagagcacctcctctaagagccctcccagaaaaataaattcatcacccaatgttaatactactgcatcaggtgttgaagaccttaacatcattcaggtgacaattccagatgatgataatgaaagactctcgaaagttgaaaaagctagacagctaagagaacaagtgaatgacctctttagtcggaaatttggtgaagctattggtatgggttttcctgtgaaagttccctacaggaaaatcacaattaaccctggctgtgtggtagttgatggcatgcccccgggggtgtccttcaaagcccccagctacctggaaatcagctccatgagaaggatcttagactctgccgagtttatcaaattcacggtcattagagtcttcctgaaacacagctacacccgtattatccatggctgctttcctgtcacatgtaaagaactggccaagtccaaggcagaagtggcctgcatcgcagtgtacgaaacagacgtgtttgtcgtcggaaccgagagaggatgcgcttttgttaatgccaggacggattttcagaaagattttgcaaaatacttgcatttaaggcgcagcctggaagtgccagggagcactggaggccacccagtcatgggggacaccttcatccgtcacatcgccctgctgggctttgagaagcgcttcgtacccagccagcactatgtgtacatgttcctggtgaaatggcaggacctgtcggagaaggtggtctaccggcgcttcaccgagatctacgagttccataaaaccttaaaagaaatgttccctattgaggcaggggcgatcaatccagagaacaggatcatcccccacctcccagctcccaagtggtttgacgggcagcgggccgccgagaaccgccagggcacacttaccgagtactgcagcacgctcatgagcctgcccaccaagatctcccgctgtccccacctcctcgacttcttcaaggtgcgccctgatgacctcaagctccccacggacaaccagacaaaaaagccagagacatacttgatgcccaaagatggcaagagtaccgcgacagacatcaccggccccatcatcctgcagacgtaccgcgccattgccaactacgagaagacctcgggctccgagatggctctgtccacgggggacgtggtggaggtcgtagagaagagcgagagcggttggtggttctgtcagatgaaagcaaagcgaggctggatcccagcgtccttcctcgagcccctggacagtcctgacgagacggaagaccctgagcccaactatgcaggtgagccatacgtcgccatcaaggcctacactgctgtggagggggacgaggtgtccctgctcgagggtgaagctgttgaggtcattcacaagctcctggacggctggtgggtcatcaggaaagacgacgtcacaggctacttcccgtccatgtacctgcaaaagtcagggcaagacgtgtcccaggcccaacgccagatcaagcggggggcgccgcgcaggtcgtccatccgcaacgcgcacagcatccaccagcggtcgcggaagcgcctcagccaggacgcctatcgccgcaacagcgtccgttttctgcagcagcgacgccgccaggcgcggccgggaccgcagagccccgggagcccgctcgccggcgtgcccccgcggccgagcgccgacctcatcctgaaccgctgcagcgagagcaccaagcggaagctggcgtctgccgtctga

SEQ ID NO: 20699 - DNA, 3489 bp, Homo sapiens; identical to SEQ ID NO: 10824
  SIMILAR (196)..(1659): 971254mologous to Homo sapiens Bruton's tyrosine kinase- associated protein-135; BAP-135,accession number U77948,Smith- Waterman Score=2479.

SEQ ID NO: 20700 - DNA, 445 bp, Homo sapiens
  SIMILAR (417)..(196): 851254mologous to Homo sapiens Human secreted protein bg140_1,accession number W69424,Smith-Waterman Score=320.
gggcctcacggtgactccgcggaggcgattgtcactattttccttgcacggatgaagatgattgagtatgggcaggggcaatggacagtacccggactgcagctcacagccaggctttgccatcaaggacttacagccacgcctgtcacctctagcttgaaaaacatcttaacagaaatgtcattttattgttttgattccagaaacgactacagtggcaaaaagaacttactttttaacaacgaacttgattttattactcccgcggacgatcctttcaagtcgtggaattccaaaccaggtagggcttcggaagggaatcccctctggcaagccttccacatacaagaactccgggtttgattcaaacacaggatatggtacttttactgcctcggtgagtccaagagcttgagctgaaagtgcaagagaacgttaagttgcg

SEQ ID NO: 20701 - DNA, 499 bp, Homo sapiens
  SIMILAR (274)..(498): 1001254mologous to Homo sapiens Human secreted protein bg140_1,accession number W69425,Smith-Waterman Score=381.
ttcccgttcgacgatttcgtgctttcctttgaggcctggaatgccaaaatcacggacctaaaacagatagttgaaaatctcttcaatgagaaatgtggtaagtctattttgaaaccttcttactgccacgcagggtgccttcatgggagtaggagggagcagagtgggatactgagcgttggagtatccctgtcattggcaacgtgtgggtttttcgggattgaatggcgtcatttcgcccatgttctgtttcgtgtacgcggctgttttgcaggggaagctcttggccttaaacaagctgtgaaggtgccgttcgcgttatttgagtctttcccggaagacttttatgtggaaggcttacctgagggtgtgccattccgaagaccatcgacttttggcattccgaggctggagaagatactcagaaacaaagccaaaattaagttcatcattaaaaagcccgaaatgtttgagacggcgattaaggagagcacctcct

SEQ ID NO: 20702 - DNA, 4140 bp, Homo sapiens
  SIMILAR (1210)..(2667): 981254mologous to Homo sapiens Bruton's tyrosine kinase- associated protein-135; BAP-135,accession number U77948,Smith- Waterman Score=2475.
atgcccgacgatgatgagccaaaacggcacgtctatgaagttcatgattacgtagacaatcgaagcgacctgattgagtgcacaagtcattgcagattggatgaatatacactctccctgcgatatcctctctgggaatccagctgccaagctgtgagaagccctagccccatggagagaggcacccgtcaaccaggcttcagacacagagtaaagaagcttccaggcgaccccagcccccaggcatccaaatcaccgccagcattcaggtctttccaagctcagaggctcaggcaagagctacagatgctcatgaccgaatgtctcacctgggccaggaatggcagcagcaagcaccctctcagcctagcccagaagccagagttcctatttcatcagttgcaaagcagagacaatgccatctgcccgatagcagagcaaaaggcagtcctgagggtgcccgcgctcctgcatttcccgtgcaccgggctgccggtagctccggccgcccagcccccgcggcagcaacagcagcaacagcagcagcagcagcagcaccgggggagcccccccaggcggactacaagtcccggcagccgcgcgcggccgcgcatgcgcagcggggaccggcgtttgagtggcaagttgtttgttacagcgaacaccagctgctccccccgcgccgggcgccgcgcgccgctgctccgccgctcggcccctcggctgctgctctgccggcgctgcctccctcgccccgcggctcccccttgcaacttggcgggcctcctcccttttgtccggcccggcccggccgccgccgccccccgcgcccggcgccgagctcccgggtctccgggccggctgtcgggcgcggagggggcgggggccgcggctcgtccccccgcggatgagccgccgcggacggggcgcgggcggacgatggaactccacatcctggagcaccggctgcaagttgccagcgtcgccaaggagagtatcccgctgttcacctacggcctgatcaaacttgccttcctgtcctccaagaccagaaagcagcctgtcctgtcccaggcccaggaagccaccctggtgcctgatgatgattattctccaccgtctaagagaccaaaggccaatgagctaccgcagccaccagtcccggaacccgccaatgctgggaagcggaaagtgagggagttcaacttcgagaaatggaatgctcgcatcactgatctacgtaaacaagttgaagaattgtttgaaaggaaatatgcggaagccttggggagcactgaagccaaggctgtaccgtaccaaaaatttgaggcacacccgaatgatctgtacgtggaaggactgccagaaaacattcctttccgaagtccctcatggtatggaatcccaaggctggaaaaaatcattcaagtgggcaatcgaattaaatttgttattaaaagaccagaacttctgactcacagtaccactgaagttactcagccaagaacgaatacaccagtcaaagaagattggaatgtcagaattaccaagctacggaagcaagtggaagagatttttaatttgaaatttgctcaagctcttggactcaccgaggcagtaaaagtaccatatcctgtgtttgaatcaaacccggagttcttgtatgtggaaggcttgccagaggggattcccttccgaagccctacctggtttggaattccacgacttgaaaggatcgtccacgggagtaataaaatcaagttcgttgttaaaaaacctgaactagttatttcctacttgcctcctgggatggctagtaaaataaacactaaagctttgcagtcccccaaaagaccacgaagtcctgggagtaattcaaaggttcctgaaattgaggtcaccgtggaaggccctaataacaacaatcctcaaacctcagctgttcgaaccccgacccagactaacggttctaacgttcccttcaagccacgagggagagagttttcctttgaggcctggaatgccaaaatcacggacctaaaacagaaagttgaaaatctcttcaatgagaaatgtggggaagctcttggccttaaacaagctgtgaaggtgccgttcgcgttatttgagtctttcccggaagacttttatgtggaaggcttacctgagggtgtgccattccgaagaccatcgacttttggcattccgaggctggagaagatactcagaaacaaagccaaaattaagttcatcattaaaaagcccgaaatgtttgagacggcgattaaggagagcacctcctctaagagccctcccagaaaaataaattcatcacccaatgttaatactactgcatcaggtgttgaagaccttaacatcattcaggtgacaattccagatgatgataatgaaagactctcgaaagttgaaaaagctagacagctaagagaacaagtgaatgacctctttagtcggaaatttggtgaagctattggtatgggttttcctgtgaaagttccctacaggaaaatcacaattaaccctggctgtgtggtggttgatggcatgcccccgggggtgtccttcaaagcccccagctacctggaaatcagctccatgagaaggatcttagactctgccgagtttatcaaattcacggtcattagaagcaatagcagggcttgctgtggcatccgcttcctgcgggggctcaaggttgctcgttcctcaggctacataaagcagagatcaggtccggaccacgagctgaccctggactcaggcaaggtgcatttaaggcgcagcctggaagtgccagggagcactggaggccacccagtcatgggggacaccttcatccgtcacatcgccctgctgggctttgagaagcgcttcgtacccagccagcactatgacaactgcaaagatggtcctcaccccaatcctctgggcttcctccagtgggtagtgggatcctgggtgcacacagcaaagcctctttggaggctgaatggggtcccccgactctggctttcccccaggtacatgttcctggtgaaatggcaggacctgtcggagaaggtggtctaccggcgcttcaccgagatctacgagttccataaaaccttaaaagaaatgttccctattgaggcaggggcgatcaatccagagaacaggatcatcccccacctcccagctcccaagtggtttgacgggcagcgggccgccgagaaccaccagggcacacttaccgagtactgcggcacgctcatgagcctgcccaccaagatctcccgctgtccccacctccttgacttcttcaaggtgcgccctgatgacctcaagctccccacggacaaccagacaaaaaagccagagacatacttgatgcccaaagatggcaagagtaccgcgacagacatcaccggccccatcatcctgcagacgtaccgcgccattgccaactacgagaagacctcgggctccgagatggctctgtccacgggggacgtggtggaggtcgtggagaagagcgagagcggttggtggttctgtcagatgaaagcaaagcgaggctggatcccagcatccttcctcgagcccctggacagtcctgacgagacggaagaccctgagcccaactatgcaggtgagccatacgtcgccatcaaggcctacactgctgtggagggggacgaggtgtccctgctcgagggtgaagctgttgaggtaattcacaagctcctggacggctggtgggtcatcaggaaagacgacgtcacaggctacttcccgtccatgtacctgcaaaagtcagggcaagacgtgtcccaggcccaacgccagatcaagcggggggcgccgccccgcaggtcgtccatccgcaacgtgcacagcatccaccagcggtcgcggaagcgcctcagccaggacgcctatcgccgcaacagcgtccgttttctgcagcagcgacgccgccaggcgcggccgggaccgcagagccccgggagcccgctcgaggaggagcggcagacgcagcgctctaaaccgcagccggcggtgcccccgcggccgagcgccgacctcatcctgaaccgctgcagcgagagcaccaagcggaagctggcgtctgccgtctga

SEQ ID NO: 20703 - DNA, 4424 bp, Homo sapiens
  SIMILAR (1158)..(3251): 1001254mologous to Homo sapiens general transcription factor 2-I,accession number AF038967,Smith-Waterman Score=3624.
cgcccccccgcttccccgcacgcgctctccagccgcggccgcccgcctgccgcggtcaccccggcctctgcctctgtcccccagtgatcggatcaaggcgctgagcgaggccctgcctgcggggcggccatgcggcggtgacaggagcgcgaccgacacgcacgggcccctcgccccctctcgcctcccgtccgctcgccagctcccctcagccgaggctgctccgcggcggccgcagcccgcgcgcggcccacactcgcctcccctcggcacccccggccccggagctgcctggaggcggccgcactcggggatcatggcccaagttgcaatgtccaccctccccgttgaagatgaggagtcctcggagagcaggatggtggtgacattcctcatgtcagctctcgagtccatgtgtaaagaactggccaagtccaaagccgaagtggcctgcattgcagtgtatgaaacagacgtgtttgtcgtcggaactgaaagaggacgtgcttttgtcaataccagaaaggattttcaaaaagattttgtaaaatattgtgttgaagaagaagaaaaagctgcagagatgcataaaatgaaatctacaacccaggcaaatcggatgagtgtagatgctgtagaaattgaaacactcagaaaaacagttgaggactatttctgcttttgctatgggaaagctttaggcaaatccacagtggtacctgtaccatatgagaagatgctgcgagaccagtcggctgtggtagtgcaggggcttccggaaggtgttgcctttaaacaccccgagaactatgatcttgcaaccctgaaatggattttggagaacaaagcagggatttcattcatcattaagagaccttttttagagccaaagaagcatgtaggtggtcgtgtgatggtaacagatgctgacaggtcaatactatctccaggtggaagttgtggccccatcaaagtgaaaactgaacccacagaagattctggcatttccctggaaatggcagctgtgacagtaaaggaagaatcagaagatcctgattattatcaatataacattcaaggaagccaccattcttcagagggcaatgaaggcacagaaatggaagtaccagcagaagattctactcaacatgtccctttcagaaacaagtgaggaccctgaagttgaggtgactattgaagatgatgattattctccaccgtctaagagaccaaaggccaatgagctaccgcagccaccagtcccggaacccgccaatgctgggaagcggaaagtgagggagttcaacttcgagaaatggaatgctcgcatcactgatctacgtaaacaagttgaagaattgtttgaaaggaaatatgctcaagccataaaagccaaaggtccggtgacgatcccgtaccctcttttccagtctcatgttgaagatctttatgtagaaggacttcctgaaggaattccttttagaaggccatctacttacggaattcctcgcctggagaggatattacttgcaaaggaaaggattcgttttgtgattaagaaacatgagcttctgaattcaacacgtgaagatttacagcttgataagccagcttcaggagtaaaggaagaatggtatgccagaatcactaaattaagaaagatggtggatcagcttttctgcaaaaaatttgcggaagccttggggagcactgaagccaaggctgtaccgtaccaaaaatttgaggcacacccgaatgatctgtacgtggaaggactgccagaaaacattcctttccgaagtccctcatggtatggaatcccaaggctggaaaaaatcattcaagtgggcaatcgaattaaatttgttattaaaagaccagaacttctgactcacagtaccactgaagttactcagccaagaacgaatacaccagtcaaggaagattggaatgtcagaattaccaagctacggaagcaagtggaagagatttttaatttgaaatttgctcaagctcttggactcaccgaggcagtaaaagtaccatatcctgtgtttgaatcaaacccggagttcttgtatgtggaaggcttgccagaggggattcccttccgaagccctacctggtttggaattccacgacttgaaaggatcgtccgcgggagtaataaaatcaagttcgttgttaaaaaacctgaactagttatttcctacttgcctcctgggatggctagtaaaataaacactaaagctttgcagtcccccaaaagaccacgaagtcctgggagtaattcaaaggttcctgaaattgaggtcaccgtggaaggccctaataacaacaatcctcaaacctcagctgttcgaaccccgacccagactaacggttctaacgttcccttcaagccacgagggagagagttttcctttgaggcctggaatgccaaaatcacggacctaaaacagaaagttgaaaatctcttcaatgagaaatgtggggaagctcttggccttaaacaagctgtgaaggtgccgttcgcgttatttgagtctttcccggaagacttttatgtggaaggcttacctgagggtgtgccattccgaagaccatcgacttttggcattccgaggctggagaagatactcagaaacaaagccaaaattaagttcatcattaaaaagcccgaaatgtttgagacggcgattaaggagagcacctcctctaagagccctcccagaaaaataaattcatcacccaatgttaatactactgcatcaggtgttgaagaccttaacatcattcaggtgacaattccagatgatgataatgaaagactctcgaaagttgaaaaagctagacagctaagagaacaagtgaatgacctctttagtcggaaatttggtgaagctattggtatgggttttcctgtgaaagttccctacaggaaaatcacaattaaccctggctgtgtggtggttgatggcatgcccccgggggtgtccttcaaagcccccagctacctggaaatcagctccatgagaaggatcttagactctgccgagtttatcaaattcacggtcattagaccatttccaggacttgtgattaataaccagctggttgatcagagtgagtcagaaggccccgtgatacaagaatcagctgaaccaagccagttggaagttccagccacagaagaaataaaagagactgatggaagctctcagatcaagcaagaaccagaccccacgtggtagacctcttccctcctaggcttaaagtatcagtggttgagaagagcttttcggacctgttactaccccaagctgtgtaatatacttgtataacagaaataccttctatacaaacctttttttctacttttagatagaaatgtctactttttcagcagttctgtgaattaaagagcagagtgactgtgggtctggaatggctggtgtacttgggaatgtactatcaggattttacagcaatgctgggaaatgacagggaaaatgacaggaatgaatctcaccagattttttatgtactcagcagagccttgagttacggtgtttattttccaatcaagtgaagatatctcctacttctcctactggaacatctcagcttctgcagtgaagaaaaattcctgtgatagttcagttctttagtttttctatttgaaaaaaaaaaatcatttaaatgatcctttgttcacggctctccttaatgactgagtgaacagttcctatctgtatatttgactaaaccttttcctaagctatctctcatggttcctatgtttttttatcataattaaaagcaaaaccatctggatcacctaacagtcagaggtcagtatctcagcgtgtgaattatagaggaaatacagagagaacctcttccacttttacttttcgtccaaataaaatgcatggtgtaccagaagttgaagatcgggttgaggattggggctagctcgatgacactaaggccccaacatcgcgggacctgctgtggcgcggattcttaggaacgctgttctagccggccccctctccaggggtcgcgtggccggcattatttcctagttcttcttgtaaccctgaggtgccagcgcggggagtgaggaggggtcagggggctaaggatgcaacctctgacgttctgcgccttcctaggagagtcttacatgtgttgagatttcacaagcaatgcgagttgtaaaataccagctctacaagaagctaggctctgtgacggcatagttttcagtagctttatcacaatattcacaatggagaattatatgacatggtagcagaaataggcccttttatgtgttgcttctattttacctcaaattgtagatatagggtaatcaataaaatccatccatgcctttcacacactaaaaagtcgga

SEQ ID NO: 20704 - DNA, 3610 bp, Homo sapiens
  SIMILAR (454)..(735): 871254mologous to Homo sapiens general transcription factor 2 -I; alternative splice product,accession number AF035737,Smith- Waterman Score=413.
  misc_feature (1)...(3610): n = a,t,c or g
gcgccgggcgccgcgcgccgctgctccgccgctcggcccctcggctgctgctccgccggcgctgcctccctcgccccgcggctcccccttgcaacttggcgggcctcctcccttttgtccggcccggcccggccgccgccgccccccgcgcccggcgccgagctcccgggtctccgggccggctgtcngtgcccgcaagggcccggagggggcgggggccacngctcgtccccccgcggatgaaccgccgcggacggggcgcgggcggacgatggaactccacatcctggagcaccggctgcaagttgccagcgtcgccaaggagagtatcccgctgttcacctacggcctgatcaaacttgacttcctgtcctccaagaccagatgatgattattctccaccgtctaagagaccaaaggccaatgagctaccggagccaccagtcccggaacccgccaatgctgggaagcggaaagtgaggggagttcaacttcgagaaatggaatgctcgcatcactgatctacgtaaacaagttgaagaattgtttgaaaggaaatatgctcaagccataaaagccaaaggtccggtgacgatcccgtaccctcttttctagtctcatgttgaagatctttatgtagaaggacttcctgaaggaattccttttagaaggccatctacttacggaattcctcgcctggagaggatattacttgcaaagggaaaggattcgttttgtgattaagaaacatgagcttctgagttcaacacgtgaagatttacagcttgataagccagcttcaggagtaaaggaagaatggtatgccagaatcactaaattaagaaagatggtggatcagcttttctgcaaaaaatttgcggaagccttggggagcactgaagccaaggctgtaccgtaccaaaaatttgaggcacacccgaatgatctgtacgtggaaggactgccagaaaacattcctttccgaagtccctcatggtatggaatcccaaggctggaaaaaatcattcaagtgggcaatcgaattaaatttgttattaaaagaccagaacttctgactcacagtaccactgaagttactcagccaagaacgaatacaccagtcaaggaagattggaatgtcagaattaccaagctacggaagcaagtggaagagatttttaatttgaaatttgctcaagctcttggactcaccgaggcagtaaaagtaccatatcctgtgtttgaatcaaacccggagttcttgtatgtggaaggcttgccagaggggattcccttccgaagccctacctggtttggaattccacgacttgaaaggatcgtccacgggagtaataaaatcaagttcgttgttaaaaaacctgaactagttatttcctacttgcctcctgggatggctagtaaaataaacactaaagctttgcagtcccccaaaagaccacgaagtcctgggagtaattcaaaggttcctgaaattgaggtcaccgtggaaggccctaataacaacaatcctcaaacctcagctgttcgaaccccgacccagactaacggttctaacgttcccttcaagccacgagggagagagttttcctttgaggcctggaatgccaaaatcacggacctaaaacagaaagttgaaaatctcttcaatgagaaatgtggggaagctcttggccttaaacaagctgtgaaggtgccgttcgcgttatttgagtctttcccggaagacttttatgtggaaggcttacctgagggtgtgccattccgaagaccatcgacttttggcattccgaggctggagaagatactcagaaacaaagccaaaattaagttcatcattaaaaagcccgaaatgtttgagacggcgattaaggagagcacctcctctaagagccctcccagaaaaataaattcatcacccaatgttaatactactgcatcaggtgttgaagaccttaacatcattcaggtgacaattccagatgatgataatgaaagactctcgaaagttgaaaaagctagacagctaagagaacaagtgaatgacctctttagtcggaaatttggtgaagctattggtatgggttttcctgtgaaagttccctacaggaaaatcacaattaaccctggctgtgtggtggttgatggcatgcccccgggggtgtccttcaaagcccccagctacctggaaatcagctccatgagaaggatcttagactctgccgagtttatcaaatttacggtcattagaccatttccaggacttgtgattaataaccagctggttgatcagagtgagtcagaaggccccgtgatacaagaatcagctgaaccaagccagttggaagttccagccacagaagaaataaaagagactgatggaagctctcagatcaagcaagaaccagaccccacgtggtagacctcttccctcctaggcttaaagtatcagtggttgagaagagcttttcggacctgttactaccccaagctgtgtaatatacttgtataacagaaataccttctatacaaacctttttttctacttttagatagaaatgtctactttttcagcagttctgtgaattaaagagcagagtgactgtgggtctggaatggctggtgtacttgggaatgtactatcaggattttacagcaatgctgggaaatgacagggaaaatgacaggaatgaatctcaccagattttttatgtactcagcagagccttgagttacggtgtttattttccaatcaagtgaagatatctcctacttctcctactggaacatctcagcttctgcagtgaagaaaaattcctgtgatagttcagttctttagtttttctatttgaaaaaaaaaaatcatttaaatgatcctttgttcacggctctccttaatgactgagtgaacagttcctatctgtatatttgactaaaccttttcctaagctatctctcatggttcctatgtttttttatcataattaaaagcaaaaccatctggatcacctaacagtcagaggtcagtatctcagcgtgtgaattatagaggaaatacagagagaacctcttccacttttacttttcgtccaaataaaatgcatggtgtaccagaagttgaagatcgggttgaggattggggctagctcgatgacactaaggccccaacatcgcgggacctgctgtggcgcggattcttaggaacgctgttctagccggccccctctccaggggtcgcgtggccggcattatttcctagttcttcttgtaaccctgaggtgccagcgcggggagtgaggaggggtcagggggctaaggatgcaacctctgacgttctgcgccttcctaggagagtcttacatgtgttgagatttcacaagcaatgcgagttgtaaaataccagctctacaagaagctaggctctgtgacggcatagttttcagtagctttatcacaatattcacaatggagaattatatgacatggtagcagaaataggcccttttatgtgttgcttctattttacctcaaattgtagatatagggtaatcaataaaatccatccatgcctttcacacactaaaaagtcgga

SEQ ID NO: 20705 - DNA, 4523 bp, Homo sapiens
  SIMILAR (4207)..(1214): 1001254mologous to Homo sapiens general transcription factor 2-I; alternative splice product,accession number AF035737,Smith- Waterman Score=5169.
tccgactttttagtgtgtgaaaggcatggatggattttattgattaccctatatctacaatttgaggtaaaatagaagcaacacataaaagggcctatttctgctaccatgtcatataattctccattgtgaatattgtgataaagctactgaaaactatgccgtcacagagcctagcttcttgtagagctggtattttacaactcgcattgcttgtgaaatctcaacacatgtaagactctcctaggaaggcgcagaacgtcagaggttgcatccttagccccctgacccctcctcactccccgcgctggcacctcagggttacaagaagaactaggaaataatgccggccacgcgacccctggagagggggccggctagaacagcgttcctaagaatccgcgccacagcaggtcccgcgatgttggggccttagtgtcatcgagctagccccaatcctcaacccgatcttcaacttctggtacaccatgcattttatttggacgaaaagtaaaagtggaagaggttctctctgtatttcctctataattcacacgctgagatactgacctctgactgttaggtgatccagatggttttgcttttaattatgataaaaaaacataggaaccatgagagatagcttaggaaaaggtttagtcaaatatacagataggaactgttcactcagtcattaaggagagccgtgaacaaaggatcatttaaatgcattttttttttttcaaatagaaaaactaaagtaactgaactatcacaggaatttttcttcactgcagaagctgagatgttccagtaggagaagtaggagatatcttcacttgattggaaaataaacacccgtaactcaaggctctgctgagtacataaaaaatctggtgaggattcattcctgtcattttccctgtcatttcccaggcattgctgttaaaatcctggataggtacattcccaaggtacaccaggccattccaggacccacagttcactctggctcttttaatttcacaggaactgtctggaaaaaggtaggacattttctatcttaaaaggtaggaaaaaaagggtttgtataggaagggtatttcctgttatacaaggtattattacacaggcttggggggtaggtaacagggtccgaaaaggctctttttcaaccactggattactttaagcctaggagggaagaggtctaccacgtggggtctggttcttgcttgatctgagagcttccatcagtctcttttatttcttctgtggctggaacttccaactggcttggttcagctgattcttgtatcacggggccttctgactcactctgatcaaccagctggttattaatcacaagtcctggaaatggtctaatgaccgtgaatttgataaactcggcagagtctaagatccttctcatggagctgatttccaggtagctgggggctttgaaggacacccccgggggcatgccatcaaccaccacacagccagggttaattgtgattttcctgtagggaactttcacaggaaaacccataccaatagcttcaccaaatttccgactaaagaggtcattcacttgttctcttagctgtctagctttttcaactttcgagagtctttcattatcatcatctggaattgtcacctgaatgatgttaaggtcttcaacacctgatgcagtagtattaacattgggtgatgaatttatttttctgggagggctcttagaggaggtgctctccttaatcgccgtctcaaacatttcgggctttttaatgatgaacttaattttggctttgtttctgagtatcttctccagcctcggaatgccaaaagtcgatggtcttcggaatggcacaccctcaggtaagccttccacataaaagtcttccgggaaagactcaaataacgcgaacggcaccttcacagcttgtttaaggccaagagcttccccacatttctcattgaagagattttcaactttctgttttaggtccgtgattttggcattccaggcctcaaaggaaaactctctccctcgtggcttgaagggaacgttagaaccgttagtctgggtcggggttcgaacagctgaggtttgaggattgttgttattagggccttccacggtgacctcaatttcaggaacctttgaattactcccaggacttcgtggtcttttgggggactgcaaagctttagtgtttattttactagccatcccaggaggcaagtaggaaataactagttcaggttttttaacaacgaacttgattttattactcccgcggacgatcctttcaagtcgtggaattccaaaccaggtagggcttcggaagggaatcccctctggcaagccttccacatacaagaactccgggtttgattcaaacacaggatatggtacttttactgcctcggtgagtccaagagcttgagcaaatttcaaattaaaaatctcttccacttgcttccgtagcttggtaattctgacattccaatcttccttgactggtgtattcgttcttggctgagtaacttcagtggtactgtgagtcagaagttctggtcttttaataacaaatttaattcgattgcccacttgaatgattttttccagccttgggattccataccatgagggacttcggaaaggaatgttttctggcagtccttccacgtacagatcattcgggtgtgcctcaaatttttggtacggtacagccttggcttcagtgctccccaaggcttccgcaaattttttgcagaaaagctgatccaccatctttcttaatttagtgattctggcataccattcttcctttactcctgaagctggcttatcaagctgtaaatcttcacgtgttgaattcagaagctcatgtttcttaatcacaaaacgaatcctttcctttgcaagtaatatcctctccaggcgaggaattccgtaagtagatggccttctaaaaggaattccttcaggaagtccttctacataaagatcttcaacatgagactggaaaagagggtacgggatcgtcaccggacctttggcttttatggcttgagcatatttcctttcaaacaattcttcaacttgtttacgtagatcagtgatgcgagcattccatttctcgaagttgaactccctcactttccgcttcccagcattggcgggttccgggactggtggctgcggtagctcattggcctttggtctcttagacggtggagaataatcatcatcttcaatagtcacctcaacttcagggtcctcacttgtttctgaagggacatgttgagtagaatcttctgctggtacttccatttctgtgccttcattgccctctgaagaatggtggcttccttgcaaaggcttcgataggggctgtttttcatcaacatcatcagtttcagaagggcctgcttgaatgttatattgataataatcaggatcttctgattcttcctttactgtcacagctgccatttccagggaaatgccagaatcttctgtgggttcagttttcactttgatggggccacaacttccacctggagatagtattgacctgtcagcatctgttaccatcacacgaccacctacatgcttctttggctctaaaaaaggtctcttaatgatgaatgaaatccctgctttgttctccaaaatccatttcagggttgcaagatcatagttctcggggtgtttaaaggcaacaccttccggaagcccctgcactaccacagccgactggtctcgcagcatcttctcatatggtacaggtaccactgtggatttgcctaaagctttcccatagcaaaagcagaaatagtcctcaactgtttttctgagtgtttcaatttctacagcatctacactcatccgatttgcctgggttgtagatttcattttatgcatctctgcagctttttcttcttcttcaacacaatattttacaaaatctttttgaaaatcctttctggtattgacaaaagcacgtcctctttcagttccgacgacaaacacgtctgtttcatacactgcaatgcaggccacttcggctttggacttggccagttctttacacatggactcgagagctgacatgaggaatgtcaccaccatcctgctctccgaggactcctcatcttcaacggggagggtggacattgcaacttgggccatgatccccgagtgcggccgcctccaggcagctccggggccgggggtgccgaggggaggcgagtgtgggccgcgcgcgggctgcggccgccgcggagcagcctcggctgaggggagctggcgagcggacgggaggcgagagggggcgaggggcccgtgcgtgtcggtcgcgctcctgtcaccgccgcatggccgccccgcaggcagggcctcgctcagcgccttgatccgatcactgggggacagaggcagaggccggggtgaccgcggcaggcgggcggccgcggctggagagcgcgtgcggggaagcgggggggcg

SEQ ID NO: 20706 - DNA, 4307 bp, Homo sapiens
  SIMILAR (1377)..(2570): 571254mologous to Homo sapiens general transcription factor 2 -I,accession number AF038968,Smith-Waterman Score=922.
ctgtctcccaagctggagtgcagtggtgtggtcataggtcactgcagcgtcgaactcctaggctcaagtgatcctcttgcctcaggctcctgagtagctgggacaacaggcgtgtaccacacctggatactttttaaatttttggtagagaagggatctcactctattgccaagctggtgtcgaactcttggtcttaagcagccctcccacgtcagcatcccaaagtgttgggatttcagagggatcatggcccaagttgcaatgtccaccctccccgttgaagatgaggagtcctcggagagcaggatggtggtgacattcctcatgtcagctctcgagtccatgtgtaaagaactggccaagtccaaagccgaagtggcctgcattgcagtgtatgaaacagacgtgtttgtcgtcggaactgaaagaagacgtgcttttgtcaataccagaaaggattttcaaaaagattttgtaaaatattgtgttgaagaagaagaaaaagctgcagagatgcataaaaatgaaatctacaacccaggcaaatcggatgagtgtagatgctgtagaaattgaaacactcagaaaaacagttgaggactatttctgcttttgctatggggaaagctttaggcaaatccacagtgggtacctggtaccatatgagaagatgctgccgagaccagtcggctgtgggtagtgcaggggcttccggaaggtgttgcctttaaacaccccgagaactatgatcttgcaaccctgaaatggattttggagaacaaagcagggatttcattcatcattaagagttgtggccccatcaaagtgaaaactgaacccacagaagattctggcatttccctggaaatggcagctgtgacagtaaaggaagaatcagaagatcctgattattatcaatataacattcaaggcccttctgaaactgatgatgttgatgaaaaacagcccctatcgaagcctttgcaaggaagccaccattcttcagagggcaatgaaggcacagaaatggaagtaccagcagaagatgatgattattctccaccgtctaagagaccaaaggccaatgagctaccgcagccaccagtcccggaacccgccaatgctgggaagcggaaagtgagggagttcaacttcgagaaatggaatgctcgcatcactgatctacgtaaacaagttgaagaattgtttgaaaggaaatatgctcaagccataaaagccaaaggtccggtgacgatcccgtaccctcttttccagtctcatgttgaagatctttatgtagaaggacttcctgaaggaattccttttagaaggccatctacttacggaattcctcgcctggagaggatattacttgcaaaggaaaggattcgttttgtgattaagaaacatgagcttctggaattcaacacgtgaagatttacagcttgataagccagcttcaggagcggaagccttggggagcactgaagccaaggctgtaccgtaccaaaaatttgaggcacacccgaatgatctgtacgtggaaggactgccagaaaacattcctttccgaagtccctcatggtatggaatcccaaggctggaaaaaatcattcaagtgggcaatcgaattaaatttgttattaaaagcttgaggagctccgcagtgatggatggcagcacattcttcattggcttctccagtaattggaagatgcaaggacctggccagcaacaagtcaaagaagattggaatgtcagaattaccaagctacggaagcaagtggaagagatttttaatttgaaatttgctcaagctcttggactcaccgaggcagtaaaagtaccatatcctgtgtttgaatcaaacccggagttcttgtatgtggaaggcttgccagaggggattcccttccgaagccctacctggtttggaattccacgacttgaaaggatcgtccgcgggagtaataaaatcaagttcgttgttaaaaaacctgaactagttatttcctacttgcctccctgggatggctaggtaaaataaacactaaagctttgcagtcccccaaaagaccacggaagtcctggggagtaattcaaaggttcctgaaattaagggtcaccgtggaaggccctaataacaacaatcctcaaacctcagcttgttcgaaccccgacccagacttaacggttcttaacgttccctttcaagccacggagggaggagagttttcctttgaaggcctgggaatgccaaaatcacgggaccttaaaacaggaaagtttgaaaatcttctttcaattgaggaaatttggggggaagctttttggcctttaaacaagctgttgaagggtgcccgttcgcgttatttggagtctttccccggaaggactttttatgtgggaaggctttacctgaggggtgttgccctttccgaaggacccattcgactttttgggcatttccgagggttggagaagatattcaggaaacaaaggccaaaattaaggttcatcatttaaaaagcccgaaatgtttgagacggcgattaaggagagcacctccttttaaggagccctcccagaaaaaataaattcatcacccaatgttaatactactgcatcaggtgttgaaggacctttaacatcatttcagggtgacaattccaggatggatggataatggaaaggactcttcggaaagttggaaaaaggctaggacagctaaggaggaacaagtggaatggacctctttagttcgggaatttgggtggaagctattggtatgggttttcctgtgaaagttccctacaggaaaatcacaattaaccctggctgtgtggtggttgatggcatgcccccgggggtgtccttcaaagcccccagctacctggaaatcagctccatgagaaggatcttagactctgccgagtttatcaaattcacggtcattagaagcaatagcagggcttgctgtggcatccgcttcctgcgggggctcaaggttgctcgttcctcaggctacataaagcagagatcaggtccggaccatgagctgaccctggactcaggcaaggtgcatttaaggcgcagcctggaagtgccagggagcactggaggccacccagtcatgggggacaccttcatccgtcacatcgccctgctgggctttgagaagcgcttcgtacccagccagcactatgtgtacatgttcctggtgaaatggcaggacctgtcggagaaggtggtctaccggcgcttcaccgagatctacgagttccataaaaccttaaaagaaatgttccctattgaggcaggggcgatcaatccagagaacaggatcatcccccacctcccagctcccaagtggtttgacgggcagcgggccgccgagaaccgccagggcacacttaccgagtactgcagcacgctcatgagcctgcccaccaagatctcccgctgtccccacctcctcgacttcttcaaggtgcgccctgatgacctcaagctccccacggacaaccagacaaaaaagccagagacatacttgatgcccaaagatggcaagagtaccgcgacagacatcaccggccccatcatcctgcagacgtaccgcgccattgccaactacgagaagacctcgggctccgagatggctctgtccacgggggacgtggtggaggtcgtagagaagagcgagagcggttggtggttctgtcagatgaaagcaaagcgaggctggatcccagcgtccttcctcgagcccctggacagtcctgacgagacggaagaccctgagcccaactatgcaggtgagccatacgtcgccatcaaggcctacactgctgtggagggggacgaggtgtccctgctcgagggtgaagctgttgaggtcattcacaagctcctggacggctggtgggtcatcaggaaagacgacgtcacaggctacttcccgtccatgtacctgcaaaagtcagggcaagacgtgtcccaggcccaacgccagatcaagcggggggcgccgccccgcaggtcgtccatccgcaacgcgcacagcatccaccagcggtcgcggaagcgcctcagccaggacgcctatcgccgcaacagcgtccgttttctgcagcagcgacgccgccaggcgcggccgggaccgcagagccccgggagcccgctcgaggaggagcggcagacgcagcgctctaaaccgcagccggcggtgcccccgcggccgagcgccgacctcatcctgaaccgctgcagcgagagcaccaagcggaagctggcgtctgccgtctga

SEQ ID NO: 20707 - DNA, 4827 bp, Homo sapiens
  SIMILAR (2367)..(2005): 441254mologous to Homo sapiens general transcription factor 2 -I,accession number AF038967,Smith-Waterman Score=265.
  misc_feature (1)...(4827): n = a,t,c or g
ggggagagatgagggcgcgcaaaaacaaaaaaatagtgtcccgccgcggggagggagatagtttatttatataggggaggccccccacaacggtatggtttttttttactaactgccatatacagacataatgaggatacatataacctttcttcaaagtttgtgttttttttggttcccttttttttttttagtgtgtgaaaatgcatggatggattttattgattaccctatatcttacaactttaaaaggtaaaatagaagcacacacataaaagggcctattttttgcttaccatgtcatatatattctccattgtgaatattgtgataaagctactgaaaactatgcccgtcacagagacctagacttcttgtaggagctgggtatttttacaactccgcattggcttgtggaaaatctcaaacaacatgtaaggactctccctagggaagggcgcagcnccgcccggcaggttgcatcccttaggccccctgaccccctccctcacttccccgcgctgggcaccctccaggggttacaaggaaggaactaagggaaaataaatggccgggccacggcggaccccccttgggaagaagggggggcccgggctaagaaacaagcggttccctaaggaatcccgcggccaacagcagggtncccgcgatgttgggggccttaagtggtcattcgagctttagcccccaatccctcaacccgatctttcaactttctgggtacacccatggcattttatttgggacggaaaagtaaaaagtgggaagaaggttcctcccctgtatttccctcctataattccacacgcctgagatactggacctctgaactgttaggtggatcccagatggttttgccttttaattatgaataaaaaaaacatagggaaccatgagagatagccttaggaaaaaggttttagtcaaaataatacagaatagggacctagttcactcagtcattaaggagagccgtgaacaaaggatcatttaaatgatttttttttttttcaaataggaaaaactaaagaactgaactatcacaggaatctcttcttcactgcagaagctgaggatgttccagtagggaggaagtagggagatatcttccacttgattgggaaaataaacaccgtaaactcaagggctctgctgcggtacataaaaaatctgggtgaggattcattcctggtcattttccctgtccatttccccaggcattgctggttaaaatcctggataggtacattccccaagttacacccagccatttccagacccaaaagtcaactctggctcttttaattcacagaactggctggaaaaaagtaggacatttccaatcctaaaaagtaggaaaaaaaaggtttgtatagaaggtatttctgttataccaaggtatattacacagcttgggggtagtaacaggtccgaaaagctctttcttcaaccactggatacttttaagcctaggagggaagaggtcctacccacgtggggtctggttcttgccttgatctgagagcttcccatcagtctcttttatttcttctgtggctggaacttcccaactggccttggttccagctgaatacttgtatcaacggggccttttgactcactctggatcaaaccagctggttaattaatcacaagtccctggaaatggtctaatgaccgtgaaatttgataaactcggccagagtcataagatccttctcatggcagtctgattttccaggtaagctgggggctttgaaaggacacccccggggggcatgccgagtcgaccaccacgcagccaggggttaattgtgattttcctgtaggggaactttcacaggaaaacccataccaaatagcttcaccaaaatttccgacttaaagaggtcattaacttggtcctcttaagctggctagctttttcaactttcgaagagcctttcattatcatcatctgggaattgtcacctgaatgatgttaaggtcttcaacacctgatgcagtagtattaacattgggtgatgaatttatttttctgggagggctcttagaggaggtgctctccttaatcgccgtctcaaacatttcgggctttttaatgatgaacttaattttggctttgtttctgagtatcttctccagcctcggaatgccaaaagtcgatggtcttcggaatggcacaccctcaggtaagccttccacataaaagtcttccgggaaagactcaaataacgcgaacggcaccttcacagcttgtttaaggccaagagcttccccacatttctcattgaagagattttcaactttctgttttaggtccgtgattttggcattccaggcctcaaaggaaaactctctccctcgtggcttgaagggaacgttagaaccgttagtctgggtcggggttcgaacagctgaggtttgaggattgttgttattagggccttcccacggtgacctcaaatttcaggaaacctttgaaantaactccccggacttccgtggtcttttgggggactgcaaagctttagtgtttattttaactagccatccccaggaggcaagtaggaaataactagttcaggttttttaacaacgaacttgattttattactcccgcggacgatcctttcaagtcgtggaattccaaaccaggtagggcttcggaagggaatcccctctggcaagccttccacatacaagaactccgggtttgattcaaacacaggatatggtacttttactgcctcggtgagtccaagagcttgagcaaatttcaaattaaaaatctcttccacttgcttccgtagcttggtaattctgacattccaatcttctttgactggtgtattcgttcttggctgagtaacttcagtggtactggtgagtcagaaagttctggtcttttaattaacaaatttaaatccgattgcccacttgaatgattttttcccagccttgggattccatacccatgagggacttcggaaaggaatgttttctggcagtccttccacgtacagatcattcggggtgtgcctcaaatttttggtacggtacagccttggctttcagtgctccccaaggggttccgcaaattttttgcagaaaagctgatccaccatctttcttaaatttagtgattctgggcataccattcttcctttactcctgaagctggcttatcaagctgtaaatcttcacgtgttgaattcagaagctcatgtttcttaatcacaaaacgaatcctttcctttgcaagtaatatcctctccaggcgaggaattccgtaagtagatggccttctaaaaggaattccttcaggaagtccttctacataaagatcttcaacatgagactggaaaagagggtacgggatcgtcaccggacctttggcttttatggcttgagcatatttcctttcaaacaattcttcaacttgtttacgtagatcagtgatgcgagcattccatttctcgaagttgaactccctcactttccgcttcccagcattggcgggttccgggactggtggctgcggtagctcattggcctttggtctcttagacggtggagaataatcatcatcttctgctggtacttccatttctgtgccttcattgccctctgaagaatggtggcttccttgaatgttatattgataataatcaggatcttctgattcttcctttactgtcacagctgccatttccagggaaatgccagaatcttctgtgggttcagttttcactttgatggggccacaacttccacctgggagatagtattgacctgtcagcatctgttaccatcacacgaccacctacatgcttctttgggctctaaaaaaggtctcttaatgatgaatgaaatccctgctttgttctccaaaatccatttcaggggttgcaagatcatagttctcgggggtgtttaaggccaacacctttcggaaagactctggcacacacacaaccgactgatctcgcagcatcttctcaaatggaacaggtaccactgtggatttgccctaaagcctttccccatagcaaaagcagaaatagtcctcgaactgtttttcctgaagtgtttcaaatttcctacagcatcctacactcatccgatttgccctgggttgtagatctcactcttacgcatctctgcagctcctctctctctctcccccacacaatatttcacaaaatctttttgaaactcctttctggtattgacaaaagcacgtcctctttcagttccgaccacaaacacctctgtttcataccactccaatgcaggccacttcggctttggacttggccagttcgtttacacatggactcgagagctgacatgaggaatgctcaccaccatcctgctctcaggaggactcctcatcttcaacggggagggtggacattgcaacttgggccatgatccaccgagtgcggccgcctccaggcagctccggggccgggggtgccgaggggaggcgagtgtgggccgcgcgcgggctgcggccgccgcggagcagcctcggctgaggggagctggcgagcggacgggaggcgagagggggcgaggggcccgtgcgtgtcggtcgcgctcctgtcaccgccgcatggccgccccgcaggcagggcctcgctcagcgccttgatccgatcactgggggacagaggcagaggccggggtgaccgcggcaggcgggcggccgcggctggagagcgcgtgcggggaagcgggggggcgaccggtggccccttttctctgctctcccagcttctctctcaccctcctcctcct

SEQ ID NO: 20708 - DNA, 467 bp, Homo sapiens
  SIMILAR (166)..(2): 941254mologous to Homo sapiens T54 protein,accession number AF196779,Smith-Waterman Score=277.
ttgggcttaggacatcttcaattatcatcttggtgttgtaatattggcctcctttgtacatgttgtccacaaaccgcacacgcaggtccctgtgcaaccagtgctgacttctgggggctgctttctcactgttggctgcaggcccatcctgtctgtggagaaggtgccagcaccaggcttagctcttcatcagatgctctttccagttgccctcccttagcctatgctatgaaacccacccacaatgcagttccccgttccttctatgagcccgccttgccttggaagccttccctggctgctcgagcctacccacagccctgccttcttgacccctcccgcatgctcagagtcccaccagtctggaaggaagtttccgcttcctctctgagttgtcctgctggatgtagagttcttgattccagagggtcttccgtgatgaggcacgaaatcgtcgacccgggaat

SEQ ID NO: 20709 - DNA, 1987 bp, Homo sapiens
  SIMILAR (647)..(1621): 481254mologous to Homo sapiens T54 protein,accession number AF196779,Smith-Waterman Score=551.
ggcccctagcgatctgaacccaaactaaatttcccagcaagcagcgcgccggcctgggaaaaggagcaagatggctgactccaaagagggtgttttgccgctgacggctgcttccactgccccaatttcattcggcttcactcgcacgtccgcacggaggcggctggccgactcggctctgaatgaaggagtgtgacccactgaccctgccattctcccaaccccacccctctgtgtccacatcagtgtgaagccccaggaggcccccaaggaactcgtcatccctttgatccagaatggccatcgcaggcagccaccagcccggcccccttgaaggaagaagaggaagaaggtggaaggatagagtgggacttcattgctccctcctattcttcctttagaatccaagaagtctctggaagagagagagaatgcgggtgtcgaccccacgctcgccccgggcagagacagtgagctggccccttgtccccctcctgccccagcctttctttgccctgtccgccaggctgtgtccctgcacgtagcagggaaagtctgtgtgtgtgctagaggccccaagtgcacttcaaatagaagacccagtgtaagcaaagcctgaccctccttcctctacctgaacctgtaggtgccagaggaggctaattatgaggcggtccccgtggaggggaagaggaagtaaataaggtgttgaagactgttgcatcctctccaacaaacccatattcctccctgcagagtagtgaagccccgtgtcaactcactgaggcccaaggggttagggctgggtgccaacctgaccgaggcccaggccttgacccccactggcccctcccgcatgccaagaccagatgaggagcaagagaaagataaggaagatcagacatcttggtcctaggaatgtgggtggagtccacaacccctacctgacttcttcccctcaacactttaggtggaaggccttgatcctgacaatgttcgggccatggttcgtctggctgtggggagccgggtgactgaggctctgtcctggttctcctcataacctcttgaacaggccagatgagcaaaacttccttccccagggcaacagaacggaactgcctcatcacggaagaggcaaagggagggcaactggaaagtgcatctgatgaagagctaagcctggtgctggcaccttctccacagacaggatgggcctgcagccaagagtgagaaagcagcccccagaagtcagcactgcctccctctcctagggactgggcccccctacctctctaaaatctcacatccccctgacctgtatccccaggcccttctgacaggacgctggttgggctggtccttgctgtgggcctcactcccctctcccttatccataggcctgagggaagacatttgtgggtcgttcagggcctgtcccaggatctaggcttgccttgctgattccacttcacctctgttccaggtgggacatttgctgagccgggacagagcacggagccgggctttggtgcaactgcccaagagaaaatcaaggtggtggagcttcactacgatgccatctgcccagtacatgggccctagtgacacagatgatgacttgacccatgggactcctcccatcccccagggtggttaccagttctgtaccatatgagaaagttgccttcagaaggtgggaagatcattgttccatcctctacttctggtgcagtcctgggacaaggacaagggaaagggatgggtgaaccagtagggaagctagaaacaaaccacaatattaaccaaaatatagaatataataaaaaccatttcaagtacttaatagaaagatgaaatcataagtggtatgatgagctgcgagttaaggtgggaactgagttgactgaggtgggaaccatttcacttttaagccttgcttttctgctcagggtacaggacaagttaaaggactcatttgattgtg

SEQ ID NO: 20710 - DNA, 1107 bp, Homo sapiens
  SIMILAR (88)..(624): 341254mologous to Homo sapiens molybdopterin synthase large subunit,accession number AF117815,Smith-Waterman Score=188.
atggaggcacttgccatgaaccaccagctcaaggattctatgcatacttcaaagataaagaaaaagcgaagaaaaaagaaaccttcagtgccccagagtcaccttactttgtctactgagtataatattaatccattgttaattataccatccgcagcccttaacagttacagcaagtacgagatacactcagagggaatcacaacaaagtcaacaaaaatcatgtatcaagaggagagggggaaaaagctttcagagaaatattgcaatagtgtctttctcttcctattatattttatacggaacggctggaccactgtggctggagcagaatgtgcaatgtgttcgaggatggaggaaatgacatcaaataaaacagagctgggaccagacctgggccttggtgtccactttaagggctttgacatttattccaacttggttccagtgtcagaagcaagcataatcattgctgtgtcctcagcccacagagctgcatctcttgaagctgtgagctatgccattgatactttaaaagccaaggtgcccatgatggtaaaagatataatgcaacagccaacacccaccccttatctccaatggggacaggcggaagctcgatggcaagccagagtgacactgaactgtgaaggacacgataaatacaccctccactccagagtgcatgtatctcatgaacaatctcttgatatactcacaacatcgcagcacaacacgggcaccaaatcagcaatgaaacatcaagatacagtggaggtattgccactttcacgtacatgcccatcccctctcaccactatggtaccaagcaccacacctaaagctgtctttgtctttatccaacaaaaaaggaagaacagaagtgacagtgattctactggaactgggttcccttcacaaactggcaaaaccccagataatgtagcagcaaccggaaaaccgagtcggacggtacgccatctcaagtccctgtcaaagaaatatatcgcaaagggaaaccgtaggaccttacaaggagtcagaagtgagtctctcactccacatatttataaggaaagctcacagccggatatgagacatgcttga

SEQ ID NO: 20711 - DNA, 1778 bp, Homo sapiens
  SIMILAR (1143)..(904): 601254mologous to Homo sapiens molybdopterin synthase large subunit,accession number AF117815,Smith-Waterman Score=173.
ttttttttttttttttttaaacttttggaaaatccaggggttttaagtttaattattttttaatcatatttcctgaaaatgttataatatccaagactgtcctgataatgcttttttaatactttcccagttctgcccaacattcctgtcatgcatcccttaataacaatgctcatcccagaaccgggatgggggggcggtgaggtggggttggtggggggagtaccgtttctgagctagttaaaggtcactgaggagggcccatacctcaatgtgtgtggagttaccaattaggaaattagtccatggaaggaccatgtctacccacagatatcttttcctcacaatttaaaattattccatttcttcctaccagtcctcctttctatcttttagttccattttaaaataacccttgcatcctacatacccatttatcttggcttcctttttctcccttttggtcccactaggtataggggattgtggcttcggtaaactatcctgatgtggagagaaaaaaatcaaaatgtgatcaataataatagtttaacaaagttaagattgcatgctctaaaaacataagtgattaactggttggatgcccaaaagcactctttgtttcctttccaagttgatgactcttccgtatatttccttttttcccatatgggcacccttggccttttaaaggtatcaaagggcaatagctcaacagcttcaaagagatgccagctctgtgggctggaggacacagcaaatgattatggcttggcttctgacactggaaccaagccaagtctatggaacactgctatgtgtttgactggccatttctgcctaatgtcactacaaatctttctgacttcattttccgccatgggtagatatgcttcatattcgtaagctaatgacttttttccccttcaaaggtattttctgtaaggcccttccaattggggatattgcaccacaagagcggagaaatcaccaaactgtgagacttcatctactgaaaagtttctcggcagtaaagtttataacatctttagatttctcttcaacttcatcccatatctttcctagatgggctcaaaaagcactatcctccactaatgggggggataacggcaatttcgtctcccaggctgaagcacgaggagctgatctccaagctcgacatattcttgacgaacagcaaatattatctgatttctaacatcagccaactccaggatgtcgagtttctatctccttccacagctgcaacgcttttatttcttgaggcacagaaatggtctctgaacgaactcctgttatttcagcactttttgcaaaatacaatacttcaacctgtatccgtgcaaacaactctttacgaaataattacaggtttgcaaatgatcaagggtgtagaaatccacagatgaagcacagttcttcacaagaattctccatgaggtgcatttctttttagattaaaattttagcttcatcaaaacgaataatctgggaaagaggtggtcataaaagtgtgtgggcgccttcacaacgagtccgtccttgctgccgtgagctgacaagagttctcggagaggacccgacttctgctggggcagtcgcagtaaagcccggagacaggaagggcccgggggcgggggcgggggcgcccccgaacccaagacgccggccaggttgggggctagtggggaggtccgactgaccaaggccaggcccgcacgcacacccgccacccttacctggcacagcggcaccat

SEQ ID NO: 20712 - DNA, 2460 bp, Homo sapiens
  SIMILAR (100)..(2073): 761254mologous to Homo sapiens 2-oxoglutarate dehydrogenase precursor,accession number D10523,Smith-Waterman Score=2660.
atgagtcagctgaggctgctgccgtcccgtcttggggtacaggctgcgaggctcctggctgcacatgacgtcccggtgtttggctggcgcagcaggtcctccgggccaccggccaccttcccaagcagcaaaggtggaggcggctccagttacatggaggagatgtacttcgcctggttggaaaacccccagagtgtccacaagtcctgggacagcttcttcagggaagccagcgaggaagccttttctggctctgctcagccacggcccccttctgttgtccatgagagcaggtctgcagtctcaagtcggaccaagaccagcaaattggtggaggaccacctggctgtgcagtccctgatccgggcctaccagatccggggtcaccatgtggcccagctggaccccctgggcattctggatgcagacctggactcctttgtgccctcagacttgatcacaaccattgataaactgggttggacccagagggagggcactggggagactgggaggtctgccttctatgaccttcaggaggctgaccttgataaggagttccagctgccgacaaccaccttcattgggggctctgaaaacaccctttctctgcgggagatcattcggcgcctggagaacacctactgccagcacattggcctggagttcatgttcatcaacgatgtggagcagtgccagtggatccggcagaagtttgagacccctggtgtgatgcagttctccagcgaggagaagcggaccctgctggcccggctagtgcgctccatgagcaggtttgaagacttcctggcccggaaatggtcctcagagaagcggtttggcctggagggctgtgaagtgatgattcctgccctcaagaccatcatcgacaaatccagcgagatggggattgagaatgtcatcttggggatgccacacaggggaaggctgaacgtgctggccaacgtgatccgcaaggacctggagcagatcttctgccagtttgaccccaagctggaggcggcggacgagggctccggggatgtcaagtaccacctgggcatgtaccatgagaggatcaaccgcgtcaccaaccggaacatcactctgtcgctggttgccaacccctcccacctggaggcagtggaccctgtggtgcaggggaagacaaaggcagagcagttctaccgtggagatgcccagggcaagaaggtcatgtccatcctggttcatggggacgccgcctttgctggccagggcgtggtatatgagaccttccacctgagcgacctgccctcctacacgaccaatggtaccgtgcacgtcgtcgtcaacaaccagattggattcaccacagacccccgaatggcccgctcctcaccatacccgaccgacgtggcccgggtggtcaatgcgcctatcttccatgtgaatgccgatgacccagaggctgtgatatatgtgtgcagtgtggcagccgaatggagaaacactttcaacaaagatgttgtcgtggacctggtctgttaccgccggcgtggccacaatgagatggacgagcccatgttcacccagccgctcatgtacaagcagatccacagacaggtgcctgtgctgaagaagtacgcagacaagctgattgccgagggcacagtcaccctgcaggagtttgaggaagaaattgccaaatacgaccggatctgtgaggaggcttatggcaggtccaaggataaaaagattctgcatataaagcactggttggactccccctggcctggcttcttcaacgtagatggggagcccaagagcatgacatgcccagccacggggatccctgaggacatgctcacccacatcggcagtgtggccagctctgtgcccctggaggactttaagatccacactggcctctctcgcattctgcggggccgtgcggacatgaccaagaaccggacggtggactgggcgttggcagagtacatggcctttggctccctgctgaaggaaggcatccacgtgcggctcagcgggcaggatgtggagaggggcacattcaggtggcatcatcagatggccacctcgctgaccccccagggcaagtgtgcagagctcactgctgggcccaagctgtccactaaggtcaagctggtggccatctgtggtcctcaggatcatgtgtgtgtggggggtgtgtggtggaatgtttttgccatcaagtgtgaagttaatagtgacagattgtttgtttcaggtactgagcagtacagtgaatacacaggctatgctgagacatatcgttggtcccggagccacgaagatgggagtgaaagggacgactggcagcggcgctgcactgagatcgttgccatcgatgctcttcacttcagacgctacctcgatcagtttgtgcctgagaaaatgagacgcgagctgaacaaggccagtaaccttatttcttag

SEQ ID NO: 20713 - DNA, 3734 bp, Homo sapiens
  SIMILAR (161)..(3094): 671254mologous to Homo sapiens similar to 2-oxoglutarate dehydrogenase ; similar to Q02218 (PID:g1352618),accession number AC004859,Smith-Waterman Score=3395.
tgtcgtcctgacctgcagcctccggacctcgctgcagcgcggacccggcccgcccgcccgaatgagtcagctgaggctgctgccgtcccgtcttggggtacaggctgcgaggctcctggctgcacatgacgtcccggtgtttggctggcgcagcaggtcctccgggccaccggccaccttcccaagcagcaaaggtggaggcggctccagctacatggaggagatgtacttcgcctggttggaaaacccccagagtgtccacaagtcctgggacagcttcttcagggaagccagcgaggaagccttctctggctctgctcagccacggcccccttctgttgtccatgagagcaggtctgcagtctcaagtcggaccaagaccagcaaattggtggaggaccacctggctgtgcagtccctgatccgggcctaccagatccggggtcaccatgtggcccagctggaccccctgggcattctggatgcagacctggactcctttgtgccctcagacttgatcacaaccattgataaactggccttctatgaccttcatgaggctgaccttgataaagagttccaggtgccgacaaccaccttcattgatggctcttgaaacaccctttctctgcgggagatcattcggcgcctggagaacacctactgccagcacattggcctggagttcatgttcatcaacgatgtggagcagtgccagtggatccggcagaagtttgagacccctggtgtgatgcagttctccagcgaggagaagcggaccctgctggcccggctagtgcgctccatgaggtttgaagacttcctggcccggaaatggtcctcagagaagcggtttggcctggagggctgtgaagtgatgattcctgccctcaagaccatcatcgacaaatccagcgagatggggattgagaatgtcatcttggggatgccacacaggggaaggctgaacgtgctggccaacgtgatccgcaaggacctggagcagatcttctgccagtttgaccccaagctggaggcggcggacgagggctccggggatgtcaagtaccacctgggcatgtaccatgagaggatcaaccgcgtcaccaaccggaacatcactctgtcgctggttgccaacccctcccacctggaggcagtggaccctgtggtgcaggggaagacaaaggcagagcagttctaccgtggagatgcccagggcaagaaggtcatgtccatcctggttcatggggacgccgcctttgctggccagggcgtggtatatgagaccttccacctgagcgacctgccctcctacacgaccaatggtaccgtgcacgtcgtcgtcaacaaccagattggattcaccacagacccccgaatggcccgctcctcaccatacccgaccgacgtggcccgggtggtcaatgcgcctatcttccatgtgaatgccgatgacccagaggctgtgatatatgtgtgcagtgtggcagccgaatggagaaacactttcaacaaagatgttgtcgtggacctggtctgttaccgccggcgtggccacaatgagatggacgagcccatgttcacccagccgctcatgtacaagcagatccacagacaggtgcctgtgctgaagaagtacgcagacaagctgattgccgagggcacagtcaccctgcaggagtttgaggaagaaattgccaaatacgaccggatctgtgaggaggcttatggcaggtccaaggataaaaagattctgcatataaagcactggttggactccccctggcctggcttcttcaacgtagatggggagcccaagagcatgacatgcccagccacggggatccctgaggacatgctcacccacatcggcaatgggggcaagtttgggccccttggaggactttaagaatcccactggcctctctcgcattctgcggggccgtgcggacatgaccaagaaccggacggtggactgggcgttggcagagtacatggccttttggttccttgttgaaggaagggatacacgtgccggtcaacgtgcaggatgttgagaggggcacattcagtcaccggcaccatgttctccatgaccaggaggttgaccgcaggacgtgtgtgcctatgaatcatctctggcctgaccaggccccgtacaccgtgtgcaacagctccctctcggagtacggagtcctggggctttgagctgggctatgccatggccagccccaatgccctggtcctctgggaggcccagtttggggacttccacaacacggaccagtgcatcatcgaccagttcatcagcaccggccaggccaagtgggtgcggcataatggcattgtgctgctgctgccccatggcatggaaggcatgggcccagagcactcgtcagcgaggcccgaaaggttcctgcagatgagcaatgatgactcggatgcctaccctgcattcaccaaggacttcgaggtgagccagctctatgactgcaactggatcgtggtcaactgctccacaccggccaactacttccacgtgctgcgccggcagatcctgctgcccttccgcaagccgctgattatcttcacacctaaatctctgctgaggcacccagaggccaagtccagctttgaccaaatggtatccgggaccagcttccagcgggtgattcctgaagatggggccgcagcacgggcccctgagcaggtgcagcggcttcatcttcttgcacgggaaaggtgtactatgacctggtgaaggagcggagcagccagggacctgggaggagaaagtggccatcacgcgcctgggagcagatctctccatttcccctttcgacttgattcaaggcaggaggcagagcaagttacccaggtgcggagctggcctggttgtcaggaggagcacaagaacatgggctactatgactacattagcccacgcttcatgaccatcctgaggcgcgcacggcccatatggtatgttggccgggacccagcggctgcaccagccacaggaaacaggaacactcacctggtgtcactgaagaagtttctggatactgccttcaatctccaggcctttgagggcaagacattttagagctgggcaaaacctgtgtaggtctcgctgtgggtttgctggggaccaagggggtgatgaaaaggggaggggcggagctcctgcccaagagaggggctgtggggcccccaggataaaacagacacagtgacagggccaagagccagcactgctggccttggtggtcatgccagaatctaccaggactgagggagccagaggagtcctgtaggcaggctactgtgctggagcatccccccagctgctccccatcttgctggaatttttttgggcggcttctccacctgtatctcaagacagacacccgggggcctgtgtctgtggccgctcccatcccggcaagccctgggttgctgctcgcccccaccctcgcttatcctgtagattcaaagcgatgttctcttcctgtgctcttagaagtagggagttcagcagtaacagcccaggtgaagcgaacctgctgggtgaatttgtttgcgctctgttttatggggcattcctgcgagatgtgtcagcttctgtgtgaaatgcagccacagctcatgtgtaccaaagtagaaaaccaaatcacagagaaataaaaacatgcttcagagagatttgctgttttcatttcatgttgtaa

SEQ ID NO: 20714 - DNA, 1062 bp, Homo sapiens
  SIMILAR (490)..(1059): 1001254mologous to Homo sapiens mannose receptor precursor,accession number J05550,Smith-Waterman Score=1003.
atgcgggacctggatgttgggtttgattatcctttacaggctctccatagtgacgaaagtgatgtgcctactcactgtcctagtcagtggtggccgtatgccggtcactgttacaagattcacagagatgagaaaaaaatccagagggatgctctgaccacctgcaggaaggaaggcggtgacctcacaagtatccacaccatcgaggaattggactttattatctcccagctaggatatggcaggtccagaggtgccatacaggagccaggaactagagtcaaaaccttagaagtctacctggtgttctaccgtattgcagctgaattggcactcgaatcacaagacgcagaggagccttactctgtggccagcaccaccacaggtccatggggagagctgccacactactgccaatgttcccttaaggcccaagggctcttgaatcaacttctggtgaatgctgcctaccctaggactcacccttcaggttcctctctggtttccattgaaagtgctgcagaatccagttttctgtcatatcgggttgagccacttaaaagtaaaaccaatttttggataggattgttcagaaatgttgaagggacgtggctgtggataaataacagtccggtctcctttgtcaactggaacacaggagatccctctggtgaacggaatgattgtgtagctttacatgcgtcttctgggttttggagtaatattcactgttcatcctacaaaggatatatttgtaaaagaccaaaaattattgatgctaaacctactcatgaattacttacaacaaaagctgacacaaggaagatggacccttctaaaccgtcttccaacgtggccggagtagtcatcattgtgatcctcctgattttaacgggtgctggccttgccgcctatttcttttataagaaaagacgtgtgcacctacctcaagagggcgcctttgaaaacactctgtattttaacagtcagtcaagcccaggaactagtgatatgaaagatctcgtgggcaatattgaacagaatgaacactcggtcatctag

SEQ ID NO: 20715 - DNA, 873 bp, Homo sapiens
  SIMILAR (79)..(717): 931254mologous to Homo sapiens mannose receptor precursor,accession number J05550,Smith-Waterman Score=1081.
atgtgccaaaggaacagagaagatcaaaaggccacctgggagttctgggcaagagtcacgtccttccaaatagttcccacgagcagctctgatcctggcccaggttccatagcagtagaagtttatccaccagttactgaagatgggtgggttatttacaaagactaccagtattatttcagcaaagagaaggaaaccatggacaatgcgcgagcgttttgcaagaggaattttggtgatcttgtttctattcaaagtgaaagtgaaaagaagtgtgggtggaaatatgtaaacagaaatgatgcacagtctgcatattttattggtttattgatcagcttggataaaaagtttgcttggatggatggaagcaaagtggattacgtgtcttgggccacaggtgaacccaattttgcaaatgaagatgaaaactgtgtgaccatgtattcaaattcagggttttggaatgacattaactgtggctatccaaacgccttcatttgccagcgacataacagtagtatcaatgctaccacagttatgcctaccatgccctcggtcccatcagggtgcaaggaaggttggaatttctacagcaacaagtgtttcaaaatctttggatttatggaagaagaaagaaaaaattggcaagaggcacgaaaagcttgtataggctttggagggaatctggtctccatacaaaatgaaaaagagcaagaatcgggacagctgctaatccatacggtgactttttatgaattagaaaaagttttggttgtaggcagccacgacccagataggggcgcacagaatggagcccttgggcagggtgcaacttgcacaagtgtcttcagtggcctagataaaacctag

SEQ ID NO: 20716 - DNA, 1041 bp, Homo sapiens
  SIMILAR (205)..(474): 1001254mologous to Homo sapiens mannose receptor precursor,accession number J05550,Smith-Waterman Score=517.
atggcaacaacagaaactggggactatgagatgggggaggaatggaggcacctgccaaatggtatccatcttcctgtgttgaccccattgagtgtcttaggccacgagaatagcccagctgcagcctatgaacaatttcttggttattctgtgtctacttatcctggaaaattcacaatagaagataataatggaatcagaactgagccaaatgacgaattgtggatcggcttaaatgacattaagattcaaatgtactttgagtggagtgatgggacccctgtaacgtttaccaaatggcttcgtggagaaccaagccatgaaaacaacagacaggaggattgtgtggtgatgaaaggcaaggatgggtactgggcagatcggggctgtgagtggcctcttggctacatctgcaagatgaaatcacgaagccaaggtccagaaatagtggaagtcgaaaaaggctgcaggaaaatgggaccatctagttgcaggaaaacaagctcagggctcccactgattctgcgtgatgacccttccttgactaatcctccagcaacgattcaaacagatggctttgttaaatatggcaaaagcagctattcactcatgagacaaaaatttcaatggcatgaagcggagacatactgcaagcttcacaattcccttatagccagcattctggatccctacagtaatgcatttgcgtggctgcagatggaaacatctaatgaacgtgtgtggatcgccctgaacagtaacttgaaatccctgctactgaacccccacaactgcctggcagatgcccggagtcagatcacacagcatggattcctttccatggtcactgttactatattgagtcctcatatacaagaaactggggccaagcttctctggaatgtcttcgaatgggctgactgtgttgttattattggaggtgcatcaaatgaagcaggaaaatggatggatgatacctgcgacagtaaacgaggctacatatgccagacacgatccggaagccagaatatggttaaatga

SEQ ID NO: 20717 - DNA, 5457 bp, Homo sapiens
  SIMILAR (954)..(4658): 771254mologous to Mus musculus macrophage mannose receptor precursor,accession number Z11974,Smith-Waterman Score=5330.
tcatctgggaatttctcgcagaatcacgcattcaggatcaccgggcttcatgaggtcccctggggagcgggaagcaaagttgttactttgaattcctgtgtttccagccaccctcatgtgacaggatgtctcctcagtagaggctttccctaaattcaggagccctttaaaagggagggcttcctctgtagttcttttcagctgggcagctctgggaactcggattatgtggagaggcagttggggggcctcgttgttttgcgtcttagttccgccctcctgtccatcatgagaaggaaaggataaaccctgggccatgaggctacccctgctcctggtttttgcctctgtcattccgggtgctgttctcctactggacaccaggcaatttttaatctataatgaagatcacaagcgctgcgtggatgcagtgagtcccagtgccgtccaaaccgcagcttgcaaccaggatgccgaatcacagaaattccgatgggtgtccgaatctcagattatgagtgttgcatttaaattatgcctgggagtgccatcaaaaacagactgggttgctatcactctctatgcctgtgactcaaaaagtgaatttcagaaatgggagtgcaaaaatgacacacttttggggatcaaaggagaagatttattttttaactacggcaacagacaagaaaagaatattatgctctacaagggatcgggtttatggagcaggtggaagatctatggaaccacagacaatctgtgctccagaggttatgaagccatgtatacgctactaggcaatgccaatggagcaacctgtgcattcccgttcaagtttgaaaacaagtggtacgcagattgcacgagtgctgggcggtcggatggatggctctggtgcggaaccactactgactatgacacagacaagctatttggatattgtccatgagcaatttgagggcagtgaaagcttatggaataaagacccgctgaccagcgtgatctaccagataaactccaaatccgctttaacgtggcaccaagcgaggaaaagctgccaacaacagaacgctgagctcctgagcatcacagagatacatgagcaaacatacctgacaggattaaccagttccttgacctcaggactctggattggacttaacagtctgagcttcaacagcggttggcagtggagtgaccgcagtcctttccgatatttgaactggttaccaggaagtccatcagctgaacctggaaaaagctgtgtgtcactaaatcctggaaaaaatgctaaatgggaaaatctggaatgtgttcagaaactgggctatatttgcaaaaagggcaacaccactttaaattcttttgttattccctcagaaagtgatgtgcctactcactgtcctagtcagtggtggccgtatgccggtcactgttacaagattcacagagatgagaaaaaaatccagagggatgctctgaccacctgcaggaaggaaggcggtgacctcacaagtatccacaccatcgaggaattggactttattatctcccagctaggatatgagccaaatgacgaattgtggatcggcttaaatgacattaagattcaaatgtactttgagtggagtgatgggacccctgtaacgtttaccaaatggcttcgtggagaaccaagccatgaaaacaacagacaggaggattgtgtggtgatgaaaggcaaggatgggtactgggcagatcggggctgtgagtggcctcttggctacatctgcaagatgaaatcacgaagccaaggtccagaaatagtggaagtcgaaaaaggctgcaggaaaggctggaaaaaacatcacttttactgctatatgattggacatacgctttcaacatttgcagaagcaaaccaaacctgtaataatgagaatgcttatttaacaactattgaagacagatatgaacaagccttcctgactagtttcgttggcttaaggcctgaaaaatatttctggacaggactttcagatatacaaaccaaagggacttttcagtggaccatcgaggaagaggttcggttcacccactggaattcagatatgccagggcgaaagccagggtgtgttgccatgagaaccgggattgcagggggcttatgggatgttttgaaatgtgatgaaaaggcaaaatttgtgtgcaagcactgggcagaaggagtaacccacccaccgaagcccacgacgactcccgaacccaaatgtccggaggattggggcgccagcagtagaacaagcttgtgtttcaagctgtatgcaaaaggaaaacatgagaagaaaacgtggtttgaatctcgagatttttgtcgagctctgggtggagacttagctagcatcaataacaaagaggaacagcaaacaatatggcgattaataacagctagtggaagctaccacaaactgttttggttgggattgacatatggaagcccttcagaaggttttacttggagtgatggttctcctgtttcatatgaaaactgggcttatggagaacctaataattatcaaaatgttgaatactgtggtgagctgaaaggtgaccctactatgtcttggaatgatattaattgtgaacaccttaacaactggatttgccagatacaaaaaggacaaacaccaaaacctgagccaacaccagctcctcaagacaatccaccagttactgaagatgggtgggttatttacaaagactaccagtattatttcagcaaagagaaggaaaccatggacaatgcgcgagcgttttgcaagaggaattttggtgatcttgtttctattcaaagtgaaagtgaaaagaagtttctatggaaatatgtaaacagaaatgatgcacagtctgcatattttattggtttattgatcagcttggataaaaagtttgcttggatggatggaagcaaagtggattacgtgtcttgggccacaggtgaacccaattttgcaaatgaagatgaaaactgtgtgaccatgtattcaaattcagggttttggaatgacattaactgtggctatccaaacgccttcatttgccagcgacataacagtagtatcaatgctaccacagttatgcctaccatgccctcggtcccatcagggtgcaaggaaggttggaatttctacagcaacaagtgtttcaaaatctttggatttatggaagaagaaagaaaaaattggcaagaggcacgaaaagcttgtataggctttggagggaatctggtctccatacaaaatgaaaaagagcaagcatttcttacctatcacatgaaggactccactttcagtgcctggactgggctgaatgatgtcaattcagaacacacgttcctttggacggatggacgaggagtccattacacaaactgggggaaaggttaccctggtggaagaagaagcagtctttcttatgaagatgctgactgtgttgttattattggaggtgcatcaaatgaagcaggaaaatggatggatgatacctgcgacagtaaacgaggctacatatgccagacacgatccgacccttccttgactaatcctccagcaacgattcaaacagatggctttgttaaatatggcaaaagcagctattcactcatgagacaaaaatttcaatggcatgaagcggagacatactgcaagcttcacaattcccttatagccagcattctggatccctacagtaatgcatttgcgtggctgcagatggaaacatctaatgaacgtgtgtggatcgccctgaacagtaacttgactgataatcaatacacttggactgataagtggagggtgaggtacacttaactgggctgctgatgagcccaaattgtaaatcagcatgtgtttatctgggatctttgatgggctactgggaaggacaggcacatttgccaatggaaagttttttacttttctctgttaaaagtccagatggaatccctgcttacttgaacccccacaactgccggggcagattgcccgggagttcaggttcacacagcatggattcctttccatggtcactgttactatattgagtcctcatatacaagaaactggggccaagcttctctggaatgtcttcgaatgggttcctctctggtttccattgaaagtgctgcagaatccagttttctgtcatatcgggttgagccacttaaaagtaaaaccaatttttgggatagggattgttcaggaaatgttggaaggggacgtgggctgtgggataaaataacagtccgggtctcctttgttcaactgggaacacagggagatccctctggtgaacggaatgattgtgtagctttacatgcgtcttctgggttttggagtaatattcactgttcttcctacaaaggatatatttgtaaaagaccaaaaattattgatgctaaacctactcatgaattacttacaacaaaagctgacacaaggaagatggacccttctaaaccgtcttccaacgtggccggagtagtcatcattgtgatcctcctgattttaacgggtgctggccttgccgcctatttcttttataagaaaagacgtgtgcacctacctcaagagggcgcctttgaaaacactctgtattttaacagtcagtcaaagcccaggaactagtgatatgaaagatctcgtgggcaatattgaacagaatgaacactcggtcatctagtacctcaatgcgattctgagatatttgaatttcataaaattgtaactgaaatttaaaatttttagttcaatgtgattgttttctttaaaatgagtactgaattgtactggtctgtcctttttttcctttgcctaattgaagaaataattgcttgttttcctagccgggcaagatattttcataaaagagggataccaatgctgattactaccttttaaaatattttagataaatgcacagcaccacagcaccacatctaagcattagtgatgggtagctgatgtcagcctccatgtggattttaagcactcctagaaaccaatggaagccctccctggccatattttaagggaggcccccccaaatgtgttaccctattaaattgtaacctcagcaagtagaagcccccatttgaaaagtcaggtacaaatatccctcaagtggcataaaaatgtagtcagttttcctcttttacccagtttttatttcccactccaattatttagaactttatttgtacatgtgcagaagaataaggcagctgagaatctttgtttcccccaagagagttttacaggcttgagtgttgcaaatgtgttctttgtcctgttatatgtatatcaggaatacaaggatgtgaaataaaactgtaaatttgcataactggatgtacttagataatgtgaaataaaccattaaagaacaagctctatttttaataaaaaaaaaaaaaaa

SEQ ID NO: 20718 - DNA, 407 bp, Homo sapiens
  SIMILAR (122)..(340): 1001254mologous to Homo sapiens Protein Enriched in Diabetes,accession number Y13736,Smith-Waterman Score=367.
  misc_feature (1)...(407): n = a,t,c or g
tttcgtcggcggcagaannnnnnnnnnnnnnnnnnnnnnnngccgaggaggaggttccggacgctgcttaggaaccggggactcaggagtgcccgcgccctgagcgctcagctccagaggcgacaacctctcctacattgagcacatctttgagatctcccgccgtcctgacctactcactatggtggttgactacagaacccgtgtgctgaagatctctgaggaggatgagctggacaccaagctaacccgtatccccagtgccaagaagtacaaagacattatccggcagccctctgaggaagagatcatcaaattggctcccccaccgaagaaggcctgagcaagggggaggaagaggaggaaggttggaccttcatcagaccactcccttcccccatcctgcn

SEQ ID NO: 20719 - DNA, 278 bp, Homo sapiens
  SIMILAR (2)..(70): 731254mologous to Homo sapiens Human mammary transforming protein,accession number W17838,Smith-Waterman Score=81.
  misc_feature (1)...(278): n = a,t,c or g
caaggctttttccaaaaaacattcaaattacacatgcagtctcagagactatttagacaaagttcaagttanggagcttttacggatgtgggagaaaagctttaaaannncggggagggctggctgctggaagaaggaagangccagactggttagacagtactcttcactcctagcccagcctagcgtgccctgcccctctggccactgctgcagacacctgccttaacacacacatctggcttctcccttaagaagagagagatacttntagaatt

SEQ ID NO: 20720 - DNA, 447 bp, Homo sapiens
  SIMILAR (1)..(222): 851254mologous to Homo sapiens Human mammary transforming protein,accession number W17838,Smith-Waterman Score=319.
atgtatattaaaactgcactgccatgtctgcccttttttgtggtgtctagcattaacttattgtctaggccagagcgggggtgggaggggaatgccacagtgaagggagtggcagaatcaaattgctacatagtccaaacaaaaaagaaggctttttcaaaaaacattaaattcacatgcagtctcagagactatttagacaaagttcaagttaggagcttttaggatgtgggagtaaaactttaatgggaggggagggctggctgctggaagaaggaagaagccagactggttagacagtactcttaactcctagcccagcctagcgtgccctgcccctctggccactccttatattgctgtgagattgcccctatcttgtgctcttctgtctgcagtgtgcacggccttgttctaacccggaataaaggtgattgattgtattgc

SEQ ID NO: 20721 - DNA, 198 bp, Homo sapiens
  SIMILAR (2)..(43): 921254mologous to Homo sapiens Human mammary transforming protein,accession number W17838,Smith-Waterman Score=68.
aaagaaggctttttcaaaaaacattaaattcacatgcagtctagtagtttctctgtaaggcaaaataatctaaaaagactaacctgcccacccactccttatattgctgtgagattgcccctatcttgtgctcttctgtctgcagtgtgcacggccttgttctaacccggaataaaggtgattgattgtattgcaaaa

SEQ ID NO: 20722 - DNA, 455 bp, Homo sapiens
  SIMILAR (145)..(80): 631254mologous to Homo sapiens Human mammary transforming protein,accession number W17838,Smith-Waterman Score=66.
  misc_feature (1)...(455): n = a,t,c or g
caacacaaaaaaaaaggcgccgcctaaggggaatttttaatannntnnnnnnnnnnnnnnnnnnnnnnnnnnnnnnnnntttgtttggactatgtagcaatttgattctgccactcccttcactgtggcattcccctcccacccccgctttggcctagacaataagttaatgctagaccccacaaaaaagggcagacatggcagtgcagttttaatatacatatatgtagaatatatatgtacccccagttagcacggtcagggtggggaggggcatcttggggtaggcaggaggctggggtcactcactgtactgtagtgacgtggctaggaggtgttcacaagcccagggggccaggatatctagtaaagaagggtttcctaagtaagtccggacgcgtgggcggacgcgtgggtcgnttcgaagattctctgaggttcgcaggatatcagan

SEQ ID NO: 20723 - DNA, 419 bp, Homo sapiens
  SIMILAR (413)..(294): 851254mologous to Homo sapiens Protein Enriched in Diabetes,accession number Y13736,Smith-Waterman Score=168.
ttgatttctattcgcatagaaatagcccccacctcctcctaaagtggggaaactcagccccctcccatagccctggacccccatcccgttaagaagaggatctagatgagctagccatataggcaatcagccagagcgtgcgcatttgcacacacacgtgcacagtaagggggttaggctcaggttagtaagtgggtagatggtgggtggcccctgccccctctcctggaggatgggggaagggagtggtatgatgaagttccacccttcctcctgttcctcccccgtgctcaggccttcttcggtgggggagccaatatgatgatctcttccccagagggcagccggataatgtctttgtacttgttggcactggggaagcgggttagcttggtgtccaggtcatcctcctctccccc

SEQ ID NO: 20724 - DNA, 374 bp, Homo sapiens
  SIMILAR (153)..(239): 721254mologous to Homo sapiens Protein Enriched in Diabetes,accession number Y13736,Smith-Waterman Score=116.
cttaggaaccggggactcaggagtgtctcggccctgagcgctcagctccagaggcgtcatggctgagtacgggaccctcctgcaagacctgaccaacaacatcacccttgaagatctagaacagctcaagtcggcctgcaaggaagacatccccagcgaaaagagtgaggagatcagctactggcagtgcctggtttagcttcctggagagccacaacaagctggacaaagacaacctcttccactcagttgttcctactcagactgttgcactctaaacctagggaggttgaagaatgagacccttaggttttaacacgaatcctgacaccaccatctatagggtcccaacttggttattgtaggcaaccttc

SEQ ID NO: 20725 - DNA, 2601 bp, Homo sapiens
  SIMILAR (2442)..(2398): 861254mologous to Homo sapiens Human PEA-15 protein fragment containing death effector domain,accession number W76624,Smith- Waterman Score=65.
  misc_feature (1)...(2601): n = a,t,c or g
ggtttttttttttttttttttttgcaatacaattaatcaccgtttattcccgggtttagaacaagggccgtgcacacttgcagacaggaaggagcacaaagataggggcaatctcaccagcaattataaggagtggggtgggcaggttagtcttttttaggattattttgccttacacgagaaactactaagactcttgctgaaaaagaacccctgtctttcttctccccatttccttccataaggaaaggctcctttattctctcttctaactctaatgtaaacataacccccaaatgggaagggacagttcatggcttcattccccccaccccaattcttacaagtaagtatctctctccttccttaaggggaagaagccaggacaggggaaaggggagacttgggggaagggtccttttaaggggcaaaaactgtggggagtccttagaaggtgttgtggtgttaaagggcaggtgtcttgcagcagtgggcccagagggggcagggggcacgctaaggctggggctaggagtttaagagtgactgtctaaaccagtctgggtttcttcctttcttccaggcaagccaagccctcccccanccccattaaagttttaactccccacatccctaaaaagctccctaacttgaaactttgtcctaaatagtctctgaagacttgcatgtgaatttaatgtctttttgaaaaagcccttcttttttgctttggactatggtagcaaatttgattcctgccactccctttacttgtggcatttccccttccacccccgctctggccctagacaataaagttaatgctagacaccacaaaaaagggccagacatggccagtgccagttttaaataatacatatatgtaagaatataatatgtacacacagttagcaccgtccagggtggggaggggccatcttggggtacggcaggaggctggggtcactcactgtactgtagtgatgtggctaggaggtgttcacaagcccagggggcccaggatatctagtaaagaagggtttcctaagtaagtcccttccgggattgaaattggggtgggggatcggttgcaaaggaaaaacactgtagttaacttctttctggcttgggatgttccttcaccaagaaaagagggaaggttgcctacaataaccaatttgggaccctaatagatggtggtgtcaggattcggtgttaaaacctaaagggtctcaattctttcaacctcccttaggttttaaagtgcaaacagtctgaagtaggaacaactgaagtggaaagagggggctcccctctctctgccctcatccccatctcaggctcagtggtacatggttcccagcacagtctctccagagtacaggtgggtgggggcatctaacgctggctgctccatggggtttgatcttagggacccaggaaaggatccctggctcaatacctatgctaggcccatgagagacaaaaagggacctgctggtactcaggaaacagtccagcacaggagtacaaacatggaactctggcttttctttgcccccttccaggtgggggttgagtggtctctttgccttccgtccccactgcttttccctggatccacctacctctcccataccttaccccttattgtcagctcctcaattgtaggaaaaatgcagccccttttctgcttcccacactttaaaagatatggggggagtggaggaaagggaagtaggaggaatgtgctgatttctatttgcatagaaatagcccccacctcctcctaaagtggggaaactcagccccctcccctagcccctgacccccatccccttaagaagaggaactagatgagctagacatatagacaaacagccagcagcgtgcgcacacgcacacacacgcgcacagtaagggggttaggacccaggttagtaagtgggtagatggtgggttgccccttgcccccctctcctggaggatgggggaagccactgcctctgatgaaggtcccaaccttcctcctctaaactcccccttgctgcagcccttccttcggtgggggagcccaatttgatgatctcttcctcaagagggctgccggataatgtctttgtacttcttggcactggggatacgggttagcttggtgtccagctcatcctccctcagagatcttcaancaacacgggttctgtagtcaaccaccatagtgaagtaggtcaggacggcgggagatctcaaagatgtgctcaatgtaggagaggttgtctttgtcccagcttgttgtggcttctcccaggaagctaaaccaggcactgccagtagtgatctcctcactcttttcgctggggatgtccttctttgaaggccgacatgagctgttctagtatcttcaagggtgatgttgttggtcaggtcttgcaggagggtccctgtactcagccatgacgcctctggagatgagcgctcagggcgcgggcaatcctgagtcgtcggttcctaagcagcgtccggaacttcttaaacggctgcaaccgccgccgccgccgcttctgccgcctcctccgccgggaaatctccagaagattccgg

SEQ ID NO: 20726 - DNA, 1473 bp, Homo sapiens
  SIMILAR (661)..(1029): 781254mologous to Coturnix coturnix cardiac tropomyosin,accession number X54277,Smith-Waterman Score=436.
atgagggacttagccagagattcggagagaaacaagtttatagcactaattcttactaaggtggaggaggagctgacgcacctccagaagaaactaaaagggacagaggacgagctggataaatattccgaggacctgaaggacgcgcaggagaagctggagctcacggagaagaaggcctccgacctgtggccagcggtgccgacgtcaggccctcccccagcggtgctgacgtcggcggtccggccgggtgacctcatcgccccgacggcagccggcccggggggcggggagaggcgggggcggcccccgcgcaggcaaaggcttggggggccggggcgcggctgtgcagctctcgccggagccgagcccagccgagcgtccgccgctgcccgtgcgcctctgcgcctccgcgccatggccggcctcaactccctggaggcggtgaaacgcaagatccaggcccctgcagtagcaggcggacgaggcggaagaccgcgcgcagggcctgcagcgggagctggacggcgagcgcgagcggcgcgagaaagctgaaggtgatgtggccgccctcaaccgacgcatccagctcgttgaggaggagttggacagggctcaggaacgactggccacggccctgcagaagactggaggaggcagaaaaagcctgcagatgagagtgagagaggaatgaaggtgatagaaaaccgggccatgaaggatgaggagaagatggagattcaggaagatgcagctcaaagaggccaagcacattgcggaagaggctgacccgcaaataccgaggaggtagctcgtaagctggtcatcctggagggtgagctggagagggcagaggagcgtgcagagatgcgtgcggaggtgtccgaactaaaatgtggtgacctggaagaagaactcaagaatgttactaacaatctgaaatctctggaggctgcatctgaaaagtattctgaaaaggaggacaaatatgaagaagaaattaaacttctgtctgacaaactgaaagagggctgagacccgtgctgaatttgcagagagaacggttgcaaaactggaaaagacaattgatgacctcggaagatgagttatacgctcagaagctcaagtacaaagctatcagcgaggaactggaccacgctctcaacgacatgacctctctctgagaggcagccaggtcgctgccctctgtccttctcacatggtgcctcctacggccctgtggctttctaggagctccggtggcctgccttctggtttgaacgtcagagccttcttctgatgtgtctgtgactctacaaccgaaataaagacgggcagtcctcctcttcatgccccctcattctcattttctccacttgctgcctttgagctgtagctgtgtgcccttaaccatagcctgaaacacaaagtgggtggttagcctctctcactcacaaatgaaaagcttattac

SEQ ID NO: 20727 - DNA, 424 bp, Homo sapiens
  SIMILAR (211)..(83): 951254mologous to Homo sapiens GL014,accession number AF267858,Smith-Waterman Score=203.
ggcccaactgccctgtggccagttccactgggtcttgatctcatgaattccagctcccgggtgtcaggggtagcatccaatgggccagatccacattttcatcctcttcttcctcttcctcactccgacgcaggccagcccctattcggggcaagccctcggaggggtctccggacccggatcctgcactgctgctgttccgcgatcccatcttctggtcacagcattcttaggtcctgtgcgggggctcctcctgtcacctccttgggtttggtgaaagcaaagcgtgctctagaaataccagggtctcctgagacggggtagtagctatctctaggagggtgacccttcctcggggcccagatcccttccctttagcctatgccaactaccaaggcgtcgggaacacaaaccttctcgtgcc

SEQ ID NO: 20728 - DNA, 435 bp, Homo sapiens
  SIMILAR (223)..(360): 971254mologous to Homo sapiens GL014,accession number AF267858,Smith-Waterman Score=225.
cttcgataggattggagaaggtttgtgttcccgacgccttggtagttggcataggctaaagaaaagggatctcagccccgaggaagggtcaccctcctagagatagctactaccccgcttaatgagaccgtggcatatctagagcacgctttgctttcaccaaacccaaggaggtgacaggaggagcccccgcacaggacctaagaatgctgtgaccagaagatgggatcgcggaacagcagcagtgcaggatccgggtccggagacccctccgagggcttgccccgaagaggggctggcctgcgtcggagtgaggaagaggaagaagaggatgaagatgtggatctggcccaggccctcttggactcagaggaagagaatgacagagcttgggatggtcgtcttggggatcgatacaacccacctgtggatgct

SEQ ID NO: 20729 - DNA, 307 bp, Homo sapiens
  SIMILAR (212)..(280): 1001254mologous to Homo sapiens GL014,accession number AF267858,Smith-Waterman Score=117.
  misc_feature (1)...(307): n = a,t,c or g
ataagctagtgaagcgctttcttccgagagggatttcagattggtcggtcagagaggttacctggaaatccaacaccgcccaacacccctcccgctccccagtccggggacttcgataggattggagaagagcacgctttgctttcaccaaacccaaggaggtgacaggaggagcccccngcacaggacctaagaatgctgtgaccagaagatgggatcgcggaacagcagcagtgcaggatccgggtccggagacccctccgagggcttgccccgaagaaggggctgggccttgccgtcggaagtg

SEQ ID NO: 20730 - DNA, 631 bp, Homo sapiens
  SIMILAR (2)..(208): 1001254mologous to Homo sapiens PRO2389,accession number AF130070,Smith-Waterman Score=382.
gaagctgaccaaccacaaggcgtgtgtgcgtgacgtcagttggcacccctttgaagagaagattgtcagcagttcgtgggacgggaacctgcgtctgtggcagtaccgccaggctgagtacttccaggatgacatgccagaatctgaggaatgtgccagcgcccctgccccagtgccccaatcctctacacccttttcctcaccccagtagatccaacctccagccccatatagggtgaacctcttgataagctctctgcctcctcctccctttcttcccttgtggggaatgtttggaggaatcactgggcatttgatgggggattaacattaagcctggggctctggaggcttcagctggagccctggggaaggatttctccccatgggggcaggagtgggtcttcctttacgttggttcacacccagtcagctttgggtccctatctctgggcagagtttggcaggactgccatttatctggggtgtggcctctgccagcaagagaagtgtcctggggtgtttttaaatcatgtttgaatgttaggggttgggatcctagagttagatgcctgagggccacatctgaaacagacctgttcagccagggctgccaggtctttcaagttga

SEQ ID NO: 20731 - DNA, 1165 bp, Homo sapiens
  SIMILAR (9)..(296): 961254mologous to Homo sapiens GL014,accession number AF267858,Smith-Waterman Score=500.
  misc_feature (1)...(1165): n = a,t,c or g
agagaacggggcctctgcatcggggaagcttctcccttggagaacagtctcgagtgatatctcacttcttgcccaatgatctgggcttcactgatagctactctcagaaggctttctgtggcatctacagcaaagatggtcaaatattcatgtctgcttgccaagaccagacaatccgactctatgactgccgatatggccgtttccgtaaattcaagagcatcaaggcccgcgacgtaggctggagcgtcttggatgtggccttcacccctgatgggaaccacttcctctactcctagcttggtctgattacattcatatctgcaatatctatggtgagggagatacacacactgccctggatctcaggccagatgagcgtcgctttgctgtcttctccattgctgtctcctcagatggacgagaagtactaggaggggccaatgatggctgcctgtatgtctttgaccgagaacagaaccggcgcacccttcagattgagtcccatgaggatgatgtgaatgcagtggcctttgctgatataagctcccaaatcctgttctctgggggagatgatgccatctgcaaagtgtggggatcgacgcaccatgcgggaggatgaccccaagcctgtgggtgcactggctggacaccagggntggcatcaccttcattgacagcaagggtgatgcccggtatctgatctccaactctaaagaccagaccatcaaactctgggatatcccgacgcttttccagccgggaaggcatggaagcttcacgccaggctgccgcacagcaaaacaaggactatcggtgggcagcaagtgcccaaaaaagcctggcggaagctgaagctccccaggggacagctccttgatgacctaccggggcccacggagtgctgcacaccctcatccgctgccggttctcccccattcatagcactggccagcagttcatctacagtggctgctccactggcaaagtggttggtaaggattgtgtcagaacagggggcctcaggaagggcaggaatgactccttgccattccacctataacgactagtgaccaccttaaaaagcccagtgacagctacaggtaaaatcaaacttagcttggaggcttaaacagagaaatagaaaccattctatttttcagtg

SEQ ID NO: 20732 - DNA, 3333 bp, Homo sapiens
  SIMILAR (2013)..(2564): 741254mologous to Homo sapiens Human GTPase associated protein-24,accession number Y99673,Smith-Waterman Score=688.
  misc_feature (1)...(3333): n = a,t,c or g
cacttactcctccccagcaagagctaacagccctccttgggtgtgcactttctcctcccctgaggcacctcgcgcattctgccgcctacctatcaatcatcgtgctccgctgtccagatggctggccaagggggcggggccgtcgtgtgacgtttgcagcccgccggccaggaagccgcgagatgcttgacgagcgaagcgcgtgacagaagagcggttggccaacgcagtggcggcagtcggagtaaacaaggcctcgcgccgctgcgggtcctgcgaccgctcctggctggtggggggactcgcgaggggcggaaaccgccggcttaagagggaggtgcttctcggcttcctccccctcatggggtacacacccccggcgccccacgtggggcgttaggcgaggaaggaggggtgttaggccaaattctattttcattggctgtcactgctgccggcctttgtaagggggcgctctgattggtcgataaggtgggggcgtcgagggtctttgagtcctaaggcttctaattggttagatgagataagctagtgaagcgctttcttccgagagggatttcgattggtcggtcagagaggttacctggaaatccaacaccgcccaacacccctcccgctccccagtccggggacttcgataggattggagaaggtttgtgttcccgacgccttggtagttggcataggctaaagaaaagggatctcagccccgaggaagggtcaccctcctagagatagctactaccccgtctcaggagaccctggtatttctagagcacgctttgctttcaccaaacccaaggaggtgacaggaggagcccccgcacaggacctaagaatactgtgaccagaagatggggatcgcgggaacagcagcagtgcaggatcccnggtccggagacccctccgagggcttgccccgaagaggggctggcctgcgtcggagtgaggaagaggaagaagaggatgaagatgtggatctggcccaggtactggcctatctcctagcgcaaaggccaagtgaggttggtgcagggaggaagtgcaccaaatttacaattcattcaggcccttttggactcagaggaagagaatgacagagcttgggatggtcgtcttggggatacatacaacccacctgtggatgctacccctgacacccgggggctggaattcaatgagatcaagaaacaagtggaactggccacagggcagctggggcttaggcgggccgcccagaagcacagctttcctcgaatgttgcaccagagagaacggggcctctgccatcggggaagcttctcccttggagaacagtctcgagtgatatctcacttcttgcccaatgatctgggcttcactgatagctactctcaaaaggatttctgtggcatctacagcaaagaatggtccaatattcatgtctggcttgcacagaacataccatctccgattctatgactgccgatatggccgtttccgtaaattcaagagcatcaaggcccgcgacgtaggctggagcgtcttggatgtggccttcacccctgatgggaaccacttcctctactctagctggccagatgagcgtcgctttgctgtcttctccattgctgtctcctcagatggacgagaagtactaggaggggccaatgatggctgcctgtatgtctttgaccgagaacagaaccggcggcacccttcagattgagtcccatgaggatgatgtgaatgcagaggcctttgctgatataagctcccaaatcctgttctctgggggagaggaggccatctgcaaagcgtgggatcgacgcaccatgcggtaggaagaccccaagcctgtgggtgcactggctggacaccaggatggcatcaccttcattgacagcaaggtgtgccacaaatcaggactgtacaaccaggccgataaggttctagttgcccacgggggcatgaaagcggactggtgagggaagttgacaagctccttattaaccaagggtgatgcccggtatctgatctccaactctaaagaccagaccatcaaactctgggatatccgacgcttttccagccgggaaggcatggaagcttcacgccaggctgccacacagcaaaactgggactatcggtggcagcaagtgcccaaaaaagcctggcggaagctgaagctcccaggggacagctccttgatgacctaccggggccacggagtgctgcacaccctcatccgctgccggttctcccccattcatagcactggccagcagttcatctacagtggctgctccactggcaaagtggttgtgtacgaccttctaaagtggccacattgtgaagaagctgaccaaccacaaggcctgtgtgcgtgacgtcagttggcacccctttgaagagaagattgtcagcagttcgtggggacgggaacctgcgtctgtggcagtaccgccaggcttgagtacttccaggatgacatgccagaatctgaggaatgtgccagcgcccctgccccagtgccccaatcctctacacccttttcctcaccccacccctgcttacggcgcctctaccatgcctggctggcagcagtggtcatctttgggccgcttctgcagttccatgtcaaccctcggactatcttcgccagccacggcaacttcttcaacataaaatttgtgaattcagcctggggctgtgacatgcactttcttagggggctttgtgttgctggtggtgttcctggctacacggcgcgtggcagtaactgccagacacctgagccgactggtagtaggggcagccgtgtggcggggagccggccgggccttcctgctcatcgaggacctgactggctcctgcttcgagccactgccccagggtctgctgctccacgagctgcctgacacgccgcacgtgcctggcagccgcgcaccagtggcgaggctacaccgtctcctcccacaccttcctgctcaccttttgctgcctgctcatggcagaggaagcagctgtgttcgccaagtacctgcgccatgggcttcctgccggcgcccccattgcgccttgtcttcctgctgaacgtgctgctgctgggcctctggaacttcttgctgctctgtaccgtcatctatttccaccagtacactcacaaggtggtgggcgccgcagtgggcacctttgcctggtacctcacctatggcagctggtatcatcagccctggtctccagggagcccaggccatgggctcttcccccgtccccactccagccgcaagcataactgaaagaaataaaaaccatcgggcctgaaaaaaa

SEQ ID NO: 20733 - DNA, 516 bp, Homo sapiens
  SIMILAR (153)..(320): 921254mologous to Homo sapiens non-receptor tyrosine phosphatase 1,accession number M33689,Smith-Waterman Score=277.
  misc_feature (1)...(516): n = a,t,c or g
ggttgacatgaagaagcagcagcggctagggcggcggtagctgcaggggtcggggattgcagcgggcctcggggctaagagcgcgacgcggcctagagcggcagacggcgcagtgggccgagaaggaggcgcagcagccgccctggcccgtcatggagatggaaaaggagttcgagcagatcgacaagtccgggagctgggcggccatttaccaggatatccgacatgaagccagtgacttcccatgtagagtggccaagcttcctaagaacaaaaaccgaaataggtacagagacgtcagtccctgtaagtatccacgtggccggtaccagtcttgctcttcctttgctgcaggcctttttagtcaagactcctttcgcctcagggtttagtataataataaatcaatgtagcagaggtttatgacgcgattgtttcctatagtaaaggcattagagacttatagtaatagctcattnttccaccattatagaagggctcaggtttcagtttctg

SEQ ID NO: 20734 - DNA, 3787 bp, Homo sapiens
  SIMILAR (3037)..(2147): 691254mologous to Homo sapiens dJ530I15.1 (protein tyrosine phosphatase, non-receptor type 1 (EC 3.1.3.48)),accession number AL133230,Smith-Waterman Score=959.
  misc_feature (1)...(3787): n = a,t,c or g
tttttttttttttcatgttctttagaaaaaaattttattgttgcagctaaaatgcaaacccatcatgaatatggcaagttggaaaactgtacagtctgacagttctgtgaggtcacagaagaccctgganacactccccccaacccacccggtcatgcagccacgtatccacacacacctgaaaaggtattataccaaaacaccttgctttttttgtttttatttttgtaaaaatgggtttattccatggccattgtaaaaaataatgacctgatgagtaaatttttggtttagggcatatcagcagagcagctcgctacctctctaacataatgtgtaacaaggtggcagagccagctgctctccagggatagggaggttaaacccagtacgtccattttgaaaatgctcctatatattacacaccccaaactactagagtgcatatacagggacttaaaaacaacaacgcccacgctcagaatgcttacagcctgggcacctaagccttatccacacctcaccataggctctgcaggggtgacacctccgaatgttcccacccacagaatttctctggtactgggccttctaccacggaggaaagggcaaaatgtgaaaaatgctgggccaggagagtaggctcggggagcttacagcctgcccgtgtttttcatgttaaaaaagcccactttaatgtggaggtcttcagttcccctttggcaggaagagtcgtgagcaccatcaggcccccacagggtttggaagggtggggggcagacgcgcctctctcgggcaagggtgaaccgggtacagagacggcgggcaggctgcctacaaggacagtcacgcaggctgtttcaagcaagtgtggtttccagcaggttgcctctcttcccaaatcaacggtctggctcaagaagagtggttgacttggaaatggcggaggctgaaccccaaaaggtgggggggcggggggtgtccctgcttcccctaaatccatgtcccagagcgtgaaggtgtgaaatatggcttccccataccccttggaattgtctgagttacagcaagacccctgctgtccccaggaacaggctgggccctnccccaggaagtccactagagtgtcatgcccaggaattaggcaaatgccctattccctggaaaactgcacccctattgctgagcggacaatgacttcagcaacagggtttgggccccacagccatgtaatgatcaggtcatgcacaggcaggttggacttggacatggggcacattagtaagcagagatcaaagtttctcatttcaagcacatatttttcatcaggacacaagaagaccttacatgcattctaatacacacgggggagcagtgattgagaactagatctagcagataacagggaggagaataagcgggacaaagtaatctcacatcatgtttcttattaaatacccacgtgttcattatatattatagcattgttctatcttctcacgttaccccacaatatcactaaataacaactgcttacaaccgtcctccttcccagtactggtctgacgcagcaggcccatggcaaagccttccattcccagtactacctgaggatttattattgtactttttgataaagcccttgatgcaaggctgacatcaaaaaattttaatacattattggttcaagaaaatgctagtgcactatggatgcctttggggaaaaaattgtttaaataaatatggagtggagagttgctccctgcagattcaaggggggggggctgtctggcgtgccgcccgcctgggatgctccaggagggagccctgggtgggggcgagccccaagacggggtgtaggccccttccctctgcgccgccagcatggtactctctttcactctcctcaaaaaatggcttgtggatttggtactcaaagtggaaggggcaaaaagtaaaaggatgaggggtgagacacacatccggggaagatggggttttagtgcagaaccaacgtccgtccggggcccggctttttacgcggtccggcggcccttacctaccgcggcatgcctgctagtcgggcgtgggctctgcgggcagaggcggacagtgggtgaaggtggagtggagaagggtcaggctatgtgttgctgttgaccaggaacctgtagcagaggtaagcgccgcccgtgaggcccgtagccccgcacatgttgaccaggaagggcttccagtaactcagtgcatggtcctcgtccttctcgggcagtgacggctcccctttggctggggaggcagcctgggcacctcgaagacttccccccacgacccgacttaaaaatacagtgtcttggctcatgctttcgatgccgtagggtgcggcatttaaggggcttcctttttcttccttgatggggcagtctttatcctcctgggtctcttccttcacccactggtgatttgggaagaactccctgcatttcccattgtgtggctccaggattcgtttgggtggccggggaggtggggggatatgctcggcgtgggggctccaggtcctcgtgggaaagctccttccactgatcctgcacggaagagtcccccatgaatgaaatttggccaccttcggatcaacagccccaggtaaggaaaaaacgcagctggtcggctgtctggatcagccccccatcccgaaacttccctcatttcctaacagcactttcttgatatcaacggaagaagggtctttcctcttgtccattcaggcaagagggcaggtattcaggccaggacagaaggttccagacctggccgatgcctggcactgcagtgcaaccacaacggggcccgtgctccgggctgagtgacccttgactcttcgacttttgaaaagaaagttcaagaatgaaggctgttgatccaggacttcaaagtcaagccatgtggtatagtggaaatgtaagatctctcgagtttcttgggttgtaaggttttccaattctagctgatcgcgctgtataatatgacttgatatcttcagagatcaatgttaatttcaaatttgtgtcttcaaagatcatctctttttcttctttttgtggccagtattgtgcgcattttaacgaacctttctccatcactctgttgagcatgacgacacccctgcttttctgctcccacaccgatctcccaaaagtgaccgcatgtgttagcaaaagggccctgggtaagaatgtaactcctttgggcttcttccatttttatcaaactagcgttgatatagtcattatcttcttgacgtagtttaatccgactatggtcaaagggactgacgtctctgtacctatttcggtttttgttcttaggaagcttggccactctacatggggaagtcactggcttcatgttcgataatcctggtaaatgggccgcccagctcccggacttgtcgatctgctcgaactccttttccatctccatgacgggccagggcggctgctgcgcctccttctcggcccacttgcgccgtctgccgctctaaggccgcgtcgcgctcttagccccgaggcccgctgcaatccccgacccctgcagctaccgccgccctagccgctgctgcttcttcatgtcaaccggcagccggaactacgcatcacgcctgccaggggctccgcccctgaagcagaaggaccaatcagcgatcgagaatttcgacaagcacttccgcggggaggagccgggggcggtgctaggggaagtggccccagcaccgcgagatatctaa

SEQ ID NO: 20735 - DNA, 452 bp, Homo sapiens
  SIMILAR (444)..(178): 981254mologous to Homo sapiens cytokeratin 8,accession number M34225,Smith-Waterman Score=438.
tttattggcagagtagctgaggttttattttggaccaaaaaaaaaaagcaattgaattgttttgtagctggaggcatgggcaaggggggtcccaggtagtaaactccccaggtgggctgagggctagggctgagctcaggtgggtctcctgttcccagtgctaccctgcatagcggcctccaccagcccctgcatgttgccaagctccgcctccagcttcagcttctcctgggccagagtctccagctgccgcctaaggttgttgatgtagctctcgaacatgttgtccatgttgcttcgagccgtcttctgctgctgcaggaggctccacttggtctccagcatcttgttctgctgctccaggaaccgtaccttgtctatgaaggaggcaaacttgttgttgagggtcttgatctgctctttctcctgggtgcgcacggcctggaatgttg

SEQ ID NO: 20736 - DNA, 442 bp, Homo sapiens
  SIMILAR (1)..(129): 651254mologous to Homo sapiens cytokeratin 8,accession number M34225,Smith-Waterman Score=117.
  misc_feature (1)...(442): n = a,t,c or g
ggtggggccagcggcatgggaggcatcacccgcaagtacggtcaaccagaagcctgntgagcccccttgtcctggaggtggacccccaacatccaggccgtgcgcacccaggagaaggagcagatcaaagaccctcaacaacaagtttgcctccttcatagacaaggtacggttcctggagcagcagaacaagatgctggagaccaagtggagcctcctgcagcagcagaagacggctcgaagcaacatggacaacatgttcgagagctacatcaacaaccttaggcggcagctggagactttgggccaggagaagctgaagctggaggcggagtttactacctggggaccccccttgcccatgcctccagctacaaaacaattcaattgctttttttttttggtccaaaataaaacctcagctagctctgccaatgtcaaa

SEQ ID NO: 20737 - DNA, 488 bp, Homo sapiens; identical to SEQ ID NO: 9399
  SIMILAR (7)..(177): 931254mologous to Homo sapiens cytokeratin 8,accession number M34482,Smith-Waterman Score=249.
  misc_feature (1)...(488): n = a,t,c or g

SEQ ID NO: 20738 - DNA, 1980 bp, Homo sapiens
  SIMILAR (1881)..(718): 471254mologous to Homo sapiens Keratin 8,accession number X74929,Smith-Waterman Score=603.
  misc_feature (1)...(1980): n = a,t,c or g
aaattgccggccgcgtcgactttttttttttttttttccgacattggcagagcttagcttgaggtttttaattttggaccaaaaaaaaaaaaaagcatttgaatttgttttgtagcttggaggcagtgggcaaaggggggttccccaggtaataaactcccccgcaggtggggctgagggctaagggctgaaccctcaaggtgggtctccctgttccccagtgcctaccctgcaatagcggccctccttccccaggcctctggggcagccgcaggagagggtagggctgggagggggctgccgcaagctgtttcacttggggcaggacgttcagaggacttcagacaccaggcttcccaatcacgttgtctcgaatcttctttcaaaaccaacgggccttggaaaggagcctgggtgcgggcttgaaggagctgggagccctgcggccagagccaaaagcttgggagccccaggcttgttagcttgaggcccggggctttgttgaggccccccataaggccgaagcttaagaccaccttgcaatagccccgctgggtggtcttcgttaatgaaatactcatgttctgcatccccagacttccagcccggctcttcctcgcccttccagcaagctttcctggtaaggtggcgaatctcgaatgtcccagggccaagcttgaacgttcaatcaagctccctggtaactcaacgcaagtgccggcgcaccatgtccctggctctggcccggctgcagggcggccctcccagctcggacaaccttggcgttggcattccttaatgggccagctttttccacgctgcttcggcatcctgccaatgggcggcctcccagggaaagcccttcttgcctttgaggcccttcaaatcttcaagcctggagcccggctgatgttccgggttcatctcaagagatctcaagtctttgtgctgccgcaggtcatcccagtgcttcccagccaaggttctgcagctccttcatacttgatcagagtacatgctctcagcctcagcccggatgcggttggcaatatcctcgtactgtgccttgacctcagcaatgatgctgtccatgtccagggagcggctgttgtccatggacagcaccacagatgtgtccgagatctgggactgcagctcccggatctcctcttcatacagtctgcctgatggaagttgatctcgtcggtcatgcccttccaggtcgagactccagctctagcttgtkcmatgtaagcttcatccacatccttcttgatgaggacaaattgattctccatctctgtacgcttattgatcatcatcctcatacttgttcttgaagtcctccaccagcccctgcatgttgcccaagctccggtctccagcttcagcttctcctggcccagaagtctccagctgccgcctaaggttgtktgatgtagctctcgaacatgtktgtgccatgttgcttcgaactcgtcttctgctgctgcaggaggctccacttggtctccagcatcttgttctgctgctccaggaaccctacctcgtcctatgaatggaggcaaacttgttgttgagggtcttgatctgctccttctcctgggtgcgcacggcctggatgttggggtccacctccagggacaagggggctcagcaggctctggttgattgaccgtgactgcagtgatccctcccatctccgctggccccaccatagccgccagcccaggccaccgcgaaaagttgctgctgcccactcgggagaagctcgaggagctgatgcgggaaccgggccgactcgtgtaggagcgcgtgctgaaggcccgggggcaagaagttggacaccttgtaggacttctgggtcaccctgatggacatggtagatggcaggagtggaggcatggcgggccgaaccaggcggagatcctagaaggagcggacaagctgggncgcttggctcaacncaaaaggcggtca

SEQ ID NO: 20739 - DNA, 2206 bp, Homo sapiens
  SIMILAR (3)..(281): 1001254mologous to Homo sapiens colony stimulating factor receptor,accession number M33210,Smith-Waterman Score=496.
gtggcaccccttacccagagctgcccatgaacgagcagttctacaatgccatcaaacggggttaccgcatggcccagcctgcccatgcctccgacgagatctccaccctgaatgaagtcaacacctcctcaaccatctcctgtgacagccccctggagccccaggacgaaccagagccagagccccagcttgagctccaggtggagccggagccagagctggaacagttgccggattcggggtgccctgcgcctcgggcggaagcagaggatagcttcctgtagggggctggcccctaccctgccctgcctgaagctccccccctgccagcacccagcatctcctggcctggcctgaccgggcttcctgtcagccaggctgcccttatcagctgtccccttctggaagctttctgctcctgacgtgttgtgccccaaaccctggggctggcttaggaggcaagaaaactgcaggggccgtgaccagccctctgcctccagggaggccaactgactctgagccagggttcccccagggaactcagttttcccatatgtaagatgggaaagttaggcttgatgacccagaatctaggattctctccctggctgacaggtggggagaccgaatccctccctgggaagattcttggagttactgaggtggtaaattaacttttttctgttcagccagctacccctcaaggaatcatagctctctcctcgcacttttatccacccaggagctagggaagagaccctagcctccctggctgctggctgagctagggcctagccttgagcagtgttgcctcatccagaagaaagccagtctcctccctatgatgccagtccctgcgttccctggcccgagctggtctggggccattaggcagcctaattaatgctggaggctgagccaagtacaggacacccccagcctgcagcccttgcccagggcacttggagcacacgcagccatagcaagtgcctgtgtccctgtccttcaggcccatcagtcctggggctttttctttatcaccctcagtcttaatccatccaccagagtctagaaggccagacgggccccgcatctgtgatgagaatgtaaatgtgccagtgtggagtggccacgtgtgtgtgccagtatatggccctggctctgcattggacctgctatgaggctttggaggaatccctcaccctctctgggcctcagtttccccttcaaaaaatgaataagtcggacttattaactctgagtgccttgccagcactaacattctagagtattccaggtggttgcacatttgtccagatgaagcaaggccatataccctaaacttccatcctgggggtcagctgggctcctgggagattccagatcacacatcacactctggggactcaggaaccatgccccttccccaggcccccagcaagtctcaagaacacagctgcacaggccttgacttagagtgacagccggtgtcctggaaagcccccagcagctgccccagggacatgggaagaccacgggacctctttcactacccacgatgacctccgggggtatcctgggcaaaagggacaaagagggcaaatgagatcacctcctgcagcccaccactccagcacctgtgccgaggtctgcgtcgaagacagaatggacagtgaggacagttatgtcttgtaaaagacaagaagcttcagatggtaccccaagaaggatgtgagaggtgggcgctttggaggtttgcccctcacccaccagctgccccatccctgaggcagcgctccatgggggtatggttttgtcactgcccagacctagcagtgacatctcattgtccccagcccagtgggcattggaggtgccaggggagtcagggttgtagccaagacgcccccgcacggggagggttgggaagggggtgcaggaagctcaacccctctgggcaccaaccctgcattgcaggttggcaccttacttccctgggatccccagagttggtccaaggagggagagtgggttctcaatacggtaccaaagatataatcacctaggtttacaaatatttttaggactcacgttaactcacatttatacagcagaaatgctattttgtatgctgttaagtttttctatctgtgtacttttttttaagggaaagattttaatattaaacctggtgcttctcactcac

SEQ ID NO: 20740 - DNA, 6390 bp, Homo sapiens; identical to SEQ ID NO: 15469
  SIMILAR (1636)..(3021): 871254mologous to Homo sapiens platelet-derived growth factor receptor,accession number J03278,Smith-Waterman Score=2150.

SEQ ID NO: 20741 - DNA, 1014 bp, Homo sapiens
  SIMILAR (586)..(870): 931254mologous to Homo sapiens CSF-1 receptor,accession number U63963,Smith-Waterman Score=470.
atgtacatgagcaaggacgagtcggtggactatgtgcccatgctggacatgaaaggagacgtcagatatgcagacatagagtcctccaactacatggccccttacgataagtacgttccctctggtggcaccccttacccagagctgcccatgaacgagcagttctacaatgccatcaaacggggttaccgcatggcccagcctgcccatgcctccgacgagatgcacaccttcaccctctctctgccccgcctgaagccctctgaggctggccgctactccttcctggccagaaacccaggaggctggagagctctgacgtttgagctcacccttcgataccccccagaggtaagcgtcatatggacattcatcaacggctctggcacccttttgtgtgctgcctctgggtacccccagcccaacgtgacatggctgcagtgcagtggccacactgatagcaacagcagctgccccgccggcaatagccccagccgtttcccagttatcctgagtcgtgcctttcatacaggtattggtgtgaaccagacgaccctgatcgtcataaaccggaacgcagggcgaatcgtgagcacagcccgccagcaatgcggtcagggaatcccagtgatagagcccagtgtccccgagctggtcgtgaagccaggagcaacggtgaccttgcgatgtgtgggcaatggcagcgtggaatgggatggccccccatcacctcactggaccctgtactctgatggctccagcagcatcctcagcaccaacaacgctaccttccaaaacacggggacctatcgctgcactgagcctggagaccccctgggaggcagcgccgccatccacctctatgtcaaaggtgaggagtctgagcctcctcccaagaggcctgacccggcaggccccactacaatgggccctaaaattaacaatcgtaacaattcagctctgcatttactgagtgctggctatgagcaaggacctgaaagggggatcgtctag

SEQ ID NO: 20742 - DNA, 867 bp, Homo sapiens
  SIMILAR (13)..(831): 951254mologous to Homo sapiens calmodulin-dependent protein kinase II alpha,accession number AF091486,Smith-Waterman Score= 1384.
gagcgcacgttccgaattgccgggtcgacgatgtcctagctggcagactttggcctggccatagaggtggagggggagcatcaggcatggtttgggtttgcagggactcctggatatctctccccagaagtgctgcggaaggacccgtacgggaagcctgtggacctgtgggcttgtggggtcatcctgtacatcctgctggttgggtaccccccgttctgggatgaggaccagcaccgcctgtaccagcagatcaaagccggcgcctatgatttcccatcgccggaatgggacactgtcaccccggaagccaaggatctgatcaataagatgctgaccattaacccatccaaacgcatcacagctgccgaagcccttaagcacccctggatctcgcaccgctccaccgtggcatcctgcatgcacagacaggagaccgtggactgcctgaagaagttcaatgccaggaggaaactgaagggagccattctcaccacgatgctggccaccaggaacttctccggagggaagagtgggggaaacaagaagagcgatggtgtgaaggaatcctcagagagcaccaacaccaccatcgaggatgaagacaccaaagtgcggaaacaggaaattataaaagtgacagagcagctgattgaagccataagcaatggagattttgagtcctacacgaagatgtgcgaccctggcatgacagccttcgaacctgaggccctggggaacctggttgagggcctggacttccatcgattctattttgaaaacctgtggtcccggaacagcaagaacgtgcacaccacgtgtatgcggccgctctgaggatcagacttcgtcgggtcttcgaagaat

SEQ ID NO: 20743 - DNA, 990 bp, Homo sapiens
  SIMILAR (493)..(930): 561254mologous to Homo sapiens platelet-derived growth factor receptor,accession number M21616,Smith-Waterman Score=382.
atgggcaggctgggccatgcggtaaccccgtttgatggcattgtagaactgctcgttcatgggcagctctggggggttgaaggttctctggtcctctttccaggggtcatcctgtacatcctgctggttgggtaccccccgttctgggatgaggaccagcaccgcctgtaccagcagatcaaagccggcgcctatgatgggtttttgggtgctgactgggggcctccaaagcacagcacagtcaatggggagtggggagaagctgggaagagcgggagaggggaattgggagaagtgcaggggctgcagctatctttagagcacagtggcgagactcctcaaagggagtattacagtgaggcggatgccagtcactgtatccagcagatcctggaggctgtgctgcactgccaccagatgggggtggtgcaccgggacctgaagcccacatgctttgtgccaggatgggtgagctgcagttatactgtcatgactggctacggtaagactcggaccaaggacaagtaccgcgtggtctacaccgaccaccaacgcctggagctggagaaggagtttcattacagccgttacatcacaatccggcggaaatcagagctggctgccaatctggggctcactgaacggcaggagcagtgcgaggactctggtctccaggctgccaggcagagtacagagctcagtagaaggaaaacagagaggtgtccacgtgagctgccgcccacgctgctggggaacagttccgaagaggagagccagctggagactaacgtgacgtactgggaggaggagcaggagtttgaggtggtgagcacactgcgtctgcagcacgtggatcggccactgtcggtgcgctgcacgctgcgcaacgctgtgggccaggacacgcaggaggtcatcgtggtgccacactgtgagtccccagcctcagtggcccctgacgatcccaatccctaccttaatcctgcctaa

SEQ ID NO: 20744 - DNA, 5602 bp, Homo sapiens
  SIMILAR (357)..(3308): 851254mologous to Mus musculus PDGF receptor precursor,accession number X04367,Smith-Waterman Score=4478.
ggcccctcagccctgctgcccagcacgagcctgtgctcgccctgcccaacgcagacagccagacccagggcggcccctctggcggctctgctcctcccgaaggatgcttggggagtgaggcgaagctgggcgctcctctcccctacagcagcccccttcctccatccctctgttctcctgagccttcaggagcctgcaccagtcctgcctgtccttctactcagctgttacccactctgggaccagcagtctttctgataactgggagagggcagtaaggaggacttcctggagggggtgactgtccagagcctggaactgtgcccacaccagaagccatcagcagcaaggacaccatgcggcttccgggtgcgatgccagctctggccctcaaaggcgagctgctgttgctgtctctcctgttacttctggaaccacagatctctcagggcctggtcgtcacacccccggggccagagcttgtcctcaatgtctccagcaccttcgttctgacctgctcgggttcagctccggtggtgtgggaacggatgtcccaggagcccccacaggaaatggccaaggcccaggatggcaccttctccagcgtgctcacactgaccaacctcactgggctagacacgggagaatacttttgcacccacaatgactcccgtggactggagaccgatgagcggaaacggctctacatctttgtgccagatcccaccgtgggcttcctccctaatgatgccgaggaactattcatctttctcacggaaataactgagatcaccattccatgccgagtaacagacccacagctggtggtgacactgcacgagaagaaaggggacgttgcactgcctgtcccctatgatcaccaacgtggcttttctggtatctttgaggacagaagctacatctgcaaaaccaccattggggacagggaggtggattctgatgcctactatgtctacagactccaggtgtcatccatcaacgtctctgtgaacgcagtgcagactgtggtccgccagggtgagaacatcaccctcatgtgcattgtgatcgggaatgaggtggtcaacttcgagtggacatacccccgcaaagaaagtgggcggctggtggagccggtgactgacttcctcttggatatgccttaccacatccgctccatcctgcacatccccagtgccgagttagaagactcggggacctacacctgcaatgtgacggagagtgtgaatgaccatcaggatgaaaaggccatcaacatcaccgtggttgagagcggctacgtgcggctcctgggagaggtgggcacactacaatttgctgagctgcatcggagccggacactgcaggtagtgttcgaggcctacccaccgcccactgtcctgtggttcaaagacaaccgcaccctgggcgactccagcgctggcgaaatcgccctgtccacgcgcaacgtgtcggagacccggtatgtgtcagagctgacactggttcgcgtgaaggtggcagaggctggccactacaccatgcgggccttccatgaggatgctgaggtccagctctccttccagctacagatcaatgtccctgtccgagtgctggagctaagtgagagccaccctgacagtggggaacagacagtccgctgtcgtggccggggcatgccccagccgaacatcatctggtctgcctgcagagacctcaaaaggtgtccacgtgagctgccgcccacgctgctggggaacagttccgaagaggagagccagctggagactaacgtgacgtactgggaggaggagcaggagtttgaggtggtgagcacactgcgtctgcagcacgtggatcggccactgtcggtgcgctgcacgctgcgcaacgctgtgggccaggacacgcaggaggtcatcgtggtgccacactccttgccctttaaggtggtggtgatctcagccatcctggccctggtggtgctcaccatcatctcccttatcatcctcatcatgctttggcagaagaagccacgttacgagatccgatggaaggtgattgagtctgtgagctctgacggccatgagtacatctacgtggaccccatgcagctgccctatgactccacgtgggagctgccgcgggaccagcttgtgctgggacgcaccctcggctctggggcctttgggcaggtggtggaggccacggctcatggcctgagccattctcaggccacgatgaaagtggccgtcaagatgcttaaatccacagcccgcagcagtgagaagcaagcccttatgtcggagctgaagatcatgagtcaccttgggccccacctgaacgtggtcaacctgttgggggcctgcaccaaaggaggacccatctatatcatcactgagtactgccgctacggagacctggtggactacctgcaccgcaacaaacacaccttcctgcagcaccactccgacaagcgccgcccgcccagcgcggagctctacagcaatgctctgcccgttgggctccccctgcccagccatgtgtccttgaccggggagagcgacggtggctacatggacatgagcaaggacgagtcggtggactatgtgcccatgctggacatgaaaggagacgtcaaatatgcagacatcgagtcctccaactacatggccccttacgataactacgttccctctgcccctgagaggacctgccgagcaactttgatcaacgagtctccagtgctaagctacatggacctcgtgggcttcagctaccaggtggccaatggcatggagtttctggcctccaagaactgcgtccacagagacctggcggctaggaacgtgctcatctgtgaaggcaagctggtcaagatctgtgactttggcctggctcgagacatcatgcgggactcgaattacatctccaaaggcagcacctttttgcctttaaagtggatggctccggagagcatcttcaacagcctctacaccaccctgagcgacgtgtggtccttcgggatcctgctctgggagatcttcaccttgggtggcaccccttacccagagctgcccatgaacgagcagttctacaatgccatcaaacggggttaccgcatggcccagcctgcccatgcctccgacgagatctatgagatcatgcagaagtgctgggaagagaagtttgagattcggccccccttctcccagctggtgctgcttctcgagagactgttgggcgaaggttacaaaaagaagtaccagcaggtggatgaggagtttctgaggagtgaccaccccagccatccttcggtcccaggcccgcttgcctgggttccatggcctccgatctcccctggacaccagctccgtcctctatactgccgtgcagcccaatgagggtgacaacgactatatcatccccctgcctgaccccaaacctgaggttgctgacgagggcccactggagggttcccccagcctagccagctccaccctgaatgaagtcaacacctcctcaaccatctcctgtgacagccccctggagccccaggacgaaccagagccagagccccagcttgagctccaggtggagccggagccggagctggaacagttgccggattcggggtgccctgcgcctcgggcggaagcagaggatagcttcctgtagggggctggcccctaccctgccctgcctgaagctcccccgctgccagcacccagcatctcctggcctggcctggccgggcttcctgtcagccaggctgcccttatcagctgtccccttctggaagctttctgctcctgacgtgttgtgccccaaaccctggggctggcttaggaggcaagaaaactgcaggggccgtgaccagccctctgcctccagggaggccaactgactctgagccagggttcccccagggaactcagttttcccatatgtaagatgggaaagttaggcttgatgacccagaatctaggattctctccctggctgacaggtggggagaccgaatccctccctgggaagattcttggagttactgaggtggtaaattaacttttttctgttcagccagctacccctcaaggaatcatagctctctcctcgcactttttatccacccaggagctagggaagagaccctagcctccctggctgctggctgagctagggcctagccttgagcagtgttgcctcatccagaagaaagccagtctcctccctatgatgccagtccctgcgttccctggcccgagctggtctggggccattaggcagcctaattaatgctggaggctgagccaagtacaggacacccccagcctgcagcccttgcccagggcacttggagcacacgcagccatagcaagtgcctgtgtccctgtccttcaggcccatcagtcctggggctttttctttatcaccctcagtcttaatccatccaccagagtctagaaggccagacgggccccgcatctgtgatgagaatgtaaatgtgccagtgtggagtggccacgtgtgtgtgccagtatatggccctggctctgcattggacctgctatgaggctttggaggaatccctcaccctctctgggcctcagtttccccttcaaaaaatgaataagtcggacttattaactctgagtgccttgccagcactaacattctagagtattccaggtggttgcacatttgtccagatgaagcaaggccatataccctaaacttccatcctgggggtcagctgggctcctgggagattccagatcacacatcacactctggggactcaggaaccatgccccttccccaggcccccagcaagtctcaagaacacagctgcacaggccttgacttagagtgacagccggtgtcctggaaagccccaagcagctgccccagggacatgggaagaccacgggacctctttcactacccacgatgacctccgggggtatcctgggcaaaagggacaaagagggcaaatgagatcacctcctgcagcccaccactccagcacctgtgccgaggtctgcgtcgaagacagaatggacagtgaggacagttatgtcttgtaaaagacaagaagcttcagatgggtaccccaagaaggatgtgagaggtgggcgctttggaggtttgcccctcacccaccagctgccccatccctgaggcagcgctccatgggggtatggttttgtcactgcccagacctagcagtgacatctcattgtccccagcccagtgggcattggaggtgccaggggagtcagggttgtagccaagacgcccccgcacggggagggttgggaagggggtgcaggaagctcaacccctctgggcaccaaccctgcattgcaggttggcaccttacttccctgggatccccagagttggtccaaggagggagagtgggttctcaatacggtaccaaagatataatcacctaggtttacaaatatttttaggactcacgttaactcacatttatacagcagaaatgctattttgtatgctgttaagtttttctatctgtgtacttttttttaagggaaagattttaatattaaacctggtgcttctcactcac

SEQ ID NO: 20745 - DNA, 1017 bp, Homo sapiens
  SIMILAR (272)..(322): 761254mologous to Apis mellifera calmodulin kinase II,accession number AB013287,Smith-Waterman Score=77.
atggggaatgggagtgggggtggtggcgatgcgcaggcgggacggaaagcagagctgagcatccagcacaggaagaccccagaggagctttggctgctgtcagggctggaaggttccttggagggtgcacttcctgatcctcaagcatcttccttcaaaattgtaatcttcccaaagacgtgcaaagaggacagatgtgggctcaaaacccgaaagtccgactacatgacagcattcagaggagggacaccactacctgatcttcgaccttcactgtatccagcagatcctggaggctgtgctgcactgccaccagagggggtggtgcaccgggacctgaaggccaggggagaagaaaaaccagactctaggccgtgcagttctcctttcttttacctgaaggagattgcagagtctaggactgcaccagctgcacagccttgctccttcagcagggacttcatggatctccctgctgatcctcatggtatcagtggctgggtttgcagggactccggatatctctccccagaagtgctgcggaaggacccgtacgggaagcctgggacctgtgggcttgtgggggttgaaggttctctggtcctcttccaggggtcatcctgtacatcctgctggttggttcccatcgccgaatgggacactgtcaccccggaagccaaggatctgatcaataagatgcgaccattaacccatccaaacgcatcacagctgccgaagcccttaagcaccctggatctcgccctctcccctacttcctccagcaccgctccacgtggcatcctgcatgcacagacaggagaccgtggactgcctgaagaagtcaatgccaggaggaaactgaagggcgcaccacggcccgccggctcggatgctgcgagggagttcagcgccccccggggacgtccagtgtctggtccgggactggctgccggacggctgggccgggatctctcggccgcagcggggcgctctggggagttcccaactgaatcttag

SEQ ID NO: 20746 - DNA, 1908 bp, Homo sapiens
  SIMILAR (633)..(821): 411254mologous to Ascaris suum putative cuticular collagen,accession number AJ249373,Smith-Waterman Score=88.
atggccaaagttgtgaagttggtaatgatcatggcctatttccaggaaaagctttctgcagctttgcttattactgagaatgggcgatggcgtgcagataaaacccaatctcctccaaccatcgcgcaaaacgccgacccaacttcatccagatctaagctccgggagattccatcaggcttggaagacatgacaagcgtctccagcatgaaaatcccccaggggcatcccaccagcttatctggtcacacttgggatgtgagggcctggatgattgtccatcagggcctcacccggctcttttcacactggcgccagatgtttgggaagttttcaggaaattgtggaaaaccagacctcaggctggtcaccttccagcaagaccaaggtcaagttatcaatcttgattatagatgccctggaccggggtgtctggagcctccaccgccgcagagagatgtctggagacaaagcctctacggggaaggattgctggcaagcaggttgctgcaaggtaatacccaggacttcctgaaggggggatatcgaggctcccttttggacagctcagggcccgccatggagcgcgcggcgggtgcgctcggagatgccttctcgggccgggttctcgaaagcagagccccgggggcccgttgggaccgtggcatgccgggcggtggtccgcgcgcggagatcccggcgccgcggggggaccgtgccggggctccccggcccgcgcccgagtcgccgccgtgcccaaggggcgagtgcctgcctgccaccccccgcccggaggagcggcgcacccttagggtccgccccgcacgtgccagctcggcgcccgcggcgccgggacagccccgggactctgccagacctctttatactgagattgggttgccacctgggggtaaagaggctgatcggtctttgcagagagaaatccaggttggagacgtcagcgggtccagccaagtgggagacaagttcaggtttctgctccatgggatccaggagcctgcagtcaccgatgagcctggaggaccacaaggtggccagggcccttggagagctgtgctgcggaatcgtaaagctaccatccggagctggccgtcccagagggaaggcttggtcatctcttcccctccacctgccctggtcccgcagtttgtcatcccgcagtttgtcagcatcgatgtgggactgggagaggaaggatattgccagttatggttgaatgtcattgtcaggggacccctgggttacccaaagaaatatacttctggcctgctggttggtcagagaatgcaggacacattggggtatcgcgaggtgtccaatggcagcgggttgggactgccacttctgggcgcgtcggagcggctgcacagggggtcagctggctgtcctgtggcctgctccggtgcctctggtccccatcttaccaggagcagcgccatggccatgcagggaggggccggagagggagccacaagaggcacaggtgttaggtctgccccagccacaacacctcagcacgtggtgtgtggcttcaaccaggtcaccgtgggcacactgggaggggagggcttctgtgcggccacgcttaataaacagtctgcctgggaaactgagcatccaaagtgccctctgaaggagcgggatgctgctgcccgtggtggctccgtcacacgcattctggaaggacgtttctgcgaggtggtgggcggtatcatcctggtttttcagggagaagtcaagtcactggcccaggtcctcaagctggccagtgtggcccggtctgaccccgaggttctgcccgggtttctgtccctccagcctggcatcgtgaactcaggggaaacagatggggaatctgttgttgtaacaaagattctaaggatttga

SEQ ID NO: 20747 - DNA, 9450 bp, Homo sapiens
  SIMILAR (67)..(7002): 971254mologous to Homo sapiens Trio,accession number U42390,Smith-Waterman Score=11674.
gaggcggccaaggacctggccgacatcgcggccttcttccgatccgggtttcgaaaaaacgatgaaatgaaagctatggatgttttaccaattttgaaggaaaaagttgcatacctttcaggtgggagagataaacgtggaggtcccattttaacgtttccggcccgcagcaatcatgacagaatacgacaggaggatctcaggagactcatttcctatctagcctgtattcccagcgaggaggtctgcaagcgtggcttcacggtgatcgtggacatgcgtgggtccaagtgggactccatcaagccccttctgaagatcctgcaggagtccttcccctgctgcatccatgtggccctgatcatcaagccagacaacttctggcagaaacagaggactaattttggcagttctaaatttgaatttgagacaaatatggtctctttagaaggccttaccaaagtagttgatccttctcagctaactcctgagtttgatggctgcctggaatacaaccacgaagaatggattgaaatcagagttgcttttgaagactacattagcaatgccacccacatgctgtctcggctggaggaacttcaggacatcctagctaagaaggagctgcctcaggatttagagggggctcggaatatgatcgaggaacattctcagctgaagaagaaggtgattaaggcccccatcgaggacctggatttggagggacagaagctgcttcagaggatacagagcagtgaaagctttcccaaaaagaactcaggctcaggcaatgcggacctgcagaacctcttgcccaaggtgtccaccatgctggaccggctgcactcgacacggcagcatctgcaccagatgtggcatgtgaggaagctgaagctggaccagtgcttccagctgaggctgtttgaacaggatgctgagaagatgtttgactggatcacacacaacaaaggcctgtttctaaacagctacacagagattgggaccagccaccctcatgccatggagcttcagacgcagcacaatcactttgccatgaactgtatgaacgtgtatgtaaatataaaccgcatcatgtcggtggccaatcgtctggtggagtctggccactatgcctcgcagcagatcaggcagatcgcgagtcagctggagcaggagtggaaggcgtttgcggcagccctggatgagcggagcaccttgctggacatgtcctccattttccaccagaaggccgaaaagtatatgagcaacgtggattcatggtgtaaagcttgcggtgaggtagaccttccctcagagctgcaggacctagaagatgccattcatcaccaccagggaatatatgaacatatcactcttgcttattctgaggtcagccaagatgggaagtcgctccttgacaagctccagcggcccttgactcccggcagctccgattccctgacagcctctgccaactactccaaggccgtgcaccatgtcctggatgtcatccacgaggtgctgcaccaccagcggcacgtgagaacaatctggcaacaccgcaaggtccggctgcatcagaggctgcagctgtgtgttttccagcaggaagttcagcaggtgctagactggatcgagaaccacggagaagcatttctgagcaaacatacaggtgtggggaaatctcttcatcgggccagagcattgcagaaacgtcatgaagattttgaagaagtggcacagaacacatacaccaatgcggataaattactggaagcagcagaacagctggctcagactggggaatgtgaccccgaagagatttatcaggctgcccatcagctggaagaccggattcaagatttcgttcggcgtgttgagcagcgaaagatcctactggacatgtcagtgtcctttcacacccatgtgaaagagctgtggacgtggctggaggagctgcagaaggagctgctggacgacgtgtatgccgagtcggtggaggccgtgcaggacctcatcaagcgctttggccagcagcagcagaccaccctgcaggtgactgtcaacgtgatcaaggaaggggaggacctcatccagcagctcagggactctgccatctccagtaacaagaccccccacaacagctccatcaaccacattgagacggtgctgcagcagctggacgaggcgcagtcgcagatggaggagctcttccaggagcgcaagatcaagctggagctcttcctgcacgtgcgcatcttcgagagggacgccatcgacattatctcagacctcgagtcttggaatgatgagctttctcagcaaatgaatgacttcgacacagaagatctcacgattgcagagcagcgcctccagcaccatgcagacaaagccttgaccatgaacaacttgacttttgacgtcatccaccaagggcaagatcttctgcagtatgtcaatgaggtccaggcctctggtgtggagctgctgtgtgatagagatgtagacatggcaactcgggtccaggacctgctggagtttcttcatgaaaaacagcaggaattggatttagccgcagagcagcatcggaaacacctggagcagtgcgtgcagctgcgccacctgcaggcagaagtgaaacaggtgctgggttggatccgcaacggagagtccatgttaaatgccggacttatcacagccagctcgttacaagaggcagagcagctccagcgagagcacgagcagttccagcatgccattgagaaaacacatcagagcgcgctgcaggtgcagcagaaggcagaagccatgctacaggccaaccactacgacatggacatgatccgggactgcgccgagaaggtggcgtctcactggcaacagctcatgctcaagatggaagatcgcctcaagctcgtcaacgcctctgtcgctttctacaaaacctcagagcaggtctgcagcgtcctcgagagcctggaacaggagtacaagagagaagaagactggtgtggcggggcggataagctgggcccaaactctgagacggaccacgtgacgcccatgatcagcaagcacctggagcagaaggaggcattcctgaaggcttgcacccttgctcggaggaatgcagacgtcttcctgaaatacctgcacaggaacagcgtgaacatgccaggaatggtgacgcacatcaaagctcctgaacagcaagtgaaaaatatcttgaatgaactcttccaacgggagaacagggtattgcattactggaccatgaggaagagacggctggaccagtgtcagcagtacgtggtctttgagaggagtgccaagcaggctttggaatggatccatgacaatggcgagttctacctttccacacacacctccacgggctccagtatacagcacacccaggagctcctgaaagagcacgaggagttccagataactgcaaagcaaaccaaagagagagtgaagctattgatacagctggctgatggcttttgtgaaaaagggcatgcccatgcggcagagataaaaaaatgtgttactgctgtggataagaggtacagagatttctctctgcggatggagaagtacaggacctctttggaaaaagccctggggatttcttcagattccaacaaatcgagtaaaagtctccagctagatatcattccagccagtatccctggctcagaggtgaaacttcgagatgctgctcatgaacttaatgaagagaagcggaaatctgcccgcaggaaagagttcataatggctgagctcattcaaactgaaaaggcttatgtaagagacctccgggaatgtatggatacgtacctgtgggaaatgaccagtggcgtggaagagattccacctggcattgtaaacaaagaactcatcatcttcggaaacatgcaagaaatctacgaatttcataataacatattcctaaaggagctggaaaaatatgaacagttgccagaggatgttggacattgttttgttacttgggcagacaagtttcagatgtatgtcacatattgcaaaaataagcctgattctactcagctgatattggaacatgcagggtcctattttgacgagatacagcagcgacatggattagccaattccatttcttcctaccttattaaaccagttcagcgaataacgaaatatcagctccttttaaaagagctgctgacgtgctgtgaggaaggaaagggagagattaaagatggcctggaggtgatgctcagcgtgccgaagcgagccaatgacgccatgcacctcagcatgctggaagggtttgatgaaaacattgagtctcagggagaactcatcctacaggaatccttccaagtgtgggacccaaaaaccttaattcgaaagggtcgagaacggcatctcttcctttttgaaatgtccttagtatttagtaaagaagtgaaagattccagtgggagaagcaagtacctttataaaagcaaattgtttacctcagagttgggtgtcacagaacatgttgaaggagacccttgcaaatttgcactgtgggtggggagaacaccaacttcagataataaaattgtccttaaggcttccagcatagagaacaagcaggactggataaagcatatccgcgaagtcatccaggagcggacgatccacctgaagggagccctgaaggagcccattcacatccctaagaccgctcccgccacaagacagaagggaaggagggatggagaggatctggacagccaaggagacggcagcagccagcctgatacgatttccatcgcctcacggacgtctcagaacacgctggacagcgataagctctctggtggctgtgagctgacagtggtgatccatgacttcaccgcttgcaacagcaacgagctgaccatccgacggggccagaccgtggaagttctggagcggccgcatgacaagcctgactggtgtctggtgcggaccactgaccgctccccagcggcagaaggcctggtcccctgtggttcactgtgcatcgcccactccagaagtagcatggaaatggagggcatcttcaaccacaaagactcgctctccgtctccagcaatgacgccagtccacccgcatccgtggcttccctccagccccacatgatcggggcccagagctcgccgggccccaagcggccgggcaacaccctgcgcaagtggctcaccagccccgtgcggcggctcagcagcggcaaggccgacgggcacgtgaagaagctggcgcacaagcacaagaagagccgcgaggtccgcaagagcgccgacgccggctcgcagaaggactccgacgacagtgcggccaccccgcaggacgagacggtcgaggagagaggccggaacgagggcctgagcagcggtactctctccaaatcctcctcctcggggatgcagagctgtggagaagaggaaggcgaggagggggccgacgccgtgcccctgccgccacccatggccatccagcagcacagcctcctccagccagactcacaggatgacaaggcctcttctcggttattagtccgccccaccagctccgaaacaccgagtgcagccgagctcgtcagtgcaattgaggaactcgtgaaaagcaagatggcactggaggatcgccccagctcactccttgttgaccagggagatagtagcagcccttccttcaacccttcggataattcccttctctcttcctcctcgcccattgatgagatggaagaaaggaaatccagctctttaaagagaagacactacgttttgcaagaactagtggagacagagcgtgactatgtgcgggaccttggctatgtggttgagggctacatggcacttatgaaagaagatggtgttcctgatgacatgaaaggaaaagacaaaattgtgttcggcaacatccatcagatttacgactggcacagagacttttttttaggagagttagagaagtgccttgaagatccagaaaaactaggatccctttttgttaaacacgagagaaggttgcacatgtacatagcttattgtcaaaataaaccaaagtctgagcacattgtctcagaatacattgataccttttttgaggacttaaagcagcgtcttggccacaggttacagctcacagatctgttgatcaaaccagtgcagagaatcatgaagtatcagctgttactgaaggacttcctcaagtattccaaaaaggccagcctggatacatcagaattagagagagctgtggaagtcatgtgcatagtacccaggcggtgcaacgacatgatgaacgtggggcggctgcaaggattcgacgggaaaatcgttgcccagggtaaactgctcttgcaggacacattcttggtcacagaccaagatgcaggacttctgcctcgctgcagagagaggcgcatcttcctctttgagcagatcgtcatattcagcgaaccacttgataaaaagaagggcttctccatgccgggattcctgtttaagaacagtatcaaggtgagttgcctttgcctggaggaaaatgtggaaaatgatccctgtaaatttgctctgacatcgaggacgggtgacgtggtagagaccttcattttgcattcatctagtccaagtgtccggcaaacttggatccatgaaatcaaccaaattttagaaaaccagcgcaattttttaaatgccttgacatcgccaatcgagtaccagaggaaccacagcgggggcggcggcggcggcggcagcgggggcagcggcgggggtgggggcagcggcggcggcggggcccccagtggcggcagcggccacagtggcggccccagcagctgcggcggcgcccccagcacgagcaggagccggccctcccggatcccccagcctgtccgacaccacccccccgtgctggtctcctctgcagcctcgagccaggcagaggcagacaagatgtcaggtacgtccacccccgggccctccctgcctccccctggcgcggcccccgaggccggccccagcgcgcccagcaggcggccccccggcgcggacgccgaggggtccgagcgagaagcggagccgatccccaagatgaaggtgctggagagccccaggaaaggcgccgcgaacgcctcggggtcgagcccagacgcccccgccaaggacgcgcgcgctagcctgggcaccctgccgcttgggaagccccgggccggggccgcttcgccgctgaactcgccgctctccagcgcggtcccttctctcggcaaggagcccttcccccccagcagccccctgcagaaggggggctccttctggagctccatccccgcctcccccgccagccgacccggctccttcaccttcccgggggacagcgactccctccagcggcagacaccccgccacgcggcccctggcaaggatactgaccgcatgagcaacgtgctcctcggccagcgagcagtccgtgcagtccacccagagcaacgggagtgaaagcagcagcagtagcaacatctccaccatgttggtgacacacgattacacggcagtgaaggaggatgagatcaacgtctaccaaggagaggtcgttcaaattctggccagcaaccagcagaacatgtttctggtgttccgagccgccactgaccagtgccccgcagctgagggctggattccaggctttgtcctgggccacaccagtgcagtcatcgtggagaacccggacgggactctcaagaagtcaacatcttggcacacagcactccgtttaaggaaaaaatctgagaaaaaagataaagacggcaaaagggaaggcaagttagagaacggttatcggaagtcacgggaaggactcagcaacaaggtatctgtgaagcttctcaatcccaactacatttatgacgttcccccagaattcgtcattccattgagtgaggtcacgtgtgagacaggggagaccgttgttcttagatgtcgagtctgtggccgccccaaagcctcaattacctggaagggccctgaacacaacaccttgaacaacgatggtcactacagcatctcctacagtgacctgggagaggccacgctgaagattgtgggcgtgaccacggaagatgacggcatctacacgtgcatcgctgtcaatgacatgggttcagcctcatcatcggccagcctgagggtcctaggtccagggatggatgggatcatggtgacctggaaagacaactttgactccttctacagtgaagtggctgagcttggcaggggcagattctctgtcgttaagaaatgtgatcagaaaggaaccaagcgagcagtggccactaagtttgtgaacaagaagttgatgaagcgcgaccaggtcacccatgagcttggcatcctgcagagcctccagcaccccctgcttgtcggcctcctcgacacctttgagacccccaccagctacatcctggtcttagaaatggctgaccagggtcgcctcctggactgcgtggtgcgatggggaagcctcactgaagggaagatcagggcgcacctgggggaggttctggaagctgtccggtacctgcacaactgcaggatagcacacctggacctaaagcctgagaatatcctggtggatgagagtttagccaagccaaccatcaaactggctgactttggagatgctgttcagctcaacacgacctactacatccaccagttactggggaaccctgaattcgcagcccctgaaatcatcctcgggaaccctgtctccctgacctcggatacgtggagtgttggagtgctcacatacgtacttcttagtggcgtgtcccccttcctggatgacagtgtggaagagacctgcctgaacatttgccgcttagactttagcttcccagatgactactttaaaggagtgagccagaaggccaaggagttcgtgtgcttcctcctgcaggaggaccccgccaagcgtccctcggctgcgctggccctccaggagcagtggctgcaggccggcaacggcagaagcacgggcgtcctcgacacgtccagactgacttccttcattgagcggcgcaaacaccagaatgatgttcgacctatccgtagcattaaaaactttctgcagagcaggcttctgcctagagtttgacctatccagaagttctttctcattctctttcacctgccaatcagctgttaatctgaattttcaagagaaaacaagcaaacataactgatcagctgccggtatgttcatcgtgtgaaattgcattccaagtgagctgtgctcagcagtgcttggacacagagctgcaagctgcgctggggtggaggaccgtcacttacactctgccaaggacggaggtcgcattgctgtatcacagtattttttacggatttctgaaaaaaaaaaaa

SEQ ID NO: 20748 - DNA, 1209 bp, Homo sapiens
  SIMILAR (5)..(154): 241254mologous to Homo sapiens Trio,accession number U42390,Smith-Waterman Score=50.
atgagtcaaaaatgccgcaaagataatccacggcatacaagcagcaacaaccagcgaagagcaaaaagctcaaagcgtacagaaacaaacaaagaagaagaagagaaacagcaaaaaaggacacaggagcgggcagcaaagacagaccagagcgacacgaaaggaccacgaagaaaagaaaaacaaacagaccagcacggaagaaagagaagacaacacgacagcgaggaagaacgacgaagaggaacaaacgacgcgaaggcacgaagacgaaaggagaaccacagcagaagcacacgacggcgcaccggggcagaggcaagagagcaaaggggcagagcgcgagccaccgaagaaaggaaacgcaagggggacagaaacgaaacaaagcgagagcaaggagcagaagcaaaagagaaacgagagaaaaaaaaaagaacaaagacagcagcgcaaagaaagaacagacgagaagaccgcaagaaaaacaagaaagcaagacaagaggacattgtgtttgacctggggtctcacattaagtgtggaatgagtttagagaagactgaccaggaccacgaagagactccccaaagatatcatccaccacatctccactcgcatgagccgtgtggcaggtgcccggtggccacgcgcagctgctgtgagggacagtgcgtggcgatagccttcttacccaagaagctccacgggaaacaagctcaggcaggtgctgttcttcttgcaggtccaggcatggatgggatcatggtgacctggaaagacaactttgactccttctacagtgaagtggctgagcttggcaggtatgatgcacaacccagaacgccttccgaaagagcagagcgtggggaagacatacccaagagatgtgcgaaggactataaccgctgtatactcattaagctccaggtgtatgccacgctgcctgctggcagctgggacttcctcaagtattccaaaaaggccagcctggatacatcagaattagaggggaaaatcgttgcccagggtaaactgctcttgcaggacacattcttggtcacagaccaagatgcaggacttctgcctcgctgcagagagaggcgcatcttcctctttgagcagatcgtcatattcagcgaaccacttgataaaaagaagggcttctccatgccgggattcctgtttaagaacagtatcaagacatga

SEQ ID NO: 20749 - DNA, 777 bp, Homo sapiens
  SIMILAR (138)..(359): 1001254mologous to Homo sapiens Trio,accession number U42390,Smith-Waterman Score=376.
  misc_feature (1)...(777): n = a,t,c or g
agctctagttagtctagtgctttttttcctcgttacttttactgccaatgttgtagtctttctgacaattacaaagactaaaaaattgccctttaatgaacagcccatacgatcttttctctctcttaaaactgtaggacttaaagcagcgtcttggccacaggttacagctcacagatctgttgatcaaaccagtgcagagaatcatgaagtatcagctgttactgaaggacttcctcaagtattccaaaaaggccagcctggatacatcagaattagagagagctgtggaagtcatgtgcatagtacccaggcggtgcaacgacatgatgaacgtggggcggctgcaaggattcgacgtaatgcggctcttgttttttaagagagctcctctgccttcatctctttcttttgtcttggattatttctctccacatagagaaagctgatccttttcacttggttttctggcttctctcactttacctcaatctgattgatattttatttcctttttttttttttttttttttttggtgcgtttggtttgcttttttgggacttgcctgtgctcaaagcccagtgtctcatggcagaaacaagcaggaccggggctttgtctcctgggccccagtactggtaagagctgagtttcctttccctcagcactttaagaccatggttagctatggatgtagtaggacctcggaggtcccactctctcanctctgggacttgatacttcctcattangtttaagatatgtttgcatgagat

SEQ ID NO: 20750 - DNA, 1590 bp, Homo sapiens
  SIMILAR (277)..(663): 791254mologous to Homo sapiens Trio isoform,accession number AF091395,Smith-Waterman Score=491.
atgagtatttcattctctcgggtgaaacacagctgtctatgcttgtctgttgttgccgcggcttcggtcatctggttcgtcgtgcgtgccgagctaggatcgtctcgatgtgctgtggtggagtacccagatatggccgggaccaagggcccctacggcccgggacaaaaccaggagcgtaaacgccccaaccccccgcaagggcacaaatcgccccacaggaccccgaaacccgaactcaataaccgaacaaccgtgcacccaggattagcttacaactcgctctccgtctccagcaatgacgccagtccacccgcatccgtggcttccctccagccccacatgatcggggcccagagctcgccgggccccaagcgggcgggcaacaccctgcgcaagtggctcaccagccccgtgcggcggctcagcagcggcaaggccgacgggcacgtgaagaagctggcgcacaagcacaagaagagccgcgaggtccgcaagagcgccgacgccggctcgcagaaggactccgacgacagtgcggccaccccgcaggacgagacggtcgaggagctaaaatcctttgggggagacagcgtggagaatttgcaatgcaagacagatgttcaccggaactctcctgctgttgagcagggcatccgtgggtggccctgtctcatcggaaacgccctggctgtcaatcggcagcagacccacatgtgtgcatgtttggctgacgttatgtggcatgagggctgccagtcacagcagaggcttggtgaccttgtgggttttgtgaccctggctgtccaaggaggcccgcacttcacagccccagctcttcttcccactctgggcctggggcgcttgtccttagattcgtcgtctcgccgctctgcttcatcctgctttcttcctcagccttctgcagctttttcctacacatcagtcacatgtggtaagtttctcaagactgtgagcaaagtcccggtgtgccgccgtggcctggccgtgaacaggaaagaggctgagggccgctcctccgagagccccaccagctctgccactttccagtcgccggctttgtcctggatgctggtctcccagaggctgctgctgccccacatgatcggggcccagagctcgccgggccccaagcggccgggcaacaccctgcgcaagtggctcaccagccccgtgcggcggctcagcagcggcaaggccgacgggcacgtgaagaagctggcgcacaagcacaagaagagccgcgaggtccgcaagagcgccgacgccggctcgcagaaggactccgacgacagtgcggccaccccgcaggacgagacggtcgaggaggataccgtcgcgcagcccaggggccggcgagagggggccggacgccagagtggcagcagagcggcggggcccggcggacgccgagcgtcggccatccgcggcgggcacgcgcggacagatgtcgggaagcgaaacggaaccaggacgagaaaggagctcatgccgctccacgggaagcgcaaggacgcagcggaacatgacgaaccaacatcagccagtcgccccgcgggcgagcgcccg

SEQ ID NO: 20751 - DNA, 9041 bp, Homo sapiens
  SIMILAR (126)..(3167): 941254mologous to Homo sapiens Trio isoform,accession number AF091395,Smith-Waterman Score=4909.
gaggcggccaaggacctggccgacatcgcggccttcttccgatccgggtttcgaaaaaacgatgaaatgaaagctatggatgttttaccaattttgaagggaaaaagttgcatacctttcaggtgggcagagataaacgtggaggtcccattttaacgtttccggcccgcagcaatcatgacagaatacgacaggaggatctcaggagactcatttcctatctagcctgtattcccagcgaggaggtctgcaagcgtggcttcacggtgatcgtggacatgcgtgggtccaagtgggactccatcaagccccttctgaagatcctgcaggagtccttcccctgctgcatccatgtggccctgatcatcaagccagacaacttctggcagaaacagaggactaattttggcagttctaaatttgaatttgagacaaatatggtctctttagaaggccttaccaaagtagttgatccttctcagctaactcctgagtttgatggctgcctggaatacaaccacgaagaatggattgaaatcagagttgcttttgaagactacattagcaatgccacccacatgctgtctcggctggaggaacttcaggacatcctagctaagaaggagctgcctcaggatttagagggggctcggaatatgatcgaggaacattctcagctgaagaagaaggtgattaaggcccccatcgaggacctggatttggagggacagaagctgcttcagaggatacagagcagtgaaagctttcccaaaaagaactcaggctcaggcaatgcggacctgcagaacctcttgcccaaggtgtccaccatgctggaccggctgcactcgacacggcagcatctgcaccagatgtggcatgtgaggaagctgaagctggaccagtgcttccagctgaggctgtttgaacaggatgctgagaagatgtttgactggatcacacacaacaaaggcctgtttctaaacagctacacagagattgggaccagccaccctcatgccatggagcttcagacgcagcacaatcactttgccatgaactgtatgaacgtgtatgtaaatataaaccgcatcatgtcggtggccaatcgtctggtggagtctggccactatgcctcgcagcagatcaggcagatcgcgagtcagctggagcaggagtggaaggcgtttgcggcagccctggatgagcggagcaccttgctggacatgtcctccattttccaccagaaggccgaaaagtatatgagcaacgtggattcatggtgtaaagcttgcggtgaggtagaccttccctcagagctgcaggacctagaagatgccattcatcaccaccagggaatatatgaacatatcactcttgcttattctgaggtcagccaaagatgggaagtcgctccttgacaagctccagcgacccttgactcccggcagctccgattccctgacagcctctgccaactactccaaggccgtgcaccatgtccctggatgtcatccacgaggtgctgcaccaccagcggcagctggagaacatctggcaacaccgcaagtcccggcctgcatcagaggctgcagctgtgtgttttccagcaggacgttcagcaggtgctagactggatcgagaaccacggagaagcatttctgagcaaacatacaggtgtggggaaatctcttcatcgggccagagcattgcagaaacgtcatgaagattttgaagaagtggcacagaacacatacaccaatgcggataaattactggaagcagcagaacagctggctcagactggggaatgtgaccccgaagagatttatcaggctgcccatcagctggaagaccggattcaagatttcgttcggcgtgttgagcagcgaaagatcctactggacatgtcagtgtcctttcacacccatgtgaaagagctgtggacgtggctggaggagctgcagaaggagctgctggacgacgtgtatgccgagtcggtggaggccgtgcaggacctcatcaagcgctttggccagcagcagcagaccaccctgcaggtgactgtcaacgtgatcaaggaaggggaggacctcatccagcagctcagggactctgccatctccagtaacaagaccccccacaacagctccatcaaccacattgagacggtgctgcagcagctggacgaggcgcagtcgcagatggaggagctcttccaggagcgcaagatcaagctggagctcttcctgcacgtgcgcatcttcgagagggacgccatcgacattatctcagacctcgagtcttggaatgatgagctttctcagcaaatgaatgacttcgacacagaagatctcacgattgcagagcagcgcctccagcaccatgcagacaaagccttgaccatgaacaacttgacttttgacgtcatccaccaagggcaagatcttctgcagtatgtcaatgaggtccaggcctctggtgtggagctgctgtgtgatagagatgtagacatggcaactcgggtccaggacctgctggagtttcttcatgaaaaacagcaggaattggatttagccgcagagcagcatcggaaacacctggagcagtgcgtgcagctgcgccacctgcaggcagaagtgaaacaggtgctgggttggatccgcaacggagagtccatgttaaatgccggacttatcacagccagctcgttacaagaggcagagcagctccagcgagagcacgagcagttccagcatgccattgagaaaacacatcagagcgcgctgcaggtgcagcagaaggcagaagccatgctacaggccaaccactacgacatggacatgatccgggactgcgccgagaaggtggcgtctcactggcaacagctcatgctcaagatggaagatcgcctcaagctcgtcaacgcctctgtcgctttctacaaaacctcagagcaggtctgcagcgtcctcgagagcctggaacaggagtacaagagagaagaagactggtgtggcggggcggataagctgggcccaaactctgagacggaccacgtgacgcccatgatcagcaagcacctggagcagaaggaggcattcctgaaggcttgcacccttgctcggaggaatgcagacgtcttcctgaaatacctgcacaggaacaagcgtgaacatgccaggaatggtgacgcacatcaaagctcctgaacagcaagtgaaaaatatcttgaatgaactcttccaacgggagaacagggtattgcattactggaccatgaggaagagacggctggaccagtgtcagcagtacgtggtctttgagaggagtgccaagcaggctttggaatggatccatgacaatggcgagttctacctttccacacacacctccacgggctccagtatacagcacacccaggagctcctgaaagagcacgaggagttccagataactgcaaagcaaaccaaagagagagtgaagctattgatacagctggctgatggcttttgtgaaaaagggcatgcccatgcggcagagataaaaaaatgtgttactgctgtggataagaggtacagagatttctctctgcggatggagaagtacaggacctctttggaaaaagccctggggatttcttcagattccaacaaatcgagtaaaagtctccagctagatatcattccagccagtatccctggctcagaggtgaaacttcgagatgctgctcatgaacttaatgaagagaagcggaaatctgcccgcaggaaagagttcataatggctgagctcattcaaactgaaaaggcttatgtaagagacctccgggaatgtatggatacgtacctgtgggaaatgaccagtggcgtggaagagattccacctggcattgtaaacaaagaactcatcatcttcggaaacatgcaagaaatctacgaatttcataataacatattcctaaaggagctggaaaaatatgaacagttgccagaggatgttggacattgttttgttacttgggcagacaagtttcagatgtatgtcacatattgcaaaaataagcctgattctactcagctgatattggaacatgcagggtcctattttgacgagatacagcagcgacatggattagccaattccatttcttcctaccttattaaaccagttcgagcgaatagcgagtactcgcctcttttaaaaagagctcctgacgtgctgtgaggaaggaaagggagagattaaaagatggcctggaggtgatgctcagcgtgcagaagcgagccaaatgatgccatgcacctcagcatgctgaaagggttggatgaaaacattgaggtctcagggagaactcatcctaacagaaatccttccaaagtgtgggacccaaaaaaccttaattcggaaggggtcgggaccggcatctcttccctttttgaaatgtccttagtatttagtaaagaagtgaaagattccagtgggagaagcaagtacctttataaaagcaaatttgtttacctcaagagttggggtgtcacagaaccatgttgaaggagaccctttgcaaattttgcacttgtggctgggagaacaccaaccttcaagataaataaaattgtccttaaggcttccagcatagagaacaagcaggactggataaagcatatccgcgaagtcatccaggagcggacgatccacctgaagggagccctgaaggagcccattcacatccctaagaccgctcccgccacaagacagaagggaaggagggatggagaggatctggacagccaaggagacggcagcagccagcctgatacgatttccatcgcctcacggacgttctccagaaccccctggacaacgataagctctctggtggctgtaagctgaccaagtggtgatccatgacttcaccgcttgtaacagcaacgtagctgtaccatccgacggggccagaccgtggaagttctggagcggccgcatgacaagcctgactggtgtctggtgcggaccactgaccgctccccagcggcagaaggcctggtcccctgtggttcactgtgcatcgcccactccagaagtagcatggaaatggagggcatcttcaaccacaaagactcgctctccgtctccagcaatgacgccagtccacccgcatccgtggcttccctccagccccacatgatcggggcccagagctcgccgggccccaagcggcccgggcaacacccctgcgcaaagtggctcaccagccccgtgcggcggctcagcagcggcaaggccgacgggcacgtgaaaggaagctgggcgcacaagcacaagaagagccgcgaggtccgcaagagcgccgacgccggctcgcagaaggactccgacgacagtgcggccaccccgcagatcgagacggtcgaggagagaggccggaacgagggcctgagcagcggtactctctccaaatcctcctcctcggggatgcagagctgtggagaagaggaaggcgaggagggggccgacgccgtgcccctgccgccacccatggccatccagcagcacagcctcctccagccagactcacaggatgacaaggcctcttctcggttattagtccgccccaccagctccgaaacaccgagtgcagccgagctcgtcagtgcaattgaggaactcgtgaaaagcaagatggcactggaggatcgccccagctcactccttgttgaccagggagatagtagcagcccttccttcaacccttcggataattcccttctctcttcctcctcgcccattgatgagatggaagcaaaggaaatccagctctttaaagagaagcacactacgttttgcaagaactagtggagacagagcgtgactatgtgcgggaccttggctatgtggttgagggctacatggcacttatgaaagaagatggtgttcctgatgacatgaaaggaaaagacaaaattgtgttcggcaacatccatcagatttacgactggcacagagacttttttttaggagagttagagaagtgccttgaagatccagaaaaactaggatccctttttgttaaacacgagagaaggttgcacatgtacatagcttattgtcaaaataaaccaaagtctgagcacatttgtctcagaaatacattgatcccttttttaaggacttaaagcaggcttcttggccacaggttacagctcacagatctggtgttcaaaccagtgcagagaatcatgaagtatcagctgttactgaaggacttcctcaagtattccaaaaaggccagcctggatacatcagaattagagagagctgtggaagtcatgtgcatagtacccaggcggtgcaacgacatgatgaacgtggggcggctgcaaggattcgacgggaaaatcgttgcccagggtaaactgctcttgcaggacacattcttggtcacagaccaagatgcaggacttctgcctcgctgcagagagaggcgcatcttcctctttgagcagatcgtcatattcagcgaaccgcttgataaaaggaagggcttctccatgccgggattcctgtttaagagcagtatcaaggtgagttgcctttgcctggaggaaaatgtggaaaatgatccctgtaaatttgctctgacatcgaggacgggtgacgtggtagagaccttcattatgcattcatctagtccgagtgtccggcaaacttggatccatgaaatcaaccaaattttagaaaaccagcgcaattttttaaatgccttgacatcgccaatcgagtaccagaggaaccacagcgggggcggcggcggcggcggcagcggggcagcggcgggggtgggggcagcggcggcggcggggcccccagtggcggcagcggccacagtggcggccccagcagctgcggcggcgcccccagcacgagcaggagccggccctcccggatcccccagcctgtccgacaccacccccccgtgctggtctcctctgcagcctcgagccaggcagaggcagacaagatgtcagagtgaaagcagcagcagtagcaacatctccaccatgttggtgacacacgattacacggcagtgaaggaggatgagatccaacgtcctaccaaggagaggtcgttcaaattctggccagcaaccagcagaacatgtttctggtgttccgagccgccactgaccagtgccccgcagctgagggctggattccagagctttgttctgggccacaccagagcagccatcggggagaacccggacgggactctcaagaaggcaacatcttggcacacagcactccgtttaaggaaaaaatctgagaaaaaagataaagactgcaaaagggaaagcaagttatagaacgggtatcggaagtcacgggaaggactcagcaacaaggtatctgtgaagcttctcaatcccaactacatttatgacgttcccccagaattcgtcattccattgagtgaggtcacgtgtgagacaggggagaccgttgttcttagatgtcgagtctgtggccgccccaaagcctcaattacctggaagggccctgaacacaacaccttgaacaacgatggtcactacagcatctcctacagtgacctgggagaggccacgctgaagattgtgggcgtgaccacggaagatgacggcatctacacgtgcatcgctgtcaatgacatgggttcagcctcatcatcggccagcctgagggtcctaggtccagggatggatgggatcatggtgacctggaaagacaactttgactccttctacagtgaagtggctgagcttggcaggggcaagattctctgttcgtttaagaaatgtgattcagaaaggaaccaagcgagcagtggccactaagtttgtgaacaagaagttgattgaagcgccgaccaggtcacccatgagcttggcatcctgcagagccttcccagcaccccctgcttgttcggcctccttcgacacctttttgagacccccaccagcttacatcctgggtcttaggaaatggctgaccaggggttcgcctcctgggactgcgttggtgcgattggggaagcctcactgaagggaagatcagggcgcacctgggggaggttctggaagctgtccggtacctgcacaactgcaggatagcacacctggacctaaagcctgagaatatcctggtggatgagagtttagccaagccaaccatcaaacttggctgacttttggagatgcttgttcagctcaacacggcctactacatccaccaagttacttgggggaacccttgaaattcgcagcccctgaaatcatccttcgggaaccctgtctccctgacctcggatacgtggagtgttggagtgctcacatacgtacttccttagtggcgtgtcccccttccctggatgacagtgtggaagagacctgcctgaacatttgccgcttaaactttagcttcccagatgactactttaaaggagtgagccagaaggccaaggagttcgtgtgccttcctccctgcaaggaggaatcccgccaagcgtccctcggctgcgctggccctcccaggaagcagtgggctgcaggccggcaacggcagaaggcacgggccgtccctcgaacacgtcccagaactgaacttcccttccattgaagcgggcgcaaacacccagaatgatgttcgaccctatcccgtagccatttaaaaacttatctgcagcagcaggcttcctgccctagagtttgaccctatcccagaagttcctttctcattctctttcacctgcccaatcagctgttaatctgaattttcaagagaaaacaagcaaacataactgatcagctgccggtatgttcatcagtgtgaaattgcattccaagtgagctgtgctcagcagtgcttggacacagagctgcaacgtgcgctggggtggaggaccgtcacttacactctgcccaaggcagaggttcgcattgctgtatcacagtattttattcaggtttctgcaaaaaaaaaaaaaaaaaacgaaggcg

SEQ ID NO: 20752 - DNA, 2827 bp, Homo sapiens
  SIMILAR (258)..(314): 1001254mologous to Homo sapiens Human secreted protein, SEQ ID NO: 5039,accession number G00958,Smith-Waterman Score=103.
cccacgcgtccgctccaagatggctgcctccatagtgcggcgcgggatgctcctggcgcggcaagtggttcttcctcagctctctcctgcaggtaaaagatacctgctttcttcagcctatgtagacagccacaaatgggaagcaagagaaaaagaacattactgtcttgctgatcgtgcatcttgaatggataaaacatttgagagaaagttgcctgttagttctttaacaatatcacggcttatagacagcattttcctctcgggaagagatagatcatgcagagtattacctttacaagtttcgacacagccccaactgctggtacctgatgaaactggactatccacacctggattaggcagtgtctaaaatatgatgcacaagacaaagccctatatacccttgtaaataaggttcaatatggaatttttccagataactttacattcaatttactgatggattctttcataaagaaagaaaattacaaagatgctttatctgtggtttttgaggtcatgatgcaagaagcctttgaagtgccttccacccaacttctctccctctatgttttatttcattgcctggcaaagaagacagacttcagttgggaagaggagaggaactttggtgcatcccttttgcttccaggcctaaaacaaaagaactcagtgggtttcagttcccagttgtatggctatgcacttcttgggaaggtggagttgcagcaagggctacgggctgtgtaccacaacatgcctctgatatggaaaccaggctaccttgacagagcccttcaagtgatggagaaagtggctgcctccccagaagacataaagctgtgtagagaagcgctcgcatgtgctggatgcagtgctgaaggctctgacttcagctgatggggcttcaagaggagcagtcccaaaatgatgaagacaaccaggggtcagaaaaactggtggagcagttagacatcgaggaaacagagcagtccaagcttcctcaatacctggaacgatttaaggccttacattctaagcttcaagctctgggcaaaattgagtcagaaggtcttttaagtctgaccacccagcttgtcaaggaaaaactctccacctgtgaagcagaggacatcgccacctatgagcagaatctgcagcagtggcatctagaccttgtacagttgatccagagagaacagcaacagagggagcaagcgaagcaggagtaccaggctcagaaagcagcaaaggcatctgcctaaatagggtcccccagggccccacctgttttcacaagaacttcactcaaccccgtgccagggacttcagcagtggcctggacaacagcctcagcttcctctacccatcttcttttcttaaagcaggctatgtgccctacatggcaaggcaccatgactgcccatcgagatgccaagaagggctatggaactatgcaggtggctagtggtcagacaaaagaaaaccagctgaataccttaaggaggactcttgaggctcataatggagttcctggggcacagggattagttatgagcattaaagttcctaagacccagtgacagtactgggagaaaccaaggcttgaagagtcaggttgaagcacaggcttttttttttttgttgtttttggtttttttgagacagagtctcattctgtcactccaggctggagtgcagtggcgcaatcttggctcactgcaacctccgactcccaggttcaagcaattctcctgcctcggcctcctttagtaggtggggattacaggtgcataccaccacacctttctaatttttgcatttttagtagagatgggggtttcaccatgttggtcaggctggtctcaacctcctggacctcaagtgatctggcccgcctcagcctcccaaagtgctggggatgatagggcgtgacagcgcatcacccgggccaagcacagggtttttgaatgggtctccctcttccccagcccaggtacatgaggccaaggtgaactgtgcatcctgaagaccttgtgtcccctgagtctcctttctgagtgcaagctgcactggtgagctggctggtggggatactcagacattcccacattctccttttctgccacatctcggccctttctggacctgcactggggagaaattcaggaacaggagtgaactcaaggccatgaactcactggatttccatttttaggcacccatagggatgtttttaggatgtaagtttctgaggagaaagctacgctctagcatgaagcttttttggattggcttctccatcgtgttggggtaacattttttttccaattttttttttcccccccaaaacatcgtcctcagcctcatttatccaagtaggtaaaatgagcccttttgtgtaccaccacagagggcaccatgtgccatgccacacacaacttgtgaacacacatttcctgttaaagaagttagaaaatgagagatgggttggggcttgaagtgccatccagaggtatgaatgttgtaaaaactgtcaggaagatggtaaaattcctttctgaagtgtctcttctgtgaaagggttcagagcagattttgcttactatgtagtgttgcccttaagtacagtggtgtaattttattcaagaattgtgctcttctatcaaaagcctctggaaataaatgttccgggatcatgttagtgtactctttatctttggggaaagggaggagggagagggactcattattgttactatgattttgaggagtgtactttaaaccctcccccattaaactatgggatttattgtaataatga

SEQ ID NO: 20753 - DNA, 3509 bp, Homo sapiens
  SIMILAR (2943)..(2677): 821254mologous to Homo sapiens dJ408N23.1 (suppression of tumorigenicity 13 (colon carcinoma) (Hsp70-interacting protein) (Progesterone receptor associated P48 protein)),accession number Z98048,Smith-Waterman Score=343.
tttttttttttttttgaggtgaaaattaagaatgtatattatggaatttaaaaatctaaaagcacaggacacattttcagaagaggaattttacttttacccacttatggtaagcatctgcaatattagaaatataattaggttaaataaatcaaataaggaatccagaaagaaactgttccttgagttaagcccaagtacacactgggcaatttcgaggaaaggagaactctacacattaacaaaagaacacacaaggctcaaatgcaagtttatatgggtgaggtgtttttaaaggatttaaaaagcatgctccatcaggcataataggctttttctcatttatgtaacagatggcatttctggtctgcttgtgtacaagcaaagggttaggaacctggattaaacttattttatggatttcaggaaatgtgggtattttagaaatgtactccatagaatttacttccactgctccctaccactgattccttccaaataagccaaagtaacagaaggcccttatccccttgaaaatgtttttaaacactagcactttaaattgaaacactggtagaaacgtagccaatgtcaggtacaatgccctatacttagtcttatttaaaataaggaattgaatgcacaacagaaaatttatcattttctttatcattggaggggagggaaagaaagcaagcagaggtggggattatagttacactatttaagagctgaatacaaagacaatgagtctttcatagtctcaacaactcccacaatgaataactgtgggaataactcatttataattcacattggataaaaaaaatccggtcccctccggtgttttccatttaaatccaaaccttatcttcagaatacaaagatgaatactacaagataaactaactgcaataggtttttcctaagtaggaagcccaaacacccaaagggaatcccctctttcccaatgtccttcctgataagggcaaggattttgccaggattgggaagttcttaacactttaaataaggcatttctcttgggcccaagtaagaaactacagttgttgtggggtattcaccctaccaattaccctatgtattacatattaaattaaacctccagcattaaatatgccttgtataattacgcctgttaaatgatggatagccagtgatggatgcccggtgggaaaaagccctgtctttagcctcaagaaaagtaagggagacaaatgtagcaaggcagaaagcaaacacagatttgggcaatttttgactaggaaagagaattttaagcatagaaatataaaaagaaaagtacctacccttaatttccccttacgtggaaataatatggaaaaacacttaatttagatatactggacaacaagagaactaaggtactccaacttctactgcagccattacaaaaaaaaccatcccttcacccacagtgtaagatttaagggcaaccctgccccaaggatggcatggttatatcaaaacacagcaagattgctggctgccctgcccaagtacttccaatccctaccccaggtcctactgaaatacgggtggtccccaattagttttattgaaataaatctttaaagaaaaagataaagcatttaaaaagacaagtcaaaatgcatcaggaaccacatatccaacacaaactttatcctcaaatgagttatgtttgcgctcgcactaataacttttatttcactcagagcagtaatcttccatacataagtatattccctgccaataattcaaagagaaaaatcccaaaatgattagtacagtaaaatataagaattaacaggccctttaaatttgttttaaatattttgaagatttaaaaagtgtttaaagtttcgtaattcctagtaggaaaacattatctggaatgaatacccctaaggccaaaccactgtaaaaagccttccagctgcatttgggggagagggggtaagggattaatccttccaaagcacccccagctctccttgaatgaagaaggtccagaggtaacactggtttgtattattgcgacatcccataagggtgatctaggtggcttttcccttcagcaaggggtttatttatcagaaggacattacgcttgacctccaaatttgggctgacaatttactgatgagattcataacccttggggttgctctgggtattttgaacatattttgctggggttctgagccacatcctgggaaagccaccataacttctggatcctgcatggctgcaagaacctctggatcactaagaatttcattgagtcccaggcattccaacccattcccaggcatgcccccctcccattccaggcatttcctccggggaaaattaccaggcatttccccccagaaagccacctggaaaaagagccatactgagctccctgactgtcgtctggcttcttccctccctctgggctctctcatgctcttctcgagccttcttaactcggttctattctttctttgatctctcgctcttcacgttttcgctcatactctatgacgatgttctgcaattttctgtgccctaggttgaacttctttcagcattgcactagcatcttcatcataatccaatttacaggcaagggcaagatcatgggctgcttcttcccagtggcctaaaaagtctgtgtgctttcccccgccacttgtaaggttgagctgaatcaggatttatatcaatggctctgtcacagtctcggatggcagcaatttggcttctgtaatttgaccgaaagacactggcccctccttgggcatacaaaaatgggccaagccgaggattcagcttgatggcatctgtgaataagtcaatggctttctggagttcaccatcatttagggcttcaatagcagccacttttttatcatttgcctgatccatcatcttcctccggtatctccgcgatttcatctaccatttcttgaggagcatcagtgtctggttcaatcacaccttctttaatcaatttcctaagatcactttcctcacttgatggttcagtctgcctataagtcttcctccaccttcttactatcaggtttttcttccttggtatattcttctgatttagctttctgagtagcaggtggtactttaccacccatgctctccacccactccctgcaggaagcgcatttcctcggtgtgcagaacgctcggatcctgcttacacattttcacaaaggcccgaagctcgttcactttgcgggggtccatggtagggaggtggtgggcgaaactgggggggctacggcccggttccaggaacaggcgctgtgctcggcgtgaccgcgcagaaggccctcccattccaggcattcctccgggaaaattaccaggcattcccccaggaaagccacctgtaaaagagccatactgagctcttgactgtcgtgtggaatcttcctccctctgggctctctctctctctctctcccctcctgcctccggtc

SEQ ID NO: 20754 - DNA, 452 bp, Homo sapiens
  SIMILAR (241)..(107): 351254mologous to Homo sapiens immunoglobulin heavy chain variable region,accession number AJ295964,Smith-Waterman Score=68.
  misc_feature (1)...(452): n = a,t,c or g
natcccgggtcgacgatttcgtggcggggcagcccgcggccaccggctcgccgtctgccgacaaggacggaatggagcccaacgtcgtggctcggatctcgcagtgggcagacgaccacctgcgcctagtccggacatcaaaatttacaagctcttcggatattccagtagaatttataagaagaaatgttaaactacgtggacgattacgccgaataactgagaatggtttagaaattgaacatatacctattactttacctattatagcttcattgagaaaagagccacgtggtgctttgctggttaagttggctggagtagaactcgctgaaactgggaaggcatggttacaaaaagagctaaaaccttcccaattactatggttccaacttcttggaaaggagaattcagcactcttttgctatcttctggtgaataagggtggatat

SEQ ID NO: 20755 - DNA, 423 bp, Homo sapiens
  SIMILAR (115)..(2): 421254mologous to Homo sapiens dynamin,accession number L07810,Smith-Waterman Score=68.
  misc_feature (1)...(423): n = a,t,c or g
ccgacgatttcgttggcggggcagcccgcggccaccggctcgccgtctgccgacaaggacggaatggagcccaacgtcggggctcggatctcgcagtgggcagacgaccacctgcgcctagtccgnnnnnnnnnnnnnnnnnnnnnnnnnnnnnnnnnnnnnnnnnnnnnnnnnnnnnnnnnnnnnnnnnnnnnnnnnnnnnnnnnnnnnnnnnnnnnnnnnnnnnnnnnnnnnnnnnnnnnnnnnnnnaacatcaccactggaatggccatagctggaataagctactttttgagaagcattcgacttgcatcaaaatttacaagctctttggatattccagtagaatttataagaagaaatgttaaactacgtggacgattacgcccgataactgagaatggtttagaaattgaacatata

SEQ ID NO: 20756 - DNA, 561 bp, Homo sapiens
  SIMILAR (15)..(119): 341254mologous to Homo sapiens Sequence of a polypeptide of human caldesmon designated 116 AA,accession number R27358,Smith- Waterman Score=71.
gagctcagggccggtggcagtaggccgggaacatggcggggcagcccgcggccaccggctcgccgtctgccgacaaggacggaatggagcccaacgtcgtggctcggatctcgcagtgggcagacgaccacctgcgcctagtccggaacatcagcactggaatggccatagctggaataatgttacttttgagaagcattcgactgacatcaaaatttacaagctcttcggatattccagtagaatttataagaagaaatgttaaactacgtggacgattacgccgaataactgagaatggtttagaaattgaacatatacctattactttacctattatagcttcattgagaaaagagccacgtggtgctttgctggttaagttggctggagtagaactcgctgaaactgggaaggcatggttacaaaaagagctaaaaccttcccaattactatggttccaacttcttggaaaggagaattcagcactcttttgctatcttctggtgaataagggtggatatttcagcgtgaatctgaatgaagacattttgagaagag

SEQ ID NO: 20757 - DNA, 1675 bp, Homo sapiens
  SIMILAR (1582)..(1424): 321254mologous to Globodera pallida collagen,accession number X96713,Smith-Waterman Score=48.
gcagctacgggagagagtaggaaaagcaaggtattcccaagaagcaggcaacagtacggaacaagatgttgctgtggtaagtgcccagcttccagttaaacaaacaaaacaaaacaaaacaaaaacaatgatggttggactcaacccaagcccaggaagtaaatgttttattcgtctccccttttcgggacagagggggatttcaattgctgccctaataactaatctctcaccattttcttctgtccgtgatcaaaacggaaaagctgtgagactccccaagtgtaacggacgctgcactccccttgctgggaaacgcggacctgctctcctggcggcgtctggcggtcagagagagggtcccgggaccccgcgtgagggtgaagcatcctgcagcgaggctggaccttccaccgggcgaaacgccacccaccaccaccgcaagggacccgagagttacattatttcgcggacacacacacccaccctcatccttctgaattatgggaccctgaagagcggccgtggccagttccccgcacggggccttaggggatccccacgcacagcactcacagtcctaaacaggcgtgtgccggctgtggctgccgagaaaggaacttgggccacctgctcactcgctcatcggactggcggccagaaaagcccccctagaagagcacttctccccactagccagcagaagccccagacgagcggggaagagcagggcgccgccgccacaacctgctttctcattcaaatcctcacgctcacacaggagcccccctccctctcggccccgcagcttccgaggaaatcaggaactggagttgcggagagcggactggagcgcctgctgcctcctctggcccgggcgggatgggtgtacggaaccctagggctgcacgtggaaccccaaggctgcacctggaacccttggcttacactctcctgcggggctccccgcttggcaagggccagaagcactgggaatgaagtacttttactcccccgcaagtttcaaaagtttcgaaacccaggaaagaaacacctttatactgattcatatgtatatgacttaatctacaaagtagatcagaagaggaatttcctaaatccatcatgggagactgaggagagaggagtagtaatggccaactccccgcacacacgacactcgcgatgtcgccctctcgagctcattcccccgcagttttctgtcgctccccggccccggcgggatccacgccagaggcctcacgttgttctcagggtcgctctgtgccgccccgcgcccaccacccgcccagactgcgtggccccagtacccggactaggcgcaggtggtcgtctgcccactgcgagatccgagccacgacgttgggctccattccgtccttgtcggcagacggcgagccggtggccgcgggctgccccgccatgttcccggcctcctgcgagcggccctgagctcctccggctggcggcagggggcgccgctcacctcgggaaggcggcggggtccccttccccgcggaccggggtggccccgcgacctgcagtcgccagtgggcgggccccagatatcagacgtcttaacagtgccccaaccgcttttatgcagggtgattccacgatgcaggagatctctgagcagcactgtgggggctga

SEQ ID NO: 20758 - DNA, 415 bp, Homo sapiens
  SIMILAR (204)..(407): 1001254mologous to Homo sapiens rTSbeta,accession number X89602,Smith-Waterman Score=362.
  misc_feature (1)...(415): n = a,t,c or g
cggctgcctatgtcgtcatagaaactgatgcacaacatggaatcaaggggtgtggaattaccttcactctgggaaaaggcactgaagttgattggtccagaaaagggcgtggtgcacctggcgacagcggccgtcctaaacgcggtgtgggacttgtgggccaagcaggagggaaagcctgtctggaagttacttgtggacatgaaatactgcagaaaggtcaaattggtaaaaaagaaagagagaagcaaatgctggcacaaggataccctgcttacacgacatcgtgcgcctggctggggtactcagatgacacgttgaagcagctctgtgcccaggcgctgaaggatggctggaccaggtttaaagtaaaagtgggtgctgatctccaggatgacatgcgaagatngccaat

SEQ ID NO: 20759 - DNA, 564 bp, Homo sapiens
  SIMILAR (10)..(561): 841254mologous to Homo sapiens rTSbeta,accession number X89602,Smith-Waterman Score=817.
atggattttattcaatgggttataagccattactatcatatttatttggatgttcaaattgtcccagattcagccaatgggaacttcttcaaggtgacatctttcaaggcactggtcccattaggaattggcattgccacaggagaacagtgccacaatagagtgatatttaagcaactcctacaggcgaaggccctgcagttcctccagattgacagttgcagactgggcagtgtcaatgagaacctctcagtattgctgatggccaaaaagtttgaaattcctgtttgcccccatgctggtggagttggcctctgtgaactggtgcagcacctgattatatttgactacatatcagtttctgcaagccttgaaaatagggtgtgtgagtatgttgaccacctgcatgagcatttcaagtatcccgtgatgatccagcgggcttcctacatgcctcccaaggatcccggctactcaacagaaatgaaggaggaatctgtaaagaaacaccagtatccagatggtgaagtttggaagaaactccttcctgctcaagaaaattaa

SEQ ID NO: 20760 - DNA, 651 bp, Homo sapiens
  SIMILAR (345)..(1): 591254mologous to Plasmodium lophurae histidine-rich protein,accession number X01469,Smith-Waterman Score=480.
atggtgatggagatggagatggtgatggtgatggtgatggagatggtgatggtgatggtgatggagatggtgatggtgatggagatggtgatggtgatggtgatggagatggtgatggtgatggtgatggagatggtgatggtgatggagatggtgatggtgatggtgatggagatggtgatggtgatggtgatggtgatggtgatggtgatggagatggagatggtgatggtgatggagatggtgatggtgatggagatggagatggtgatggtgatggagatggtgatggtgatggtgatggtgtggagatgcgacggttatggtgatggagatgatcttcctctgatggcgctgcctccatgccatgccctctgccagttctatgtggtgaacagtgagctgtcctgccagctgtaccagagatcgggagacatgggcctcggtgtgcctttcaacatcgccagctacgccctgctcacgtacatgattgcgcacatcacgggcctgaagcttcagcgagaacccagacctttcccaaagctcaggattcttcgaaaagttgagaaaattgatgacttcaaagctgaagactttcagattgaagggtacaatccgcatccaactattaaaatggaaatggctgtttag

SEQ ID NO: 20761 - DNA, 433 bp, Homo sapiens
  SIMILAR (2)..(433): 901254mologous to Homo sapiens rTSbeta,accession number X89602,Smith-Waterman Score=722.
gctggggtactcagatgacacgttgaagcatctctgtgcccaggcgctgaaggatggctggaccaggtttaaagtaaaggtgggtgctgatctccaggatgacatgcgaagatgccaaatcatccgagacatgattggaccggaaaagactttgatgatggatgccaaccagcgctgggatgtgcctgaggcggtggagtggatgtccaagctggccaagttcaagccattgtggattgaggagccaacctcccctgatgacattctggggcacgccaccatttccaagtgccacaatagagtgatatttaagcaactcctacaggcgaaggccctgcagttcctccagattgacagttgcagactgggcagtgtcaatgagaacctctcagtattgctgatggccaaaaagtttgaaattcctgtttgcccc

SEQ ID NO: 20762 - DNA, 593 bp, Homo sapiens
  SIMILAR (22)..(201): 1001254mologous to Homo sapiens rTSbeta,accession number X89602,Smith-Waterman Score=318.
ttcgagagtgctggaattcctttgatgatggatgccaaccagcgctgggatgtgcctgaggcggtggagtggatgtccaagctggccaagttcaagccattgtggattgaggagccaacctcccctgatgacattctggggcacgccaccatttccaaggcactggtcccattaggaattggcattgccacaggagaacagggtgtgtgagtatgttgaccacctgcatgagcatttcaagtatcccgtgatgatccagcgggcttcctacatgcctcccaaggatcccggctactcaacagaaatgaaggaggaatctgtaaagaaacaccagtatccagatggtgaagtttggaagaaactccttcctgctcaagaaaattaagtgctcagccccaacaacttttttctttctgaagtgaaagggcttaaaatttcttggaaatagttgtacaaaaatggatttaaaaaatcctaccgatcaagatgagttcagctagaagtcataccaccctcaggaatcagctaagtaattattacttgattcttttagcaaatcaatgcacgttatcctacttaatccttaaataagt

SEQ ID NO: 20763 - DNA, 3422 bp, Homo sapiens
  SIMILAR (451)..(819): 881254mologous to Homo sapiens cellular yes-1 protein,accession number M15990,Smith-Waterman Score=607.
atggattttattcaatgggttataagccattactatcatatttatttggatgttcaaattgtcccagattcagccaatgggaacttcttcaaggtgacatctttcaagtgcatggatgggagactaagccgggttaggaaaagacaaaatccagtatcacgggacaaaggcaaagatttgataatgggctgcattaaaagtaaagaaaacaaaagtccagccattaaatacagacctgaaaatactccagagcctgtcagtacaagtgtgagccattatggagcagaacccactacagtgtcaccatgtccgtcatcttcagcaaagggaacagcagttaatttcagcagtctttccatgacaccatttggaggatcctcaggggtaacgccttttggaggtgcatcttcctcattttcagtggtgccaagttcatatcctgctggtttaacagaacatgctgatggtttatgccacaagttgacaactgtgtgtccaactgtgaaacctcagactcaaggtctagcaaaagatgcttgggaaatccctcgagaatctttgcgactagaggttaaactaggacaaggatgtttcggcgaagtgtggatgggtacaatgatgccagaagctttccttcaagaagctcagataatgaaaaaattaagacatgataaacttgttccactatatgctgttgtttctgaagaaccaatttacattgtcactgaatttatgtcaaaaggaagcttattagatttccttaaggaaggagatggaaagtatttgaagcttccacagctggttgatatggctgctcaggaagatgaaagtagttcaggtatgaggagggaacaaagtaaagctgtctgtactgacctgactcctccctctggtaatggcagagtttttaagattggtattatttcgtccttcaatgtgagtgatcaacaaggactttcccctctagctagtaaaacctcaaatgcttcccagccctctgtgacctctgatgtctgtcagttcacatcaatctggttgctctttgtctggctttacagttttactccatgtatgttcattctagaattcagcaaaaagtcagagacttctatggatagcattaattttgacaaagtgtccttcctgctgaactttgccctacaacttcttgctgcctcagcttccataaattctgatctctatctcttcatcttgttctttgctcaagattccctgtcccagatctacaatttagaatgtgccccaggcaaaaagccaggatggtattttggcaaaatggggagaaaagatgctgaaagattacttttgaatcctggaaatcaacgaggtattttcttagtaagagagagtgaaacaactaaaggtgcttattccctttctattcgtgattgggatgagataaggggtgacaatgtgaaacactacaaaattaggaaacttgacaatggtggatactatatcacaaccagagcacaatttgatactctgcagaaattggtgaaacactacacaggtgcctcaactcctgtatttgatcgagtcaccaatggagtaactccaactatcaaggatctcactggctgctgtgttgagaacagactactgacttctaatagcagcgacttctttaccttgataaaccacagcaactcctccaaaacacccttccagaacacacgtttggttgtcagcagagggaattcatctgaaaaacaatttgccatacggtttcaagatgggaagacagatcatgccatccaactttcttcagggaagaaaactgccctgggacgtgaggccctggagcatccagaaagcctagactcccgcaaagtgggccagagatcacggtggagctcccaggctgcaagtcccatcagtggcccgattcaggctgagacagcacttctgtgccccggtgaccagtggacacaggaattccacacaaaaggtgggttaaaaatgaggtctatggctcatcaaaggcccctgggcttggagctgcagaaaagtggatccctctcctcagacaaaactccccacgctgtcccacgccaatcagccacagcagctgctatgtattcgtctctagatgggtccgtgggccggagggcttttccgctagctacagtgaatctgcttcaccacgaatgggtttccccattcaaaaccacctccacccctgtgtcaaggctgcgctccatttatctgagcggtcaagtagactacaacaagagtaacagtaggcgaaggtggaaggcaaaggtgggaagaggtcagggctctgagtgctgggctgtggagtctgaggttcactctacagcgctggcactggtcccattaggaattggcattgccacaggagaacagtgccacaatagagtgatatttaagcaactcctacaggcgaaggccctgcagttcctccagattgacagttgcagactgggcagtgtcaatgagaacctctcagtattgctgatggccaaaaagtttgaaaaaatacaaactaccatcagagattactacaaacacctctacgcaaataaactagaaaatctagaagaaatggataaattccttgacacatacactctcccaagactaaaccaggaagaagttgaatctctgaatagaccaataacaggagctgaaattgtggcaataatcaatagcttaccaaccaaaaagagtccaggaccagatggattcacagccgaattctaccagagacgggtccaagagacccagagaggtctggaacttctccaagtcacacagcaagttgtggaagcgggatcaccactcaaaactcccagccccgggcttcccgttctccctcagcgccaaccccgtcgcgttcagggtacagaggaagccagcgagcgctgtgctctagggtttccactggcgggaacccaacaaaatcattttgctgctattgcctattatgcattctaccatttccagcaaaatatgatggatgccaaccagcgctgggatgtgcctgaggcggtggagtggatgtccaagctggccaagttcaagccattgtggattgaggagccaacctcccctgatgacattctggggcacgccaccatttccaagggtgtgtgagtatgttgaccacctgcatgagcatttcaagtatcccgtgatgatccagcgggcttcctacatgcctcccaaggatcccggctactcaacagaaatgaaggaggaatctgtaaagaaacaccagtatccagatggtgaagtttggaagaaactctttcctgctcaagaaaattaagtgctcagccccaacaacttttttctttctgaagtgaaagggcttaaaatttcttggaaatagttttacaaaaatggatttaaaaaatcctaccgaatcagatgag

SEQ ID NO: 20764 - DNA, 1539 bp, Homo sapiens
  SIMILAR (1539)..(1000): 991254mologous to Homo sapiens thymidylate synthase (aa 1- 313),accession number X02308,Smith-Waterman Score=959.
tttttttttacttaaggagagttctttaatctattttaggaaggaactgagcagataagtggcagtacaaaatgaacaaagcgtggacgaatgcagaacacttctttattatagcaacatataaaacaactataactttaaagttcataaccacactctacatcatgatcgatggggttactcagctccctcagatttgagggaatagcttgtgaaattcttaaaatattctaaaaatattccaaaaatagcttgtgaaattcaccaacccttctttataagtacgtgggattgaaatgcacatacatgtttttggctaagagcacatacatttcattctcctcactttgttcatgacctcagcattgtcagataccctcagtgagttaactcaaagccttttattatggaaagaactggcacagttacatttgccagtggcaaccatccttaaaaattaataactgataggtcacggacagatttttgacctagttcctttttcttttagagcaaaaagaacttttacctcggcatccagcccaacccctaaagactgacaatatccttcgagctcctttgaaagcaccctagacagccatttccattttaatagttggatgcggattgtacccttcaatctgaaagtcttcagctttgaagtcatcaattttctcaacttttcgaagaatcctgagctttgggaaaggtctgggtttcctcgctgaagctgaattttcagtggctcgatgtgattcaggtaaatatgtgcatctccccaagtgtggatagagacacctagctttagagcgcgtgatgtgcgcgatcattgacgtgagcagggcgtagctggcgatgttgaaaggcacaccgaggcccatgtctcccgatccccgggtacggttggaaggacagctccactgttcaccacatagaactggcagagggcatggcatggaggcagcgccatcagaggaaagatctcttggatttcaagccgcaaatgatgattcttctgtcgtcagggttggttttgatggtgtcaatcactctttgcagttggtcaactccctgtcctgaataatctgattccatatctctgtattctgccccaaaatgcctccactggaagccataaactgggcccaagtccccttcttctctggtggagaatcccaggctgtccaaaaagtctcgggatccattggcatcccagattttcactcccttggaagacagctctttagcatttgtggatcccttgataaaccacagcaactcctccaaaacacccttccagaacacacgtttggttgtcagcagagggaattcatctctcaggctgtagcgcgcctgcatgccgaataccgacagggtgccggtgcccgtgcggtcgtccttcctgacgccgcagcggaggatgtgttggatctgccccaggtactgcagctccccgtgcggcggacgcggctcggcgtcccgctcctgtgcggcggggggcaagggccggcgcggcagctccgagccggccacaggcat

SEQ ID NO: 20765 - DNA, 1764 bp, Homo sapiens
  SIMILAR (555)..(451): 771254mologous to Homo sapiens rTSbeta,accession number X89602,Smith-Waterman Score=150.
tttaatcagtgaaatatttttcccttcgttgcataccagatacccccggtgttgcacgactatttttattctgctaatttatgacaagtgttaaacagaacaaggaattattccaacaagttatgcaacatgttgcttattttcaaattacagtttaatgtctaggtgccagcccttgatatagctatttttgtaagaacatcctcctggactttgggttagttaaatctaaacttatttaaggattaagtaggataacgtgcattgatttgcttaaagaatcaagtaataattacttagctgattccctgagggtggtatgacctcctagctgaaactcaccttggatcggtaggattttttaaaacccatttttgtaaaactatttcccaagaaattttaagccctttcacttcagaaagaaaaaagttgttggggctgaagcacttaattttcttgagcaggaaggagtttcttccaaacttcaccatctggatactggtgtttctttacagattcctccttcaatttctgttgagtagccgggatccttgggaggcatgtaggaagcccgctggatcatcacgggatacttgaaatgctcatgcaggtggtcaacatactcacacaccctattttcaaggcttgcagaaactgatatgtagtcaaatataatcaggtgctgcaccagttcacagaggccaactccaccagcatgggggcaaacaggaatttcaaactttttggccatcagcaatactgagaggttctcattgacactgcccagtctgcaactgtcaatctggaggaactgcagggccttcgcctgtaggagttgcttaaatatcactctattgtggcactgttctcctgtggcaatgccaattcctaatgggaccagtgccttggaaatggtggcgtgccccagaatgtcatcaggggaggttggctcctcaatccacaatggcttgaacttggccagcttggacatccactccaccgcctcaggcacatcccagcgctggttggcatccatcatcaaagtcttttccggtccaatcatgtctcggatgatttggcatcttcgcatgtcatcctggagatcagcacccacctttactttaaacctggtccagccatccttcagcgcctgggcacagagctgcttcaacgtgtcatctgagtaccccagccaggcgcacgatgtcgtgtaagcagggtatccttgtgccagcatttgcttctctctttcttttttaccaatttgacctttctgcagtatttctagggcatcctcctcagtcaggacatcagtgatgtacctgaaatctatgcaggataccagcatcctgggatccatgtccacaagtaacttccagacaggctttccctcctgcttggcccacaagtcccacaccgcgtttaggacggccgctgtcgccaggtgcaccacgcccttttctggaccaatccatctgagctgcccatcacttgtgagctgcctatagaagcctctgaagtcaccaacaatgtccttgaggtccttgttgagcacatggtgggcgagggcattcacagcacagacaacaacttcagtgccttttcccagagtgaaggtaattccacaccccttgattccatcttctgcatcagtttctatgacgacataggcagccgagtagtcagggtccgtgtgcatggcgtccgcgccgtggcccccaagcgacgtggggaagcgcacgtcccggaccgagagccgggaga

SEQ ID NO: 20766 - DNA, 2945 bp, Homo sapiens
  SIMILAR (1422)..(1814): 871254mologous to Homo sapiens RTS beta,accession number AF305057,Smith-Waterman Score=584.
  misc_feature (1)...(2945): n = a,t,c or g
tattggtggcccaggggtaggcagccttctttcctctgcagttcactgctccagaaccatctccagcctcatagctcaccgtggacagccctgcggtgtggcgctgatgtacagagtgatgccaggcgttcatctccccactgagctcctgctgagtgtttgcctggggccaggtcctccttccgggaagtcattttagctggaaagaacagggtgggggcgggtggcaagggatcagagcatgagcgtttgagggcttcgtcaggggcagtgaggagcctctaaaggactctacatttaggaatgacagagtcaaacaatttaacaaagccctaaaggtccctgccaggaaagaatgagccccatgtatcaccataagcaacttcttagaaacataacccacccctgtcatcccagcactttgggaggccaaggagggaggattgcttgaggccaggagctcgagatcaacctggtcaacatggtaagaccccattttctacaaaaataaaaataaattagccgggcatggtggcacatacctggagtcccggctgctcaggaggctgaggcaggaggatcacataagccggggagactgaggctgcagtgagctatgatggcatcactgcactccagcctgggcaacagagtgagcccttgtctctaaaaaaagaataataaattttaaaaaacaaaatataacccaccttataattgattcaggcctcttcccctcctgtcacgttgccaggatcccaggacgctggtatcctgcatagatttcaggtacatcactgatgtcctgactgaggaggatgccctaggtgagtttggaagctttctgggatacacgatgtgcacacacagtagtggcatgctttgtttcctaaaagagtgagtgatgctttttatttcttccagaaatactgcagaaaggtcaaattggtaaaaaagaaagaggtgggttgtaagaaaattttcttcattgtttttgctaacattgtccacttttgagtgcccctgtccttttggggtacacattgtcttcccaaatgccctgtgctgagcagctaggccctcaaactcaacattcaagtctgcatggtgaagcctgctgggtatgacctctgactgtagagatggctacatcctctgctgaaaggaagtttggctttacgattacactgtaaggagagccctgggggagcagggcagtccgtgagagtatcctgatcacctgggtttgacatcctagtaattcgcggctgggtgtgtgtgtgctgcgccggatcaggagaacagctggactctccaggggaaacagctggactctccaggggaaacagcttaactacaggcacttccaattccgaagggccctggaaagcgcaaaatgttgacggcgctgtgttttcacagagaagcaaatgctggcacaaggataccctgcttacacgacatcgtgcgcctggctggggtactcagatgacacgttgaagcatctctgtgcccaggcgctgaaggatggctggaccaggtttaaagtaaaggtgggtgctgatctccaggatgacatgcgaagatgccaaatcatccgagacatgaatggaccggaaaagactttgatgatggatgccaaccagcgctgggatgtgcctgaggcggtggagtggatgtccaagctggccaagttcaagccattgtggattgaggagccaacctccccttgattgacatttttggggcacgccaccattttccaaggcactggtcccatttagggaattgggcatttgcaccagggagaacagttgccacaatagagtgatatttaagcaactcctacaggcgaaggccctgcagttcctccagattgacagttgcagactgggcagtgtcaatgaagaacctctcagtattgctgatggccaaaaagtttgaaattcctgtttgcccccatgctggtggagttggcctctgtgaactggtgcagcacctgattatatttgactacatatcagttttctgcaaagccttgaaaatagggtgtgtgagtatgttgaacacctgcatgagcattttcagtatcccgtgatgatccagcgggcttcctacatgccttcccaaggatcccggctactcaacagaaatgaaggaggaatctgtaaagaaacaccagtattcagatggtgaagtttggaagatactccttcctgctcaagaaaattaagtgcttagccccaacaactttttttctttctgaagtgaaagggcgtaaaatttcttggaaatagttttacaaaaatggatttaaaaaaatcctaccgatcgacatgagttcagctagaagtcataccaccctcaggaatcagctaaagcaaaaagaacttttacctcggcatccagcccaaccccttaaagactgacaatatccttcgagctcctttgaaagcaccctaaacagccattttccatttttaatagttggatgcgggattgtaccccttcaatctggaaaagtcttcagctttgaaagtcaatcnaattttctcaacttttcggaagaatcctgagctttgggaaaggtctgggttcatcgctgaagctaaaaacaaaataaggccattattttgccataattgtacggaccttgttgtaattgctcctcatgtcccatgaaacaagtacacaggatgtgattcaacaaagttctattttacaggagtatgatcctgtcgataccttgccgtaggttatgtaacatgattggagcgcaaccagctgttctcttgaccacagatcgagagtgaggggtattttgtgacattacacagcatcaggagcctggtgcctcatcaggtgtaagttcttataaccactcttggcaaatttattaaagacaggaacacagtcaatctgtaactcaaaaaaaaaaaaaaaaa

SEQ ID NO: 20767 - DNA, 2535 bp, Homo sapiens
  SIMILAR (420)..(614): 871254mologous to Homo sapiens Yippee protein,accession number AF172940,Smith-Waterman Score=280.
aagccgctggcagccgcggatctcaccgccgctcaggagatctgttggtaatctgaggatttttattctacgtcgtcttgacagatggaaaacctgaagtaacttcgggctaaccttgtgtttttggaaaattagtagacttggtggtgaagaaactgggaggagtaggatattagctaactttgcatagccacatatagagcgtcgcagctgcattccaccaaagaggaaccaaaaggcctgtggtgttcccagggtacatattcatgccagaagtgaagtgccttggtgaattcgtttcctgaaagtttatcgcatacttgtactgggttaggtttttagaacttcagccataaaaatgggcagaattttccttgatcatatcggtggtacccgtctgttttcttgtgcaaactcgtgatacgatcctgaccaaccgctcagaactcatctccactcgtttcacaggcgccactggcagagcatttctttttaacaaggtagttaacctgcagtacagcgaagttcaagatcgggtcatgctcactggccgccacatggttcgagatgtgagctggcaaaaactgcaattagcaaacttgggatggatctatggagtttggccactgaagacagccagcgattttaagggaagggccggcgttgatccggggaacgttgttttagtttcggaggaggagttgagggctttggaggagcatggtaccacctgataactcttgaagatacagagagaaatccatcttttccccaggtctcctttcactgaaaacaaaaatctacttacatacactgtgcaccttagcatcagagtcggattaatgaacttgcggaacaagaggttgtggagaatctaagatgggaacctttctttctttctttctttttttttaaattttgtattttccatccaacagcacgtgtgtaggagagaatattatgcaggatgcccgttaattttttaccctatgttttacatcttgagggcaggcaggagtctgtctggcaggctatgtgggtggaggctatggtaagggggaaaaaaatctgggcctgttagagtgaaaaaagtgtgttttatgtccaattgtgaaaaggaaaatgttaggaagtatgggtttttaaaccttgggccttcattttaaaacttttttttttaaaccccagttatttcacttggatttgccaagcttcccgagaaagagatcccgaatctgtgcccagcgctaaaggctctttgttagcatgggcttgtgctggccggtgtgccatattcttgttggagatgaaccgtagcaccagagcccattcttccttgtcagtcttggcccaaagatgtcaccattcctagttatttgtcaccacgtcaattggtgttgattggaaactttttctgagatgggacagaactgctgggttgtctttttccatgtaacttaagcatagtaatataaataaagtaatagttgggatgcttttgggtcctgtgttgcttttaaaaacaccttataaaagagggagagtatttggataaggccaatttttccataggtagtaaaagttttttttcattctcttgaaactagaattgaccatgcatataatattctttgtttaaatgaaagcatactgttgaaacccgcagtgttgcatttagaaaacagttgaacagaatgtcaatgtgcattcatgcaaaaaaacatttaatctgcatctgttttagaaaagggggaaatgaagcaacttgtctaaaaatactgctttacaaagcatttcagcctttccccctcagttttgcattgattttttgacaagtctgtagagcctaatagtttccatcaaaggcctagatctcttatttagcatttttttcagctcttctctcagaagttcagctgttgaaacgaaaactgtactttgtaccctcacatacaaagggatcaaatttgacctggtgttattttagccccaaatttatgacattacacaatattacaaatgtaaatgtttctttacccaaactacttctagatattctagtattggccttcctggtgggaattaaaatgcccggtaaaattggcctaattatttggaatggaatgaatgggatgggatgttttgccatgcctcaatttcctaggtccctttgtcctagaaagggaaatttgcctccagttgaattagtgaaatatttctgtcggttgatattaaaagtgacttctgagtacagttaagttcctcccaatttgccactggggctgttgggttaggaaggcatagggtaactgattaagtagggtatggatactggcatttgaaataagtgggacacaaactatcctttctccaccctgggactcaatctgagaacaacagcattcatttccattcatttccatactggcttttgattatatgcagattcctagtagcatgccttacctacagcactatgtgcatttgctgtcacaataaagtatattttgtcttgcaaaaaaaaaaaaaaaaaaa

SEQ ID NO: 20768 - DNA, 467 bp, Homo sapiens; identical to SEQ ID NO: 8588
  SIMILAR (204)..(404): 631254mologous to Homo sapiens HTRM clone 3340290 protein sequence,accession number Y73387,Smith-Waterman Score=196.
  misc_feature (1)...(467): n = a,t,c or g

SEQ ID NO: 20769 - DNA, 348 bp, Homo sapiens
  SIMILAR (325)..(80): 481254mologous to Acidithiobacillus ferrooxidans TapA protein,accession number AJ277640,Smith-Waterman Score=185.
agccagtaccaagaactagcagtagccctggattcaagctccgcaataatcagtcaactcagtgaaaacatcaattcactggagaggctgctggaagaggtggcgaagctgttagaacaggagaggtggcaagaggagcaggagaggctgctggagagggagaggctgctggacaaggtggaggagctgctggaacaggagaggctttgggagcaggatgagagactgtggcagcaggagactctgtgggagctggagaggatgtgggtgctggagaggatgctggagctgggttgggaagccctctatgagcagagggcggagtcacacagcggcttcaaggagctg

SEQ ID NO: 20770 - DNA, 5130 bp, Homo sapiens; identical to SEQ ID NO: 2332
  SIMILAR (2614)..(4473): 941254mologous to Homo sapiens putative p150,accession number U93572,Smith-Waterman Score=3044.

SEQ ID NO: 20771 - DNA, 1139 bp, Homo sapiens; identical to SEQ ID NO: 8648
  SIMILAR (486)..(1136): 951254mologous to Homo sapiens putative p150,accession number U93563,Smith-Waterman Score=1045.

SEQ ID NO: 20772 - DNA, 1302 bp, Homo sapiens
  SIMILAR (124)..(1296): 791254mologous to Homo sapiens putative p150,accession number U93569,Smith-Waterman Score=1583.
atgaagcttccagaggaaatatcaggcagcaacatttgctgttcagcaatatttgctgttctgcagcctccgatgctgatacccaggcaaacagggtctggagtggacctccagcaaactccaacagacctgcagctgagggacctgactgttagaaggaaaactaacaaacagaaaggacatccacaccaaaaccccatctgtatgtcaccatcatcaaagaccaaagcaccacaccacacctattctaaaattgaccacatagttggaagtaaagcactcctcagcaaatgtaaaagaacaggaattataacaaactgtctctcagaccacagtgcaatcaaactagaactcaggattaagaaactcactcaaaaccactcaactacatggaaactgaacaacctgctcctgaatgactactgggcacataacaaaatgaaggcagaaatgaagatgttctttgaaaccaacgagaacaaagacacaacataccagaatctctgggacacattcaaagcagtgtgtagagggaaatttatagcactaaatgtccacaagagaaagcaggaaagatctaaaactgacaccctaacatcacaattaaaacaactagagaagcaagagcaaacacattcaaaagctaggagaaggcaagaaataactaagatcagagcagaactgaaggagatagaaacacaaagaacccttcaaaaaatcaatgaatccaggagctttttttttgaaaagatcaacaaaattgatagactgctagcaagactaacaaagaagaaaagagagaagaatcaaatagatgcaataaaagatgataaaggggatatcaccacagatcccacagaaatacaaactaccatcagagaatactataaacacctctacacaaataaactagcaaatctagaagaaatggataaattcctcgacacatacaccctcccaagactaaaccaggaagaagttgaatctcttagtagaccaataacaggctctgaaattgaggcaataattaatagcttaccaccaccaacaacagcaagaggcccaggaccagacggattcacagctaaattctaccagatgtatgaaaatgaactggtgccattcctactgaaacgattccaaaatattgaaaaagagggactcctccctaactcattctatgaggccagaatcatcatgttagcaaaacctggcagagatacaacaaaaaaagaaaacttcaggctaatatccttgatgaagatcggtgcaaaaatcctcaagaaaatactagcaaagtga

SEQ ID NO: 20773 - DNA, 1122 bp, Homo sapiens; identical to SEQ ID NO: 7488
  SIMILAR (628)..(1068): 931254mologous to Homo sapiens putative p150,accession number U93565,Smith-Waterman Score=735.

SEQ ID NO: 20774 - DNA, 858 bp, Homo sapiens
  SIMILAR (289)..(855): 841254mologous to Homo sapiens p40,accession number U93566,Smith-Waterman Score=782.
atgcatcactacacaattgcatcactgtgtggacatcatagagtggacttacatgaacctaggtggtacagcctactacacaccgggctatatggctacgaacctataccacatgctactgttctgaatactgcaagccattgtaacacaatacctccgctgctgatacccaggcaaacacggtctggagtagacctccagcaaactccaacagacctgcagctgagggtcctgactgttagaaggaaaactaacaaacagaaaggatatccacaccaaaaccccatctgtacgtcaccatcatcaaagaccaaagagaagtccttaaaggacctgatggagctgaaaaccatggcacaagaactacatggtgaatgcacaagcctcagtagccaatttgatcaactggaagaaatggtatcagtgatggaggatcaaatgaatgaaatgaagcaagaagagaagtttacagaaaaaagaataaaaagaaaccaacaaagcctccaagaaatatgggactatgtgaaaagaccaaatctacgtctgactggtgttcctgaaagtgacggggagaatggaaccaagttggaaaacactctgcaggatattatccaggagaacttccccaatctagcaaggctggccaacattcaaattcaagaaatacaaagaacaccacaaagatactcctcaagaagagcaaccccaagacacataattctcagattcaccaaagttgaaatgaaggaaaaaatgttaagggcagccagagagaaaggtcgggttacccacaaagggaagcctgtcagactaacagctgatctgtcggcagaaactctacaagccagaagacagtag

SEQ ID NO: 20775 - DNA, 2001 bp, Homo sapiens
  SIMILAR (649)..(1929): 851254mologous to Homo sapiens putative p150,accession number U93572,Smith-Waterman Score=1897.
atggcagcaagccttttgttccctgatctggggttcttggcctcacggattccaaggaatggaaccttgggccatgcggtgagtgttatagctctattagaagccatggatcacagaagagaaccgtggaacccagcaactagtgttcagctcaattgggacgaacccaaggacttagctgcgcaggaacaatggaccctcagctgcaggtctgttggagtttgctggaggtccactccagaccctgtttgcctgggtatcagcagtggaggctgcaaaacagcggatattggtgagcagcaaatgttgctgcctgatcgttcctctggaatttttgtctcagaggagtacccggccatttggaaatgcagaaatcacccgtcttctgtgtcactcatgctgggagctctagactggagatgttcctattcggccatcttggtaaaccgaatccagcagcatatcaaaaagcttatccgcgatgatcaagtgggcttcatccctgggatgcaaggctggttcaccatatgcaaatcaataaacgtaatccggcatataaacagaaccaaagacaaaaaccacatgattatctcaatagatgcagaaaaagcctttgacaaaattcaacaacgcttcatgctaaaaactctcaataaattagtgttggaagttctggccagggcaatctggcaggagaaggaaataaggggtattcaattaggaaaagaggaagtcaaattgtccctgtttgcagatgacatgattgtatatctagaaaaccccatcgtctcagcccaaaatcgccttaagctgataggcaaattcagcaaagtctcaggatacaaaatcaatgtgcaaaaatcacaagcattcttatacaccaataacagacaaacagagagtgaaatcatgagtgaactcccattcactattgctttaaagaggatgaaatacctaggaatccaacttacaagggatgtgaaggacctcttcaaggaaaactacgaaccactgctcaatgaaataaaagaggatacaaacaaatggaagaacattccatgctcatgggtagaaagaatcaatatcatgaaaaaggccatactgcccaaggtaatttatagattcaatgccatccccatcaagttaccaatgactttcttcacggaattggaaaaaactactttaaagttcatatggaatcaaaaaagagcccacatcaccaagtcaatcctaagccaaaagaacaaagctggaggcatcacactacctgacttcaaactacactacaaggctgcagtaaccaaaacagcatggtactggtaccaaaacagagatatagaccaacggaacagaacagagcccacagaaataatgctgcatatctacaaccatctgatctttgacaaacctgacaaaaacaagaaatggggaaatgattccctatttaataaatggtgctgggaaaactggctagccatatgtagaaagctgaaacgggatcccttccttacaccttatacaaaaattaattcaagatggattgaagacttaaatattagacctgaaaccataaaaaccctagaagaaaacctaggcaataccattcaggacatagccatgggcaaggacttcatgtctaaaacaccaaaagcaatggcaacaaaagccaaaattgacaaatgggatctaattaaactaaagaacttctgcacagcaaaagaaactaccatcagagtgaacaggcaacctacagaatgggagaaaatttttgcaatctactcatctgacaaagggataatatccagaatctacaatgaactcaaacaaatttacaagaaaaaaaaacaaccctatcaaaaagtgggcaaaggatataaacagacacttctcaaaagaagacatttatgcagccaaaagactcatgaaaaaatgctcatcatcactggctatcagagaaatgcaaatcaaaaccacaatgagataccatcttacaccagttag

SEQ ID NO: 20776 - DNA, 669 bp, Homo sapiens; identical to SEQ ID NO: 11824
  SIMILAR (229)..(642): 941254mologous to Homo sapiens putative p150,accession number U93569,Smith-Waterman Score=676.

SEQ ID NO: 20777 - DNA, 1167 bp, Homo sapiens; identical to SEQ ID NO: 7506
  SIMILAR (1092)..(1166): 841254mologous to Homo sapiens NAG13,accession number AF194537,Smith-Waterman Score=122.

SEQ ID NO: 20778 - DNA, 1299 bp, Homo sapiens; identical to SEQ ID NO: 2487
  SIMILAR (253)..(1296): 891254mologous to Homo sapiens putative p150,accession number U93567,Smith-Waterman Score=1580.

SEQ ID NO: 20779 - DNA, 1260 bp, Homo sapiens; identical to SEQ ID NO: 2484
  SIMILAR (268)..(1257): 831254mologous to Homo sapiens p40,accession number U93567,Smith-Waterman Score=1399.

SEQ ID NO: 20780 - DNA, 771 bp, Homo sapiens
  SIMILAR (1)..(468): 921254mologous to Cloning vector pZC320 SopA,accession number U26464,Smith-Waterman Score=777.
atgcatcacggatgggtaccagatcttcatattcatgcagaagacactctcctgcctttctatcttggggaaaaggacgatgtcacttatgcaataaagcccacttgctggccggggcttgacattattccttcctgtctggctctgcaccgtattgaggctgagttaatgggcaaatttgatgaaggtaaactgcccaccgatccacacctgatgctccgactggccattgaaactgttgctcatgactatgatgtcatagttattgacagcgcgcctaacctgggtatcggcacgattaatgtcgtatgtgctgctgatgtgctgattgttcccacgcctgctgagttgtttgactacacctccgcactgcagtttttcgatatgcttcgtgatctgctcaagaacgttgatcttaaagggttcgagcctgatcctctgctgctgatacccaggcaaacagggtctggagtggacctccagcaaactccaacagacctgcagctgagggtcctgactgttagaaggaaaactaacaaacagaaaggacatccacaccgaaaccccatctgtatgtcaccatcatcaaagaccaaagtgccgcaagccaaaggcaacaatgtggtgatcacaagctacatgacaaacagaggcttcttcgaggataaaaaggcaacatttgcgccaagcttcttaatgaacatcaaaggcaataaaacatccgttgtcaaaaacagcatcctggagcaaggacagctgacagtcaactaa

SEQ ID NO: 20781 - DNA, 373 bp, Homo sapiens
  SIMILAR (371)..(231): 771254mologous to Homo sapiens Human secreted protein, SEQ ID NO: 5176,accession number G01095,Smith-Waterman Score=195.
cttaaaagcatcaataacgaatctcatttaaacttcacaaatggaagtcaaaaaataccacctctattatacagatgtgaaaagagaggcccaaagacctcaagcaacttgccctaaatcatatgctaatcaatccctaatcaattcttagcagatggagaggcaggattcaaatccagaattcttaaccagtacccaacagtccatctacaatcttaacaattaccctctactgccccttgggccccctgtccccaggaccctggcccgccgagactcacatccccaggtgagtggtaaccaccagaagtggctgtgtcagggctactgccattgattttctttttcctgttagctcctgctggaatgccag

SEQ ID NO: 20782 - DNA, 1251 bp, Homo sapiens; identical to SEQ ID NO: 993
  SIMILAR (271)..(489): 1001254mologous to Cloning vector pEH1 lac repressor,accession number AJ007659,Smith-Waterman Score=349.

SEQ ID NO: 20783 - DNA, 661 bp, Homo sapiens
  SIMILAR (436)..(660): 891254mologous to Homo sapiens NAG13,accession number AF194537,Smith-Waterman Score=346.
atggcagcaagccttttgttccctgatctggggttcttggcctcacggattccaaggaatggaaccttgggccatgcggtgagtgttatagctctattagaagccatggatcacagaagagaaccgtggaacccagcaactagtgttcagctcaattgggacgaacccaaggacttagctgcgcaggaacaatggaccctcagctgcaggtctgttggagtttgctggaggtccactccagaccctgtttgcctgggtatcagcagtggaggctgcaaaacagcggatattggtgagcagcaaatgttgctgcctgatcgttcctctggaatttttgtctcagaggagtacccggccatttggaaatgcagaaatcacccgtcttctgtgtcactcatgctgggagctctagactggagatgttcctattcggccatcttggtaaaccgaatccagcagcatatcaaaaagcttatccgcgatgatcaagtgggcttcatccctgggatgcaaggctggttcaccatatgcaaatcaataaacgtaatccggcatataaacagaaccaaagacaaaaaccacatgattatctcaatagatgcagaaaaagcctttgacaaaattcaacaacgcttcatgctaaaaactctcaataaattag

SEQ ID NO: 20784 - DNA, 2317 bp, Homo sapiens; identical to SEQ ID NO: 6258
  SIMILAR (863)..(2296): 891254mologous to Homo sapiens putative p150,accession number U93563,Smith-Waterman Score=2181.

SEQ ID NO: 20785 - DNA, 1140 bp, Homo sapiens
  SIMILAR (804)..(19): 931254mologous to Homo sapiens putative p150,accession number U93564,Smith-Waterman Score=1317.
tcactctgatggtagtttctcttttgctgtgcagaagctctttagtttaattagatcccatttgtcaattttggcttttgttgccattgcttttggtgttttagacatgaagtccttgcccatgcctatgtcctgaatggtattgcctaggttttcttctagggtttttatggtttttgatctaacatttaagtctttaatccatcttgaattaatttttgtataaggtgtaaggaagggatccagtttcagctttctacatatggctagccagttttcccagcaccatttattaaatagggaatcctttccccatttcttgtttttctcaggtttgtcaaagatcagacagttgtagatacatggcattatttctgagggctctgttctgttccattggtctatatctctgttttggtaccagtaccatgctgttttcgttactgtggccttgtagtatagtttgaagtcaggtagcatgatgcctccagctttgttcttttggcttatgattgacttggcaatgcgggctcttttttggttccatatgaactttaaagtagttttttccaattctgtgaagaaagtcattggtagcttgatggggatagcattgaatctataaattaccttgggcagtatggccattttcatgatattgattcttcctacccataagcatggaatgttcttgcatttgtttgtatcttcttttattttgttgagcagtggtttgtagttctccttgaagaggtccttcacatcccttgtaagttggattcttaggtattttattcctttggtctttgatgatggtgacgtacagatggagttttggtatgagttgtcctttttgttgatgttgctgctgttcctttgtgcttgttggttttccttctaacagtcaggaccctcagctgcaggtctgttggagtttgctggaggtccactccagaccctgtttgcctgggttatcagcagcggaggctgcagaacagcagatattggtgaactgcaaatgctgctgcctgatcgttcctctggaagttttgtctcagaggagtacccggccattttgatctcagactgctgtgccagcactgagcaaggctccatgggcgtaggactctctgagccaag

SEQ ID NO: 20786 - DNA, 2277 bp, Homo sapiens
  SIMILAR (2226)..(2276): 641254mologous to Homo sapiens putative p150,accession number U93569,Smith-Waterman Score=68.
aataccacagactgggtaatttataaagaacagtgcatttggctcacagctctggagactggggagtccaagagcactgcaccagcatttggcaagggttatcccatggcagaatacatcatatggggcagattgacacctcacatggctggctactcctctgagacaaaacttccagaggaacgatcaggcagcaacatctgctgttcaccaatatccgctgttctgcagcctctgctgctgatacccaggcaaacagggtctggagtggacctccagcaaactccaacagacctgcagctgagggtcctgactgttagaaggaaaactaacaaacagaaaggacatccacaccaaaaccccatctgtacgtcaccatcatcaaagaccaaaggatcaaattcacacataacaatattaaccttaaatgtaaatgggctaaatgctccaattaaaagacacagactggcaaattggataaagagtcaagacccatcagtgtgctgtattcaggagacccatctcacgtgcagagacacacacaggatcaaaataaagggatggagggagatctaccaagcaaatggaaaacaaaaaaaggcaggggttgcaatcctagtctctgataaaacggactttaaaccaacaaagatcaaaagagacaaagaaggccattacatgatggtaaagggatcaattcaacaagaagagctaactaccctaaatatatatgcacccaatacaggagcacccagattcataaagcaagtccttagagacctacaaagagacttagactcccacacattaataatgggagactttaacaccccactgtcaacattagacagatcaacgagacagaaagttaacaaggatatccaggatttgaactcagctctgcaccaagtggacctaatagacatctacagaactctccaccccaaatcaacagaatatacattcttctcagcactacaccacatttattccaaaattgaccacatagttggaagtaaagcactcctcagcaaatataaaacaacagaaattataacaaactgtctctcagaccacagtgcaatcaaactcgaactcaggattaagaaactcactcaaaaccgctcaactacatggaaactgaacaacctgctcctgaatgactactgggtacataacaaaatgaaggcagaaataaatacattatttgaaaccaacgagaacaaagacacaacataccagaatctctgggacacattcaaagcagtgtgtagagggaaattcatagcactaaatgcccacaagagaaagcaggaaagatctaaaattgacaccctaacatcacaattaaaagaactagagaagcaagaacaaacacattcaaaagctagcagaaggcaagaaataactaagatcagagcaaaactgaaggaaatagagacacaaaaaatccttcaaaaaatcaatgaatccaggagctggttttttgaaaagatcaacaaaattgatagaccactagcaagaccaataaagaagaaaagagagaagaatcaaatagatgcaataaaaaatgataaaggggatatcaccactgatcccacagaaatacaaactaccatcagagaatactataaacacctctatgcaaataaactagaaaatctagaagaaatggataaattcctcaacacatacaccctcccaagactaaaccaggaagaagttgaatctctgaataaaccaataacaggctctgaaattgaggcaataattaatagcttaccaaccaaaaaaaagtacaggaccagacggattcacagccgaattctatcagaggtacaaggaggagctgtgttggaagttctggccagggcaatcaggcaggagaaagaaataaagtgtattcaattaggaaaagaggaagtcaaattgtccctgtttgcagacgacatgattgtatatctagaaaaccccactgtttcagcccaaaatctccttaagctgataagcaacttcagcaaagtctcacgatacaaaatcaatgtgcaaaaatcacaagcattcttatacactaataacagacaaacagagagccaaatcatgagtgaactcccattcacaattgcttcaaagagaataaaatacctaggaatccaacttacaagggatgtgaaggatctcttcaaggagaactacaaaccactgctcaacgaaataaaagaggacacaaatggaagagcattccatgcccacggattggaagaatcaatatcatga

SEQ ID NO: 20787 - DNA, 1660 bp, Homo sapiens
  SIMILAR (781)..(1122): 461254mologous to Homo sapiens golgin-like protein,accession number AF263742,Smith-Waterman Score=218.
atggctgggtactcctctgaggcaaaacttccagaggaacaatcagccagcaacatttgctgttcaccaatatctgctgttctgcaggctccgccgctgatacccagggaaacagggtctggagtggacctccagcaaactccaacagacctgcagctgagggatatagaagacttagatcactatgagatgaaagaagagcctactagtgagaagaagttggaagatgaaggaactgaaaaagaaaattgggcaatattagagaaaattaggaagactgaaaggcaaggccatttaaatttaaaagaatattggcagaggaagagccctggcattccagaaggagctaacaggaaaaagaaaatcaatggcagtagccctgacacagccacttctggtggttaccactcacctggggattcagcaacaggtatctacggggagggccgtgcatcctctactaccctggaggatctggagagccagtaccaagaactagcagtggccctggattcaagctccgcaataatcagtcaactcactgaaaacatcaattcactggctcgtgtttctggaggaggttcagcagcccctctctccagggccctctcctccctgtgctttgggcacgttcgcacatcgaaggaggagaagaagcatgagatacatcgagtacagaagcttgggtttaccaaaaccagatgggtaagatggggctggcatgacctgggaggaggactggcatcagagggctgtgggggtgacttagaatgccccagggaggagaggctgctggaagaggtggcgaagctgttagaacaggagaggtggcaagaggagcaggagaggctgctggagagggagaggctgctggacaaggtggaggagctgctggaacaggagaggctttgggagcaggatgagagactgtggcagcaggagactctgtgggagctggagaggatgtgggtgctggagaggatgctggagctgggttgggaagccctctatgagcagagggcggagtcacacagcggcttcaaggagctgaacaatgagaacaagagcgcaatgcagttggaggaacaagtaaaggagctgaagaagccgggtgaagctgaagagccaagaggctccaagtctgcggcagcagcaagaccagtacctgtgtaccgctctaggagccctgatcccacaggagcttgggtgtgcggacaagcagtgtggactccccaggagcacccaggcttgggtggagaagctgttggtacaggagaggctgcaggaggagcaggagatgctgcatgccattctttttgggctgccgagaacagggagataaacatcaccatcatctaagagcggggtcaaggaattgaaaaaaaaaaacaaaacatttaagggggttaatatcctacacaattcatttactccatttgaatgttagagcccccagcaggccatctaaggtagagcagctacaagatgagaccaccacctaaggaaggagctagagagtgtgggaagacagctcaggctgaggtggaaacaatcagatgttgagtctctgacagagcaggagagagctacgtgacagagagagctacgtgacagagagagcacgtgacagagatagcatcatgaccttgcatatatgatt

SEQ ID NO: 20788 - DNA, 5120 bp, Homo sapiens
  SIMILAR (2756)..(3040): 351254mologous to Homo sapiens Human nucleic acid-binding protein, NuABP-33,accession number B21029,Smith-Waterman Score=182.
atggggctcatgctagggacctgccggtcagggtgcagcatgagactggtgagtgtgaagcttcaggggagcactgggggaagagagtctccaagggcagagctggcttctgatttgatgaccacagcccatccccagttcacagtgctgtgtccacaagatggtgctgagaccactcaaggaaatgctcctgggtcccaggtagccagtcatccagccccaagacctttctcaaaatgggcagatgaatgtgctactaacaggtcaggagcccagatcaaagagctggtttgggaggtggataatgaaggttgtgaagtctgtgctccctctgagaagcctgaggaaaatgcaggtggctccctcaatcaacagacatccaaaatggacttcagtgctgaaagggagctggggccctgtgctatgtgcgtcaaagacattatgactcagcaccgagaaagaaagggcagggttaaaagatatgcagaaaagagggaaagcactgtaaattccagggtgtgtggaaggtcaataaagtgtcaacagaggcagagaggacaatcctcagattgtcccagtctaggcctagttaaggagtcactgtttgatatttcagaaaacatccttggaccaaacataccaaagaccaagtacaccaggacgtatctgctgtcccttgctgtcatccatcacctgatgccatccaggttgatatttctattactggttgagcattccaaatttcaaagtccaaaattccaaatgctccaggatgcaaaactgagcaccaacatgattctcaaaggaaatactcattggagcatttcagattttcagatttgggatgcacaactggtcctatattgcgacctagttggactttcgtttaaaaaaaagtctaaattatgcagaagggagacgtcaaagaaaaaggagagactgaagaacaagaaggctgaaagtaatgaaaatagaattgctagacagtgtcctggagggacaagagggaatggggtagagagagcacaggccgggtatgatgaaaacagagaagtgaccgttgatttggcaatgtggaaggcattagtgtcctcagctagagcagttttagtggcatgcccatttttcagtgaagaattttactttgagattccaagaactttccagtatttgtctttctatgtttatgataagaatgttttacaaagagatctccgtatagcgctgcggccggactcacgggtccggaagcaccatggacccccggggaaacgcgccggcggcgaaggagccgagccccatcttgatgtggaagaaatggaggactcagaaccaaggatttccaagtgatttcttccaaagcacaggaatctcactctgttaaagctggtctgttctaactgagatgacagtcatgtccctttccagggacctcaaggacgactttcacagtgacacggtactctccatcttaaatgagcagcgcattcggggcattttatgcggatgtccactatcattgtggaagatacccaaatttaaagcccatagcaatgttctggcagcttcaagcctgtattttaaaaatatcttttggagccatacaatctgaattttcagccaacgtcctggagcttgacgatcctaaaagctgaagtgtttactgaaatacttaattatatctacagttccacgagtcgttgtcaagagacaggaaacagtcactgatctcgcagctgcaggaaaaaagctgggaatatcgttcttggaagaccttactgatcgcaacttctcaaattccccgggtccctatgtattctgtattactgaaaagggagtggttaaagaagaaaaaaatgaaaaaaggcatgaagaaccagccatcactaatgggccaaggatcacaaatgcattttccatcatcgaaacagaaaatagtaataacatgttttccccgctggacttgagggcaagtttcaaaaaggtctccgactccatgagaacagctagcctttgcctggagaggacggacgtctgccacgaggcagagcctgtccgcacacttgccgagcactcatacgctgtttcttccgtagctgaagcttacagaagtcagcctgtacgtgaacatgatggcagttcacctggtaacacagggaaagaaaattgtgaagcccttgcagcgaaaccgaaaacatgccggaagccaaagacattctccataccacaggattcggattcagccacagaaaatataccaccccctccagtatccaacttagaggttaatcaagaaagaagtccacaaccagctgctgttctcactcgttcaaaatctccaaacaatgaaggagatgtccatttttccagggaagatgaaaatcaatcttctgatgttcccgggccgccagccgcagaggttccacctctggtgtacaattgtagctgctgttccaaagcctttgacagcagcactctgctcagtgcccacatgcagcttcacaagccaacccaggagcctttagtgtgcaagtattgcaacaaacaattcaccaccctgaacaggttggatcggcatgaacagatctgcatgaggtcaagccacatgcccattcctggaggaaaccaacgctttttagaaaactatcctaccattggacaaaatggaggttcattcacaggtccagaacctttattatctgaaaataggattggtgaattttccagtaccggaagtactttgccagacacggaccacatggttaaatttgttaatgggcaaatgctctacagttgcgttgtgtgcaaacgtagttatgtgaccttatctagcctccgaagacatgcaaatgttcactcctggagaagaacatatccttgccattactgcaacaaagtatttgcattggctgagtacaggacaaggcatgaaatttggcatacgggagaaagacgatatcagtgcattttctgtcttgaaactttcatgacctactatatactcaaaaatcatcagaagtctttccatgccatcgatcatagactttccatcagtaaaaaaacagcaaatggaggcttgaagcctagtgtctatccgtataaactttataggctactgcctatgaaatgcaagagagccccttataagagctaccgaaattcttcctatgaaaatgcacgagaaaacagtcaaatgaatgagtctgcacctggtacctatgttgttcagaatccacacagctctgaattaccaacgctgaatttccaagatactgtaaacaccctgaccaacagtccagccatcccattggaaacatctgcatgtcaggacatacccacttctgccaatgtacaaaatgcagagggtaccaaatggggagaggaggcattgaaaatggatcttgacaataacttttattcaactgaggtgtcagtttcttccactgaaaatgctgtcagttctgacctccgggcaggggatgtacctgttttatctttgagtaatagcagtgagaatgccgcctctgtgatcagctacagtggctctgcaccctcggtcattgtacacagcagccagttttcatcggtgatcatgcacagcaatgccattgctgccatgaccagcagcaaccacagagccttttcagacccaagctgtcagtcagtccctgaaagatgacagtaagcccgagccagataaagtgggtaggtttgcaagcagacccaaaagcattaaggagaaaaagaaaactacatcacataccaggggagaaataccggaggagtcaaactatgttgctgatcctggaggatcactgagcaaaaccacaaatattgctgaagaaaccagcaaaattgaaacctacattgcaaaacctgctctgccgggaacctccacaaatagtaatgttgcacccctttgccaaataacagtgaaaattggaaacgaagccattgtgaaaaggcacattctaggatctaaattgttttataaaagagggagaagacccaagtatcagatgcaggaggagcctttgccacaggggaatgacccagaacccagtggagacagcccactcgggctttgccaatccgagtgcatggagatgagtgaagtgttcgatgacgcaagtgaccaggattccactgacaaaccgtggcgcccttactacaactacaaacccaaaaagaaatccagacagttgaaaaaaatgaggaaagtcaactggaggaaggagcacggaaacaggagcccgagccataaatgtaaatacccagcagaactggattgcgccgtggggaaggctcctcaggataaaccctttgaggaagaagaaactaaagagatgcccaagctgcagtgtgaactctgtgatggagacaaagcagtgggggctggaaaccaaggaaggccccaccgacatcttacttctcggccatatgcctgcgagctctgcgccaagcagttccagagcccttccacactcaaaatgcacatgagatgtcacaccggggagaagccataccagtgcaagacctgcggacggtgcttttcggtgcaaggaaacttacagaaacatgaacgcatccacctgggcttgaaggagttcgtctgtcagtattgcaacaaggcattcaccttgaatgagaccctcaaaatccatgaaagaatccatactggagaaaagcgttaccactgtcagttctgctttcagagatttttgtatctctccaccaaaaggaatccacgagcagaggcatattcgggagcataatgggaaggggcttatgcctgctttccagtgccccaaaaatttgcaaaaacaagctgcagccctttggaatgcacccaaaaggaaccactttttttcaaaagcccaagtcagcaggggaaattagggtgacgtgtgccacgaaaactcaaatcccttggagaatcaacatttcattggttcagaagacaatgaccaaaaggataacatacaaaccggtgtggaaaatgttgtcctttgagtggcaagaattagaaaaatcttcaaaaatatagttggtggtttttttagttatgatttaagtttagtttcattttgtccatgtgacagtcatgaaggagtgaaatt

SEQ ID NO: 20789 - DNA, 257 bp, Homo sapiens
agcgttatctaactcctggagggtggactctgtcctggcttgtttggtgtcctcagatatctttcacacagtagagcaaaatcaccagccctgcactgatgtcactttatgtagaaaaaggccttagctggacctgtgttgccgtctatgcaaatgcatgcaaatactccaggcaatctgattctgaagctaaagagctttcatccccttgccttgcccttccaacaaaccctaggcccttgagaagctgatacttc

SEQ ID NO: 20790 - DNA, 693 bp, Homo sapiens
  SIMILAR (223)..(423): 981254mologous to Homo sapiens Human secreted protein, SEQ ID NO: 5792,accession number G01711,Smith-Waterman Score=331.
atgaagcggaagagacaggcagcacctctcttctctcaccagaaccttgtgtccaaggaggtccttcaggagacctgggatgagtggtgcttccccaaaacagactcatggacattaaacatcatcagaatggcacaagagggcaaagaagaaaacagcctcataccactcctggtgaaccccatgaacatctacgaagaacagaagattatgttcttgtacagcttgagcctgccagtggagacactgggcccggcatccaggatggacccagaatctgagagagccctgcaggcccctcacagcccctccaagacagatgggaaagaattagctgggaccatggatggagaagggacgctcttccagactgaaagccctcagtctggcagcattctaacagaggagactgaggtcaagggccctgcatactcacatctgacggagtttgcaccacccccaactcccatggtggatcacctggttgcatccaacccttttgaagatgacttcggagcccccaaagtgggggttgcagcccctccattccttggcagtcctgtgcccttcggaggcttccgtgtgcaggggggcatggcgggccagcccagtgctcctcctgccttgcaaacggacgacccgtactccaaagctcactccgtgacacccaaaagcactcctcgtgtcacgtga

SEQ ID NO: 20791 - DNA, 3270 bp, Homo sapiens
  SIMILAR (404)..(1963): 891254mologous to Homo sapiens hematopoietic PBX-interacting protein,accession number AF221521,Smith-Waterman Score=2379.
ggcacgaggcaagagctggttcaggtggcagccacagcagcctcagggacctcagcaactatggcctcctgcccagactctgataatagctgggtgcttgctggctccgagagcctgccagtggagacactgggcccggcatccaggatggacccagaatctgagagagccctgcaggcccctcacagcccctccaagacagatgggaaagaattagctgggaccatggatggagaagggacgctcttccagactgaaagccctcagtctggcagcattctaacagaggagactgaggtcaagggcaccctggaaggtgatgtttgtggtgtggagcctcctggcccaggagacacagtagtccagggagacctgcaggagaccaccgtggtgacaggcctggggaccagacacacaaggacctggaaggccagagccctccacagagcctgccttcaacccccaaagcagcttggatcagggaggagggcccgctgctccagcagttgacgatgacacccgacgtggacatggaggggtctgcggagacggcggggccggggaggccggcccacctcagcccatggtgcccctggctgtggagaaccaggctgggggtgagggtgcaggcggggagctgggcatctccctcaacatgtgcctccttggggccctggttctgcttggcctgggggtcctcctcttctcaggtggcctctcagagtctgagactgggcccatggaggaagtggagcggcaggtcctcccagaccccgaggtgctggaagctgtgggggacaggcaggatgggctaagggaacagctgcaggccccagtgcctcctgacagtgtccccagcctgcaaaacatgggtcttctgctggacaagctggccaaggagaaccaggacatccggctgctgcaggcccagctgcaggcccaaaaggaagagcttcagagcctgatgcaccagcccaaagggctagaggaggagaatgcccagctccggggggctctgcagcagggcgaagccttccagcgggctctggagtcagagctgcagcagctgcgggcccggctccaggggctggaggccgactgtgtccggggcccagatggggtgtgcctcagtgggggtagaggcccacagggtgacaaggccatcagggagcaaggccccagggagcaggagccagaactcagcttcctgaagcagaaggaacagctggaggctgaggcacaggcattaaggcaagagttagagaggcagcgacggctgctggggtctgtacagcaggatctggagaggagcttgcaggatgccagccgcggggacccagctcatgctggcttggctgagctgggccacagattggcccagaaactgcagggcctggagaactggggccaggaccctggggtctctgccaatgcctcaaaggcctggcaccagaagtcccacttccagaattctagggagtggagtggaaaggaaaagtggtgggatgggcagagagaccggaaggctgagcactggaaacataagaaggaagaatctggccgggaaaggaagaagaactggggaggtcaggaggacagggagccagcaggaaggtggaaggagggcaggccaagggtggaggagtcggggagcaagaaggagggcaagcgacagggcccgaaggaacccccaaggaaaagtggtagcttccactcctctggagaaaagcagaagcaacctcggtggagggaagggactaaggacagccatgaccccctgccatcctgggcagagctgttgaggcccaagtaccgggcaccccagggctgctcaggtgtggacgagtgtgcccggcaggagggcctgactttctttggcacagagcttagccccagtgcgggcaacaggagcttggcctctctgcttaagaacatacttggcacggctgccctgggctgggcagctgaccaaggagctacccctctcacctgctttctttggtgaggatggcatcttccgtcatgaccgcctccgcttacgggatcttgtggatgccctggaggacagcttggaggaggtggctgtgcaacagacaggtgatgatgatgaagtagatgcctttgaggacttcatcttcagccacttctttggagacaaagcactgaagaagaggtcagggaagaaggacaagcactcacagagcccaagagctgcagggcccagggaggggcacagccatagccaccaccaccaccaccggggctgacaccctgccccacagggaatggccttggcctggcccagcccaagatcccagcgttatctaactcctggagggtggactctgtcctggcttgtttggtgtcctcagatatctttcacacagtagagcaaaatcaccagccctgcactgatgtcactttatgtagaaaaaggccttagctggacctgtgttgccgtctatgcaaatgcatgcaaatactccaggccctgggatgtgggcttgtgttttgtcactgtgaagggggaaatgggaaaggagcctgttttggggtggggtcttgggaaaggcaatctgatttctgaagctaaagagctttcatcctcttgagtgtatgtccccatagtgggccccttgacccacatggttgaccggtgccttgggatttgactagagttgctggctcgaggcccagcacgaggacttaccctggggttttgttaggtttgggaagcagctgtccctagggggtgaagtcccccccctttttttttttttaccccctgcttctccccacgggcttcacctcccctatgtgaacttgtagactcaagatccccaataaaggtgctgttgcaagctaatgatgcctaggtggttttcttaagcaccaggggacaaccccacacccccctgccctgaatggatgggtcccatccccaggcactgggtactttgccccctttgttctgtaatcccccttttggcctttgccttggccctttccaacaaaccctaaggcccttgagaagctgatacttctccttttgctcacagctgccttggccccacccctgggagcatgtagcaaattgagtgtgggttttggagttctgagcctcaggctcaaatccaggccaagtgatcttgggcaagttaatctctgggaactttggggttttcttaatcctcaaaaaaggcgatggaagggctggggaagtgattaaataaaagcaacgcaagaaaaatgaaaaaaaaaaaaaaaaaa

SEQ ID NO: 20792 - DNA, 386 bp, Homo sapiens
  SIMILAR (140)..(385): 961254mologous to Homo sapiens PGM1,accession number M83088,Smith-Waterman Score=385.
tttcgtggagggccctgtcccctgtccctttaaggaggaggtcctgacgccggcctagagtgcggcgtattccccacccgccgtgccctcaccccatagccaagtccgccgttctgacccccggctgcaaggcgccaccatggtgaagatcgtgacagttaagacccaggcgtaccaggaccagaagccgggcacgagcgggctgcggaagcgggtgatggtgttccagagcagcgccaactacgcggagaacttgatccagagtatcatctccaccgtggagccggcgcagcggcaggaggccacgctggtggtgggcggagacggccggttctacatgaaggaggccatacagctcatcgctcgcatcgctgcctgcaacggga

SEQ ID NO: 20793 - DNA, 531 bp, Homo sapiens
  SIMILAR (247)..(531): 871254mologous to Homo sapiens reverse transcriptase homolog= pol {retroviral element},accession number S61070,Smith-Waterman Score=415.
atggtgaagatcgtgacagttaagacccaggcgtaccaggaccagaagccgggcacgagcgggctgcggaagcgggtgaaggtgttccagagcagcgccaactacgcggagaacttcatccagagtatcatctccaccgtggagccggcgcagcggcaggaggccacgctggtggtgggcggggacggccggttctacatgaaggaggccatccagctcatcgctcgcatcgctgccgccaacgggcaagctgaactcactgccttaactcgagacctcgctctcgcaaaaggactacgcgtcaatatttatactgactgtaaatatgccttccatatcttgcaccaccatgctgttatatgggcagaaagaaatttcctcactatgcaagggtcctccatcattaatgcctctttaacaaaaactcttctcaaagccgctttacttccaaaggaagctggagtcattcactgcaaaggccatcaaaaggcatcagatcccatcgctcaagacaatgcttatgctgataag

SEQ ID NO: 20794 - DNA, 222 bp, Homo sapiens
  SIMILAR (55)..(123): 431254mologous to Simian immunodeficiency virus gag protein,accession number M58410,Smith-Waterman Score=55.
atgtcgcaaaacaaggcagaaatctgtagccaagtacgtctcactcagaggaaagaactgattgggacagaaggcactaaaaattgcatttttgcattttgttgctttgtttggtctgatcacctgcttgggcagaacacaccactgggtcttagatttggtgggggcagggagaggcagtttcatgtgtcttcacagaacagtctgcagacctgcagcttg

SEQ ID NO: 20795 - DNA, 951 bp, Homo sapiens
  SIMILAR (58)..(393): 911254mologous to Homo sapiens PGM1,accession number M83088,Smith-Waterman Score=509.
atggccgctaatgtgctgtgtggccttgtcgtgtcatctacgccagtgtctgccataatcggtcgcttggttatcggacagaatggaatcctctccacccctgctgtatcctgcatcattagaaaaatcaaagccattggtgggatcattctgacagccagtcacaacccagggggccccaatggagattttggaatcaaattcaatatttctaatggaggtgagtttgctgtcattttgaggacaggtcctgctccagaagcaataactgataaaattttccaaatcagcaagacaattgaagaatatgcagtttgccctgacctgaaagtagaccttggtgttctgggaaagcagcagtttgacttggaaaataagttcaaacccttcacaggcatgtttactttcctcctctttctgcccactcctatttccaagttgagcgattttcctttcaacgttttagtagagggtcttcagctttggaaagatttccctgcggatactcccagttctgtggcccctggaatggcttcaaaaatttcctcctccctgatcgtatttcaactgcttttcctgcctccacttggcaacagcttggaagttaaaagctcaggggaggaagaaggaggtggctggagccatggggcagtggagggcttccaaagagatgccgcagtgtgtgtgccccagggagtgcgggagaggagtcctgagaggcgggcagcagcacccagccaggcttccccgccttccagcgttgatgtggtctccccttccctctacaaactgattactccttcaaaagcttcagcagagtggtccctaatgggttccgacgtggcaggaatggggctcacacagcacagagataagggcccagcagcagggccaaaacgcttccagtgctacagcccagatgctccaccacaaaagaaagcaacgaactga

SEQ ID NO: 20796 - DNA, 1244 bp, Homo sapiens
  SIMILAR (357)..(575): 891254mologous to Rattus norvegicus phosphoglucomutase,accession number L11694,Smith-Waterman Score= 323.
agaattttgatacaaagaggaatgaactaacaagacaaggatttatggatttgaatctaatggaagctaatgatcgagaaggagatccttgtgacctttgggtaactctacactctatgggctacaataaagctctggagttgacagagctgcttgctgtcccccctccaggttctgaccacatccgtgagaaagatggactgtgggctgtccttgcctggctctccatcctagccacccgcaagcagagtgtggaggacattctcaaagatcattggcaaaagtattggccggaatttcttcaccaggtgagccacagcccagctggggtacaaggccttggtgtgatctgcagtcagcccgtgggcctcaacttcgtgacttcttccaggtatgattacgaggaggtggaagctgagggcgcaaacaaaatgatgaaggacttggaggccctgatgtttgatcgctcctttgtggggaagcagttctcagcaaatgacaaagtttacactgtggagaaggccgataactttgaatacagcgacccagtggatggaagcatttcaagaaatcaggtagaaacagaccggtgtgtaatggtttatgcccttgttctgtgcactgtccagtaccctcattctgggattcttaacctggactccagagggatttttgcactctctggaatgatatgcaagatgatgtgtccattgtacatgcagaaaggagccccagaatctaagaaagagggagaactgtgggaacttagatgtcaactcctctcttttctgtcagcagattatagcagagtgacagcattgctaatgaatggcaccattaaacaccagatggggattggtgacgaacagcaggtgaagagcagcatctttttgggcttgcgcctcattttcacagatggttctcgaatcgtcttccgactgagcggcactgggagtgccggggccaccattcggctgtacatcgatagctatgagaaggacgttgccaacattaaccaggacccccacctaacgcccagccctgtgccctgcaggaatgggggtggaagggaaaggaaggaaggcactgtgactgacagccctggggccacatggaatctgagaggagtttcgccccaggaacagagtgctgattatagaagagaaatgaggaagattgtgggatatccaaaaacactgacaaaacaatattataatgaacaaaaagctataagaaactattga

SEQ ID NO: 20797 - DNA, 2620 bp, Homo sapiens
  SIMILAR (166)..(1476): 551254mologous to Homo sapiens PGM1,accession number M83088,Smith-Waterman Score=912.
tttcgtctgtcccctgtccctttaaggaggagggccatacgccggcctagagtgcggcgtagcccccacccgccgtgccctcaccccagagcagctgcagcctcagccggccgcccctccgccagccaagtccgccgctctgacccccggcagcaagtcgccaccatggtgaagatcgtgacagttaagacccaggcgtaccaggaccagaagccgggcacgagcgggctgcggaagcgggtgaaggtgttccagagcagcgccaactacgcggagaacttcatccagagtatcatctccaccgtggagccggcgcagcggcaggaggccacgctggtggtgggcggggacggccggttctacatgaaggaggccatccagctcatcgctcgcatcgctgccgccaacgggatcggtcgcttggttatcggacagaatggaatcctctccacccctggctgtatcctgcatcattagaaaaatcaaagccattggtgggatcattctgacagccagtcacaagccagggggccccaatggagattttggaatcaaattcaatatttctaatggaggtcctgctccagaagcaataacttgataaaattttccaaatcacgcaagacaattgaagaatatgcaagtttgcccctgaccttgaaagtagaccttggtgttctgggaaagcagcagtttgacttggaaaataagttcaaacccttcacagtggaaatttgttggattcggtagaagcttatgctacaatgctgagaagcatcgtttgatttcagtgcactgaaagaactactttctgggccaaaccgactgaagatctgtattgatgctatgcatggagttgtgggaccgtatgtaaagaagatcctctgtgaagaactcggtgcccctgcggaactcggcaggttaactgcgttccctctggaaggacttttggaggccacccaccccttgacccccaacctcaccctatggcagctgaccttgggtggagaccatgaagtcaggagagcatgattttgggggctgcctttgatggagatggggatcgaaacatgattctgggcaagcatgggttctttgtgaacccttcagactctgtggctgtcattgctgccaacatcttcagcattccgtatttccagcagactgggggtccgcggctttgcacggagcatgcccacggagtggtgctctggaccgggtggctagtgctacaaagatttcttttgtatgagaccccaactgggctggaagttttttgggaatttgatggacgcgagcaaactgttccctttgtggggaagaaagccttcgggacgggttctgaccacatccgtgagaaagatggactgtgggctgtccttgcctggctctccatcctagccacccgcaagcagagtgtggaggacattctcaaagatcattgggcaaaagcatggccggaatttcttcaccagggtattgattacggagggaggtgggaagcttgaggggcgcaaacaaaatgatgaaggacttggaggccctgatgtttgatcgctcctttgtggggaagcagttctcagcaaatgacaaagtttacactgtggagaaggccgataactttgaatacagcgacccagtggatggaagcatttcaagaaatcagggcttgcgcctcattttccaaaatggttttcgattcttcttccggatgaaacggcacgggaagtgccggggcccccaattcgcctgtacatcaatagctatgagaaagaacgttgccaagattaaccaaggaccccccagggtccatgttggcccccccttattttcccattgccctgaaaagtgtcccggcttgcaggagaggacgggagcgcacttgcacccactgtcatcacctaagaaagatagtcctgatgtggtatgtccctccacccccgggaccccatcccaagtcatctgattgaaagagcatgaccagaaaccaaaatgtaattcaccaaagccatttttaggaatttgactttttcactaacccagttggacggagcagtgcatttaaccagggcactgcccaaaacaagatgccccttggggagctgtgaggggaaagagggaccctgtggggcttaagaatcaatcctcaattcccttttccatgcccctccctgcattgcctgcctgccgtggggtatttgtcgtccttagcccatcagggtacagttttacacttacaatgttaaggctatagggtggggagcattcaggcagttgaggtgaggggccttctttcatcccttagggtgtgggcaatgaaaatgatgggtgcaagttcctttctcttttgtgaatctttccccccatttcctgttttacatgtaacccaacaaaatgcaatttctaagtgccttctgtccaatcagttctttcctctgagtgagacgtactatggctacagatttctgccttgttttgcgacattgtcccattcacacaagatattttggggataataaaggaaaataagctactaaaaataaaaaaaaggggccccccttcattaaaaaaccattttatagcccccatttaggaacctaattcctttctttatgggccg

SEQ ID NO: 20798 - DNA, 548 bp, Homo sapiens
  SIMILAR (548)..(384): 981254mologous to Homo sapiens putative glycolipid transfer protein,accession number AF103731,Smith-Waterman Score=283.
  misc_feature (1)...(548): n = a,t,c or g
tttttttggcaagcaattgagctttattttcttgtaatataatttaatttctcttttgagacctcattctatctgatggcagaaaaacaatcaaataagttccagatagactcagtcatttcagggttttctcaggcattttagatctcacttaactcaggatactctcacatacttccttctctccaggaggcatctcggggcttgctgggcatcctggcccaggagaggcatttagtccaggctgatcccctggagagaggcgtcacccagatgtgatgcatcctgtctcatgctgggtcatcatgtcctgcaggccactctgcacccgcctgattctgagtgacagccctcctgggccaccatcagacatttgtgtgtcccgcaaaaacccctcgaactacccagccatggtgttgccgcaatgttttaccatatgcattatttagggctgtctggatatccttctccccatttttcacttctgtcaaaaatcccttcaaaaatntgagacctctcttcagccacaagagggcttcagtcgctga

SEQ ID NO: 20799 - DNA, 1494 bp, Homo sapiens
  SIMILAR (1)..(1173): 1001254mologous to Homo sapiens putative glycolipid transfer protein,accession number AF103731,Smith-Waterman Score=2005.
atgtcagaactaagactctgctgtgacctccttgttcagcaagtagataaaacaaaagaagtgaccacaactggtgtgtccaattctgaggagggaattgatgtgggaactttgctgaaatcaacctgtaatacttttctgaagaccttggaagaatgcatgcagattgcaaatgcagccttcacctctgagctgctctaccacactccaccaggatcaccacagctggccatgctcaagtccagcaagatgaaacatcctattataccaattcataattcattggaaaggcaaacggagttgagcacttgtgaaaatggatctttaaatatggaaataaatggtgaggaagaaatcctaatgaaaaataagaattccttatatttgaaatctgcagagatagactgcagcatatcaagtgaggaaaatacagatgataatataaccgtccaaggtgaaataatgaaggaagatagaatggaaaacctgaaaaatcatgacaataacttgtctcagtctggatcagactcaagttgctctccagaatgcctctgggaggaaggcaaagaagttatcccaactttctttagtaccatgaacacaagctttagtgacattgaacttctggaagacagtggcattcccacagaagcattcttggcatcatgttgtgctgtggttccagtattagacaaacttggccctacagtgtttgctcctgttaagatggatcttgttgaaaatattaagaaagtaaatcagaagtatataaccaacaaagaagagtttaccactctccagaagatagtgctgcacgaagtggaggcggatgtagcccaggttaggaactcagcgactgaagccctcttgtggctgaagagaggtctcaaatttttgaagggatttttgacagaagtgaaaaatggggaaaaggatatccagacagccctgaataacgcatatggtaaaacattgcggcaacaccatggctgggtagttcgaggggtttttgcgttagctttaagggcaactccatcctatgaagattttgtggccgcgttaaccgtaaaggaaggtgaccaccggaaagaagctttcagtattgggatgcagagggacctcagcctttacctccctgccatgaagaagcagatggccatactggacgctttataagaggtccatgggctggaatctgatgaggttgtatgatggctgctgggcagcacctcctaacttcagggaataaagtgctaaagtgttttgttgccctacttaatttccagcaacagcctcaaccctctccaaccccttcacctggggggatggacaggaggtggcaaaacccagtgcttttataatttttaaaatgcatatgtgttttgtttaaagatcaaggtgctatatatttcagttcagcaggcctactggaaaccaaatgataagctgctgtagacttgaacagcaagttataagagcagatttaacaaacaa

SEQ ID NO: 20800 - DNA, 2094 bp, Homo sapiens
  SIMILAR (133)..(669): 951254mologous to Homo sapiens Similar to putative glycolipid transfer protein,accession number BC002838,Smith-Waterman Score= 915.
atgggagttgagctgttcacaccagccagcgtcatgggagtgaaaagatgctgttgttctataccaggacagctttctgggaatggggagccaaggttctcagaaattgactcttctgtttcagtgaggggaggttggcagcctcgatggttccttctctgtgggggaatattgtcctattatgattctcctgaagatgcctggaaaggttgcaaagggagcatacaaatggcagtctgtgaaattcaagttcattctgtagataatacacgcatggacctgataatccctggggaacagtatttctacctgaaggccagaagtgtggctgaaagacagcggtggctggtggccctgggatcagccaaggcttgcctgactgacaagtttgctgaaaacactgaaaacttgaaaaccaaaatgtcagaactaagactctactgtgacctccttgttcagcaagtagataaaacaaaagaagtgaccacaactggtgtgtccaattctgaggagggaattgatgtgggaactttgctgaaatcaacctgtaatacttttctgaagaccttggaagaatgcatgcagatcgcaaatgcagccttcacctctgagctgctctaccgcactccaccaggatcacctcagctggccatgctcaagtccagcaagaaagtaaatcagaagtatataaccaacaaagaagagtttaccactctccagaagatagtgctgcacgaagtggaggcggatgtagcccaggttaggaactcagcgactgaagccctcttgtggctgaagagaggtctcaaatttttgaagggatttttgacagaagtgaaaaatggggagaaggatatccagacagccctaagtttctcatcaaatgttgtacttgatttggagactgggcccaggggatgtattgactttgtgaagaaagaggagactttgaagggcaaatgctgctttgtgactgcaataatcacagccagtctcagctttttcttccctctcttctccttcggcacaattttcaatggaaaagagaagggaggctgtaaatttgacatttttgtcctgatgttcaggcttatttcaaagaagacacagacacaacaagctctgcgtaaacggttttttgagaaatgtttacacaatagttactcagaacctgtaggctccttgatgcatatttcttctgggataatggttcctttttctcattttgaagtcccagccttcataagtagaactgataccttgtttgaaatgagggaggataatgcatatggtaaaacattgcggcaacaccatggctgggtagttcgaggggtttttgcgttagctttaagggcagctccatcctatgaagattttgtggccgcgttaaccgtaaaggaaggtgaccaccagaaagaagctttcagtattgggatgcagagggacctcagcctttacctccctgccatggagaagcagctggccatactggacactttatatgaggtccacgggctggaatctgatgaggtgctgtaccctttggggtgcttggactgctgtccagagggtgaacagagctggtttcagaaaaagaatgtgtttggatgtctgtcccaacttccagtgggtagaggagtacagctgccttgtggtcatgagggtccagcaaaggagaacagagtgtggctgtgcatgccacttgctattactccagaatctgcagaggcacaaaatagagataaccacctttggagcagtgtggttcgggttgatggagaattgatgaacgatgatggtctgacatcagcactgaggacacagatcacgtttgggatgatttgctgtgtgaatgcattgtcctcagagaacaaagttgtcgcatctttgctgacacttgtaagattcactgctgcccctagtctccccactttgcactgtgtgtcacggcaccttcaagtagaagaccctcatctagtcatgtctgtatgtgaatgtggcactaccatttccttgcctgagccccggagccagctgcagtgctccacagctgtatcccagttggaggattccagaagaatggctgagcattag

SEQ ID NO: 20801 - DNA, 453 bp, Homo sapiens
  SIMILAR (138)..(452): 971254mologous to Homo sapiens ras inhibitor,accession number M37190,Smith-Waterman Score=527.
atgaagaaaccaaaagcgtagcaaggtcaagccaagatgcaagcgcgactgacacggtcccttggcaggccttgtctatacttctggtggcagggaattaccgctgccttccagttggttttatgtggcgggaaggtgacctcagagatgtggtgctggaaaaagccatgcacaagtgcatcttgaagcccctcaaggggcatgtggaggccatgctgaaggactttcacatggccgatggctcatggaagcaactcaaggagaacctgcagcttgtgcggcagaggaatccgcagaagctgggggtcttcgccccgacccctgattttgtggatgtggagaaaatcaaagtcaagttcatgaccatgcagaagatgtattcgccagaaaagaaggtcatgctgctgctgcgggtctgcaagctcatttacacggtcatggagaacaactcag

SEQ ID NO: 20802 - DNA, 455 bp, Homo sapiens
  SIMILAR (121)..(2): 701254mologous to Homo sapiens Protein deduced from human Glioblastoma cell cDNA,accession number R14839,Smith-Waterman Score =146.
ggtccaattcaagcatgtcacactgggctatgacataggtcaggactggcaagaagtcatcagcgccatacatcctccctgagagcaggaagagaaggagatggaatatttttaccaacttttctttctttcacatccttcttgctgcttttattagacagcaaggagtcactctggggggaactgtgctatttataaacagaggtgagtgtttctggaatcctatgtagcctctgaccctcccagctgctaatgttagagaccagcccttacagtttcagaatgaatgtctatgaaccaatgaacacattacagattttctccctacttttataatttgtataaaattatgtgatagaacagaatactcgttaaaatattttaactttcagcaaacaagattataaaatgcttacaaaatatttacttatgctaattctttgtgtcttacttcc

SEQ ID NO: 20803 - DNA, 1314 bp, Homo sapiens
  SIMILAR (1059)..(1091): 811254mologous to Bacteriophage P1 non-essential to replication and lytic development,accession number X15639,Smith- Waterman Score=47.
atgttggaacatgggggtctcatcgtgcaggaagatgaggtggactggagctttttcgtgaccaccatgtcggtgaggttgcggttcctgtcccctggggacacaggggccgtgggggtcgtgggccggagcgcctccttcgcaggcttcagcagtgcacagagccggaggatcgcaaacctgccttttcccgagtctgcagccctgaccgtctctgccagcctcaagatggcaaacttgcggagggcccggttcaagagaaagtccatcaacaggaactccgtgagatcgcgaatgcctgcaaaatcctccaagatgtacggcacgctgcggaaggggtcggtctgtgcagacccgaagccccagcaggtgaagaagatcttcgaagcattgaaaagaggcctcaaggagtatctgtgtgtgcagcaggctgagctggaccacctgtctggacgccacaaagacaccaggaggaattccaggctgggccgtggcaagaagcaccagagcacaagcccgaccacagaaacactttttagagccagtgctcatggcatttattctattgggcaatgcaggtcatgccgggaaaccccacatcaaagggcagggaaatatgctctgcctctacgtggggaactgcaaagccacatggcacagggtgtggataaatcgaagggtaaagaattgaaggtcgaaggccgtggcggcggcacttttgcccatgaattgctcgctgtggagtacgcaggctgcatttctcccgcatttcgggtgaaggtaaaccagacatttatcgactatcgaaccctaagattacaacctgctattccgcagagcctccctgaagctctccgtttggctgccgacctggcagagcaaaagcaacggctggagcaaaaaatgcttatggatgcacctaaagtcgaattctctgaacgcgttgctaccgccagcggggttctaatccgcaactatgccaaagtgctcggcctgggccaaaactatctcttcacctggttgcgtgataacggaattctgatcgcaaccggtgaacgcagaacgtccccaaacaagaatacatatttcgggcatgtggaggccatgctgaatgactttcacatggccgatggctcatggaagcaactcaaggagaacctgcagcttgtgctgcagaagaatccgcaagagctgggggtcttcgccccgacccctgattttgtggatgtggagaaaatcaaagtcaagttcatgaccatgcagaagatgtataccccagaaaagaagggcatgctgctgatgcggctctgctag

SEQ ID NO: 20804 - DNA, 551 bp, Homo sapiens
  SIMILAR (9)..(299): 391254mologous to Rattus norvegicus RIN1,accession number U80076,Smith-Waterman Score=166.
ccaagatgcagaagaaagtcctctccctccgcctgccctgtgaatttggggccccactcaaggaatttgccataaaggaaagcacatacaccttttccctggaaggctcaggaatcagtttcgcagatttattccggctcattgctttctactgcatcagcagggatgttctaccatttaccttgaagttgccttatgccatttcaacagccaagtcggaggctcagcttgaagaactggcccagatgggactaaatttctggagctccccagctgacagcaaacccccgaaccttccacctccccataggcctctttcctccgacggtgtctgtcctgcctccctgcgtcagctctgccttataaatggagtgcattctatcaaaaccaggacgccttcagagctggagtgcagccagaccaacggggccctgtgctttattaatccccttttcttgaaagtgcacagccaggacctcagtggaggcctgaaacggccgagcacaaggactcccaacgcgaatggcacggagcggactcggtcccccccc

SEQ ID NO: 20805 - DNA, 3252 bp, Homo sapiens
  SIMILAR (2128)..(3057): 781254mologous to Homo sapiens ras inhibitor,accession number M37190,Smith-Waterman Score=1199.
atagcaaaactctggaaacaactaagcctctatcaaaatagaatggatatgtggattgtggtatatccctatggtggaaaaccgttcccacttacaacaaatgaaccagggcttccacgcctctccacttcctgacgtcatactatttttgtctttgaatagctcattgacacaattgcctcggagatcggagaactgaaacaggagatggtgcgggaaatggtactgcagccagctgaccgtgccgcttctctttctcctagcatggtaagacacaaggatggtggctattccgaggaagaggacgtgaagacctgtgcccgggactcaggctatgacagcctctccaacaggctcagcatcttggaccggctcctccacacccaccccatatggctgcagctgagtaacattctagatatttcctaaagcttgtatttcttttccctccactagatcttcctggttcataaatctaccaagatgcagaagaaagtcctctccctccgcctgccctgtgagttaggggagggtaaaacctgccaggctgactgtgaaccgcctccagctcaattgtcaacctggatcttacaagtccacaaggtcatggatgccagggaaaaacttccccctgaaaggcgcacaagctctctctttttctgaacaatcagggatgttctaccatttaccttgaagttgccttatgccatttcaatagttttcctcctttggtggttttaatgctgaatgtgtaaaaccctaggcagattgtgtaacatcccccaggcccagctgctggtcctgcccattaaaggggaacttcaaggcccgattccttggctggcagctgcactgagctccccagctgacagcaaacccccgaaccttccacctccccataggcctctttcctccgacggtgtctgtcctgcctccctgcgtcagctctgccttataaatggagtgcattctatcaaaaccaggacgccttcagagctggagtgcagccagaccaacggggccctgtgctttattaatccccttttcttgaaagtgcacagccaggacctcagtggaggcctgaaacggccgagcacaaggactcccaacgcgaatggcacggagcggactcggtcccccccacccaggcccccgccacccgctattaatagtctccacacaagccctcggctggccaggactgaaacccagacgagcatgccagaaacagtcaaccataacaaacatgggaacgtagctctgcctggaacgaaaccaactcccatccctccaccccggctgaagaagcaggcttcttttctggaagcagagggcggtgcaaagaccttgagcggcggccggccgggcgcaggcccggagctggagctgggcacagctggcagcccaggtggggccccgcctgaggccgccccgggggattgcacaagggccccgccgcccagctctgaatcacggcccccgtgccatggaggccggcagcggctgagcgacatgagcatttctacttcctcctccgactcgctggagttcgaccggagcatgcctctgtttggctacgaggcggacaccaacagcagcctggaggactacgagggggaaagtgaccaagagaccatggcgccccccatcaagtccaaaaagaaaaggagcagctccttcgtgctgcccaagctcgtcaagtcccagctgcagaaggtgagcggggtgttcagctccttcatgaccccggagaagcggatggtccgcaggatcgccgagctttcccgggacaaatgcacctacttcgggtgcttagtgcaggactacgtgagcttcctgcaggagaacaaggagtgccacgtgtccagcaccgacatgctgcagaccatccggcagttcatgacccaggtcaagaactatttgtctcagagcttcctccgaatgccttgggaggctccatttattgccctcacttctatagatgaagaaaccaaaggcgtagcaaggtcaagccaagatgcaagcgcgactgacacggtcccttggcaggccttgtctatacttctggtggcagggaatttcttctttcttcagacaatagtcatagtagctacactttctttggcagatgtggtgctggaaaaagccatgcacaagtgcatcttgaagcccctcaaggggcacgtggaggccatgctgaaggactttcacatggccgatggctcatggaagcaactcaaggagaacctgcagcttgtgcggcagaggaatccgcaggagctgggggtcttcgccccgacccctgattttgtggatgtggagaaaatcaaagtcaagttcatgaccatgcagaagatgtattcgccggaaaagaaggtcatgctgcaagaaaagttggtaaaaatattccatctccttctcttcctgctctcagggaggatgtatggcgctgatgacttcttgccagtcctgacctatgtcatagcccagtgtgacatgcttgaattggacactgaaatgagcggaggttggcactgggaggacccactctttctgctcttttcaggaggctattacttgacaagcgcatatggagcactttctctgataaagaatttccaagaagaacaagcagcgcgactgctcagctcagaaaccagagacaccctgaggcagtggcacatctagttttctcttctgactgtctcaacattcctcttccacctgcagaattacctccgagttgcatttcaggaggtcaacagtggttgcacaggaaagaccctccttgtgagaccttacatcaccactgaggatgtgtgtcagatctgcgctgagaagttcaaggtgggggaccctgaggagtacagcctctttctcttcgttgacgagacatggcagcagctggcagaggacacttaccctcaaaaaatcaaggcggagcgtgccacagccgaccacagccccacatcttccactttgtctacaaacgcatcaaggaacgatccttatgggcatcattttccaggaacggggaaggaggacctcaccacctcctaggaaggacagggcgggatttcccagtggtggcttccaaaggggagctggaagccttgccttcccgcttctacatgcttgagcttgaaaagcagtcacctcctcggggacccctcagtgtagtgactaagccatccacaggccaactcggccaagggcaactttagccacgcaaggtagctgaggtttgcgaaa

SEQ ID NO: 20806 - DNA, 445 bp, Homo sapiens
  SIMILAR (134)..(442): 971254mologous to Homo sapiens 06-OCT-1998 Human p0071 coding sequence,accession number A09308_cd1,Smith-Waterman Score=537.
  misc_feature (1)...(445): n = a,t,c or g
cggagcatttataaaaaggatgggtggaatcagaaccattttattacacctgtgtcgacattggagcgagaccgattcaaatcacatccttccttgtctaccaccaaccaacagatgtcacccatcattcagtcagcatcaacagctgtattatagtcaagatgactccaacagaaagaactttgatgcatacagattgtatttgcagtctcctcatagctatgaagatccttattttgatgaccgagttcactttccagcttctactgattactcaacacagtatggactgaaatcgaccacaaattatgtagacttttattccactaaacgaccttcttatagagcagaacagtacccagggtccccagactcatgggtgtagcatcaagatgcccaacagaggaactctttctttctaaccttgntcagattgaggtgaana

SEQ ID NO: 20807 - DNA, 660 bp, Homo sapiens
  SIMILAR (660)..(187): 981254mologous to Homo sapiens Human resenilin binding armadillo protein p0071,accession number Y23899,Smith-Waterman Score=808.
ttttgttgctaattagtttattgaagcaagcgaagaagatacagaagggcatgcatgctaaagaggtgatctgtaagataaagcaggctgctgcaaatcggaagcaaccatgcacttcagttggtatgtgcatttccttttgcccagagcttggtgttgaaatgtagcatctgcaattttctgagcagggtacaggcctttatgtgtggcatccccttggctattgtaatactgcataggtggctgggtcctatcgtattcagagcgagggtctctgattcctaacagtgctggtgaggaagaggtgctgccgactgactgaatgatgggtgacatctgttggttggtggtagacaaggaaggatgtgatttgaatcggtctcgctccaatgtcgacacaggtgtaataaaatggttctgattccacccatcctttttataaatgctccggaggtcccgatattgccataatgtattcaagacctgggctgctgccttcaccactttcagagatgatctgtcgcccctgcctttggttatgttcaccagcttctctatgcctcctgagtcggccagggcttttgcgttctccatgtttttgctggtgacctcgtgcagagcacagcagatggctgccatggtctcattaaacaaaacact

SEQ ID NO: 20808 - DNA, 485 bp, Homo sapiens
  SIMILAR (368)..(394): 881254mologous to Homo sapiens Human resenilin binding armadillo protein p0071,accession number Y23899,Smith-Waterman Score=42.
ttgtcccacattctggatggaataactcttcttttgatgatgatcataaaattaaatttcagacttcactagtttctgcgtaacacgacaaggttgcctaaggaaccttcaactccgcgggggaagaagctcggaagcaaatgcggtcctgcgaggggctggtagacttcactgttgtatgtgatccacacgtgtgtgaacacatccgattacgacagcaaggaggccactctccagatcaaagggcaagtctccaaagttacaggggcaaggacgtggcaacttaagaaaatatcctgagaaccgtgagaacagagtggcttggtgtgacggtggagaactgcgtgtgcaccctgaggaacctgtctatcggctggagctggaggtccccaggcccggttactgggactgaacgaattggatgacttactaggaaaagagtctcccagcaaagactctgagccaagttgctgggggaagaagaa

SEQ ID NO: 20809 - DNA, 1375 bp, Homo sapiens
  SIMILAR (1375)..(1019): 881254mologous to Homo sapiens Human resenilin binding armadillo protein p0071,accession number Y23899,Smith-Waterman Score=554.
aggaaaatgaaacgtagttgaggcaaattagtttattgaagcaagcgaagaagatacagaagggcatgcatgctaaagaggtgatctgtaagataaagcaggctgctgcaaatcggaagcaaccatgcacttcagttggtatgtgcatttccttttgcccagagcttggtgttgaaatgtagcatctgcaattttctgagctattaattgccatagtaacaacagtcgattagtaaatagtcctgtgaaatcacaatttcaaagacaacagtacaatggagactgcctcccctgcaggagtaaagctgccaccagcttttatttatttttaatagacaggtttgagaaaagagtactttttgtggggtagctcacactgacttatttggaacatctaaagtagttataatcgccagacggttgagaatgggaacagtatgaaatcttagtaaccctttgggctggtatcctttaaataaattgtatgcacagctttctgaataggatataaaaatattaacactatgtaacattatttttgttattcttaaaaaataatcacgttgagaagaatcacattataccttttgctatttattcaaactcttctccatgaaaatgtaaatgaaattgatctccattctctggtttgaatttaagagatgagccagtctagaagatgtggcccctgcaaagtgacactgggctgacggttctgatgcatgtggaaaacacagagactgctcgagccaggaggggacggagcaaggggactgtgccagtgagcagccagaaatgatttatttggatacagccctctttttatttgtgcccaccgtacaactacatacatacatacatacaaacaagtacatgcttgttttactttaaacaagcagaaaaggcaacaatccccaaagtaggaaagggaatgactggaacatggtttgctgctgggggactgtctcaatacaagcacaggctacttcccaggccactggccaagcgcctggaaatgcggcttttcaagagactgtatcacacacccaactggcgtcttaccagggtacaggcctttatgtgtggcatccccttggctattgtaatactgcataggtggctgggtcctatcgtattcagagcgagggtctctgactcctaacagtgctggtgaggaagaggtgctgccgactgactgaatgatgggtgacatctgttggttggtggtagacaaggaaggatgtgatttgaatcggtctcgctccaatgtcgacacaggtgtaataaaatggttctgattccacccatcctttgtatgaatgctccggaggtcccgatattgccataatgtattcaacacctgggctgctgcctt

SEQ ID NO: 20810 - DNA, 448 bp, Homo sapiens
  SIMILAR (301)..(447): 971254mologous to Homo sapiens Human resenilin binding armadillo protein p0071,accession number Y23899,Smith-Waterman Score=250.
gtctgctcggcagcagccctgaagagaaacactgggccggaaccctcaagcatttcggtcggccatgaaagtcaaatccctcagcaggactgagaagggctctgcatccctgtcatctgggtattcccacaaacactcctagaatcataattcctctccttcagattgtttcaagttcctcataaataaaaagtagttctttcatatttccccatttatttccctgtctgtagtgttcagtacagaagtgttttgctctaatgtgccgagttgtttttaattatacgccatgctgggtttcagacggtggagaactgcgtgtgcaccctgaggaacctgtcctatcggctggagctggaggtgccccaggcccggttactgggactgaacgaattggatgacttactaggaaaagagtctcccagcaaagactctgagccaagttgct

SEQ ID NO: 20811 - DNA, 3148 bp, Homo sapiens
  SIMILAR (2492)..(3145): 1001254mologous to Homo sapiens p0071 protein,accession number X81889,Smith-Waterman Score=1167.
atgtttgtgatttctaggctgacgccagccctgtctgttcccaccagcccttcctctcccttcaggcatgacatctcacttcgctacagtgcacgtgtttacctgagccttgcacctgcagatttcttacatagggagtttgcctggcgtgatcctgagttgcctgaggtcattcacatgcttcagcaccagttcccatctgttcaggcaaatgcagcggcctacctgcagcacctgtgctttggtgacaacaaagtgaagatggaggtgtgtaggttagggggaatcaagcatctggttgaccttctggaccacagagttttggaagttcagaagaatgcttgtggtgcccttcgaaacctcgtttttggcaagtctacagatgaaaataaaatagcaatgaagaatgttggtgggatacctgccttgttgcgactgttgagaaaatctattgatgcagaactccctcctaggaagcatcttgccctcagaccacctgagcacccacttcccactgcgctgaaagctgagatggtggtgttccgagcacagctggacctgagagttctttggaatttatcctcatgtgatgctgtaaaaatgacaatcattcgagatgctctctcaaccttaacaaacactgtgattgttccacattctggatggaataactcttcttttgatgatgatcataaaattaaatttcagacttcactagttctgcgtaacacgacaggttgcctaagaatagggatgataataccacctcagagctgtgaggggtcagcaggtacttgtggaaggtgcttagcacagtgtcatcgcatgagcactcagaacctcagctccgcgggggaagaagctcggaagcaaatgcggtcctgcgaggggctggtagactcactgttgtatgtgatccacacgtgtgtgaacacatccgattacgacagcaagcatgagccccttaccctctccctcctgtgcccgagtacagggcattctgctcatcatttgtcagctgtgacgaccatccaggatcctcctgggggccgaggaaagtggaaagaacaggaaagagggactgaaagtgtcaggacttccaaagcgggccagttacttggtgtcaggatggactggactaggagaggccattggaaggtgttggattgtaagggtgagcctgagagaaaaaaggatgaagagtgcctgggagaagagagaggaatgcaagggaacagccagtttttgagccttattgaaccaggagatctgcagatgaaattgagaggatgttcagtacagaagtgttttgctctaatgtgccgagttgtttttaattatacgccatgctgggtttcagacggtggagaactgcgtgtgcaccctgaggaacctgtctatcggctggagctggaggtgccccaggcccggttactgggactgaacgaattggatgacttactaggaaaagagtctcccagcaaagactctgagccaagttgctgggggaagaagaagaaaaagaaaaagaggactccgcaagaagatcaatgggatggagttggtcctatcccaggactgtcgaagtcccccaaaggggttgagatgctgtggcacccatcggtggtaaaaccatatctgactcttctagcagaaagttccaacccagccaccttggaaggctctgcagggtctctccagaacctctctgctggcaactggaagtttgcagcatatatcccgggcggcccgtccgaaaagaaaaggggctccccatccttgtggagcttctgagaatggataaccgatagagttgtttcttccgtggcaacaagccttgaggaatatggcactagatgttcgcaacaaggagctcataggcaaatacgccatgcgagacctggtcaaccggctccccggcggcaatggccccagtgtcttgtctgatgagaccatggcagccatctgctgtgctctgcacgaggtcaccagcaaaaacatggagaacgcaaaagccctggccgactcaggaggcatagagaagctggaacgtcttcttgaatccccagttctggaattgagttttctgccacatacccagaaagtattaaaattactgctctgcagcagggctgctgtgtggcctcaggatgtgccccaggcttggatggcgcatttccctttgcttctgcatgacacctcactgattaagcaggaaggaaggactagagaatcagtggtaaaaattgaaggctgcttgtcatggagctgtagcagtgactataagtttgccttagtatcagatcagagaaatgagattcggaaagtcctggaccaaatcaaattgtctcctagctccacacacttaacttctttcacaagtacttactgcctgcctgctgtgtgccagacgctcttctctatgctgggcttgcagcagcagacaggtcgcatgacagccccacccgaggtagcttacgttccatgggtgagatcatctctgaaagtggtgaaggcagcagcccaggtcttgaatacattatggcaatatcgggacctccggagcatttataaaaaggatgggtggaatcagaaccattttattacacctgtgtcgacattggagcgagaccgattcaaatcacatccttccttgtctaccaccaaccaacagatgtcacccatcattcagtcagtcggcagcacctcttcctcaccagcactgttaggaatcagagaccctcgctctgaatacgataggacccagccacctatgcagtattacaatagccaaggggatgccacacataaaggcctgtaccctggctccagcaaaccttcaccaatttacatcagttcctattcctcaccagcaagagaacaaaatagacggctacagcatcaacagctgtattatagtcaagatgactccaacagaaagaactttgatgcatacagattgtatttgcagtctcctcatagctatgaagatccttattttgatgaccgagttcactttccagcttctactgattactcaacacagtatggactgaaatcgaccacaaattatgtagacttttattccactaaacgaccttcttatagagcagaacagtacccagggtccccagactcatgggtgtag

SEQ ID NO: 20812 - DNA, 4977 bp, Homo sapiens
  SIMILAR (1939)..(3789): 761254mologous to Homo sapiens 06-OCT-1998 Human p0071 coding sequence,accession number A09308_cd1,Smith-Waterman Score=2216.
  misc_feature (1)...(4977): n = a,t,c or g
ctactgttgtttttgaggggcgggcagccgcgccgccgcggcacttttttaattttttcgggtgccgcagcagcgacccctcggcgccgatgtccctgatccctggagcgacgacggccgctgcctaagctgggaagaggaatgccagctcctgagcaggcctcattggtggaggaggggcaaccacagacccgccaggaagctgcctccactggcccaggcatggaacccgagaccacagccaccactattctagcatccgtgaaggagcaggagcttcagtttcagcgactcacccgagaactggaagtggaacgtgcagattgttgctcatgtcaactagaacgaagtatgcttgtagcagaatcaccaagcattgccagcacctgctcaactgagaaggcatttccttgtagatcaactgacgtgccaaatactggtgtaagcaaacctacagtttctgacgctgtccagcccaacaactatctcatcaggacagagccagaacaaggaacccgtctattcaccagaacagacatctctccatgaaagtgagggatcattgggtaactcaagaagttcaacacaaatgaattcttattccgacagtggataccaggaagcagggagtttccacaacagcccagaacgtgagcaaagggagacaacagacagcagcattcattcataggatcaactaacaaccatgtggtgaggaattcaaagagctgaaaggacaaacactgggtttcagccatcagtagccaatcgggccatgagaagagttagttcagttccatctagagcacagtctccttcttatgttatcagcacaggcgtgtctccttcaaagggggtctctgagaacttctcctgggtagtggatttggctctcccgtcagtgaccgacccccgacctctggaanccccagtgcatattcctccaccacattacctgctgcacgggcagcctcttccggtactcacagagacccgcctccccaacagctatacggcggatttgggtcagtcacctcccggcagacctccaatcccaacggaccaacccctcaataccaaaccaccccccagagtggggtccccactgaccctgacggatgcacagactcgagtagcttccccatcccaaggccaggtggggtcgtcgtcccccaaacgctcagggatgaccgccgtaccacagcatctgggaccttcactgcaaaggactgttcatgacatggagcaattcggacagcagcagtatgacatttatgagaggatggttccacccaggccagacagcctgacaggcttacggagttcctatgctagtcagcatagtcagcttgggcaagaccttcgttctgccgtgtctcccgacttgcacattactcctatatatgaggggaggacctattacagcccagtgtaccgcagcccaaaccatggaactgtggagctccaaggatcgcagacggcgttgtatcgcacaggttcagtaggtattggaaatctacaaaggacatccagccaacgaagtacccttacataccaaagaaataattatgctctgaacacaacagctacctacgcggagccctacaggcctatacaataccgagtgcaagagtgcaattataacaggcttcagcatgcagtgccggctgatgatggcaccacaagatccccatcaatagacagcattcataaggaccccaggggagtttgcctgggcgtgatcctgagttgcctgaggtcatttcacatgctttcagcaccagtttcccatctgtttcagggcaaatgcaggcggccttacctggcaggcacctgtgtttttgggtggacaacaaagttgaaggtgggaggtgttttagggtttaggggggggattcaagcatctgggttngaccttctgggaccacagagttttgggaagttcagaaggaattgctttgtgggtgcccttcggaaacctcgtttttggcaagtctacaggatgaaaataaaatagcaatgaagaatgttggtggggatacctgccttgttgccgactgttgagaaaaatctatttgatgcagaagtaagggagcttgttacaggagttctttggaatttatcctcatgtgatgcctgtaaaaaatgacaatccattccgaaaatgctctcctcaacccttaaacaaaaacactgtgattggttccccacattcctgggaatggaaataactccttccttttgatggatgaatccataaaattaaattttcagacttcactagttcctgcgtaacacggacaggttgccctaaggaacctcagctctgcgggggaagaagctcggaagcaaatgcggtcctgcgaggggctggtagactcactgttgtatgtgatcccacacgtgtgtgaacacatccgattacgacagcaagacgggtggagaactgcgtgtgcaccctgaggaacctgtcctatcggctggagctggaggtgccccaggcccggttactgggactgaacgaattggatgacttactaggaaaagagtctcccagcaaagactctgagccaaagttgctgggggaagaagaagaaaaagaaaaagaggactccgcaagaagatcaatgggatggagttggtcctatcccaggactgtcgaagtcccccaaaggggttgagatgctgtggcacccatcggtggtaaaaccatatctgactcttctagcagaaagttccaacccagccaccttggaaggctctgcagggtctctccagaacctctctgctagcaactggaagtttgcagcatatatccggggcggccgtccgaaaagaaaagggctccccatccttgtggagcttctgagaatggataacgatagagttgtttcttccggtgcaacagccttgaggaatatggcactagatgttcgcaacaaggagctcataggcaaatacgccatgcgagacctggtcaaccggctccccggcggcaatggccccagtgtcttgtctgatgagaccatggcagccatctgctgtgctctgcacgaggtcaccagcaaaaacatggagaacgcaaaagccctggccgactcaggaggcatagagaagctggtgaacataaccaaaggcaggggcgacagatcatctctgaaagtggtgaaggcagcagcccaggtcttgaatacattatggcaatatcgggacctccggagcatttataaaaaggatgggtggaatcagaaccattttattacacctgtgtcgacattggagcgagaccgattcaaatcacatccttccttgtctaccaccaaccaacagatgtcacccatcattcagtcagtcggcagcacctcttcctcaccagcactgttaggaatcagagaccctcgctctgaatacgataggacccagccacctatgcagtattacaatagccaaggggatgccacacataaaggcctgtaccctggctccagcaaaccttcaccaatttacatcagttcctattcctcaccagcaagagaacaaaatagacggctacagcatcaacagctgtattatagtcaagatgactccaacagaaagaactttgatgcatacagattgtatttgcagtctcctcatagctatgaagatccttattttgatgaccgagttcactttccagcttctactgattactcaacacagtatggactgaaatcgaccacaaaattatgtagacttttattccactaacgacctttcttatagagcagaacagtacccagggtccccagactcatgggtgtagcatcaagatgcccaacagaggaactctttctttctaaccttgttcagattgaggtgaaaagtccatcttgctgatttgatgattgaaatgtgaaagtgaagtggaaggaattgaatgaagtgtgttttttttttttcttttttgaggaattatcagggaagtgaggaaatgtttgggagaggactttctaagctctatttaggtgttagatctaattacttatagattctgtagtctggtgaaggtgtgggtgacgtgatgagaggtttgagaaatgggtgaaatgaaatgggggatatgtaggtcaaatccaaattaaagatgatttttttaatgggaataaagttatgttctgataagtttgtacagaaaaaaataaacatggatgccccatgttttattggcttattactaaatgtccaagattgttatgctaattatgtcttgtaaaatttcttttgttggtgtaaatatgggaaatgccacatgggttaagtgccatcatttgtaatgcaatgtgtcacttgaaaagagaatttgaagaaactgacaacttcaaaaacaaatgagaaggccaagggacctgtgagcaattaaaagcaaaccgcgacaccctttgtctccaccaacacatagtgtactttggaagcacaacgtccaggctggtaccgcagcgccatgcccattcctcgcctcattcataggacactttcactgccattttctattcacataaaagaaaaataaatgtggaaatttcatccttggaaatgtgttctctattctttttaaattttctgtatgtatatggaaaagcagatttaataaacacaaatctaactgcatgttggaaacagcttaaatatatccaactattttggacttttcctagttttatatatactttgtgagatggaccacaccaaagaattaagctatgaactttccttctctgacaatctaggtatttttatttcttggaactatttcaaatctagtacccttcacagttttatcatgtttttctatatggcagcctggccataactaaattgatataactaaattgataccttttttaggcatcatttttaagaactcagtaacttcataagaacagtggttgggcatttatttggttggcaccaatataataaaccaaattctaaatt

SEQ ID NO: 20813 - DNA, 456 bp, Homo sapiens
  SIMILAR (362)..(454): 961254mologous to Homo sapiens 6- phosphogluconolactonase,accession number AJ243972,Smith-Waterman Score=153.
attgaaagactcctgttggaatgctggcccccgcaggaaccaccatgatcccgattcacccaggagggccaccctcccgtccagccccccaagagcagcagggctccctcttgcccttgaacctcctctgccctgacaggcggcgtcacccagggctcaggatcctggcttccagcattccagaggtgactcaccaaccaaagtgtcactcaccaaccgaaggaccttgcacaaatgcaccagcctccccatgcctcagtctccccatctgtaaatgagtgttatgacggtactgtcataaactccctggaggatccaggtggtcacgttactgttggtgacattgtccctctgttggctgcagacgcatcttctctccagactgccgatcccagaaagccaggtgatcaccattaaccccgagctgcctgtggaggaggcggctgaggactacgc

SEQ ID NO: 20814 - DNA, 1283 bp, Homo sapiens
  SIMILAR (993)..(1280): 831254mologous to Homo sapiens 6- phosphogluconolactonase,accession number AJ243972,Smith-Waterman Score=395.
atggccgcgccggccccgggcctcatctcggtgttctcgagttcccaggagctgggtgcggcgctagcgcagctggctggcccagcgcgcagcatgctgcctggcaggggcccgcgcccgtttcgcgctcggcctgtcgggcgggagcctcgtctcgatgctagcccgcgagctacccgccgccgtcgcccctgccgggccagctagcttagcgcgctggacgctgggcttctgcgacgagcgcctcgtgcccttcgatcacgccgagagcacgtacggcctctaccgggtgagagctacgggggccgccggggatcacgccgagagggccacagccaccgcctacaccccggctacggaggccgccgggggccatgccgaaagggccgcgcccactgtctgcacctcggctacgggggccactgggtatcatgccaagagggccgtgcccactgcctgcacctcggctaccgagttctcggggatccctgggcagctttgccgctctgatggctctgcttccaggctgttcatctttggctttgagcctcaggattctatagaatcagaggagcgcgctcttttaaagacaggactgccgatcccagaaagccaggtgatcaccattaaccccgagctgcctgtggaggaggcggctgaggactacgccaagaagctgagacaggtgagccccgaggagcggccgcaagggagtcacatccacgaagcggccacaccccgggcaacagagcggccttctgattgtcaccagcaggaactgccccagggatcactggcagatccctttgaggaatcccctcttcgaggccacagccctgccctggggagcctgaaggccactcggcctctgttgcccaggctgtcttctccccacgcccaggcattccaaggggactccatcccggttttcgacctgctgatcctgggggtgggccccgatggtcacacctgctcactcttcccagaccaccccctcctacaggagcgggagaagattgtggctcccatcagtgactccccgaagccaaccgccacagcgtgtgaccctcacactacctgtcctgaatgcagcacgaactgtcatctttgtggcaactggagaaggcaaggcagctgttctgaagcgcattttggaggaccaggaggaaaacccgctgcccgccgccctggtccagccccacaccgggaaactgtgctggttcttggacgaggcggccgcccgcctcctgaccgtgcccttcgagaagcattccactttgtag

SEQ ID NO: 20815 - DNA, 1047 bp, Homo sapiens
  SIMILAR (1030)..(242): 521254mologous to Homo sapiens 6- phosphogluconolactonase,accession number AJ243972,Smith-Waterman Score=502.
tttttttttttttttttttccagcaacgctccattttaatatccggatgtccagagccacagcctgtgtgttgagccccgggtaggactgctggccggaggctgttgtgcttccagcagcagcacgacgtggctttttgaaaggagagtcccggagacgtggcggccagcagggggcccacgcccactggcgccgcgtggctccttggtcccagctgcggcgtccctctggccagctaaaaagtggaatgcttctcgaagggcacggtcaggaggcgggcggccgcctcggtccaagaaccagcacagtttcccggtgtggggctggaccagggcggcggggcaacgggttttcctcctgggtcctccaaaatgcgcttcagaacagctgccttgccttctccagttgccacaaagatgacagttcgtgctgcattcaggacaggtagtgtgagggtcacacgctgtggcggtggctttcggggagtcactgatgggagccacaatcttctcccgctcctgtaggagggggtggtctgggaagagtgagcaggttgtacccattgggggcccacccccaggatcagcaggtcgaaaaccgggatggagtccccttggaatgcctgtctcagcttctttggcgtagtcctcagccgcctcctccacaggccagcctcgggggtaaaggtgatcacctaggctttctggggatcggcagtctggagagaagatgcgtccggttagaggccgtacgtgctctcggcgtgattcgaagggcacgaggcgcttcgtcgcagaagcccagcgtccagcgcgcttaagcttagcttggcccggcaggggcgacggcggcgggtagctcgcgggctagcatcgagacgaggctcccgccctacaggccgagcgcccaacgggcgcgggcccctgccaggcagcatgctgcgcgctgggccagccagctgcgctagcgccgcacccagctcctgggaactcgagaacaccgagatgaggcccggggccggcgcggccatggcgagggcggcggcgg

SEQ ID NO: 20816 - DNA, 456 bp, Homo sapiens
  SIMILAR (206)..(247): 1001254mologous to Homo sapiens RanBP1,accession number X83617,Smith-Waterman Score=78.
  misc_feature (1)...(456): n = a,t,c or g
ttcccgggtcgacgatttcgtcctgagcagaaataaaacactggaagaagatgaagaggaacnnnnnnnnnnnnnnnnnnnnnnnnnnnnnnnnnnnnnnnnnnnnnnnnnnnnnnnnnnnnnnnnnnnnnnnnnnnnnnnnnnnnnnnnnnnnnnnnnnnnnnnnnnnnnnnnnnnnnnnnnnnnnnnnnnnnnnnnnnnnnaactgttccgatttgcctctgagaacgatctcccagaatggaaaggagcgaggcactggtgacgtcaagctcctgaagcacaaggagaaaggggccatccgcctcctcatgcggagggacaagaccctgaagatctgtgccaaccactacatcacgccgatgatggagctgaagcccaacgcaggtagcgaccgtgcctgggtctggaacacccacgctgacttcgccgacgagtgccccaagccagagctgg

SEQ ID NO: 20817 - DNA, 512 bp, Homo sapiens
  SIMILAR (1)..(150): 1001254mologous to Homo sapiens RanBP1,accession number X83617,Smith-Waterman Score=263.
gcggccgccaaggacactcatgaggaccatgatacttccactgagaatacagacgagtccaaccatgaccctcagtttgagccaatagtttctcttcctgagcaagaaattaaaacactggaagaagatgaagaggaactttttaaaatgtaagtaggctgatgtcccagaaataggactctttaaggttgaggttacaacttttatgggtgtccaggttttggcctgacttttaatcagactgaggctgcttaaagaaagggcctaaagttggtgactaatcccatgtggaaatttaacccgttcctttcatgaatcttcaccagatgcccttgctgccctgcagccagttgcatgaagggcatcccatcttgctgctctgtccactggcatggcggccccactgcccttttttgccactggcttctgaggatccagggagtcccttggttgagcaaggggttttaagtttttgcagcatagacttctttggcatcgtgaagcttataaat

SEQ ID NO: 20818 - DNA, 1439 bp, Homo sapiens
  SIMILAR (262)..(843): 481254mologous to Homo sapiens Ran-BP1(Ran-binding protein 1),accession number D38076,Smith-Waterman Score=282.
cgcggggcgggccggacaatgagagtgtccgcctcctgagccaataaagctgtactggttttgaatcgcggcgcgtttcccgccgctggggtcaggggtcgaggttcgggtcgtggggcggagggaagagcgggcgggcgggaggcgccggcgccagacgcggagggaaggagctacgagtagccgccgagaggccgcggagccagcgacgaccgacccagccgagccgccgccgccgccgcgcccccatggcggccgccaagggacactcatgaggaccatgatacttccacttgagaatacagacgagtccaaccatgaccctcagtttgagccaatagtttcttcttcctgagcaagaaatttaaaacactggaagaagatgaagaggaactttttaaaatgcgggcaaaactgttccgatttgcctctgagaacgatctcccatgaatggaaggagcgaggcacttggtgaccgtcaagctcctgaagcacaaggagaaaggggccatccgcctcctcatgccggaggggacaaagacccttgaaagatctgttgccaacccactaccatcacgccggatgatgggagttgaagccccaaacgccaggtaggcgaccgtgccctgggttctggaaacaccccacgcttgactttcgcccgacgaagtgccccccaagcccagagcctgcctggccccatcccgccttccctgaaatgcctgaagaatgccacagaaattccaaaaccaaagttttgaagaattgcagggaaagagattcgaagagaggaggaaaaggaaagcagggttccagggcaaaaatgattcattgcccgaaaaaagtgtgcggaaaagctagaaggctctctgcggtgaagggaggagacccaaggaggatgctgaggcagaagcaataaatcgtcttattttattttcttttcctctctttcctttcctttttttttaaaaaattttacccctgcccctcttttttcggtttgtttttgattctttcatttttacaagggacgttatattaagtacctgaactcaacattcaggttgtttttttttttttgtttctaagtttttgccctattgaagatgacttcagaaaatccattccccagtcatgaaaatgtactgtgctaactttcttttccatagtggaaacacttatttatagtcatcaaaaatagtgaataaaaaacacatttggaacctgggccagatggcaggactgtgtgtgtacaggcccctgcgctgtgagcgccgctcgcctaagcctcccgggtgtatgtccaggcctgtccgcagcacaggtgggtgctgcacctcacggtagcctgggttcctgggagagacgccctggtgtctgaggtcgtgcatgtatcttgctgtgggccttgaagctgaggtgtctgagctggcgctggt

SEQ ID NO: 20819 - DNA, 428 bp, Homo sapiens
  SIMILAR (407)..(165): 1001254mologous to Homo sapiens Human secreted protein, SEQ ID NO: 8062,accession number G03981,Smith-Waterman Score=431.
tgcaatgtagttttgttggaggccattttttattgcagacttgaagagctattattcaccgcctccgagctgctccgggtcgcgggtctgcagcgtctccggccctccgcgcctacagctcaagccacatccgaagtcaggaaatatttttaaaataaaatggctagagatgctaaatacacttctgaatcctgcaagggagcccaaggctttacagctggctggacagcaaagtcagccacctccctctggccttcaccttcagggcaagaatccacaaaggagtctgagaatgcattgttggcaccatcttcttgttcaggatttggcagacaggaacaaatttcagcccagagatcctggccagatcttgtggctgtagagtcagcgctctcaaacattttcatttggaatctgagccctcgtgc

SEQ ID NO: 20820 - DNA, 502 bp, Homo sapiens
  SIMILAR (2)..(220): 931254mologous to Homo sapiens Human secreted protein, SEQ ID NO: 8062,accession number G03981,Smith-Waterman Score=349.
caatgcattctcagactcctttgtggattcttgccctgaaggtgaaggccagagggaggtggctgactttgctgtccagccagctgtaaagccttgggctcccttgcaggattcagaagtgtatttagcatctctagagaagaagctaagaagaatcaaaggtttaaatcaggaagtgacttccaaggacatgcttcgaactctggcccaagccaagaaggaatgctgggatcggttcctccaggagaagttagcttcagagttctttgtggatggacttgattctgatgagaggtaatcgattccccgtctagttccagctgaaatcatcctttatgtagttgttctatttgtttttagcccagcagtagatttttaagaacagacttttttgccaaaaggcaaatactgcagctacgtgttggtcacagattgaatagagttaaggataaagcattgtgttcatttttaagtatgcaatgaacttgagaaagtagtaaaa

SEQ ID NO: 20821 - DNA, 1779 bp, Homo sapiens
  SIMILAR (72)..(101): 901254mologous to Homo sapiens Human secreted protein, SEQ ID NO: 8062,accession number G03981,Smith-Waterman Score=45.
atttcctccgggctacaggcgacagagctgagccaagcgtttactgggcagctgttacgctcagattccaaatgaaaatgtttgagagcgctgactcttcccgccccaagttctggccaggatctctgggctgaaatttgttcctgtctgccaaatcctgaacaagaagatggtgccaacaatgcattctcagactcctttgtggattcttgccctgaaggtgaaggccagagggaggtggctgactttgctgtccagccagctgtaaagccttgggctcccttgcaggattcagaagtgtatttagcatctctagagaagaagctaagaagaatcaaaggtttaaatcaggaagtgacttccaaggacatgcttcgaactctggcccaagccaaggaaggaatgctggggatcggttcctccacgagaaagttagctttcagagtttctttgtgggatgggcttgattctgatgagagcaccttggaacatttcaagaggtggctccagccagataaagtagccgtcagcacagaggaggtccagtatctgattcctccagagtcacaggttgagaagccagtggccgaggacgagccagcagccggggacaagccagcagcagcagaacagtaaattacacacacacacacacacacacacacgccggagcagctgtctcgggtccagagcgagcagcgtggagctcagtgacagcagcagggagaaatccactgaaggaaaaaacccaaatttccactccacaaagaaaacagctgcaagcccccagggacttacctggggctggcatgtgtgaccgtctcggatgaagtgactgacccagtgcacactggatcaaaatgctgctttcctctgtgtctcacagcttggctgagctctgtctctgcaggttagaagtctgctaaagatcaaatgtgaaagtacttggagaaactgaggcctcttatgtgtaatgtgtaagttaagtgagccatatattttcttgcctctttccggacattcatgcttgtgtcccaagcattcccttggtgaattgtcacgtgagtggggcccagtaaagagtgaagtctgctccttgaatccccaaaccccatctggggcttctctaaaaaaatctgtagtaagtatacggactcccagggagagaggctgggcttctctctctcatttgttccttgtggaacaaatgggcaaaaagaagtgtgaaaatgtgggtgtttatgtcttgtgtatatgtattttttacttccagcatggcttctcctccaacttcctccctgcacttaaaaagggcccaggttccaaaattagacttgtaaatatggtgttagtgtttgacactactcctggatagttccaaacatcttccttgtggcaggtttcctggctgagcccgagcttccctccctgtttattgtgttcatgatcagtatgtgtttccatataaaactttttctcaacggaatagcagtgtctgtggtgctgttgactcgattgctcctggaaggatgttcccaggcagcaggaggtaaagacaaatgcatgcaaaggcatgggatctggccactttgccagcctcctgttattagcatgtgccctcagacagtccagactttggtgttctgaggccttagctccatgggccttcttcctgggtaatagtttacaaatccctaaagatcagtagggtggctgtaaaaatcttccgatcgagagaggagctaaaagaaaaaatagaataaataaatcttctgaaaa

SEQ ID NO: 20822 - DNA, 423 bp, Homo sapiens
  SIMILAR (135)..(4): 431254mologous to Nicotiana tabacum Pistil extensin like protein, partial CDS only,accession number Z14014,Smith-Waterman Score=86.
atgcggctgctcgggggcggcgcatgcgcgcggcggagggggggtggggccttggggccgcgagtgggagcgggagcggttctgcggcctcctcgggcttcttggccctgggcagagtgggattgggtgtcccggctgttcgcagtggccgcgactcgcctcccttccgccaagattcacagaacacggcagagtggcctcgggatcacctgcccaagacacctgcacgaccggaagttgggagaagaaattaaggccatgatgatgaacgcagcctttctcgtttatttccaatcccacaacaaaccggagtccaggaactcatgggtgattatcggactattacctagtcgtaaaactgtggagcattggtgtctaaaggaatctgagacagacccgcagtgtctcccccacatgccttaa

SEQ ID NO: 20823 - DNA, 2040 bp, Homo sapiens
  SIMILAR (461)..(619): 341254mologous to Homo sapiens Human secreted protein encoded by gene 44 clone HTDAD22,accession number Y02693,Smith-Waterman Score=67.
caggggccggcgcgctggaccctccaagagcgtgtcacccccaggcgatacagggggcgtcatcggggggcgaatgggcttccccataaccgggaaacaaaggaggcccaaaaagcttttttttttcggcatgattacctgttccactagcttactcggtgaccttccgattcatatcctagataaggtctgtacaagggctaaatttagatgtgccatctggtttcctcagcagactggtgtttatacagtgagtaccttatctgaatgttggcaaagattcagatattttgattcgatatttgcatatacataataagtatctcgggatggacccaagtctaaatggaaattcatttgttcacatacaccttaccttacccacatagcctgaaggtaaggttatattatatattttaaataattttgtgcatgaaacaaagttttgatggcgttttaaaaaaaaatgttttcattgttttttttgttttggtttttgtttttttacagacagggtctggctatatcgtccaggctggactcaaactcctgggctcaagcaatcctcctgctcaacctcccgagtagctggcactacaggtgcccaccacaccaggcttgattgtgacttgactgtcacccagtgtcacatgagggcaagtgtggaattttccatttgtggggtcacgtcagtactcaaaaaaatccgaattttagagcattttggatttcagattaggaatgtttaacctaagtttgtaaaggaaattttttagccttagaatagggatgtttcagattgttcaagagacaaatgaaagactaaaacaaccagaaaacattggaatgataaatccatttaagtatatttaaaatgtgcgttgtttacctcctgcccatacaaaaccactcatgacatacatacaaatgtaaggacaaaactgtagtcacctgattaacaagagccagagttcattgcatgctgatcaacgaaccaacacaacttttatcatacactaaaaaaagggtagaacaaaggccaacttaaagcctggaaagtgatctaatctgttaaattagtgtaccgcagagtaattttgaaagccttctcgttttgttttgttttttttcagagacagagtctcgctctgtcgcccaggctggagtgcagcggcgcgattctcggctcattgcaacctcccccacccgagttcaagccattctcctgcctcagcctcctgagtagctgggattacaggcgcgtgccgccacgcccggctaattttttgtattttaagtagggacgggggtttcaccgtgtcgcccaaggctggtctcgaactcctgaactcaagcaatccgcccacctcggcctcctaaaggataggattacaggcgtgagccaccgcgcccggccccttctcttttttaaaaccaatttcactaacatttacttaaaaatgattttctgcttggcagaagtgacttaaggcatgtgggggagacactgcgggtctgtctcagattcctttagacaccaatgctccacagttttacgactaggtaatagtccgataatcacccatgagttcctggactccggtttgttgtgggattggaaataaacgagaaaggctgcgttcatcatcatggccttaatttcttctcccaacttccggtcgtgcaggtgtcttgggcaggtgatcccgaggccactctgccgtgttctgtgaatcttggcggaagggaggcgagcgcggaggccaccagtgcgcgtctcgcgtggcgctacggcctcgggaattccgtcacggcatagccgggtccagcgcggtgtagaccggggccccgcgccttgctcggccagagcggctcaggtactactccaggtccggccgcactcgcgcgccactgcgaacagccgggacacccaatcccactctgcccaggaccaagaagcccgagaaggccgcagatccgctcccgctcccactcgcggcccccctcgtgccaagctggcggtaatcatgctcatggctg

SEQ ID NO: 20824 - DNA, 292 bp, Homo sapiens
  SIMILAR (17)..(94): 961254mologous to Homo sapiens Human protein tyrosine kinase (HPTYK) polypeptide,accession number W60053,Smith-Waterman Score= 125.
  misc_feature (1)...(292): n = a,t,c or g
cagggcctcgccttcccccntgcagcctgaggcccagcgggcactccagcagctcaagcagaaaatggtcaactacatccagatgaagctggaccctgcctggctggcttaagggggctgggtaaggggcctggcatgaacctggcctcccggggagctgagactagggtcccagcacagcccagaaacctttggccacaagaagtggggtcagtcagggctggggcaggggtcactgcagtttgggatggttgaatgctgtattttctaaagaataaaatatttttaaatc

SEQ ID NO: 20825 - DNA, 381 bp, Homo sapiens
  SIMILAR (235)..(381): 1001254mologous to Homo sapiens A6 related protein,accession number Y17169,Smith-Waterman Score=245.
  misc_feature (1)...(381): n = a,t,c or g
ctcttggtccagcgagcgttgccgggccagggtctagcggagggctccgacggcgcggacggagcgaagcgccgagccatggcgcaccaaacgggcatccacnnnnnnnnnnnnnnnnnnnnnnnnnnnnnnnnnnnnnnnnnnnnnnnnnnnnnnnnnnnnnnnnnnnnnnnnnnnnnnnnnnnnnnnnnnnnnnnnnnnnnnnnnnnnnnnnnnnnnnnnnnnnnnnnnnaagagctgaaggaattctttgccaaggcacgggctggctctgtgcggctcatcaaggttgtgattgaggacgagcagctcgtgctgggtgcctcgcaagagccagtaggccgctgggatcaggactatgacagggccgtgctgccactg

SEQ ID NO: 20826 - DNA, 1680 bp, Homo sapiens
  SIMILAR (157)..(390): 551254mologous to Homo sapiens A6 related protein,accession number Y17169,Smith-Waterman Score=165.
  misc_feature (1)...(1680): n = a,t,c or g
agtgcgttgcggaattcggcacgagccgccacatcctccacctctcttgtgtcctttgagcgttgccgggccagggtcaagcggagggctccgacggcgcggacggagcgaagcgccgagccatggcgcaccaaacgggcatccacgccacggagagagctgaaggaattctttgccaaggcacgggctggctctgtgcggctcatcaaggttgtgattgaggacgagcagctcgtgctggggtgcctcgcaggagccagtaggccgctgggatcaggactatgacagggccgtgctgccactgctggacgcccagcagccctgcttacctgctctaccgcctcgactcacagaatgctcaagggcttcgaatggctcttcctcgcctgggtcgcctgataactccccccgtgcggctgaagatgctgtacgcggccacgggggccacaagttgaaaaaggagtttggaggtggccacatcaaggatgagctctttcgggactgtgaaggatgaacctctcttttgctgggaatccagaaacacctgtcgtcctgtgcggcacctgccccgcttgacctcggctgagagagagctccagcagatccgcattaacgaggttgaaagacagagatcagtgttggaaagcaagcaccagaccctgcagggcctcgccttccccctgcagcctgaggcccagcgggcactccagcagctcaagcagaagatggtcaactacatccagatgaagctggacctagagcgggaaaccattgagctggtgcacacagagcccacggatgtgcaccaagctgccctcccgggttgccccgagattgcttgcccgctaccactttctttncttttacaagcacacccatgagggcgacccctttgaggtctgtaagtgttcatctacttcattgccgggggtacaagtccagcatcaagaagcggatgctctactccagctgcaagagccgcctcctcgactccgtggagcaggacttccatctggagatcgccaagaaaattgagattggcgatggggcagagctgacggcagagttcctctacgacgagggtgcaccccaagcaaacacgcctttcaagcaggccttcgcaaaagccaaagggccaagggggcaaagcgggcccataagcgcctcatccgcggcccgggtgaaaatggggatgacagctaggaggctggagccaggcccggccacgtgtggaacttgtggggctgccccaaccttcccgctcccctgcccacccatccctcccttccctgggctccccaggaaaaatgtttctgggaaggtcaaggaagggctgggcagcttgaaacgcactttgcaagcgtcccgagggccaacgggcttggcattttgtgacccttcccctgtttgctgtcccctgcatcttcgtcttgtgtgccccagggtgtcccggggacccttgcctgggttggctttaaagggggctgggtcaggggcctggcatgaacctgggcctcccggggagctgagactagggtcccagcacagcccataaactctttggccacaagaagtggggtcagtcagggctggggcaggggtcactgcagtttgggatggttgaatgctgtattttctaaagaataaaatatttttaaatcaaaaaaaaaaaaaaagggc

SEQ ID NO: 20827 - DNA, 504 bp, Homo sapiens
  SIMILAR (48)..(488): 951254mologous to Homo sapiens breakpoint cluster region protein,accession number U07000,Smith-Waterman Score=730.
  misc_feature (1)...(504): n = a,t,c or g
agtgagggggnntttgacggcgttgcccggctgcggattcggccgagcttatgtctcccagcatggccttcagggtgcacagccgcaacggcaagagttacacgttcctgatctcctctgactatgagcgtgcagagtggagggagaacatccgggagcagcagaagaagtgtttcagaagcttctccctgacatccgtggagctgcagatgctgaccaactcgtgtgtgaaactccagactgtccacagcattccgctgaccatcaataaggaagatgatgagtctccggggctctatgggtttctgaatgtcatcgtccactcagccactggatttaagcagagttcaaatctgtactgcaccctggaggtggattcctttgggtattttgtgaataaagcaaagacgcgcgtctacagggacacagctgagccaaactggaacgaggaatttgagatagagccccaggctggcctcagaactgtgttttttatgtggccac

SEQ ID NO: 20828 - DNA, 763 bp, Homo sapiens
  SIMILAR (27)..(149): 341254mologous to Homo sapiens similar to Homo sapiens HSPC197 mRNA with GenBank Accession Number AF151031.1,accession number AY007148,Smith-Waterman Score=55.
  misc_feature (1)...(763): n = a,t,c or g
atcnatatttctcaaggaagcccaaagtgggtgaaatggtcagcactgccgtgctgtggggtcctaaagtctgctgtcctccttcctgcaagacagggttaaacactggtgcccaggtgctcttgccatgggtcctggtccagccaagcatggtttcaaacatgacntgaccnttagtcaacctggaggctgatgtctagagtgggcgctggagcgtgcagcacctgtagcctgtgcatcacccttagggcaggtctgcctcccgggcccatgcacagaggacctggtctcccagcctgcaggtgcccctgtggtgtccaggatgtcgagggggtctctgtgtacttggtggggctgggaccctcccacttcccacctccttgtgtccctcactcccctgtttcattccatgctgagcctcccctgccttgggctccctggggagggggtggtggcaggagttgcccgagggcagctctgcccatgagcagctgctctagcggctcctcctgctgctgttcgccgggtgctgctgacaccaaggctggagtcagcttgcagcacagccagggtcgaggtcactccctccctgaggactctagcacggcacagcccctctgcctctctcctggtggtggcgttgaaacagcaccctctgcttcggtcctctaataagatgctggaatgtaatcctggacaatccgtgtcctggcagcatttggtcttcctctaagcgcctggctccgctgttctcaggagtggg

SEQ ID NO: 20829 - DNA, 921 bp, Homo sapiens
  SIMILAR (1)..(921): 1001254mologous to Homo sapiens BCR/ABL chimeric fusion peptide,accession number AJ131467,Smith-Waterman Score=1604.
gcgaacaagggcagcaaggctacggagaggctgaagaagaagctgtcggagcaggagtcactgctgctgcttatgtctcccagcatggccttcagggtgcacagccgcaacggcaagagttacacgttcctgatctcctctgactatgagcgtgcagagtggagggagaacatccgggagcagcagaagaagtgtttcagaagcttctccctgacatccgtggagctgcagatgctgaccaactcgtgtgtgaaactccagactgtccacagcattccgctgaccatcaataaggaagaagcccttcagcggccagtagcatctgactttgagcctcagggtctgagtgaagccgctcgttggaactccaaggaaaaccttctcgctggacccagtgaaaatgaccccaaccttttcgttgcactgtatgattttgtggccagtggagataacactctaagcataactaaaggtgaaaagctccgggtcttaggctataatcacaatggggaatggtgtgaagcccaaaccaaaaatggccaaggctgggtcccaagcaactacatcacgccagtcaacagtctggagaaacactcctggtaccatgggcctgtgtcccgcaatgccgctgagtatctgctgagcagcgggatcaatggcagcttcttggtgcgtgagagtgagagcagtcctggccagaggtccatctcgctgagatacgaagggagggtgtaccattacaggatcaacactgcttctgatggcaagctctacgtctcctccgagagccgcttcaacaccctggccgagttggttcatcatcattcaacggtggccgacgggctcatcaccacgctccattatccagccccaaagcgcaacaagcccactgtctatggtgtgtcccccaactacgacaag

SEQ ID NO: 20830 - DNA, 1079 bp, Homo sapiens
  SIMILAR (2)..(1078): 1001254mologous to Homo sapiens BCR-ABL minor breakpoint peptide,accession number AF113911,Smith-Waterman Score=1927.
gtaccagccctaccagagcatctacgtcgggggcatgatggaaggggagggcaagggcccgctcctgcgcagccagagcacctctgagcaggagaagcgccttacctggccccgcaggtcctactccccccggagttttgaggattgcggaggcggctataccccggactgcagctccaatgagaacctcacctccagcgaggaggacttctcctctggccagtccagccgcgtgtccccaagccccaccacctaccgcatgttccgggacaaaagccgctctccctcgcagaactcgcaacagtccttcgacagcagcagtccccccacgccgcagtgccataagcggcaccggcactgcccggttgtcgtgtccgaggccaccatcgtgggcgtccgcaagaccgggcagatctggcccaacgatggcgagggcgccttccatggagacgcagaagcccttcagcggccagtagcatctgactttgagcctcagggtctgagtgaagccgctcgttggaactccaaggaaaaccttctcgctggacccagtgaaaatgaccccaaccttttcgttgcactgtatgattttgtggccagtggagataacactctaagcataactaaaggtgaaaagctccgggtcttaggctataatcacaatggggaatggtgtgaagcccaaaccaaaaatggccaaggctgggtcccaagcaactacatcacgccagtcaacagtctggagaaacactcctggtaccatgggcctgtgtcccgcaatgccgctgagtatctgctgagcagcgggatcaatggcagcttcttggtgcgtgagagtgagagcagtcctggccagaggtccatctcgctgagatacgaagggagggtgtaccattacaggatcaacactgcttctgatggcaagctctacgtctcctccgagagccgcttcaacaccctggccgagttggttcatcatcattcaacggtggccgacgggctcatcaccacgctccattatccagccccaaagcgcaacaagcccactgtctatggtgtgtcccccaactacgacaagt

SEQ ID NO: 20831 - DNA, 870 bp, Homo sapiens
  SIMILAR (82)..(369): 761254mologous to Homo sapiens guanine nucleotide regulatory protein,accession number U01147,Smith-Waterman Score=391.
atgcagaaggctctgtgtgcagccccagacctgggtaccttcgtcaccgtcctcaccccacctccgggtgcgcagatagggagcaggagagagaggtccaaggtgccctacatcgtgcgccagtgcgtggaggagatcgagcgccgaggcatggaggaggtgggcatctaccgcatgtctggggtggccgcagacatccaggcactgaaggcagccttcaacgtcaataacaaggacgtgtcggtgatgatgagcgagatggacgtgaacgccatcgcaggcacgctgaagctgtacttccgtgagctgcccgagcccctcttcactgacgagttctaccccaacttcgcagagggcatcgggtcctcactggcggccagcgctgtgggtgtgacgatgatgacaagcctaaactgcgcaaggactcgtgtcccgggcgctccatgtgaccacctcgggagaggtctccggcttgtcgtaacccagaggagtgacccactgcctcctgcagctctttcagacccagttgcaaagaagagctgcatgctcaacctgctgtcgtccctgccggaggccaacctgctcaccttccttttccttctagaccacctggaaaggatggcagagaaggaggcagtcaataagatgtccctgcacaaccttggcacggtctttggccccacgctgctccggccctccgagaaggagagcaagctccctgccaaccccagccagcccatcaccatgactgacagctggtccttggaggtcatgtcccaggtcgaggtgctgctgtacttcttgcggctggaggccatccctgccctggacagcaagggacagagcatcctgttcttcaccgatgtctaa

SEQ ID NO: 20832 - DNA, 1212 bp, Homo sapiens
  SIMILAR (217)..(1212): 991254mologous to Homo sapiens BCR/ABL (major breakpoint) fusion peptide,accession number AJ131466,Smith-Waterman Score=1729.
accgacctgcttctctgcaccaagctcaagaagcagagcggaggcaaaacgcagcagtatgactgcaaatggtacattccggtcacggatctcagcttccagatggtggatgaactggaggcagtgcccaacatccccttggtgcccgatgaggagctgaacgctttgaagatcaagatctcccagatcaagagtgacatccagagagagaagagggcgaacaagggcagcaaggctacggagaggctgaagaagaagctgtcggagcaggagtcactgctgctgcttatgtctcccagcatggccttcagggtgcacagccgcaacggcaagagttacacgttcctgatctcctctgactatgagcgtgcagagtggagggagaacatccgggagcagcagaagaagtgtttcagaagcttctccctggcatccgtggagctgcagatgctgaccaactcgtgtgtgaaactccagactgtccacagcattccgctgaccatcaataaggaagatgatgagtctccggggctctatgggtttctgaatgtcatcgtccactcagccactggatttaagcagagttcaaaagcccttcagcggccagtagcatctgactttgagcctcagggtctgagtgaagccgctcgttggaactccaaggaaaaccttctcgctggacccagtgaaaatgaccccaaccttttcgttgcactgtatgattttgtggccagtggagataacactctaagcataactaaaggtgaaaagctccgggtcttaggctataatcacaatggggaatggtgtgaagcccaaaccaaaaatggccaaggctgggtcccaagcaactacatcacgccagtcaacagtctggagaaacactcctggtaccatgggcctgtgtcccgcaatgccgctgagtatctgctgagcagcgggatcaatggcagcttcttggtgcgtgagagtgagagcagtcctggccagaggtccatctcgctgagatacgaagggagggtgtaccattacaggatcaacactgcttctgatggcaagctctacgtctcctccgagagccgcttcaacaccctggccgagttggttcatcatcattcaacggtggccgacgggctcatcaccacgctccattatccagccccaaagcgcaacaagcccactgtctatggtgtgtcccctaactacgacaag

SEQ ID NO: 20833 - DNA, 961 bp, Homo sapiens
  SIMILAR (676)..(629): 811254mologous to Homo sapiens Sequence encoded by the breakpoint cluster region (bcr) ofchromosome 22 on pVI-3,accession number P60303,Smith-Waterman Score=62.
atggcaagagcacctgggcaccagtgtttagccctggtctgcaggaaggaggacagcagactttaggaccccacagcacggcagtgctgaccatttcacccacttggcctccttgagaaatatggatggggacccctctggggatgggcaaggccttccaggataggctcagttttggtcccctgctttttgaggttgggttaaaattccgaccatggcagaggaagcacagctcaggttcccacacctcacttttcacagcctctgagggcagcagtgcacgtggaggagacgtctcccatgaggccaaggcctccagtgctcaccgatgccctctgcgaagttggggtagaactcgtcagtgaagaggggctcgggcagctcacggaaatacagcttcagcgtgcctgcgatggcgttcacgtccatctcgctcatcatcactgacacgtccttgttatctggaaagagcacggaaatgcagcggcctccttgaagatcctgataaatgaagaaaagacacagagaaggatgtgacatgcctgggccatggagcactcttgagatctcatcgtggacaccactgcccacacctccatcccgtcctgcgcaggccgacactcacttgaacgttgaaggctgccttcagtgcctggatgtctgcggccacaccggccggacacgcggtaaatgcccacctcctccatgcctcggcgctcgatctcctccacgcactggcgcacgatgtagggcaccttggacctctctctcctgcgggaggagggaatgttctcagtgtcctaacagccctgcttgggccataacacaggagacctgctccctatgtgcacacccggaggtggggtgaggacggtgatgaaggtacccaggtctggggctgcacacagagccttctgcatgcctgtcctccctctgcaagctctgtcctcattgcatgtgc

SEQ ID NO: 20834 - DNA, 4756 bp, Homo sapiens
  SIMILAR (1764)..(1276): 841254mologous to Homo sapiens breakpoint cluster region protein,accession number U07000,Smith-Waterman Score=695.
  misc_feature (1)...(4756): n = a,t,c or g
tttttttttttttcacaggatgaagcagcagcgtttattcaaaatacaacagtgagggaatccagtcacgttcccttttccccagagagggcgcatcttgacaagggatccagtagaaattttttaaactctaagttaagttcataaaaaccactcccttcaccctgtctcccagggccaggcctgggactccgaggatgaactgggcttggggcgccctcaggtggccacataaaaaaccacagtctgaggccagcctggggctcccaggacctggggcgggatctttccagggccacctgttccttcggctttggggtcgctgtctcttgggcagatggcccaacacttggggggtnggcccaagggacaacttcagggaaggttcccgctctacgggatnggcccgatttaggccagaggttttccaggccatctgtccgccttccaaggaagatgggactgggacctttagacttcggtggagaacaggatgctctgtctcttgctgtccggggcagggatggcctccagctgcaggaagtacagcagcacctggacctgggacatgacctccaaggaccagctgtcagtcatggtgataggctggctggggttggcagggagcttgctctccttctcggagggccggagcagcgtggggccaaagaccgtggcgaggttgtgcagggacatcttattgactgcctccttctctgccacccttttcaggtggtccagaaggaaaaggaaggtgagcaggttggcctccggcagggacagcagcaggttgagcatgcagctctcctttgcaaccgggtctgaaagagcgatgccctctgcgaagttggggtagaactcgtcagtgaagaggggctcgggcagctcacggaagtacagcttcagcgtgcctgcgatggcgttcacgtccatctcgctcatcatcaccgacacatccttgttattgacgtcgaaggctgccttcagtgcctggatgtccgtggccacaccggacacgcggtagatgcccacctcctccatgcctcggcgctcgatctcctccacgcactggcgcacgatgtagggcaccttggacctctctctcttggtgaccacagcaatcttgactccgaagacccctgtctgttttcgggacggcatcctcttcaagctgaactccctgctgttgaacttgaccgagagctttacttcgatcccattcatggcgatgacggtgcgctgccagtctctgtcctgcagggcctgcgggtccagctcgttccagtttggctcagctgtgtccctgtagacgcgcgtctttgctttattcacaaaatacccaaaggaatccacctccagggtgcagtacagatttgaactctgcttaaatccagtggctgagtggacgatgacattcagaaacccatagagccccggagactcatcatcttccttattgatggtcagcggaatgctgtggacagtctggagtttcacacacgagttggtcagcatctgcagctccacggatgtcagggagaagcttctgaaacacttcttctgctgctcccggatgttctccctccactctgcacgctcatagtcagaggagatcaggaacgtgtaaactcttgccgttgcggctgttgcacccctgaaggccatgctgggagacataagcagcagcagtgactcctgctccgacaagcttcttcttcaagcctctccgtagccttgctgcccttgttcgccctcttctctctctggatgtcactcttgatctgggagatcttgatcttcaaagcgtccagctcctcatcgggcaccagggggatgttgggcactgcctccagttcatccaccatctggaagctgagatccgtgagcggaatgtaccatttgcagtcatactgctgcgttttgcctccgctctgcttcttgagcttggtgcagagaagcaggtcggtgaacaggaagacgtgccgcagcttgcgggccccctccaccagctccaccatgaagctgtccttcagcagctgccggtgctctcccttcttcaccgtcatggactgccgtcggggtgtgatctcctcattgatgctggacaggaagttctgtgagatgcggagggcgtcctgcagcaaggggtggtcagggtggctggcaggagtgtgcttcagcaagtcatggaggaccagcgtgctcctcgtcacacggtccacaggcttgtagagcagagtttccagagagttcttggtcgttggatccttggcatctttgttgcttctggctctcaggttctcggagatttctgcaaactgagcattggcctgacagcacttctcagccatttccatggcaactccgtagttgtccacgaaggcccggtacacacccagctggctggccagcttctggaagaggtcgcccacccgctgctggtggctccactgctgcacgcgggggaagagcccatcataggactccttgtggatctcgtagagctcaggcactttgaagaagatggtctcgatctgctgactcgtcagcaccggctgagaggtggtggcagcggctttcaaaggcttcatgggcagcagcagtgcctccaggtggctcaggtaagtctcctcgctagccaggattcccgacaggacccattttctcatctccaagcccttttccaagtccagctcactcgctttagtggacttcagggctcccgagaccagcgcatcccggctgcccctgcccttgctgctgaggtggggcgatgaggagggcgagtcatcaatgtagggcagcccatcttggtgccggcgctgctcctctgcccggtctgcagcgcagccgtatccaggtggtgttccgaacgagccatctgcgtctccatggaaggcgccctcgtcatcgttgggccagatctgcccggtcttgcggacgcccacgatggtggcctcggacacgacaaccgggcagtgccggtgccgcttatggcactgcggcgtggggggactgctgctgtcgaaggactgttgcgagttctgcgagggagagcggcttttgtcccggaacatgcggtaggtggtggggcttggggacacgcggctggactggccagaggagaagtcctcctcgctggaggtgaggttctcattggagctgcagtccggggtatagccgcctccgcaatcctcaaaactccggggggagtaggacctgcggggccaggtaaggcgcttctcctgctcagaggtgctctggctgcgcaggagcgggcccttgccctccccttccatgatgcccccgacgtagatgctctggtagggctggtactccaggggcggccaagggggcctgctaccgccattggcgtcgatcaggttgtccttcaggaagcgggggttcaactcggcgtcctcgtagtcgccgtcgacgccgcagctgctctccgaggagcgtccccggtaagggggcctggatgcatcccccacgctcgagcccgcgccgtgctgggactttttgcgctccatctgcatggcctggctgccaagggagctgatgcggtccgacacctctttgtcgttgaccttcaccaggccgcgctcgtggtgaaactcgacgttcacgtagaagggcttctcggcgtccgccccgggctggccatggcccttccggatccgctcgaagttggacctgagcgccgccacgctggcggggggtccccggtcgtcccgttcccccgacgcggctgccccgggcctgcgggcggtcccgggcctggccttacccggagaaccctcgccgtcgggccgggcctcgggctcctcggcgggcggcgggtcggctccgtcggcgggcgctggctgcgggcgcgacgcggacgctcggggctcggaggcgccgtcgggggcctgcgccgcgcgccggaagccccatcgctgccggtcatagctcttcttttccttggccagcaacgtctgcaggtagatcatgcggaagcgctcctggttcacctcctgctccaggcgccgaatggaggccttgcagcgctccagctcctgctcgatgtcgcccactgagcgcagctccatgcgcgggggctctgagtccgggaactgcgccttccacgcctccgcgaagcccaccgggtccaccatggcgcggccggccttacctgcgccgccgggctgcgcgcggggcccgtctcagcggcggcgcggcggcctcgccaggcccggccccgggcgccgggcggcccccatggccccgcgcggcggcggcggcggcgaacaatgcccgcccactccctggtggcaggtgaggcggagcggggcgctcggcgcgcggggcggggcgcgccggggggaagggcgcgggctgcgcgcgccgctattgtgtgcggggctcctccgcacggcgaggcgcgggcgctgctctccgctccgccaggccgccgccagactctggccacggcccgcgcgctcctcgcctctcgcttccgcaccgccccaccagccccgccgccgccgctgccgccgccgccgccgccgcctcctcggacgctaagccagccggctcgccgcactcccgcccggcccgcactctgcgccgcaggaagggagggccggggggaggcggccgcgatgcgcgatggagcggagccaggcgggcctccttaaaggggccgcgccgtgggcacagggcgggggggccccctggggcggctcccccatcgagccgccaccctcccccc

SEQ ID NO: 20835 - DNA, 5795 bp, Homo sapiens
  SIMILAR (489)..(3773): 791254mologous to Homo sapiens bcr,accession number X02596,Smith-Waterman Score=4303.
ggggagataggtaggagtagcgtggtaagggcgatgagtgtgggccgggcgggagtgcggcgagagccggctggctgagcttagcgtccgaggaggcggcggcggcggcggcggcagcggcggcggcggggctgtggggcggtgcggaagcgagaggcgaggagcgcgcgggccgtggccagagtctggcggcggcctggcggagcggagagcagcgcccgcgcctcgccgtgcggaggagccccgcacacaatagcggcgcgcgcagcccgcgcccttccccccggcgcgccccgccccgcgcgccgagcgccccgctccgcctcacctgccaccagggagtgggcgggcattgttcgccgccgccgccgccgcgcggggccatgggggccgcccggcgcccggggccgggcctggcgaggccgccgcgccgccgctgagacgggccccgcgcgcagcccggcggcgcaggtaaggccggccgcgccatggtggacccggtgggcttcgcggaggcgtggaaggcgcagttcccggactcagagcccccgcgcatggagctgcgctcagtgggcgacatcgagcaggagctggagcgctgcaaggcctccattcggcgcctggagcaggaggtgaaccaggagcgcttccgcatgatctacctgcagacgttgctggccaaggaaaagaagagctatgaccggcagcgatggggcttccggcgcgcggcgcaggcccccgacggcgcctccgagccccgagcgtccgcgtcgcgcccgcagccagcgcccgccgacggagccgacccgccgcccgccgaggagcccgaggcccggcccgacggcgagggttctccgggtaaggccaggcccgggaccgcccgcaggcccggggcagccgcgtcgggggaacgggacgaccggggaccccccgccagcgtggcggcgctcaggtccaacttcgagcggatccgcaagggccatggccagcccggggcggacgccgagaagcccttctacgtgaacgtcgagtttcaccacgagcgcggcctggtgaaggtcaacgacaaagaggtgtcggaccgcatcagctccctgggcagccaggccatgcagatggagcgcaaaaagtcccagcacggcgcgggctcgagcgtgggggatgcatccaggcccccttaccggggacgctcctcggagagcagctgcggcgtcgacggcgactacgaggacgccgagttgaacccccgcttcctgaaggacaacctgatcgacgccaatggcggtagcaggcccccttggccgcccctggagtaccagccctaccagagcatctacgtcgggggcatgatggaaggggagggcaagggcccgctcctgcgcagccagagcacctctgagcaggagaagcgccttacctggccccgcaggtcctactccccccggagttttgaggattgcggaggcggctataccccggactgcagctccaatgagaacctcacctccagcgaggaggacttctcctctggccagtccagccgcgtgtccccaagccccaccacctaccgcatgttccgggacaaaagccgctctccctcgcagaactcgcaacagtccttcgacagcagcagtccccccacgccgcagtgccataagcggcaccggcactgcccggttgtcgtgtccgaggccaccatcgtgggcgtccgcaagaccgggcagatctggcccaacgatggcgagggcgccttccatggagacgcagatggctcgttcggaacaccacctggatacggctgcgctgcagaccgggcagaggagcagcgccggcaccaagatgggctgccctacattgatgactcgccctcctcatcgccccacctcagcagcaagggcaggggcagccgggatgcgctggtctcgggagccctggagtccactaaagcgagtgagctggacttggaaaagggcttggagatgagaaaatgggtcctgtcgggaatcctggctagcgaggagacttacctgagccacctggaggcactgctgctgcccatgaagcctttgaaagccgctgccaccacctctcagccggtgctgacgagtcagcagatcgagaccatcttcttcaaagtgcctgagctctacgagatccacaaggagttctatgatgggctcttcccccgcgtgcagcagtggagccaccagcagcgggtgggcgacctcttccagaagctggccagccagctgggtgtgtaccgggccttcgtggacaactacggagttgccatggaaatggctgagaagtgctgtcaggccaatgctcagtttgcagaaatctccgagaacctgagagccagaagcaacaaagatgccaaggatccaacgaccaagaactctctggaaactctgctctacaagcctgtggaccgtgtgacgaggagcacgctggtcctccatgacttgctgaagcacactcctgccagccaccctgaccaccccttgctgcaggacgccctccgcatctcacagaacttcctgtccagcatcaatgaggagatcacaccccgacggcagtccatgacggtgaagaagggagagcaccggcagctgctgaaggacagcttcatggtggagctggtggagggggcccgcaagctgcgccacgtcttcctgttcaccgagctgcttctctgcaccaagctcaagaagcagagcggaggcaaaacgcagcagtatgactgcaaatggtacattccgcttcacggatctcagcttccagatggtggatgaactggaggcagtgcccaacatccccctggtgcccgatgaggagctggacgctttgaagatcaagatctcccagatcaagagtgacatccagagagagaagagggcgaacaagggcagcaaggctacggagaggctgaagaagaagctgtcggagcaggagtcactgcatgctgcttatgtctcccagcatggccattcagggtgcacagccgcaacggcaagagttacacgttcctgatctcctctgactatgagcgtgcagagtggagggagaacatccgggagcagcagaagaagtgtttcagaagcttctcccttgacatccgtggagctgcagatgcttgaccaactcgtgtgtgaaactccagactgtccacagcattccgctgaccatcaataaggaagatgatgagtctccggggctctatgggtttctgaatgtcatcgtccactcagccactgggatttaagcagagttcaaatctgtactgcaccctgggaggtgggattcctttggggtatttttgtggaataaagcaaagacgcgcgtctacagggacatcatgctgatccaaactggagacgaggaatttgagatagagctggagggctcccaaaccctgaggatactgtgctatgaaaagtgttacaacaagacgaagatccccaaggaggactggccatagcccgggcaggactcatggggaagggccaggtccagctggacccgcaggccctgcaggacagagactggcagcgcaccggttatcagcatgaatgggatcgaagtataggtctcggtcaagatcaacagcagggagatcaacttagaagaggatgccagccccgataacgacaggggtcttcggagtcaagattgctgtggtcaccaagagagagaggtccaaggttgccctacatcggtgcgccagtgcgtggaggagatcgagccgccgaaggcattggaaggaggttgggcatctaccgcgtgtccggccggtgtggccacggacatccaggcactgaaggcagccttcgacgtcaataacaaggatgtgtcggtgatgatgagcgagatggacgtgaacgccatcgcaggcacgctgaagctgtacttccgtgagctgcccgagcccctcttcacttgacgagttctaccccaacttcgcagagggcatcgcttctttcagacccggtttgcaaaggagagctgcatgttcaaccttgcttgctgttcccttgccggagggccaccttgcttcaactttcctttttcctttcttggaaccaacttgaaaaagggttggcagagaaggaggcagtcaataatatgttctctgcacaacctcgccacggtcttttggccccacgctgctccggccctccgagaaaagaagagcaagctccctgccaaccccagcccagcctattcaccatgacttgacagctggtccttgggaggtcatgttcccagggtccaggtgcttgctgtaatttcctggcaggtgggaggccattccctgccccgggacagcaaggagacagagcatcctgttctccaccgaagtctaaagggtcccagtccatctcctggaggcagacagatggcctggaaacctctggctaatcgggccatccgtagagcgggaaccttccctgaggtgtccttgggccacccccaagtgttgggccatctgccaagagacagcgacccaaagccgaaggacaggtggcctggggcagatctcgcccaggtctgggagccccaggctggcctcagactgtgggttttttatgtggccacccgaggggcgccccaagccagttcatctcagagtccaggggctgaccctggggaagacagggttgaaggggagtgatttttattgaactttaacttaggagtcttaaaagatttctactggatcacttgtcaagatgcgccctctctggggagaagggaacgtgaccggattccctcactgtttgaatcttgaataaaacgctgctgcttcatcctgtgggggccgtggccctgtccctgtgtgggtggggcctcttccatttccctgacttagaaaccacacactccctgcccccagtgtccctgcccctgccccagcacaggtgacttcatttctgtcctctcagctcagtggactcgctcaacttttgtataagtctccacttggtggtagcagcttgctgatgacttgttttaaaactttcatcctaaataaccttttgatacttgaatatttgtaagttttatacatagtttctaatttttttccgaccagatccagatacctaataagatgctggaatgtaatccctggacaatccgtgtcctggcagcatttggtcttcctctaagcgcctggctccgctgttctcaggagtggggttctgaagtctctgggagaacaggatacgtggaggggttaggaagggggccaggcctagagacgggagactccctcccggagcaggtggaggcacaggaccgttcgctaccccatctgccggcacctgcggggggagcccagggcattctttgtaaaccctcctggaccacctgggttcaaaggaaaacagaagcatgggagggccgccaagtatttttcaaggaaattaacccccatgaatattccatcacttttttataaagaggggcttggggcaggcagaggagagaagggagagcaaactgagagccaagttttccacacggtccttgcaggagggagaggatgcagtttcccagagggaagcagggttcacattttaaggaagtgtgtggggtccctggatgacaccagcacccagtgcggctctgtctggcaaccgctcccaaggtgggaggagtgggtgtcccctgtgtgtcagtgggcagctcctgctgaacccgcagctcactagggagcctgacagtggggccatgcgcctgacactcctctctgcttgtggacctggcaaggcagggagcagaaaacagag

SEQ ID NO: 20836 - DNA, 447 bp, Homo sapiens
  SIMILAR (447)..(340): 1001254mologous to Homo sapiens AP-3 complex delta subunit, partial CDS,accession number AC005545,Smith-Waterman Score=185.
  misc_feature (1)...(447): n = a,t,c or g
tttttgatatgtctctctctttatacgggaatgtcgatagcaaataaattcttatgtaacacatcatacaatttcaaatcctggaatcactgcatgggattctgtaatggattacatgctaaagtgacagttttcatcaaaaggagaagataaaatgtcattatctctgaagaagggtcagtcctgtgcccacgctggccgtgtgaggtgagcggagtctccttgccctgcctggtgggggctctgcctgtgaggtggctctcacaggtcctgcccaaggganctgggcacactccttcaacacagaacagcccaggtccgctgcttccaggccctgctctcgtgaaagctctgggaagcagcgaggtagccaattcgcttgaaggtgaacttggaggcactcatcacttctatgatgttgaaggcggcccagctgatgtcgtatcc

SEQ ID NO: 20837 - DNA, 725 bp, Homo sapiens
  SIMILAR (1)..(642): 861254mologous to Mus musculus mBLVR,accession number AB004305,Smith-Waterman Score=904.
  misc_feature (1)...(725): n = a,t,c or g
ccagaacctgccagagacctgcaaaatgacatcatgacactgatgtcacacaccaggccctacatcaggaagaaggctgtgctgatcagtacaaggtgttcntgaagtacccgagtcgctgcgccctgcttttcccgggctgaaggagaagctggaggacccgacnncggggttcagtcggctgccgtcaatgtcatctgcgagctggccagacgcaaccttaagaactacctgtccctggcnccgctctttttcaagctgatgacgtcctccaccaacaactgggtcctcatcaagatcatcaagctgttcggtgctcttactcctttggaaccgcggctgggcaagaagctgatcgagcccctcaccaatctcatccacagcacgtctgccatgtctctcctctatgaatgtgtgaacaccgtgattgcagtgctcatctcgctgtcctccggcatgcccaaccacagcgccagcatccagctttgtgttcagaaattaaggatattgatcgaggactccgatcagaacttgaagtacctggggctgctggcaatgtccaagatcctgaagacccaccccaagtccgtgcagtcccacaaggacctcatcctgcagtgcctggacgacaaggaccgcagccctgacgtgtctcgcctctcctcagtcgtgtgtactgtacccaagcctgagtgttaatttaactctatgttgtccgccgtgta

SEQ ID NO: 20838 - DNA, 464 bp, Homo sapiens
  SIMILAR (1)..(228): 1001254mologous to Homo sapiens AP-3 complex delta subunit, partial CDS,accession number AC005545,Smith-Waterman Score=396.
  misc_feature (1)...(464): n = a,t,c or g
cggatgtccttccagaatcttctggcgaagatctgttttcaccaccatttttccgttgtggagcgagtggactcctgcgcctccatgtacagccgctccatccagggccaccatgtctgcctcctggtgaaaaagggtgagaactctgtctcagtcgacgggaagtgcagtgactccacgctactgagcaacttgttagaagagatgaaggcgacgctggccaagtgttgagagctgcctgcgagccctgcaccacccccacctctcctcagtcgtgtgtactgtacccaagcctgagtgttaatttaactctatgttgtccgccgtgtagacatccgaggtcatttgttgcgttgaattatcttgaccatccttttttactgtggantcttcccattctntttgggcaagaagtccctttttggnccccaaaccaggcaagggattnccccactngggttttt

SEQ ID NO: 20839 - DNA, 686 bp, Homo sapiens
  SIMILAR (2)..(625): 831254mologous to Homo sapiens AP-3 complex delta subunit, partial CDS,accession number AC005545,Smith-Waterman Score=874.
  misc_feature (1)...(686): n = a,t,c or g
ctcggacagcgagtcagaggacgagaggcccagggccgtcttccacgaggaggagcagcggcgtcccaagcaccggccgtcggaggcggacgaggaagagctggctcggcgccgagaggcccggaagcaggagcaggccaacaaccccttctacatcaagagctcgccatcgccacagaagcggtaccaggacaccccgggcgtggagcacattcccgtggtgcagattgacctctccgtccccttgaaggttccagggctgcctatgtcagatcantatgtgaagctggaggaggagcggcggcaccggcagaagctggagaaggacaagaggaggaaaaagaggaaggagaaggagaagaagggcaagcgccgccacagctcgctgcccacggagagcgacgaggacatcgcccctgcccagcaggtggacatcgtcacagaggagatgcctgagaatgctctgcccagcgacgaggatgacaaagaccccacgacccctacaggctctgggatatgacctgggatagccctanccgacagcgagaaactggctattcagaacacagaacaccgagactcaaattccctgagaagacgtnccatggtngaaagaagacnngaaccccnnnnnnnnnnnnnnnnnnnnnnnnnnnnnnnnnnnnnnnnnnnnnaaaagaaagagg

SEQ ID NO: 20840 - DNA, 476 bp, Homo sapiens
  SIMILAR (393)..(476): 1001254mologous to Homo sapiens AP-3 complex delta subunit, partial CDS,accession number AC005545,Smith-Waterman Score=147.
gctagatatagtctcacagtttttccttattcttttataagtcatgtggcccttcaggtcctttccaaaacatatttatgtaagtgagaaaaggaagccgagggaaaaactaattctcattttggacacttcccctaccagtaaagataacaaatctatagtaaatggtgagtaaatgtaaataaaattacatttcagagtgaaacccacatttgggccatccttcaaattttatcctaaaatctggagtgcaattctgggaggataaccatcctgaggggaaggggagaagatgactggggtcctaggatatcacaggcaatgttatccctgaggctgtggaactggtgccatggaggggagcaatacggagttagtttcccttcacttcgcctattcagaaacacagaaacaccgagacctcaaaatcccctgagaaggacgttcccatggtagaaaagaagagcaagaaaccc

SEQ ID NO: 20841 - DNA, 1174 bp, Homo sapiens
  SIMILAR (937)..(1173): 1001254mologous to Homo sapiens AP-3 complex delta subunit, partial CDS,accession number AC005545,Smith-Waterman Score=393.
ggggagctcagtgtgaacactgtcactaccccgaaggacgagtgtgaggacgccaagacggaggcgcagggcgaggaggacgatgccgaggggcaagaccaggacaaggtgcatccacactatggcttgggtcagagcctggttcctgttcgtggccgggtcatgttccagtgcgtggacaggtcaccctctgctgaccccgttcctccgcggatgggccacactgtgctgacccactcatctgttgatagccacttgggccgcttcccctttgtggtgacacagtatgccgctttgaacatctgcgcagtgcgcgtggatgtgtgtgttccctctcggatgtgcacatgggcgtggggttgctgcgtcaagtgtggtgtcctcactggtttgccctgcatggctccctggtcggtggggactgttccccgggctgctttggcgcttgccgccaaccagagacggccccagcctccgctgggcctggtctggcctgagcttgtcccgaaatctcccaagcctaagaagaagaagcacaggaaggagaaggaggagcggaccaaaggcaagaagaagtccaagaagcagcctccaggcagcgaggaggcagcgggggagccggtgcagaatggcgcgccagaggaggagcagctcccggtgagggcctccatgcgggagagaactgagcagattcgagaagaagccgagcctggcgggggcaggggactggccctggcccgcagccccacattaggcacccccgtggtgggctgtgtggtcctgggagccggggatccctcatcggctcctttgaagccccttgccccaagcattcttggagtcgtggcattcgacctggggtattgggccatactggagtcttcgctgagacggagctcggggcccccaaggctgatgcgccttttctatttccagcctgagtccagctactccctcctcgctgaaaattcctatgttaaaatgacctgtgacatccggggcagtctgcaggaggacagccaggtcactgtggccatcgtgctggagaacaggagcagcagcatcctcaagggcatggagctcagcgtgctggactcactcaatgccaggatggcccggccgcagggctcctccgtccacgatggcgtccccgtgcctttccagctgcccccag

SEQ ID NO: 20842 - DNA, 763 bp, Homo sapiens
  SIMILAR (3)..(761): 991254mologous to Homo sapiens delta-adaptin, partial CDS,accession number AC005545,Smith-Waterman Score=1276.
  misc_feature (1)...(763): n = a,t,c or g
cccagagctttcacgaaggcaccgacgtcatcatgctgaccaccaatcagatccgtaagnacttgagcagccccagccagtacgacacaggtgttgcactgacgggtctgtcctgcttcgtcaccccagaccttgccagagacctggcaaatgacatcatgacactgatgtcacacaccaagccctacatcaggaagaaggctgtgctgatcatgtacaaggtgttcctgaagtaccccgagtcgctgcgccctgcctttccccggctgaaggagaagctggaggaccccgaccccggggttcagtcggctgccgtcaatgtcatctgcgagctggccagacgcaaccctaagaactacctgtccctggccccgctctttttcaagctgatgacgtcctccaccaacaactgggtcctcatcaagatcatcaagctgttcggtgctcttactcctttggaaccgcggctgggcaagaagctgatcgagcccctcaccaatctcatccacagcacgtctgccatgtctctcctctatgaatgtgtgaacaccgtgattgcagtgctcatctcgctgtcctccggcatgcccaaccacagcgccagcatccagctttgtgttcagaaattaaggatattgatcgaggactccgatcagaacttgaagtacctggggctgctggcaatgtccaagatcctgaagacccaccccaagtccgtgcagtcccacaaggacctcatcctgcagtgcctggacgacaagga

SEQ ID NO: 20843 - DNA, 4911 bp, Homo sapiens
  SIMILAR (479)..(1525): 741254mologous to Homo sapiens AP-3 complex delta subunit,accession number U91930,Smith-Waterman Score=1184.
cggggggcccggagcgggatcgcggcacctgccgagcgggtcgccgcgtctgccgcggtccttggaccccgccgccgccctggcctgggagcttgccccgccgcagcggccggcagcgcggcgctccgcgggcggcaggcacgggccccgggccccctcacggcgcccagccgcgggcctcccgaggcaaaagcccgtgggccgccgcgatggccttcaagatggtgaagggcagcatcgaccgcatgttcgacaagaatctgcaggacttggtccgcggcatccgtaaccacaaggaggacgaggcaaaatacatatctcagtgcattgatgagatcaagcaggagctgaagcaggacaacatagcggtgaaggcgaacgcggtctgcaagctgacgtatttacagatgttgggatacgacatcagctgggccgccttcaacatcatagaagtgatgagtgcctccaaagttcacctttcaagcgaattggctacctcgctgcttcccagagctttcacgaaggcaccgacgtcatcatgctgaccaccaatcagatccgtaaggacttgagcagccccagccagtacgacacaggtgttgcactgacgggtctgtcctgcttcgtcaccccagaccttgccagagacctggcaaatgacatcatgacactgatgtcacacaccaagccctacatcaggaagaaggctgtgctgatcgagcccctcaccaatctcatccacagcacgtctgccatgtctctcctctatgaatgtgtgaacaccgtgattgcagtgctcatctcgctgtcctccggcatgcccaaccacagcgccagcatccagctttgtgttcagaaattaaggatattgatcgaggactccgatcagaacttgaagtacctgggggctgctgggcaatgtccaagatcctggaaggacccaccccaagtccgtggcagttcccacaagggaccttcatcctgcagtgcctgggacgacaaggacgagtccatccggctgcgggccctgggaccttgcttctatggggatggtgttccaaggaaggaacctggatgggagatcgtggaaggaaggttgatggacccacgtagacaaggcagaggggtaccacctaccggtgacgagctgctcaccaagatcattgacatctgcagccagtccaactaccagtacatcaccaacttcgagtggtaacatcagcatcctggtggagctgacccggctggagggcacacggcacaggcaacctcatcgccgcccaaatgctggacgtggccatccgcgtgaaggccatccgcaaggttcgccgtgtcccagatgtctgcgctgcttgacagtgcacacctgctggccagcagcacccagcggaacgggatctgtgaggtgctgtacgctgccgcctggatctgcggggagttctcagagcatctgcaggaaccacaccacactttggaggccatgctgcggcccagagtcaccacgctgccaggccacatccaggcccgtgtatgtgcagaacgtggtcaagctctacgcctccatccttgcaagcaagaaggagcaggccggggaggcagagggcgctcaggccgtcacccagctcatggtggaccggctgccccagtttgtgcagagcgcagacctggaggtgcaggagcgggcgtcctgcatcctgcagctggtcaagcacatccagaagcttcaggccaaggacgtgcctgtggcagaggaggtcagcgctctcttttgctggggagctgaacccagtgggcccccaaggccccagaagaaggtttcaagtcccgaaagggctgggacctggacggctgggacaatgagccactctgggacagcgagtcagaggacgagaggcccatggccgtcttccacgaggagggagcagcggcgtccaaagcaccggccgtcggaggcggacgagaaagagctggctcggcgccgagaggccgggaagcaggagcaggccaacaaccccttctacatcaagagctcgccatcgccacagaagcggtaccaggacaccccgggcgtggagcacattcccgtggtgcagattgacctctccgtccccttgaaggtttccagggctgcctatgtcagatcagtatgtgaagctggaggaggagcggcggcacccggcagaagctggagaaggacaagaggaggaaaaagaggaaggagaaggagaagaagggcaagcgccgccacagctcgcttgcccacggagagcgacgaggacatcgcccccgccccccagggtggacatcgtcacagaggagatgcctgagaatgctctgcccagcgacgaggatgacaaagaccccaacgacccctacagggctctggatattgacctggataagcccttagccgacagcgagaaactgcctattcagaaacacagaaacaccgagaccgtcaaaatccccgtgaagaaaggacagttcccatggtagaaaagaagagcaagaaacccaagaagaaagagaaaaagcacaaagagaaagagagagacaaggagaagaagaaggagaaggagaacgaaggctgaggacctggacttctggctgtctaccaccccaccgcctgcccccgcccccgcccccgcccccgttccatccacggacgagtgtgaggacgccaagacggaggcgcaggtgcgagtgaggacgatgccgaggggcaagaccaggacaagaaatctcccaagcctaagaagaagaagcacaggaaggagaaggaggagcggaccaaaggcaagaagaagtccaagaagcagcctccaggcagcgaggaggcagcgggggagccggtgcagaatggcgcgccagaggaggagcagctcccgccctgagtccagcctactccctcctcgctgaaaattcctatgttaaaatgaccctgtgacatccggggcagtctgcaggaggacagccaggtcacttgtggccatcgtgctggagaacaggagcagcagcatcctcaagggcatggagctcagcgtgctggactcactcaatgccaggatggcccggccgcagggctcctccgtccacgatggcgtccccgtgcctttccagctgcccccaggcgtctccaacgaagcccagtatgtgttcaccatccagagcatcgtcatggcgcaaaagctcaaggggaccctgtccttcattgccaagaatgacgagggtgcgacccacgagaagctggacttcaggctgcacttcagctgcagcttcctacttgatcaccactcctttgctacagtgacgcttttgctaagttgctgggagtctggggacttgagcatgagctcaattcaaagtcgatgggcatttcgggatgttcctttccagaatcttctgggcgaagatctgttttcaccaccatttttccgttgtggagcgagtggactcctgcgcctccatgtacagccgctccatccagggccaccatgtctgcctcctggtgatagaagggtgagaacttctgtctcagctcgacgggaagtgcagtgtactccacggtactgagcaacttgttagaagagatgaaggtgacgctgggccaagtgtttgagagctgccttgcgagccccgcaccacccccgccggagcacgctccccaggggaccgcaggccctgacgtctctcgccctctcctcagtcgtgtgtactgtacccaagcctgagtgttaatttaactctatgttgtccgccgtgtaggacatccgaggtcatttgttgcggttgaattatctggaccatcctttttttactgtgaactcttcccattttcttttggcaaagaaagtcccctttttcggcccccaaaccaggcaaggggactcccccacctggggtctgtggccctggccccgcggctgggggccggagttccttggaatgtgggctttcagggggctcctgtcctgggccagggcctgatgggcaccacgtgaggggcacttggtggacagggcggggctgacgtggcctcctctggggtcgcctgcttttgacccaaaggtccatgacggttgcgtccgggggaggggaaggaagggccgctgtcgccaaggttttctctcccagaacccacaattgggaaagcggtcttgccaggcgttgtccattgtcagtgtgctcgtgggctggtgactgggtcttgggatcccaggccacgcgccagccaggctgtgggcagggcggggccagggacgccaaagagaggttgcagtcagaaccgtggacggggtgggttgaggcctctctgccacccgtcttcctggtcagcaagaagtgcatctcggcttgggtttggggtgggcgtgtgtggtccgcatccccctgcttgccaactatgcgcaccaaggtttcccccacatccttccccagcaccccttaggaaaggcccaggcagggccctggtaagcagcggaccctgggctgttcctgtgttgaaaggaagtgtgcccccagtgccccttggggcaggaccctgtgaagagcccaccctccaccaggcagagccccccaacccaggcagggcaagggagactcccgcctcacattccccacggcccagccgtgggcacagggattgacccttccttccagagataatgacattttatccttcctcccttttgatgaaaactgtcactttagcatgtaatccgattacagaatcccatgcagtgattctgtaatggatttgaaattgtatgatgtgttacataagaatttatttgctatcgacattcccgtataaagagagagacatatcacgctgctgtcatgcattccgtgtcaagatgatccaataaagttaaaaaacaggcaaaaaaaaaaaaaaaaaaaagtcgacgc

SEQ ID NO: 20844 - DNA, 338 bp, Homo sapiens
  SIMILAR (170)..(3): 581254mologous to Homo sapiens E-MAP-115-95,accession number AJ242501,Smith-Waterman Score=142.
atcgaatttctagagtgtgcagctttgtagggcatgatgatggggctgcaagatgctgaacgaggacaaatggggataactagggtgcaggtgattggttttacacacaagagtgccagaggagcgttaacaacgctgctctcccatgggatgagctgcaggcggcgagctaaacgtcaccacataagcaagatgttagaagcattcttttcagagtcaagagggcataatacatcgtacctattgcttccatacgctcggccttcacaggaccaggctctgcagggaggatgaatggaaaagagtcagggcaacaggacccctgtccagagggagca

SEQ ID NO: 20845 - DNA, 531 bp, Homo sapiens
caatctgtgtatgccacttggaaaaatgaaggctgtggcctaagctgatgtaaagaaaagaacatatgtttcctatgagtaacagaattcacttaaatataagactgtgaatcctaacagaattgcctattcttatataagtgtatataacagtatagtaagttttagaaatttaaggtattactatggtattcttgaaataagattttagataaatgtcatattaatcttgttctttttctgtctcttcatgtagaagttatatgagtgtttcttctgaagaaccaaagctgaaatttaatgagaatttctacaattaatgggaattcctttcctgctataaaggagcatcccctccacccgttttctaggagttcttgaccatcattttgaaaaggatttattaaaactaggctaaaggacaacagactgggataggcttttctaataatttttcatcaataggaaaaaagaaatacgtctcattcttcaatactttaaaatggctttttccagtgtgctccttcttaa

SEQ ID NO: 20846 - DNA, 1011 bp, Homo sapiens
  SIMILAR (59)..(520): 711254mologous to Homo sapiens E-MAP-115-95,accession number AJ242501,Smith-Waterman Score=473.
tggttttgttctttggattttgtttccaactggttttctccttgtacctatttgtgcagctgctccagccatggccccagctccagcctcggccccagctccagcctcggccccagctccagccccggtccccaccccagccatggtctcagccccgtcatccactgtgaatgccagtgcttctgttaagacttctgcaggcaccaccgacccagaggaggccacaaggcttctagctgagagacggaggcctctcttcaaagatttctcctcaggtgtctttggttttggttttgttctgtctttttccagacaaaagagagaggaattggctcaacgtgtggctgaagagaggacgactcgccgtgaggaggagtcgcgcaggctggaagccgagcaggcccgggagaaggaggatgggcaccccctgggagacccgggcagcccgcctgtttgtcagaggcagacgccgaccttctgttttcagaaagaagaagaagctcgcgttcgtgaagaagcatgcttttatctttttcattttcacttgtaactctaatttttaaaagtcctcttttttggctcttggaggttaggtctaagaaaagaatattagtaaccctgtgttctgtctcctttactatgcccagaggtgtctgcacttccatgtacaacaaacgctcgttttcctaataatgtgttttccagttttaagactaacttatttctatttttatttttcaaattccttagcactcccgatttggaaaaacaaccaaatgaaaatggtgtatctgttcagaatgaaaattttgaagaaattataaacttacccattggatctaaaccatccagattagatgtcaccaacagtgagagcccagaaattcctttgaatccaattttggtgcctggctcatagaaattgaattttgagttggattggacaacttctaaggcctctcctattctctcagtcagtgcagaagtccagtccgcagcacccagtgggtg

SEQ ID NO: 20847 - DNA, 1011 bp, Homo sapiens
  SIMILAR (7)..(903): 721254mologous to Mus musculus microtubule-associated protein, MAP-115,accession number Y15197,Smith-Waterman Score=1064.
atggccccagctccagcctcggccccagctccagcctcggccccagctccagccccggtccccaccccagccatggtctcagccccgtcatccactgtgaatgccagtgcttctgttaagacttctgcaggcaccaccgacccagaggaggccacaaggcttctagctgagaagaggcggctggcccgagagcagagagaaaaggaagaaagggagaggagggagcaggaagagcttgaaagacaaaagagagaggaattggctcaacgtgtggctgaagagaggacgactcgccgtgaggaggagtcgcgcaggctggaagccgagcaggcccgggagaaggaggagcagctgcagcggcaggcggaggagcgggcgctgcgcgagtgggaggaggcagagcgcgcccagaggcagaaagaagaagaagctcgcgttcgtgaagaagcagagagggtccggcaggaacgagagaagcatttccagagagaagagcaagagcgcctggagagaaagaagaaaaccagtgatcagagaaacggtgatatagccaagggagctctcactggaggaacagaggtgtctgcacttccatgtacaacaaacgctccgggaaatggaaagccagttggcagcccacatgtggttacctcacaccagtcaaaagtgacagtggagagcactcccgatttggaaaaacaaccaaatgaaaatggtgtatctgttcagaatgaaaattttgaagaaattataaacttacccattggatctaaaccatccagattagatgtcaccaacagtgagagcccagaaattcctttgaatccaattttggcctttgatgatgaagggacacttgggcccctgcctcaggtagatggtgttcagacacagcagactgcagtcagtgcagaagtccagtccgcagcacccagtgggtgtctgtcagcctctctgcacagagcagcacccattacccgacatcatgcatgctcagaatatgctttgtag

SEQ ID NO: 20848 - DNA, 1661 bp, Homo sapiens
  SIMILAR (714)..(1526): 821254mologous to Homo sapiens E-MAP-115-105,accession number AJ242502,Smith-Waterman Score=1122.
gaattcccgggtcgacgatttcgtcggagcaccatggcggagctaggagctggcggcgacggccacaggggcggcgacggcgcagtgcaatttcaggacaaaataacaaccactcaggaaataaaccagaccctccgcctgtgttacgtgttgatgaccggcagcggctggcccgggagcgacgtgaggaacgggagaaacagctagctgcaagagaaatagtgtggttagaaagagaagagcgagccaggcagcactacgagaagcacctggaagagcggaagaagaggttggaggagcagaggcagaaggaggagcggaggagggctgctgtggaggagaagcggaggcagagacttgaggaggacaaagaacgccacgaagctgttgtacggcgcacaatggaaaggagccagaagccaaaacagatgcataaccgttggtcgtggggaggctctctccatgggagccctagcatccacagtgcaggtggttttgttgaatcatcattctcctctctggatttagcaggcctggaccaccacttcataacttttggtggtactagaaaagctgatccagacaggcggtcagtttccaccatgaatctttcgaaatatgttgatcccgtcattagcaagcggctctcctcttcatctgcaactttactaaattctccagatagagagcctggtcctgtgaaggcccagcgtatggaagcaatagctcgccgcctgcagctcagcccatgggagagcagcgttgttaacagactcctgacgcccacacattcgttcctggccagaagtaaaagcacagctgccttgtctggagaagcagcatcttgcagccccatcatcatgccctacaaagctgcacactctagaaattcgatggatcgaccaaaactctttgtaacaccacctgagggctcttctcgcaggaggatcattcatggcacagcgagctataaaaaagaaagagagagagaaaatgtactcttcctcacatctggcacccgaagggctgtatctccatctaatcccaaagcaagacaaccagctcgctcccgactttggcttccgtccaagtctcttcctcatttgcctggcacacccagaccgacatcctccttgccacccggctcagtcaaagctgctcctgctcaggtccggcccccatcccccggcaacatccgccctgtcaagagggaagtcaaagtggagcctgagaagaaagatcctgagaaggaacctcagaaagttgccaatgagccctcactaaagggcagagcacctttagtgaaggtagaagaagccacagttgaagagcggacacctgctgaaccagaagttggccctgctggaacagcattggtggagggggcaggaccttctgctggtgcagggccacgagctcctccattgcagatgaggctccccatgtcaacattggccaaggcttttgcaaacaagccagtccaaaaaggttcaacatttacaccagctgctttaatgagggcattgatcttatcctccttgacggtcacctcaccctcatgcagaatgagggccgagccttatgcagaatgcaggcgagctcagaaacagaggccatggtgtgagcaagtgtggggctggcactgccaggcaaggtgctag

SEQ ID NO: 20849 - DNA, 4767 bp, Homo sapiens
  SIMILAR (4440)..(4360): 371254mologous to Homo sapiens microtubule associated protein,accession number X73882,Smith-Waterman Score=42.
  misc_feature (1)...(4767): n = a,t,c or g
cttaatgtagggtgaatactgaagacctccttaaggtctgcaagtaaatatagatttttccagtgctggccaaaaagcaagccagccattgtaaaggtcagggtcattctctggcagcgctgctctttaacacaatataattaagaattttgcaccacttctaattaaaacttgattacttagaaggctttccgtttgctaatgatgactaaagtttaaaaacacacatgaaaaagaaaaacagccaaaatacacctactgctctaaattttaaataaggctatcctatatgcttaatcaacaggaggctaggaaaatgtcactgagttaaatgaaggacaatctgaagactcaagaatcaatctgagtgaagttataacatatgagaaagctaaaagtaaaactatgtcaaacattttttatttggtggtttcanttgctatgttgatttaaacaaattaaacaagtttgttataataattttcttttctaatgtaatgactagtgtgtacatggacaactgaaaaacagggaaaacccccaaattcaatgttttcacaaatttacaagccattactaaagaccatatgcctggattaaaaaaaaatagtccaataggatgaagtctctcattcaacctaggcagttcaaccaatttctcttttaataaaaggctgcacattacagtgggtataaatttatcttttaaacactccacataaaaaacatggtggcaccctctccttcttacattttaatcattaggtaggtctctaaaatgggtaaaattaaaactggaatttatattagcaaatggaaagtggcaagtttggtacagctaggctcagcagccaaaagtggaagaataagaatggaaggtgaaaagctgacagatgccacgcagagcaaggacttccatgaaggtccgtgtcctgtgtgcccaaacacagtctaacattcccatcattttcctcattgctcttaaacgagcaaaaccaaattctttttcctatttaaagaaatattaaatctttattttccccaacattaatttgtgatcaggtaaggcaaagataagtcctccatcactggggacagcagcaacatacagacttcagaaatagccctgaatcatcagtaacattctatcgtggtaacatcagaaggaatgcagcctaacaaattaaatttgtaatgttgtcacattattcctaatttatttgattaggtttatctggaaaaactttataaatacattatgtaagagggcagtaaattattttcttgcttttgaaaaaaataaatgttttttcacatttttaaaacattttagtctgctttttgcaaaaggagttgcaaaaaaaatgtgacagctggggtttgcaggaatgtccatgtacaagctgtatttataagaacctggtaatctgcctataatttgcttctaccaaataggaggctctttgccaataatattttaaaaaaacaggcttaaactcttctcctattcattctacttgtagaacaaagaggtacttatttttcaagtattataaaaggtaaaaaattttttttgccaattttacatgttaagccttttaagaccaaaaaaatcatgcctagtcagcccatttcttttataaccaaattctcttgtcttttaaagaatgcagaaaaatattgattgctaagaaggagcacactggaaaaagccattttaaagtattgaagaatgagacgtatttcttttttcctattgatgaaaattattagaaaagctatccagtctgttgtctttagctagtttggagtaaagcttttcaaaatgatggtcaagaactctagaaaacgggtggaggggatgctcctttataggcagggaaagggaattccattaattgtagaaattctcaattaaatttcagctttggttcttcaggaangaaacactccatataacttctgcaagtctgctggtgtctgaacaccatcttacctggaggcaggggcccaagtgtcccttcatcatcaaaggccaaaattggattcaaaggaatttctgggctctcactgttggtgacatcttaatctggatggtttagatccaatggggtaagtttataatttcttcaaaattttcattctgaacagatacaccattttcatttgggttgtttttcccaaatcggggagtgctctcccactgtcactttttgactgggtgtgagggtaaccacatgtggggctgcccaactgggttttcccatttcccgggagcgtttgttgtacaatggaggtgcagacacctctgttcctccagtgaggagctcccttgggctatatcacccgtttctctgatcactggttttcttatctgtaggcttctgttctcctgggtccttttcataatctcctcaaggtcgcttctttctctccaaggcgctcttgctcttctctctgcgaaatgcttctctgcgttcctgccggaccctctctgcttcttcacgaacgcgagcttcttcttctttctgcctctgggcgcgctctgcctcctcccgctcgcgcagcgcccgctcctccgcctgccgctgcagctgctcctccttctcccgggcctgctcggcttccagcctgcgcgactcctcctcacggcgagtcgtcctctcttcagccacacgttgagccaattcctctctcttttgtctttcaagctcttcctgctccctcctctccctttcttccttttctctctgctctcgggccagccgcctcttctcagctagaagccttgtggcctcctctgggtcggtggtgcctgcagaagtcttaacagaagcactggcattcacagtggatgacggggctgagaccatggctggggtggggaccggggctggagctggggccgaggctggagctggggccgaggctggagctggggccatggctggagcagcagggccaacttctggttcagcaggtgtccgctcttcaactgtggcttcttctaccttcactaaaggtgctctgccctttagtgagggctcattggcaactttctgaggttccttctcaggatctttcttctcaggctccactttgacttccctcttgacagggcggatgttgccgggggatgggggccggacctgagcaggagcagctttgactgagccgggtggcaaggaggatgtcggtctgggtgtgccaggcaaatgaggaagagacttggacggaagccaaagtcgggagcgagctggttgtcttgctttgggattagatggagatacagcccttcgggtgccagatgtgaggaagagtacattttctctctctctttcttttttatagctcgctgtgccatgaatgatcctcctgcgagaagagccctcaggtggtgttacaaagagttttggtcgatccatcgaatttctagagtgtgcagctttgtagggcatgatgatggggctgcaagatgctgaacgaggacaaatggggataactgcttctccagacaaggcagctgtgcttttacttctggccaggaacgaatgtgtgggcgtcaggagtctgttaacaacgctgctctcccatgggctgagctgcaggcggcgagctctatctggagaatttagtaaagttgcagatgaagaggagagccgcttgctaatgacgggatcaacatatttcgaaagattcatggtggaaactgaccgcctgtctggatctgcactgtggatgctagggctcccatggagagagcctccccacgaccaacggttatgcttctgttttggcttctggctcctttccattgtgcgccgtacaacagcttcgtggcgttctttgtcctcctcaagtctctgcctccgcttctcctccacagcagccctcctccgctcctccttctgcctctgctcctccaacctcttcttccgctcttccaggtgcttctcgtagtgctgcctggctcgctcttctctttctaaccacactatttctcttgcagctagctgtttctcccgttcctcacgtcgctcccgggccagccgctgccggtcatcaacacgtaacacaggcggagggtctggtttatttcctgagtggttgttattttgtcctgaaattgcagaggcagggcggctggaggcatttttcttatcttgcactttgtagctgtcgggtgctgtttcgcttcgcactgcgccgtcgccgcccctgtggccgtcgccgccagctcctagctccgccatggtgctccgatgacgcgcccggagagccgctccgccctttcctcggcttggctcccgccggcccccgcctcccaggccagcggcccagacaggtgagcgcagtccggggatggcggagggcgggggcagagagcgcggcagtcggctgcggcctgggcctggcgcgccccctcgcgggcaggtgcggcgtggcagccgctccgaccgccgctgccgagtctcggctggaagagcggcgggcggaaccagtacctcagtccggagcttccggtcgccgcggccgaccagctgagggctcccggagatatggagcggggtcagcgaggcctggtggcgcctcctggagtctgggacgagcggcggtccgaggagcagcccaggtggggcgagggtacggagacgctatttccctccgaactctgaagtagccaggtcagtgtcggctccgaacgaatttttctttttttaaagaaacagattattggccgaggaaaaaccaatttcgctctaaagg

SEQ ID NO: 20850 - DNA, 350 bp, Homo sapiens
  SIMILAR (100)..(180): 551254mologous to Mus musculus MHC c3/g5 protein,accession number M14830,Smith-Waterman Score=85.
gtccagagtaccgcacctgcagatgctgctgtctggctgggtggtggctccggacaggagcttcctcgaaggacactttaagtccgcctacgacaaggagatttcatgtccctgaacgaggacctgcagacctggacagcggctcaaagagtggcttggaggatccatcacacctgggagaggcccagagactggaccgaagtctattgcatttgccgcagtcccgactagggagtcatggggttgaagtgacccataggctgatggagtgtgcttgctggacgcgggggaaagggagatttatatctgccctggagggagtcagtggtgtttgcatcatggcatatgag

SEQ ID NO: 20851 - DNA, 756 bp, Homo sapiens
  SIMILAR (695)..(606): 561254mologous to Mus musculus Pro-Pol-dUTPase polyprotein,accession number Y12713,Smith-Waterman Score=86.
atggagttaattctaggactgataagggcgtccagatgggacgcctttatcagttggtctcgggttctagagaagccatcagagtcagtggaggatgagcttcataaagtgggagatctccaggatccttcctggactccaagatacccagagaagccggatcctgtgtcccggaacccccttcctgttcctttgtgggccctgaccttagggagaactgggctggccgccgggctccgccttcaccacgtgggccctgagttcctccgcggcgccttcgtgggcgacacgcgattcctgagcttccacagccgcggcgagaatcagagcgtgaagcgcgggtggagaagatggcacagggctgtgggcgccctgaggaaagttctcgaagaccgcagggaatgtgttactgaggggcctgaggttcctgggcccgcaccaccaccagggtcagccggatgtgatcttcaagataaaacccagctgcaccctcaagagaccattccactgctctatcagctggcagcgtgtgtgatgcagtatggggtagaaccaggagatctcatggtcgtgtgcccactaccagacagcgttcgctataaagccccggacccgctatttaagccatttgccgttgcctatgagtctgtgcatgttctcacctcaggccacttctgtctacacaaagtgggcaaatcagagccccacctgcctattggcaggaccctcttcagcactgtctctgctcattcctga

SEQ ID NO: 20852 - DNA, 1250 bp, Homo sapiens
  SIMILAR (705)..(559): 441254mologous to Homo sapiens B antigen,accession number AJ006978,Smith-Waterman Score=105.
atgaggtcatattacagccgcacttctgtattactagatgactctgtcttctaccttctttgtttgcaagttttgatgaagcagaaaggcccatgtggcaaggaactgaagtcagcctctggccaccagccagttgacatcccactttctctttaccagtgtgaatgtcaagttctcttactatctccgtcactctcctctcacaccatccaggaggccccactagggagtggcaggcagagaggaggaagtgtgggcaagcacactccatcagcctatgggtcacttcaaccccatgactccccagtcgggactgtggcaaatgcaatagacttcagtccagtctctgtgcctggagaagaaagggaagctggtcagagcccacaggaggaggtgacccacagggagccagtagtaggtgtgatgaaaccagctctccccaacacttatcctgacccccgttctatgcctgcaggtggagcgctgttctgtcccctacaacctatgctccaagaggtcctgacgtggggcctggaggaccccagtacctgccggcagcatcatctccttgccatgctccaggtgtctgagcagccacctagtgcagtgacccatcggggcttcccttgtggcctccgcggtccagaacctctcccaggtgtgatggatcctccaagccgctctttgagccgctgtccaggcggacttaaagtgtccttcgaggaagctcctgtccggagccaccacccagccagacagcagcatctgcaggtgcggtactctggaccggctgaccctggtggtggtgcgggcccaggaacctcaggcccctcagtaacacattccctgcggtcttcgagaattttcctcagggcgcccacagccctgtgccatcttctccacccgcgcttcacgctctgattctcgccgcggctgtggaagctcaggaatcgcgtgtcgcccacgaaggcgccgctgaggaactcagggcccacgtggtgaaggcggagcccggcggccttcaagtacccgggccgatcccaaataaaagccagaaagcaaggctgccttttgtggtccagcaggccatgcagcacagtgtccaggacacggagcagggagagtacatggagtgtggatcaggagtgcacagagaagataccagcagacctgccctctccattgcactcaaaatcacactggatttcctagctagtgcaatcaggcaacagaatatatcaactacatga

SEQ ID NO: 20853 - DNA, 478 bp, Homo sapiens
  SIMILAR (174)..(476): 881254mologous to Homo sapiens putative chromatin modulator,accession number AJ295992,Smith-Waterman Score=458.
gccactacagttgttgctgctgcctcctccaccagcatccctagctcagaggccacgaccccaaccccaggagcctccccaccagcccctgaaatgggaaaggccctccagctcctgagtcacgtggggcacagagggagatgccctgaggatggagagcccgatgcagcaagagttccggtcgcgccgcctgcagaagctggagtctccctgttgcccccactgactattatcattcagaaattccaaacacaagaccacatgaaattctggaaaaaccttcccctccacagccaccacctccgtcttcggtaccacaaactgtgattccaaagaagactggctcacctgaaattaaactaaaaataaccaaaactatccagaatggcagggaattgtttgagtcttccctttgtggagaccttttaaatgaagtacaggcaagtgagcacacgaaatcaaagcatgaaagcagaaa

SEQ ID NO: 20854 - DNA, 3275 bp, Homo sapiens
  SIMILAR (621)..(701): 741254mologous to Homo sapiens DC28,accession number AF255649,Smith-Waterman Score=114.
gtgcggtgcaattcccctagccttcctcttcccgcagcacgcccggcccggcccggccgaggccctcctttttgttcgggccgccatggcagaggcgaccggcgcggggaaaatctagcccggggatttcatgcggcctatctcggttccgcctcctcctcgcgcggacccagcggctgcccgcaccccagccccactccgggcctccgtgtctctcctgtgatcgcactgacacggccggggggttagaatggaacaaactgaaggcccgatgagagaaagggaaagttaaggatgctggagcagaacaatggatttctctttctctttcatgcaagggatcatgggaaacacaattcagcaaccacctcaactcattgactccggccaacatccgtcaggaggatgcctttgataacaacagtgacattgctgaagatggtggccagacaccatatgaagctactttcgcagcaaggctttcagtacccagctacaacagaagatcttcctccactcacaaatggggtatccatcatcaatcagtgtgtatgaaactcaaaccaaataccagtcatataatcagtatcctaatgggtcagccaatggctttggtgcagttagaaactttagccccactgacatattatcattcagaaattccaaacacaagaccacatgaaattctggaaaaaccttccctctcctcagccaccacctcctccttgggtaccgcaaactgtgattccaaagaagactggctctcctgaaattaatctaaaaatagcccaaactatccagaatggcagggaattgtttgagtcttccctttgtggagaccttttaaatgaagtacaggcaagtgagcccccgaaatcaaagcatcgaaagcagaaaagaaaagaggaaaaaaagcaacaagcatgactcatcaagatctgaagagcgcaagtcacacaaaatccccaaattagaaccagaggaacaaaatagaccaaatgagagggttgacactgtatcagaaaaaccaagggaagaaccagtactaaaagagggaagccccagttcagccaatactatcttctgttccaacaacggaagtgtccactggtgttaagtttcaggttggcgatctttgtgtggtccaaggtgggaaccaaatccttggtggcctagtatggtttcaagtgatccccagcttgaggttcatactaaaattaacacaagaggtgcccgagaatatcatgtccagttttttagcaaccagccagagagggcgtgggttcatgaaaaacgggttacgagagtataaaggtcataaacagtatgaagaattactgggtgaggcaaccaaacaagccatcaattcactttgagaaacaaaagattcggaaaccccgacctcagagagaacgtgctcagtgggatattggcattgcccatgtttagatagcattgaatatgactctagaagaaagaatagaacagtatacttttatttacattgataaacagcctgaagaggctttatcccaaggcaaaaaagagtgttgcctccaaaaccgaagttaaaaaaacccgacgaccaagatctgtgctgaatactcagccagaacagaccaatgcaggggaggtggcctcctcactctcaagtactgaaattcggagacatagccagaggcggcacacaagtgcggaagaggaagagccaccgcctgttaaaatagcctggaaaacttgcggcagcaaaggaaatccttaccagcttccattacgatgcacaaagggagcctgggatttgcagaagtgtaacatgtctccagttgtgaaaattgaacaagtgtttgctcttcagaatgctacaggggatggggaaatttattcgatcaatttgtttatttcaacaaaggggaatttggtaacaaaacagaaataagtgtcagggggcaagacaggcttataatttctacaccaaaccagagaaatgaaaagccaacgcagagtgtatcatctcctgaagcaacatcctggttcctacaggcctcagtagaaaagaagcaacagagaagatcaattagaactcgttctgaatcagagaaatccacttgaggttgtgccaaagaagaagatcaaaaaaggagcaggttggaaacagttcctcagggctacagtgaaagactggattaccagaaagggtcggcggaccgggggagtgcagggctctgtcagattcagtgaccagctccgtctccgcagcgattgaggaaactgtggactgagattcctgtacaatttcatcccagaaactccagacttgtagtctccatgcaagatttctttgtcggcggcttgataaacagtttctttgttttcgattttgatttcgccaatcatcattattggcattttcctgcctggtttcttcttcaagactctgaacaattgctttaacagtcaaatgatttttttttttcggtttgagctggatgggtacagcttaaatcatgggtccagcctaaaaaaccaccatttaacttaccctgatcgattccaacatggactgtttttggttttttgtttttaaataaagcatcattaatgcacatctgcaggggtttgccaaacagcccaaactgtatacattacaatcattaaaagctcttattgtttttttaacattagtgccgttatcatggagaacaacaggacagccgccttcagcggtctgtcatttttctagcattttcagaaactcatcggaattggcgggacccgtgtttcccttcgcaagcctctcagtacagcacgtcctgttcctctgttaaaactccttgttaatccagtgatcttttaggccaaggaaatattttgtgatggtgttatgggtccatacaccagcaatgaaggagatagatttgtgtacttgtgttttttaatcagcattaacatgggcaggcaccctcatttatagatgtcaggaaacattcagtgaaaaacttgtagaatgggatgtgataacgaggttccagtaatctgagcagtctaacgaggcccacctcctccaccacagaacgtggctatgttccaagtgctactctcactcagcctgttgcggatcttcatggcctcaggagacttgtttctccatgggctcttctggactgcacacttccaccatagcttgctgggttgatctagatgtctgtttgttgtatggaaattttgggggaaaaaatccaaaacacaaactgtgggttgaaatattaaccgtctcc

SEQ ID NO: 20855 - DNA, 511 bp, Homo sapiens
  SIMILAR (1)..(45): 931254mologous to Homo sapiens fork head domain protein,accession number U02310,Smith-Waterman Score=79.
  misc_feature (1)...(511): n = a,t,c or g
gcgnccgccaccggggggctgtgcggggacttccagggcccggagcggntnggaagaattcaattcgtcataatctgtccctacacagcaagttcattcgtgtgcagaatgaaggaactggaaaaagttcttggtggatgctcaatccagagggtggcaagagcgggaaatctcctaggagaagagctgcatccatggacaacaacagtaaatttgctaagagccgaagccgagctgccaagaagaaagcatctctccagtctggccaggagggtgctggggacagccctggatcacagttttccaaatggcctgcaagccctggctctcacagcaatgatgactttgataactggagtacatttcgccctcgaactagctcaaatgctagtactattagtgggagactctcacccattatgaccgaacaggatgatcttggagaaggggatgtgcattctatgggtgtacccgccatctgccgcaaagatggcctctactttacccagtc

SEQ ID NO: 20856 - DNA, 2514 bp, Homo sapiens
  SIMILAR (1)..(2511): 991254mologous to synthetic construct Pax3-forkhead fusion protein,accession number AF178854,Smith-Waterman Score=4401.
atgaccacgctggccggcgctgtgcccaggatgatgcggccgggcccggggcagaactacccgcgtagcgggttcccgctggaagtgtccactcccctcggccagggccgcgtcaaccagctcggcggcgtttttatcaacggcaggccgctgcccaaccacatccgccacaagatcgtggagatggcccaccacggcatccggccctgcgtcatctcgcgccagctgcgcgtgtcccacggctgcgtctccaagatcctgtgcaggtaccaggagactggctccatacgtcctggtgccatcggcggcagcaagcccaagcaggtgacaacgcctgacgtggagaagaaaattgaggaatacaaaagagagaacccgggcatgttcagctgggaaatccgagacaaattactcaaggacgcggtctgtgatcgaaacaccgtgccgtcagtgagttccatcagccgcatcctgagaagtaaattcgggaaaggtgaagaggaggaggccgacttggagaggaaggaggcagaggaaagcgagaagaaggccaaacacagcatcgacggcatcctgagcgagcgagcctcagcaccccaatcagatgaaggctctgatattgactctgaaccagatttaccactaaagaggaaacagcgcagaagccgaaccaccttcacagcagaacagctggaggaactggagcacgttgcttttgagagaactcattaccctgacatttatactagggaggaactggcccagagggcgaagctcaccgaggcccgagtacaggtctggtttagcaaccgccgtgcaagatggaggaagcaagctggggccaatcaactgatggctttcaaccatctcattcccgggggattccctcccactgccatgccgaccttgccaacgtaccagctgtcggagcactcttaccagcccacatctattccacaagctgtgtcagatcccagcagcaccgttcacagacctcaaccgcttcctccaagcactgtacaccaaagcacgattccttccaacccagacagcagctctgcctactgcctccccagcaccaggcatggattttccagctatacagacagctttgtgcctccgtcggggccctccaaccccatgaaccccaccattggcaatggcctctcacctcagaattcaattcgtcataatctgtccctacacagcaagttcattcgtgtgcagaatgaaggaactggaaaaagttcttggtggatgctcaatccagagggtggcaagagcgggaaatctcctaggagaagagctgcatccatggacaacaacagtaaatttgctaagagccgaagccgagctgccaagaagaaagcatctctccagtctggccaggagggtgctggggacagccctggatcacagttttccaaatggcctgcaagccctggctctcacagcaatgatgactttgataactggagtacatttcgccctcgaactagctcaaatgctagtactattagtgggagactctcacccattatgaccgaacaggatgatcttggagaaggggatgtgcattctatggtgtacccgccatctgccgcaaagatggcctctactttacccagtctgtctgagataagcaatcccgaaaacatggaaaatcttttggataatctcaaccttctctcatcaccaacatcattaactgtttcgacccagtcctcacctggcaccatgatgcagcagacgccgtgctactcgtttgcgccaccaaacaccagtttgaattcacccagcccaaactaccaaaaatatacatatggccaatccagcatgagccctttgccccagatgcctatacaaacacttcaggacaataagtcgagttatggaggtatgagtcagtataactgtgcgcctggactcttgaaggagttgctgacttctgactctcctccccataatgacattatgacaccagttgatcctggggtagcccagcccaacagccgggttctgggccagaacgtcatgatgggccctaattcggtcatgtcaacctatggcagccaggcatctcataacaaaatgatgaatcccagctcccatacccaccctggacatgctcagcagacatctgcagtcaacgggcgtcccctgccccacacggtaagcaccatgccccacacctcgggtatgaaccgcctgacccaagtgaagacacctgtacaagtgcctctgccccaccccatgcagatgagtgccctggggggctactcctccgtgagcagctgcaatggctatggcagaatgggccttctccaccaggagaagctcccaagtgacttggatggcatgttcattgagcgcttagactgtgacatggaatccatcattcggaatgacctcatggatggagatacattggattttaactttgacaatgtgttgcccaaccaaagcttcccacacagtgtcaagacaacgacacatagctgggtgtcaggctga

SEQ ID NO: 20857 - DNA, 5833 bp, Homo sapiens
  SIMILAR (157)..(585): 311254mologous to Homo sapiens fork head domain protein,accession number U02310,Smith-Waterman Score=53.
gcagccgccacattcaacaggcagcagcgcagcgggcgcgccgctggggagagcaagcggcccgcggcgtccgtccgtccttccgtccgcggccctgtcagctggagcgcggcgcaggctctgccccggcccggcggctctggccggccgtccagtccgtgcggcggaccccgaggagcctcgatgtggatggccccgcgaagttaagttctgggctcgcgcttccactccgccgcgccttcctcccagtttccgtccgctcgccgcaccggcttcgttcccccaaatctcggaccgtcccttcgcgccccctccccgtccgcccccagtgctgcgttctccccctcttggctctcctgcggctgggggaggggcgggggtcaccatggccgaggcgcctcaggtggtggagatcgacccggacttcgagccgctgccccggccgcgctcgtgcacctggccgctgcccaggccggagtttagccagtccaactcggccacctccagcccggcgccgtcgggcagcgcggctgccaatccccgacgccgcggcgggcctgccctcggcctcggctgccgctgtcagcgccgacttcatgagcaacctgagcttgctggaggagagcgaggacttcccgcaggcgcccggacaaccgtggcggcggcggtggcggcggcggccgccgcggccgccaccggggggctgtgcggggacttccagggcccggaggcgggctgcctgcacccagcgccaccgcagctccccgccgcccgggccgctgtcgcagcacccgccggtgccccccgccgccgctgggccgctcgcggggcagccgcgcaagagcagctcgtcccgccgcaacgcgtggggcaacctgtcctacgccgacctcatcaccaaggccatcgagagctcggcggagaagcggctcacgctgtcgcagatctaacgagtggatggtcaatagcgtgccctacttcaaggataagggtgacagcaacagctcggcgggctggaagaattcaattcgtcataatctgtccctacacagcaagttcatttcctgtgcagaatgaaggaactggaaaaagttcttggtggatgctcaatccagagggtggcaagagcgggaaatctcctaggagaagagctgcatccatgggacaacaacagtaaatttgctaagagccgaagccggagctgccaagaaggaaagcatcttttccagttttggccaggaggggtggctgggggacagcccctggatcacagttttccaaatgggcctgcaagccctggctttcacagcaatgatgactttgataactggagtacatttcggccctccaacctactcaaatggtaatactatttaatgggagactctctaccccatttggaccgaaacgggatgactgggaaaggggaatgggcattctatgggggcccccgcatctggccgcaaagatggcctctactttacccagtctgtctgagataagcaatcccgaaaacatggaaaatcttttggataatctcaaccttctctcatcaccaacatcattaactgtttcgacccagtcctcacctggcaccatgatgcagcagacgccgtgctactcgtttgcgccaccaaacaccagtttgaattcacccagcccaaactaccaaaaatatacatatggccaatccagcatgagccctttgccccagatgcctatacaaacacttcaggacaataagtcgagttatggaggtatgagtcagtataactgtgcgcctggactcttgaaggagttgctgacttctgactctcctccccataatgacattatgacaccagttgatcctggggtagcccagcccaacaagcggggttttgggcccagaacgtcatgatgggccctaattcggtcatgtcaacctatggcagccaggcatctcataacaaaatgatgaatcccagctcccatacccaccctgggacatgctcagcagacatcctcattttaaccgggcgttcccctgccccaaaacggttaagcaccaatgcccccacaccttcgggtatgaaccgcctgaccccaaagtgaaagacacctgtacaaagtgccttcttgccccaccccatggcagatgagtgccctgggggggttaacttccttccgtgaggcagctggcaatgggttatgggcaggatggggcctttttccaccaggaggaagctcccaagtgaattgggatggcatgttcatttgagcgcttagactgtgacatggattccatcattcggaatgacctcatggatggagatacattggtttttaactttgacaatgtgttgcccaaccaaagcttcccacacagtgtcaagacaacgacacatagctgggtgtcaggctgagggttagtgagcaggttacacttaaaagtacttcagattgtctgacagcaggaactgagaagaagcagtccaaaagatgtctttcaccaactcccttttaagttttcttggttaaaagaaaaaagcaaaaaagagaaccctcctttttttcctttcgtcagacttggcagcaaagacatttttcctgtacaggatgtttgcccaatgtgtgcaggttatgtgctgctgtagataaggactgtgccattggaaatttcattacaatgaagtgccaaactcactacaccatataattgcagaaaagattttcagatcctggtgtgctttcaagttttgtatataagcagtagatacagattgtatttgtgtgtgtttttggtttttctaaatatccaattggtccaaggaaagtttatactctttttgtaatactgtgatgggcctcatgtcttgataagttaaacttttgtttgtactacctgttttctgcggaactgacggatcacaaagaactgaatctccattctgcatctccattgaacagccttggacctgttcacgttgccacagaattcacatgagaaccaagtagcctgttatcaatctgctaaattaatggacttgttaaacttttggaaaaaaaaagattaaatgccagctttgtacaggtcttttctatttttttttgtttattttgttatttgcaaatttgtacaaacatttaaatggttctaatttccagataaatgatttttgatgttattgttgggacttaagaacatttttggaatagatattgaactgtaataatgttttcttaaaactagagtctactttgttacatagtcagcttgtaaattttgtggaaccacaggtatttgggggcagcattcataattttcattttgtattctaactggattagtactaattttatacatgcttaactggtttgtacactttgggatgctacttagtgatgtttctgactaatcttaaatcattgtaattagtacttgcatattcaacgtttcaggccctggttgggcaggaaagtgatgtatagttatggacactttgcgtttcttatttaggataacttaatatgtttttatgtatgtattttaaagaaatttcatctgcttctactgaactatgcgtactgcatagcatcaagtcttctctagagacctctgtagtcctgggaggcctcataatgtttgtagatcagaaaagggagatctgcatctaaagcaatggtcctttgtcaaacgagggattttgatccacttcaccattctgagttgagctttagcaaaagtttcccctcataattctttgctcttgtttcagtccaggtggaggttggttttgtagttctgccttgaggaattatgtcaacactcatacttcatctcattctcccttctgccctgcagattagattacttagcacactgtggaagtttaagtggaaggagggaatttaaaaatgggacttgagtggtttgtagaatttgtgttcataagttcagatgggtagcaaatggaatagaacttacttaaaaattggggagatttatttgaaaaccagctgtaagttgtgcattgagattatgttaaaagccttggcttaagaatttgaaaatttctttagcctgtagcaacctaaactgtaattcctatcattatgttttattactttccaattacctgtaactgacagaccaaattaattggctttgtgtcctatttagtccatcagtattttcaagtcatgtggaaagcccaaagtcatcacaatgaagagaacaggtgcacagcactgttcctcttgtgttcttgagaaggatctaatttttctgtatatagcccacatcacacttgctttgtcttgtatgttaattgcatcttcattggcttggtatttcctaaatgtttaacaagaacacaagtgttcctcgataagatttcctacagtaagccagctctattgtaagcttcccactgtgatgatcatttttttgaagattcattgaacagccaccactctatcatcctcattttggggcagtccaagacatagctggttttagaaacccaagttcctctaagcacagcctcccgggtatgtaactgaacttgggtgccaaagtacttgtgtactaatttctaattactacgtactggtcactttcctcccgtggccattactgcatcataataccaggaacctcagagcccccatttgttcattaaagaggcaactacagccaaaatcactgttaaaatcttactacttcatggagtagctcttaggaaaatatatcttcctcctgagtctgggtaattatacctctcccaagcccccattgtgtgttgaaatcctgtcatgaatccttggtagctctctgagaacagtgaagtccagggaaaggcatctggtctgtctggaaagcaaacattatgtggcctctggtagtttttttcctgtaagaatactgactttctggagtaatgagtatatatcagtttattgtacatgattgctttgtgaaatgtgcaaatgatatcacctatgcagccttgtttgatttattttctctgggttggactgttattaaaagcatattgtattatagagctattcagatattttaaatataaagatgtattgtttccgtaatatagacgtatggaatatatttaggtaatagatgtattacttggaaagttctgctttgacaaactgacaaagtctaaatgagcacatgtatcccagtgagcagtaaatcaatggaacatcccaagaagaggataaggatgcttaaaatggaaatcattctccaacgatataccaaattggacttgttccaactgctggatatatgctacccaataaccccagccccaacttaaaattcttacattcaagctcctaagaggttccttaatttaaaaaccctaattttaaaaaagagaagtttccttttcctgggttttaagtttggggaataatcattcattaaaaaaaaatgtattgtggtttatggcgaacagacctaacctgggcattacagttgggcctctccttggaggtggggcacagctgggccagtgtggccaggggtggccatgtaagtcccatcaggacgtagtcatgcctcctgcatttcgctacccgagtttagtaacagtgcagattccaccgttcttgttccgatactcctgagaagtgcctgatgttgatgtacttacagacacaagaacaatctttgctataattgtataaagccataaatgtacataaattatgtttaaatggcttggtgtctttcttttctaattatgcagaataagctctttattaggaattttttgtgaagctattaaatacttgagttaagtcttgtcagccaaaaaaaaaa

SEQ ID NO: 20858 - DNA, 383 bp, Homo sapiens
  SIMILAR (3)..(305): 971254mologous to Homo sapiens HIF-1alpha variant protein sequence HIF-1alpha/delta178-390,accession number Y94630,Smith- Waterman Score=491.
  misc_feature (1)...(383): n = a,t,c or g
aagacattaaaatattgattgcatctccatctgctacccacatacataaagaaactactagggccacatcatcaccatatagagatactcaaagtcggacagcctcaccaaacagagcaggaaaaggagtcatagaacagacagaaaaatctcatccaagaagccctaacgtgttatctgccgctttgagtcaaagaactacagttcctgaggaagaactaaatccaaagatactagctttgcaaaatgctcaaagaaagcgaaaaatggaacatgatggttcactttttcaagcagtaggaattatttagcatgtagactgtggggcaatcaatggatgaaagtggattaccacagctgaccagttatgattgtgaagttan

SEQ ID NO: 20859 - DNA, 2487 bp, Homo sapiens
  SIMILAR (574)..(2487): 991254mologous to Homo sapiens 06-JUN-1995 Human hypoxia inducible factor-1 alpha cDNA,accession number T45937_cd1,Smith- Waterman Score=3300.
atgagcaaagggggcaaagtggtagaaggtgagatcaaagaggtagatagtgttagaattgaattgaaggacacccagttggtgtccgctgcagaactgattgctcacctggtggtggagagaacccctcctctcccgatagggttgcagaagttgtcttctgtgttgttgattgctgtgatcatttggaaggaggagagatttggggtggagacaattcggtacttcattcacaggatgataagttctgaacgtcgaaaagaaaagtctcgagatgcagccagatctcggcgaagtaaagaatctgaagttttttatgagcttgctcatcagttgccacttccacataatgtgagttcgcatcttgataaggcctctgtgatgaggcttaccatcagctatttgcgtgtgaggaaacttctggatgctggtgatttggatattgaagatgacatgaaagcacagatgaattgcttttatttgaaagccttggatggttttgttatggttctcacagatgatggtgacatgatttacatttctgataatgtgaacaaatacatgggattaactcaggtattgcactgcacaggccacattcacgtatatgataccaacagtaaccaacctcagtgtgggtataagaaaccacctatgacctgcttggtgctgatttgtgaacccattcctcacccatcaaatattgaaattcctttagatagcaagactttcctcagtcgacacagcctggatatgaaattttcttattgtgatgaaagaattaccgaattgatgggatatgagccagaagaacttttaggccgctcaatttatgaatattatcatgctttggactctgatcatctgaccaaaactcatcatgatatgtttactaaaggacaagtcaccacaggacagtacaggatgcttgccaaaagaggtggatatgtctgggttgaaactcaagcaactgtcatatataacaccaagaattctcaaccacagtgcattgtatgtgtgaattacgttgtgagtggtattattcagcacgacttgattttctcccttcaacaaacagaatgtgtccttaaaccggttgaatcttcagatatgaaaatgactcagctattcaccaaagttgaatcagaagatacaagtagcctctttgacaaacttaagaaggaacctgatgctttaactttgctggccccagccgctggagacacaatcatatctttagattttggcagcaacgacacagaaactgatgaccagcaacttgaggaagtaccattatataatgatgtaatgctcccctcacccaacgaaaaattacagaatataaatttggcaatgtctccattacccaccgctgaaacgccaaagccacttcgaagtagtgctgaccctgcactcaatcaagaagttgcattaaaattagaaccaaatccagagtcactggaactttcttttaccatgccccagattcaggatcagacacctagtccttccgatggaagcactagacaaagttcacctgagcctaatagtcccagtgaatattgtttttatgtggatagtgatatggtcaatgaattcaagttggaattggtagaaaaactttttgctgaagacacagaagcaaagaacccattttctactcaggacacagatttagacttggagatgttagctccctatatcccaatggatgatgacttccagttacgttccttcgatcagttgtcaccattagaaagcagttccgcaagccctgaaagcgcaagtcctcaaagcacagttacagtattccagcagactcaaatacaagaacctactgctaatgccaccactaccactgccaccactgatgaattaaaaacagtgacaaaagaccgtatggaagacattaaaatattgattgcatctccatctcctacccacatacataaagaaactactagtgccacatcatcaccatatagagatactcaaagtcggacagcctcaccaaacagagcaggaaaaggagtcatagaacagacagaaaaatctcatccaagaagccctaacgtgttatctgtcgctttgagtcaaagaactacagttcctgaggaagaactaaatccaaagatactagctttgcagaatgctcagagaaagcgaaaaatggaacatgatggttcactttttcaagcagtaggaattggaacattattacagcagccagacgatcatgcagctactacatcactttcttggaaacgtgtaaaaggatgcaaatctagtgaacagaatggaatggagcaaaagacaattattttaataccctctgatttagcatgtagactgctggggcaatcaatggatgaaagtggattaccacagctgaccagttatgattgtgaagttaatgctcctatacaaggcagcagaaacctactgcagggtgaagaattactcagagctttggatcaagttaactga

SEQ ID NO: 20860 - DNA, 411 bp, Homo sapiens
  SIMILAR (13)..(243): 1001254mologous to Homo sapiens HIF-1alpha variant protein sequence HIF-1alpha/331-641,accession number Y94631,Smith-Waterman Score=392.
cccacgcgtccgctcccctcacccaacgaaaaattacagaatataaatttggcaatgtctccattacccaccgctgaaacgccaaagccacttcgaagtagtgctgaccctgcactcaatcaagaagttgcattaaaattagaaccaaatccagagtcactggaactttcttttaccatgccccagattcaggatcagacacctagtccttccgatggaagcactagacaaagttcacctgaggtaggtgtcatgatataatcagaaagggacaactttcagattttaacattcaagaatgtatttataagtttgattcaaacactcatttgaaccacaaattacatttgtgtgtgtgtttgaattttagcactttaaaattattgcaagagctactgcctaacctagacc

SEQ ID NO: 20861 - DNA, 569 bp, Homo sapiens
  SIMILAR (293)..(499): 941254mologous to Homo sapiens HIF-1alpha variant protein sequence HIF-1alpha/1-330,accession number Y94628,Smith-Waterman Score=368.
  misc_feature (1)...(569): n = a,t,c or g
agaaataactatcaaacagccatgatgatgagatgaatgaaaaagcagcctagactttatacgaggggaattttttaaagagtaatgtataggccctgggcaggaagtaggtcataggtggtatcataggaaaaatgttcattgattttcaaaaacgtgattaatccactcgtgacagttaaattttatccaaagcttactggcccatgtccgaactncaactacttatctctgctttttttttccctagccattgtaaaatattttttttaactgctttgttcttcatacacaggtattgcactgcacaggccacattcacgtatatgataccaacagtaaccaacctcagtgtgggtataagaaaccacctatgacctgcttggtgctgatttgtgaacccattgctcacccatcaaatattgaaantcctttagatagcaagactttcctcagtcgacacagcctggatatgnaattttcttattgtgatgaaaggtaaattagatctaaaatgtgaatttgaaatttttaattagtctacagcattactgaatgtncancntagc

SEQ ID NO: 20862 - DNA, 4162 bp, Homo sapiens
  SIMILAR (378)..(1724): 871254mologous to Homo sapiens hypoxia-inducible factor 1 alpha,accession number U22431,Smith-Waterman Score=2023.
ttatcttgtacgcactttccttccaaacaatacccttttgctgccattgttctcgttatgaataggctgcctcagctcctcagtgcacagtgctgcctcgtctgaggggacaggaggatcaccctcttcgtcgcttcggccagtgtgtcgggctgggccctgacaagccacctgaggagaggctcggagccgggcccggaccccggcgaattgccgcccgcttctctctagtctcacgaggggtttcccgcctcgcacccccacctctggacttgcctttccttctcttcctccgcgtgtggagggagccagcgctttaggccggagcgaagcctgggggccgcccgccgtgaagacatcgcggggaccgattcaccatggagggcgccggcggcgcgaacgacaagaaaaataggataaagttcttgaacgtcgaaaaaggaaaagttttcgagattgaagccagatctcggcgaagtaaaagaatcttgaagttttttatgagcttgctcatcaagtttgccacttccacataatgtgagttcgcatccttgataaggcctctgtgatgaggcttaccatcagctatttgcgtgtgaggaaacttctggaatgctggtgatttggatattgaagatgacatgaaagcacagatgaattgcttttatttgaaagccttggatggttttgttatggttctcacagatgatggtgacatgatttacatttctgataatgtgaacaaatacatgggattaactcagtttgaactaactggacacagtgtgtttgattttactcatccatgtgaccatgaggaaatgagagaaatgcttacacacagaaatggccttgtgaaaaagggtaaagaacaaaacacacagcgaagcttttttctcagaatgaagtgtaccctaactagccgaggaagaactatgaacataaagtctgcaacatggaaggtattgcactgcacaggccacattcacgtatatgataccaacagtaaccaacctcagtgtgggtataagaaaccacctatgacctgcttggtgctgatttgtgaacccattcctcacccatcaaatattgaaattcctttagatagcaagactttcctcagtcgacacagcctggatatgaaattttcttattgtgatgaaagaattaccgaattgatgggatatgagccagaagaacttttaggccgctcaatttatgaatattatcatgctttggactctgatcatctgaccaaaactcatcatgatatgtttactaaaggacaagtcaccacaggacagtacaggatgcttgccaaaagaggtggatatgtctgggttgaaactcaagcaactgtcatatataacaccaagaattctcaaccacagtgcattgtatgtgtgaattacgttgtgagtggtattattcagcacgacttgattttctcccttcaacaaacagaatgtgtccttaaaccggttgaatcttcagatatgaaaatgactcagctattcaccaaagttgaatcagaagatacaagtagcctctttgacaaacttaagaaggaacctgatgctttaactttgctggccccagccgctggagacacaatcatatctttagattttggcagcaacgacacagaaactgatgaccagcaacttgaggaagtaccattatataatgatgtaatgctcccctcacccaacgaaaaattacagaaatataaatttggcaatgtctccattacccaccgctgaaacgccaaagccacttcgaagtagtgctgaccctgcactcaatcaagaagttgcattaaaattagaaccaaatccagagtcactggaactttcttttaccatgccccagattcaggatcagacacctagtccttccgatggaagcactagacaaagttcacctgagcctaatagtcccagtgaatattgtttttatgttggatagtgatatggtcaatgaattccaagtttggaattggtagaaaaaactttttgctgaagacaccagaagccaaagaacccattttctactcaggacacagatttagacttggagatgttagctccctatatcccaatgggggagtgacttccagttacgttccttcgatcagttgtcaccattagaaagcagttccgcaagccctgaaagcgcaagtcctcaaagcacagttacagtattccagcagactcaaatacaagaacctactgctaatgccaccactaccactgccaccactgatgaattaaaaacagtgacaaaagaccgtatggaagacattaaaatattgattgcatctccatctcctacccacatacataaagaaactactagtgccacatcatcaccatatagagatactcaaagtcggacagcctcaccagacagagcaggaaaaggagtcatagaacagacagaaaaatctcatccaagaacgccctaaccgtgttatctgtccgctttgagtcaaagaactacagttcctgagggaagaactaaatccaaagatactagctttgcaggaatgctcagaggaaagcgaaaaatgggaacatgatgggttcacttttttccaagccagtagggaattgggaacatttatttacagcagccagacgatcatgcagctactacatcactttcttggaaacgtgtaaaagggatgcaattctagtgaccagaatggaattggagcaaaagacaattattttaataccctcttgatttagcatgtagactgctgggggcaatcagatggattgaaaggtgggattaccaacagctggaccagataatgattgagaagttaatgctcctatacaagggcagcagaaacctactgcagggtgaagaattactcagagctttggatcaagtttaactgagctttttcttaatttcattcctttttttggacactggtggctcactacctaaagcagtctatttatattttctacatctaattttagaagcctggctacaatactgcacaaactttggttaagttcaattttttgatcccctttctacttaatttacattaatgctcttttttagtatgttctttaatgctggatcacagacagctcatttttctcagttttttggtatttaaaccattggcattgcagtagcattcatttttaaaaaatgcacctttttatttatttatttttggctagggagtttatccctttttcgaattatttttaagaagatgccaatataatttttgtaagaaggcagtaacctttcatcatgatcataggcagtttgaaaaatttttacacctttttttttcacattttacataaataataatgctttgccagcagtacgtggtagccacaattgcacaatatattttcttaaaaaataccagcagttactcatggaatatattctgcgtttataaaactagtttttaagaagaaatttttttttggcctatgaaattgttaaacctgggaacatggaccattggttaaatccatataataaggattcttaaaatgctgtatggtttattatttaaatggggtaaagccattttacataatataggaaagatatggcatatatctaggaaggtatgtgggcctttatttgggataaaattctccaatttcaggggaaatcctctggatgtttcccatagttcactttgccagctcaaaagaaaacaataccctatgttattgttgaagttttatgctaatattgtgttactgatattaaaccctaaaaggttcctgccctacccctgttgggtataaaagatattttgagcagactgttaaacaagaaaaaaaaaaaatcatgcattcttagcaaaaattgcctagtatgttaatttggcccaaaaaccaaggtttgattttatgcactttgtcgctattaacatccttttttttcatgtagattttcaataattggagtaattttagaagcattattttaggaatatatagttgtcacagtaaatatcttgttttttcatatgtacaattgtacaaatattttcaatcctctttgctctttgtggttggatcttaaccactaactgtattgttttgttacatcaaataaacatcttctgtggaccaggaaaaaaaaaaaaaaaaaaaaagtcgac

SEQ ID NO: 20863 - DNA, 2591 bp, Homo sapiens
  SIMILAR (2299)..(1874): 341254mologous to Homo sapiens dJ963K23.2 (novel protein),accession number AL031685,Smith-Waterman Score=97.
tttttttttttttttaccacttagattaagttatgaaatttatttatattttaccttttaaaagccatgtatatatcaaatctcactttcttggtaaagtcatcttattagaaatacaagaagtgcacttaatacaaggaagtaagtttctcggtgccaccaggtgaggtggtacatacactcacatcagtccctcaaacgaaggttttcggcagatttccccttccagacttctgaggttgatctggaattcagggaaggtctgaggtgaacttcttccaggaaattacaggtggaacaaggctggacctttaacttttgggggtcctccccgaagaaatactaaatgaaaaaaactaatttttttcccagtgggggccctggtggtttggctgggctttctcgggcatctggcaggctccttcacccgggcaggcggcgggaggccccaacagcaggcagtgtacaagcgcgaggtaagcacttgcagccccatcagagacatatgacatcaaaaaaccaaccttaaacccatatgccttttgggtcaatcaggaggtcctgctcctacaggtttaggctgacagctcttggacttatatttattaatatttgttgaaatattgaactccaaggttcttgagcttgttcctaaagcaagtttcccagcaacagcttttaattaacaaactgttatcttgccgatgtcttgttgccttattgaacgattgtctccgtcagaacagacccaggggttggtactggggtttcctatagcttctctctgcatctacaaagcaggttttcaaacacattttacatgtcgaaaccagtgtcataaggaaaacatttgtgacagaaaaacaatgctcagtttaatctaagttaccaaggcggaaggtaaaaggaactagtatccggctgagtccccaaacctctttcttctaattcatctgaggattttttgtgcttctagaacaagaatgtaggcaggctcccaaatggagaggtaaacatgaccggcgttgtttgaaactacttcattaatttgtaaatccagaaccaaaaagctctggccctcccacttctcttagctgaccctcctccccacttacggataaacagactttaacttccctaacccagaaacacttccaccaaaaatgtatggttataccttatcctaaaaaggcaccatgcaggcatttaagactgaaccagtgaactctaaatatgtagtagtagaaaatatcactaatcaaaacttccagcatcagatggtacaaaaccccaagaggactggtgacatgtaccccggggatggccaaccccagcttcttggcaaccccacaagcccaagcggggagcttcaactctggtcaggtgcacggctgccaaagtctgcacaccttggggacaagggaaaggagacacttgccttcattgtgctattcatgaccccagaaaaggtccctggctggcttgaagggaccccgagagacaaacactggattggagggaatgagtgtgaaacaagaggtggagaagctagattatcttccacaggaggcggcagaagctcccaggaagtagccgagaaccaatacgaactcgaccgtgtgacaaacaaggttaacagtaggggaaaaacaacctttgggcaaagaaccccaaagggaaagagaaagggctggaccctggggaccccacttccccctgtccagaagtgacccctgtcccccaatgcccatggcctcattttccaggtctgttgaaacaggtaaggtaacaggagtccatagatttcacggtttaatatgtaaatggaagctctgtaacatgagacaagaatagcaagcacggactctgctcactggtcgatgatggagcgctgcaacaccctgattcatcatgtccctcttcatcaacatcataatccacaaaagtgtcataagaaaaaccggtgccgggcgctggatgtgctctctgaagttggcgcttgcgggtagttggggtcatccccagggcaatcgaggcacatatcggacaaaccacagatttggtatcccgtgcctatggaataatttgcaagtttccaacaagtccttcctaatcaaagttccttctcaggacagtaaaggaccaaggaaaggtgtaacgggtttggaaacattcccttggctggaagagatgcatcccttaatgggtggccttaacaaccttccaatgatgtaattcttggtatttggaacaagtagccaacgtgggaccgggatctttggacagggaagaaattctttacgggcagccatggcaagaagtcttctgtgcttctcgatctgccgctcgagctccacggctcggacgccaggtgccagagcgctgcgacacaccccacagacaggcttcttcggcttcagacattcctgcaggcatgcagagcaaaagacgtgtccgcagggcacctgtaccggcttctcgtacacctctaagcacacgggacacgtgaagcgtcctagggggtcagcctccaccgccggccccgccagctgcgcagcacccccgcagtcccgctgttgcgccgccctctt

SEQ ID NO: 20864 - DNA, 1175 bp, Homo sapiens
  SIMILAR (295)..(867): 421254mologous to Homo sapiens matrilysin,accession number L22524,Smith-Waterman Score=235.
accaaatcaaccataggtccaagaacaattgtctctggacggcagctatgcgactcaccgtgctgtgtgctgtgtgcctgctgcctggcagcctggccctgccgctgcctcaggaggcgggaggcatgagtgagctacagtgggaacaggctcaggactatctcaagagattttatctctatgactcagaaacaaaaaatgccaacagtttagaagccaaactcaaggagatgcaaaaattctttggcctacctataactggaatgttaaactcccacgtcatagaaataatgcagaagcccagatgtggagtgcccagatgttgcagaatactcactattttccaaattagcccaaaatggactttccaaagttggtcacctacagggtcggtatcatatactcgagacttaccgcatattacagtggatcgattagtgtcaaaggctttaaacatgtgggggcaaagagatccccctgccatttcaggaaagttgtatgggaacatgctgacatcatgaatggcctttgcgcaaggagctcatggggactctccccaattttgatgggccagggaacacgctgggcctcatgcttttgcgcctgggacaggtctcggaggagatgctcactttcgatgaggatgaacgctggacggatggtcagcagtctagggattaaactccctgtattgctgcaactcatgaacttggccattctttgggtatgggacattccctctgatcctaaaccaatagatgtatccaacctatggaaatggagatccccccaaattttaaactttcccaggatgatattaaaggcattccagaaactatatggaaagagaagtaattcaagaaagaaatagaaacttccgggcagaacatccccatcattcattcattggattgtatatcattgttgcacaatcagaattgataagcactgttcctccactccatttagcaattaatgtcacccttttttattgcagttggtttttgaatgtctttcactccttttattggttaaactcctttatggtgtgactgtgtcttattccatctatgagctttgtcagtgcgcgtagatgtcaataaatgttacatacacaaataaataaaatatttaggccatggtaaatttaccgaattccgccgatactgacgggc

SEQ ID NO: 20865 - DNA, 4233 bp, Homo sapiens
  SIMILAR (4)..(2151): 991254mologous to Homo sapiens bA358N2.1 (KIAA0978),accession number AL121583,Smith-Waterman Score=3734.
atgagcaacgcgaacaaacaaaagaaaaagactggggtgatgctgcctcgagttgtcctgactcctctgaaggtaaacggggcccacgtggaatctgcatcagggttctcgggctgccacgccgatggcgagagcggcagcccgtccagcagcagcagcggctctctggccctgggcagcgctgctattcgtggccaggccgaggtcacccaggaccctgccccgctcctgagaggcttccggaagccagccacaggtcaaatgaagcgcaacagaggggaagaaatagattttgagacacctgggtccattcttgtcaacaccaacctccgtgccctgatcaactctcggaccttccatgccttaccatcacacttccagcagcagctcctcttcctcctgcctgaagtagacagacaggtggggacggatggcctgttgcgtctcagcagcagtgcactaaataacgagttttttacccatgcggctcagagctggcgggagcgcctggctgatggtgaatttactcatgagatgcaagtcaggatacgacaggaaatggagaaggaaaagaaggtggaacaatggaaagaaaagttctttgaagactactatggacagaagctgggtttgaccaaagaagagtcattgcagcagaacgtgggccaggaggaggctgaaatcaaaagtggcttgtgtgtcccaggagaatcagtgcgtatacagcgtggtccagccacccgacagcgagatgggcattttaagaaacgctctcggccagatctccgaaccagagccagaaggaatctgtacaaaaaacaggagtcagaacaagcaggggttgctaaggatgcaaaatctgtggcctcagatgttcccctctacaaggatggggaggctaagactgacccagcagggctgagcagtccccatctgccaggcacatcctctgcagcacccgacctggagggtcccgaattcccagttgagtctgtggcttctcggatccaggctgagccagacaacttggcacgtgcctctgcatctccagacagaattcctagcctgcctcaggaaactgtggatcaggaacccaaggatcagaagaggaaatcctttgagcaggcggcctctgcatcctttcccgaaaagaagccccggcttgaagatcgtcagtcctttcgtaacacaattgaaagtgttcacaccgaaaagccacagcccactaaagaggagcccaaagtcccgcccatccggattcaactttcacgtatcaaaccaccctgggtggttaaaggtcagcccacttaccagatatgcccccggatcatccccaccacggagtcctcctgccggggttggactggcgccaggaccctcgcagacattaaagcccgtgctctgcaggtccgaggggcgagaggtcaccactgccatagagaggcggccaccactgccatcggaggggggggtggcccgggtggaggtggcggcggggccaccgatgagggaggtggcagaggcagcagcagtggtgatggtggtgaggcctgtggccaccctgagcccaggggaggcccgagcacccctggaaagtgtacgtcagatctacagcgaacacaactactgccgccttatcctctaaatggggagcatacccaggccggaactgccatgtccagagctaggagagaggacctgccttctctgagaaaggaggaaagctgcctactacagagggctacagttggactcacagatgggctaggagatgcctcccaactccccgttgctcccactggggaccagccatgccaggccttgcccctactgtcctcccaaacctcagtagctgagagattagtggagcagcctcagttgcatccggatgttagaactgaatgtgagtctggcaccacttcctgggaaagtgatgatgaggagcaaggacccaccgttcctgcagacaatggtcccattctgtctctagtgggagatgatacattagagaaaggaactggccaagctcttgacagtcatcccactatgaaggatcctgtaaatgtgacccccagttccacacctgaatcctcaccgactgattgcctgcagaacagagcatttgatgacgaattagggcttggtggctcatgccctcctatgagggaaagtgatactagacaagaaaacttgaaaaccaaggctctcgtttctaacagttctttgcattggatacccatcccatcgaatgatgaggtagtgaaacagcccaaaccagaatccagagaacacataccatctgttgagccccaggttggagaggagtgggagaaagctgctcccacccctcctgcattgcctggggatttgacagctgaggagggtctagatcctcttgacagccttacttcactctggactgtgccatctcgaggaggcagtgacagcaatggcagttactgtcaacaggtggacattgaaaagctgaaaatcaacggagactctgaagcactgagtcctcacggtgagtccacggatacagcctctgactttgaaggtcacctcacggaggacagcagtgaggctgacactagagaagctgcagtgacaaagggatcttcggtggacaaggatgagaaacccaattggaaccaatctgccccactgtccaaggtgaatggtgacatgcgtctggttacaaggacagatgggatggttgctcctcagagctgggtgtctcgagtatgtgcggtccgccaaaagatcccagattccctactgctggccagtactgagtaccagccaagagccgtgtgcctgtccatgcctgggtcctcagtggaggccactaacccacttgtgatgcagttgctgcagggtagcttgcccctagagaaggttcttccaccagcccacgatgacagcatgtcagaatccccacaagtaccacttacaaaagaccagagccatggctcgcttacgcatggggatctttacatggtcttgggaaaaaacagtgggcatggttgatgggaaggcagccccagttctttaaaggggttttgaagggagcctctttcttgccagatagctgtgaaacaggcactggtcttgccaggattgaggccacccaggctcctggagcaccccaaaagaattgcaaggcagtcccaagttttgactccctccatccagtgacaaatcccattacatcctctaggaaactggaagaaatggattccaaagagcagttctcttcctttagttgtgaagatcagaaggaagtccgtgctatgtcacaggacagtaattcaaatgctgctccaggaaagagcccaggagatcttactacctcgagaacacctcgtttctcatctccaaatgtgatctcctttggtccagagcaaacaggtcgggccctgggggatcatagcaatgttacaggccaagggaagaagctttttgggtctgggaatgtggctgcaacccttcatcgccccaggcctgcggacccgatgccttttcctgctgaaatccctccagtttttcccagtgggaagttgggaccaagcacaaactccatgtgtggtggggtacagactccaagggaagactgggctcccaagccacatgcctttgttggcagcgtcaagaaagagaagacttttgtgggggggtcctcttaaggcaaatgccgagaacaggaaagctactgggcatagtcccctggaactggtgggtcacttggaaagggatgccccttttgtcattggacttgcccttctggaaattaccccgagagccagggaaggggctcagtgagcctctggagccttacttctctcccctcccaactcatgatgaagcacgcattttatgggaagctttctaaactccaacttgagttccaccagctttaattattcctctagctctcccacctttcccaaaggcctttgctggaagtgttgttgcaagctgagccacaaagcaaactttggtgcgagccacagtgcatcactttccttgcaaatgttcactgacagcagcacggtggaaagcatctcgctccagtgtgcgtgcagcctgaaagccatgatcatgtgccaaggctgcgaaaggagctgtcaggatgtaggccttgtgcccactgcgctgaggggtgatgcaggctgtgaagtcactttggaccctggcttttggtctcaggccacagacctgaccaaaggttga

SEQ ID NO: 20866 - DNA, 489 bp, Homo sapiens
  SIMILAR (175)..(489): 921254mologous to Oryctolagus cuniculus casein kinase-II alpha,accession number M98451,Smith-Waterman Score=540.
ccctagtccagtgcggtggaattccgcgagtactgggactacgaggctcacgtcccgagctggggtaatcaagatgattaccaactggttcgaaaacttggtcggggaaaatatagtgaagtatttgaggccattaatatcaccaacaatgagagagtggttgtaaaaatcctgaagcaactctaccagatcctgacagactttgatatccggttttatatgtatgaactacttaaagctctggattactgccacagcaagggaatcatgcacagggatgtgaaacctcacaatgtcatgatagatcaccaacagaaaaagctgcgactgatagattggggtctggcagaattctatcatcctgctcaggagtacaatgttcgtgtagcctcaaggtacttcaagggaccagagctcctcgtggactatcagatgtatgattatagcttggacatgtggagtttgggctgtatgttagcaagcatgatc

SEQ ID NO: 20867 - DNA, 1738 bp, Homo sapiens
  SIMILAR (1228)..(512): 551254mologous to Homo sapiens casein kinase II alpha' subunit,accession number M55268,Smith-Waterman Score=539.
tttttttttttttttacgttacttttaaaaggttttatttaataatatatacttttaaaataataatatgtaactggccgccatgccacatactgcgccccgtccccccactgtggagtctgtggtcagctagttagcgtggtttgctggaaaaacaggcggccacgggacgagtttgaggggctcggggagcaacagtaaccaacaacattctgcatacccttcacattccccatgctttcctgggtcgggaaaagaagtcaacaggaaggccaaagcgaagtgagccttttagcattcggaagtgacggtttgatatacgggtggtgggctgcccttcgcttgggtctagttccgtgctccgccaaacctgccaccggttttgtgtctgctcaccggaacggtgatctctctataccgcgttaaagacgttttggatttgggttcttggttctgcttatgggaaaagtggggagaaccgcaaacagacccgtcgcttttccagtcttcatcgtgctgccgtgaagaccactggaaaagcacagcatttgtctgcacaaggcttgggactgctcccttcaccacaagggtagaagtaatgggtggctccatggcctctttgggcagtcaagtctctggttgatgggcgtattgcagaaggtttgtcccagaagattcaagggcccccagggcttgacaaggtgtctgttctcactatggactacagttttcccaagcgtttccgtgaatgttgtcccaggatatcgttgaagtgtggatctaggtctatgtgatacttcttcagatacccatacagttcttctgtacccagaaccttggcaatgcgaacaagctggtcatagttgtcctgtccatggaagaatggttccccttcgaaagatcatgcttgctaacatacagaccaaactccacatgtccgaagctataatcgatacatctgatagtccacgaggagctctggtcccttgaagtacctttgaggctacacgaacattgtactcctggagcaggatgatagaattctgccagaccccaatctatcagtcgcagctttttctgttggtgatcctatcatgacattgtaagttttcacatcccctggcatgatccccttgctgtgccagtaatccagagctttaagtagttcatccaatataaaccggatatcaaagtctgtcaggatctggtagagttgcttaaaatctgtataaccgcatatatccaaataccaaagctggtgtcttgatcactgggtcctttacagtgtcaatcagcttaatgatatttgtcccaccacgaaggttctccagaatcttaacctctcgttttatcttctttttcttcactggcttcaggattcttacaaccacttctctcattgttggtgatattaatggccctcaaaatacttcccactatattttccccgaccaaggttttcgaaccagttgggtaatcattttgattaccccagctcgggacgtgagcctcgtagtcccagtactcgcggctcctcagactgttcacctcggcgtagaccccgggccctgcctcgccgcggccgggccgggcatggcgggcgggacccgggggccgcgcggggcgcagagggtggcggcggcggcgcggcggtggtacgaagggcgtcggccggaggaggcagcgggccgaagggagctggaggaggaggaggaggagcgcggcggcgggcggccgc

SEQ ID NO: 20868 - DNA, 569 bp, Homo sapiens
  SIMILAR (219)..(160): 451254mologous to Homo sapiens valyl-tRNA synthetase,accession number M98326,Smith-Waterman Score=43.
gcggccgcagcagaggctctaccacgtccttcgaccggttgcaaagtggcaccaccatggggttgtcctcaatgccacggaacagtccccgctccttcagcgccaccagcaccgctttcctggcctcaaacctgggcaggcccaggaaaggcggaggcacattgatgagggccccccgggagtccatgatgctgatggcctccagcccgtgccgctgccccaacttcaatagtcaattttggtcaatgtgcgggggtgatcttcacagcacctgtgcccaaagtcccatgtccacaaattcatcgaagacaatgggaaggctccgagacaggaatgggtggatcacgttcttccccttcaggtgctgagccttggaccttataggcaaaggacacgaggaccccgaactccaccttctccttgtagccaggcacggagagcagggtgcgacctgtcagctccttcttatccacctcaatgtcagagatggcggagttgagggtgcaggaccagttaacaaggcgggtactgcgatagatgatgccttcctcgtgaagccggacaaaggc

SEQ ID NO: 20869 - DNA, 2580 bp, Homo sapiens
  SIMILAR (469)..(1191): 651254mologous to Homo sapiens valyl-tRNA synthetase,accession number X59303,Smith-Waterman Score=718.
atgccccctaacaggcaccgcatgcgtggggagaccaccctgtggaaccctggctgtgaccatgcaggtattgccacccaggtggtggtggagaagaagctatggcgtgagcagggactgagccggcaccagctgggccgcgaggcctttctacaggaagtctggaagtggaaggaggagaaaggtgaccggatttaccaccagttgaaagaagcttggcagctcgttggactgggatcgagcctgtttcaccatggaccctaaactctcaagcagctgtgacagaggcctttgtcgggcttcacgagaaaggcatcatctatcgcagtaccgcctttgttaactgtccctgcaccctcaactccgccatctctgacattgaggtggataagaaggagctgacaggtcgcaccctgctctccgtgcctggctacaaggagaaggtggagttcggggtcctcgtgtccttttgcctataaaggtccaaggctcagattaggcgacgaggaggtggtggtggcaaacaaactcggatcgaagacaaatgctgggagatgtggctgtagctgtgccacccccaaaagataccagattaccagcaccttgaaggggaagaacgtgatccaccccattcctgtctcggagcctttccccattgtcttcggatgaatttgtggacatggacttttggcacaggtgctgtgaaagatcaccccccccgacatgaccaaaatgactatgaagttgggcagcggcacgggctggaggccatcagcatcatggactcccggggggccctcaatcaaatgtgcctccgcctttcctgggcctgccgcaggtttgaggccaggaaagcggtgctggtggcgctgaaggaaccggggactgttccgtggcattgaggacaaccccatggtggtgccactttgcaaccggtcgaaggacgtggtagagcctctgctgcggccgcagtggtacgttcgctgcggggagatggcccaggctgccagcgccgctgtgactcggggtgacctccgcatcctgcctgaggcccatcagcgcacatggcatgcctggatggacaacatccgggagtggtgcatttccaggcagctgtggtggggccatcgcatcccagcctactttgtcactgtcagtgacccagcggtgccccctggggagtcagaagacctgagtgtgttctaccccgggacactgctggagaccggtcatgacatcctcttcttctgggtggcccggatggtcatgctgggcctgaagctcacgggcaggctgccctttagagaggtctacctcccatgcccatcgtgcgaaaatgctcacggccggaaagatgagcaagtctctaggcaatgtcatcgatcccctggacgttcatctcatggaatctccctgcagggcctccacaaccagctgctgaacagcaacctggatcccagcgaggtggagaaggccaaagaagggcagaaagctgacttcccagcgggagttcctgaatgtggcaccgatgctctccggtttggattatgtgcctacatgtcccaggggtcgtgaaaataaacttggaatgtgaaccggataatgggttaacgccaattctgcaacaagctctggaaatgcaccaagtttgcccttcgtggccttgggaagggttttgtgccctcacgacacctcaaactccgcaggccatgagagcctggcggaccgatgaatccgcaacctcctgacagaggctgtgaggctcagcaatcaaggcttccaggcctacgacttcccggccgtcaccactgcccagtacagcttctggctctatgagctctgtgatgtctacttggagtgcctgaaacctgtactgaatggggtggaccaggttggcaagctgagtgtgcccgccagaccctgtacactttgccttggacgttgggcctgcggctgctctcacccttcatgcccttcgtgacggaggagctgttccagaggctgccccggaggatgccgcaagctccccctagcctctgtgttaccccctacccggagccctcagagtgctcctggaaggaccccgagggcagaagccgccccttgagctggcgctaagcatcacgcgagccgtgcgctccctgcgggccgactacaacctcacccggatccggcctgactgtttcctggaagtggcggatgaggccacgggcgccctggcatcggcggtgtcgggctacgtgcaggccctggccatgcgcaggtgtggtggctgttctggccctgggggctcccgccccccagggttgcgctgtggctctggcttctgatcgctgctccatccacctgcagcttcaggggctggtggaccctgcacgggagctgggcaagctgcaaggcaagcgaagttgaggcccagcggaagggcccagcgtctgctggaaacccgttactgcctcgggtaatcctgtcaaggtgccgctcgaagatcaggaggcagatgaagccaagctccaacagacagaagcagagctcaggaaggtggatgaggccatcgccctattccagaagatgctgtga

SEQ ID NO: 20870 - DNA, 4193 bp, Homo sapiens
  SIMILAR (1323)..(3008): 681254mologous to Homo sapiens G7A,accession number AF134726,Smith-Waterman Score=1736.
gtcacaaaggggggaacacgtgggcgccggctgccggggcggcgatcttagggaactagggtcacctggagagccgcccaccgtctctgcccgctcgactcctccgcccgggccgctcggcggctcgcagccgcggccggcgcctggctgtgaggtggattccccggcccagtctgaccatctccctccagtttttccacttcgttcggaccttctcataactatgtccaccctctacgtctcccctcacccagatgccttccccagcctccgagccctcatagccgctcgctatggggaggctggggagggtcccggatggggaggagcccacccccgcatctgtctccagccacccccgactagcaggactagctttcccccaccccgcctgccggccctggagcaggggcccggtgggctctgggtgtggggggccacggctgtggcccagctgctgtggccagcaggcctggggggcccagggggcagccgggcggctgtccttgtccaacagtgggtcagttacgccgacacggagttaataccagctgcctgtggagcaacgctgccggccctgggactccgaagctcggcccaggacccccaggctgtgctgggggccctgggcagggccctgagccccttggaggagtggcttcggctgcacacctacttggccggggaggcccccactctggctgacctggcggctgtcacagccttgctgctgcctttccgatacgtcctagacccacctgcccgccggatctggaataatgtgactcgctggtttgtcacgtgtgtccggcagccagaattccgagccgtgctaggagaagtggttctatactcaggagccaggcctctctctcatcagccaggccccgaggctcctgccctcccaaagacagctgctcagctcaagaaagaggcaaagaaacgggagaagctagagaaattccaacagaagcagaagatccaacagcagcagccacctccaggggagaagaaaccaaaaccagagaagagggagaaacgggatcctggggtcattacctatgacctcccaaccccacccggggaaaagaaagatgtcagtggccccatgcccgactcctacagccctcggtatgtggaggctgcctggtacccttggtgggagcagcagggcttcttcaagccagagtatgggcgtcctaatgtgtcagcagcaaatccccgaggtgtcttcatgatgtgcatcccaccccccaatgtgacaggctccctgcacctgggccatgcactcaccaacgccatccaggactccctgactcgatggcaccgcatgcgtggggagaccaccctgtggaaccctggctgtgaccatgcaggtattgccacccaggtggtggtggagaagaagctatggcgtgacgagggactgagccggcaccagctgggccgcgacgtttactaacaggaagtctggaagtggaaggaggagaaaggtgaccggatttaccaccagttgaagaagcttggcagctccttggactagggatcgagcctgtttcaccatggaccctaaactctcagcagctgtgacagaggcctttgtccggcttcacgaggaaggcatcatctatcgcagtacccgccttgttaactggtcctgcaccctcaactccgccatctctgacattgaggtggataagaaggagctgacaggtcgcaccctgctctccgtgcctggctacaaggagaaggtggagttcggggtcctcgtgtcctttgcctataaggtccaaggctcagatagcgacgaggaggtggtggtggcaacaactcggatcgagacaatgctgggagatgtggctgtagctgtgcaccccaaagataccagataccagcacctgaaggggaagaacgtgatccacccattcctgtctcggagccttcccattgtcttcgatgaatttgtggacatggactttggcacaggtgctgggaagatcacccccgcacatgaccaaaatgactatgaagttgggcagcggcacgggctggaggccatcagcatcatggactcccgggggggccctcatcaatgtgcctccgcctttcctgggcctgcccaggttttgaggccaggaaagcggtgcctggtggcgctgaaggagcggggactgttccgtggcattgaggacaaccccatggtggtgccactttgcaaccggtcgaaggacgtggtagagcctctgctgcggccgcagtggtacgttcgctgcggggagatggcccaggctgccagcgccgctgtgactcggggtgacctccgcatcctgcctgagcgccatcagcgcacatggcatgcctggatggacaacatccgggaagtggtgcatgttcccaggcaagctgtggtggggcccatcggcatcccagcctactttgtcactgtcagtgacccagcggtgccccctggggaggaccctgatgggcggtactgggtgagtgggacgcaatgaggcggaggcccgggagaaggcagccaaggagttcggagtgtcccctgacaagatcagtctccagcaagatgaggatgtattggatacctggttctcctctggcctctgtccccttatccaattttgggcctggcccaacgcagtcagaagacctcgagtgtgttctacccctgggacacatgcctggagaccggtcatgacatcctcgtcatctgggtggcccggatggtcatgctgggcctgaagctcacgggcaggctgcactttagagaggtctacctccatgccatcgtgcgagatgctccaggccggaagatgaagcaagtcttttagggcaatgttcatcgattcccctgggacgttcatctatgggaatctccctgcaggggcctccacaaccagctgcttgaacagcaacctggggatcccagcgaggttggagaaggccaaagaaggggcagaaagctgacttcccagcggggatttcctgaatgttggcaccgatgctctccggtttggattatgtgcctacatgtcccagggtcgtgacatcaacctggatgtgaaccggatactgggttaccgccacttctgcaacaagctctggaatgccaccaagtttgcccttcgtggccttgggaagggttttgtgccctcacccacctcccagcccggaggccatgagagcctggtggaccgctggatccgcagccgcctgacagaggctgtgaggctcagcaatcaaggcttccaggcctacgacttcccggccgtcaccactgcccagtacagcttctggctctatgagcctcgggaatgtctacctgaagttgcctgaaacctgtactggaatggggtggaccaggtggcagctgagtgtgcccgccagaccctgtacacttgcctggacgttggcctgcggctgctctcacccttcatccccttcgtgacggaggagctgttccagagggctgccccggaggatgccgcaagctccccctagcctctgtgttaccccctacccggagccctcagagtgctcctggaaggaccccgaggcagaaagccgccccttgatatggcgctaagcattcacgcgagccgtgcggcctcctgcgggccgactacaaccttcacccggaatccgggcctacttgtttcctggaagtggcggatcgaggccacgggcgccctggaatcggcggtgtcgggctacgtgcaaggccctggccaagcgcaggttgtggtggctgttgctgagccctgggggctccccgcccccccaggggttgcgctgtggctctggcttctgatcgctgctccatcccacctgcagctttcaggggctggtggacccttggacgggagcttgggcaagttgcaaagccaagcgagttgaggcccaagcggcaggcccaagcgtctgcgggacacgccgtgcctgcctcgggtaatcctgtcaaggtgccgcttcgaagtccaggaggcagatgaagcccaagctccaacagacagaagcagagctcaggaaggtggatgaggccatcgccctattccagaagatgctgtgatccaccacccagcttcacccctcacccccagcggctcaccatggggatggcagcaataaaatattttcccacaaaaaaaaaaaaaaaaaaaaaaaaaaagtcgtatcga

SEQ ID NO: 20871 - DNA, 1234 bp, Homo sapiens
  SIMILAR (546)..(752): 811254mologous to Homo sapiens Human PRO1760 (UNQ833) amino acid sequence SEQ ID NO:376,accession number Y99449,Smith-Waterman Score=282.
atggatatgggagcaattaaggaaggagagtcaagaaggcctggtgacagaatgactgtggcaggaactaagctgctccacctgcaaagcacccaccttgacttcatctctctgtcaggggcaccatctggggcacttgaactctccaaggcccagccagcacatgctcaggacacaagggttttgatgaagatggtgattatctgggacttgtcccaggtgcctctgcagccaggacatgatggacacagcttccgtatccatgattatttgtactttcaagtgctgagtcctggggacattcgatacatcttcacagccacacctgccaaggactttggtggtatctttcacacaaggtatgagcagattcaccttgtccccgctgaacctccagaggcctgcggggaactcagcaacggtttcttcatccaggaccagattgctctggtggagagggggggctgctccttcctctccaagactcgggtggtccaggagcacggcgggcggggcggtgatcatctctgacaacgcagttagcaaatgacagcttctacgtggagatgatccaggacagtacccagcgcacagctgacatccccgccctcttcctgctcggccgagacggctacatgatccgccgctctctggaacagcatgggctgccatgggccatcatttccatcccagtcaatgtccaccagcattccccacctttgagctgctgcaaccggccttttctcttctggtagaagagtttgtcccacatttcggccataagtgactctgagctgggaaggggaaacccaggaattttgctacttggaatttggagatagcatctggggaccaagtggagcccaggtagaggaaaagggtttgggcgttgctaggctgaaagggaagccacacccactggccttcccttccccagggccccccaagggtgtctcatgctacaagaagaggcaagagacagcgccccagggcttctggctagaacccgaaaacaaaaggagctgaaggcaggtggcctgagagccattttgtgacctgtcacacccaccgggcttccagccttcccctacccaaggtcttttgcacagtgacctccacagcagttgttggagttggtttaaaagagctggtgtttggggactcaataaaccctcactgactttttagcaataaagcttctcatcagggttgcaaaaaaaaaaaaaagtcgacg

SEQ ID NO: 20872 - DNA, 393 bp, Homo sapiens; identical to SEQ ID NO: 20309
  SIMILAR (14)..(391): 851254mologous to Homo sapiens bridging integrator- 2,accession number AF146531,Smith-Waterman Score=545.

SEQ ID NO: 20873 - DNA, 1827 bp, Homo sapiens; identical to SEQ ID NO: 20310
  SIMILAR (7)..(1116): 931254mologous to Cloning vector pSacBII SacB,accession number U09128,Smith-Waterman Score=1799.
  misc_feature (1)...(1827): n = a,t,c or g

SEQ ID NO: 20874 - DNA, 902 bp, Homo sapiens; identical to SEQ ID NO: 20311
  SIMILAR (102)..(770): 981254mologous to Cloning vector pZC320 SopA,accession number U26464,Smith-Waterman Score=1158.

SEQ ID NO: 20875 - DNA, 2166 bp, Homo sapiens; identical to SEQ ID NO: 20312
  SIMILAR (1459)..(2163): 991254mologous to Cloning vector pBACe3.6 levansucrase,accession number U80929,Smith-Waterman Score=1217.

SEQ ID NO: 20876 - DNA, 1893 bp, Homo sapiens; identical to SEQ ID NO: 20313
  SIMILAR (1)..(753): 881254mologous to Escherichia coli O157:H7 ATP-binding component of D-ribose high-affinity transport system,accession number AE005606,Smith-Waterman Score=1103.

SEQ ID NO: 20877 - DNA, 2884 bp, Homo sapiens; identical to SEQ ID NO: 20314
  SIMILAR (1649)..(2881): 981254mologous to Homo sapiens UDP-GalNAc:polypeptide N- acetylgalactosaminyltransferase,accession number Y08565,Smith- Waterman Score=2168.

SEQ ID NO: 20878 - DNA, 2258 bp, Homo sapiens; identical to SEQ ID NO: 20315
  SIMILAR (1289)..(1789): 831254mologous to Homo sapiens breast cancer associated protein BRAP1,accession number AB032698,Smith-Waterman Score=686.

SEQ ID NO: 20879 - DNA, 348 bp, Homo sapiens
  SIMILAR (76)..(168): 751254mologous to Homo sapiens Similar to retinoic acid induced 12,accession number BC002762,Smith-Waterman Score=126.
gtcggaggccccgacagcgcccaactgaccagactcagtggttctccatccttccggacttcagcctggvtctccaagaggggccctctgtagagtcccagvccctactccgatcctcatatacccccggtggatcccacaactcatttgacctttaaccatctttctattgtttgtgttagccttaccctgtccctgccccaccttggttccccttgtctatggagccccgctcttgtgagccaggaagcagcgtctcatcaggacagaaggtaggatgaagacatgggrataatgtgagagagtagaacacccccgtacctaataaaaamtctttatttttttatt

SEQ ID NO: 20880 - DNA, 1565 bp, Homo sapiens
  SIMILAR (354)..(1190): 421254mologous to Homo sapiens Similar to retinoic acid induced 12,accession number BC002762,Smith-Waterman Score=330.
  misc_feature (1)...(1565): n = a,t,c or g
gaccataggaagncgtagaaatccttcttaaggccctcgcggtgggcttgagggtcctcctccccctcccactgacaactgccccaactgctcttcccgccccggtcacagtgaaaatgtagacggggtcgttgtccgtacgactgtgcgccaggggctcggggaggggcgccctccgcgtgagcgcccccctgggaatattgaacataatcacctctcattccagactatgttaggtcttaatggtgggaggacgcccgagtgctcggcccgtttcaccccgaggaggaatggacactgggtcatgacgccatcagagggcgccagagcagggaccggacgcgagttggaaaatgttggactcgctgttggccttgggcgggcctggtgctgcttccgggattccgtggaattgggaaggggcgcagtctcttgaaaggcgcttgtcaagaaatctgcactgtgtggggaagcaagtgcatatcctgggctgtgaaagtgagcgagaaagagtttcgtgaaggttttgactcttgataatcaacaattcggctggtttaccatgactttcttcagagacccttctcaactggtcaaaaactgaagaaggccttttcctggggggccgctgggagccttgaggagccatgtgcaagagagacagatcctgttcctgtcaccattgctctcgattcactcagcttggctgctacttcgccttcactgcacacacactctgccaggtcactgcatgctgtggagccatccaggactcttgtcctgggtgacagctcctcagtggggaaagtgagtgtgctgggcttgctccatgagaggcttccgcgaccagcccctgtggtagctctcagcagcctcgctcagactaaggtgaccctgggcgggtaccatggggccaggccttcggcccacatcctgtggtcggaggccccgacagtcgacccaactgaccagactcagtggttctccattccttccggacttcagcctgggatctccaagaggggccctctgtagagtcccagccctaattccgattcctcatattacccccggtgggattccccacaattcattttgaccttttaaccttcacctgctccaagaaagagagagaagccagagatagcctgatcctgcccttccagttcagttctgaaaaacagcaggcttctcctgcggcctaggccagggcaggctaccagccacatcttctatgagccagatgcttatgatgacctggaccaagaagacccagatgacgacctgaatattttgcctggccagatttgattagattgtaattggagggggcgcgggaagactttgggcccagaaccatctttctattgtttgtgttagccttaccctgtccctgccccaccttggttccccttgtctatggagccccgccttgtgagccaggaagcagcgtctcatcaggacagaaggtaggatgaagacatggggtaatgtgagagagtagaacacccccgctccctaataaaaatctttatttttttattaaaaaaaaaaaataataaaaa

SEQ ID NO: 20881 - DNA, 1842 bp, Homo sapiens
  SIMILAR (328)..(1080): 921254mologous to Homo sapiens Amino acid sequence of protein PRO310,accession number Y13402,Smith-Waterman Score=1198.
atgagggttcaaggacgcaggggtacatcagagaaaccatcaagaggtctgataaaaagcgacaccgggagcaagaatctctcgctctcgcaatttccatgccaggaagcgagaccaacgagagaacaccgcctgcagctagaacagcctggtcaggagcgtaacggagtggtgcgccaacgtgagaggaaacccgtgcgcggctgcgctttcctgtccccaagccgttctagacgcgggtgcagcgggaggattgtcagcacaggagaccgagagtcttcttcctgggggcgctctcttggtccctcagagggatatcgaggaaaaatgctttctgaaagcagctcctttttgaaaggtgtgatgcttggaagccattttctgtgctttgatccactaatgctaaggacacattagggattggtcatggaaataggaatgcaccaccatgagcatcatcacctacaagctcctaacaaagaagatatcttgaaaatttcagaggatgagcgcatggagctcagtaagagctttcgagtatactgtattatccttgtaaaacccaaagatgtgagtctttgggctgcagtaaaggagacttggaccaaacactgtgacaaagcagagttcttcagttctgaaaatgttaaagtgtttgagtcaattaatatggacacaaatgacatgtggttaatgatgagaaaagcttacaaatacgcctttgataagtatagagaccaatacaactggttcttccttgcacgccccactacgtttgctatcattgaaaacctaaagtattttttgttaaaaaaggatccatcacagcctttctatctaggccacactataaaatctggagaccttgaatatgtgggtatggaaggaggaattgtcttaagtgtagaatcaatgaaaagacttaacagccttctcaatatcccagaaaagtgtcctgaacagggagggatgatttggaagatatctgaagataaacagctagcagtttgcctgaaatatgctggagtatttgcagaaaatgcagaagatgctgatggaaaagatgtatttaattcccaaatctgttgggctttctattaaagaggcaatgacttatcacccccaaccaggtagtagaaggctgttgttcagatatggctgttacttttaatggactgactccaaatcagatgcatgtgatgatgtatggggtataccgccttagggcatttgggccatatttttcaatgatgcattggttttcttacctccaaatggttctgacaatgactgagaagtggtagaaaagccgtgaatatgatctttgtataggaccgtgtgttgtcattatttgtagtaagtaacctacatatcccaataccagctggtatgtttctttttcctttccaatttggtggcactggtataacccacacctttaaagtccagtaagtacatttttaaatgagggtggtttttttctttaaaacacatgaacattgtaaatgtgttggaaagaagtgttttaagaataataattttgcaaataaactattaataaatattatatgtgataaattctaaattatgaacattagaaatctgtggggcacatatttttgctgattggttaaaaaattttaacaggtctttagcgttctaagatatgcaaatgatcatctctagttgtgaatttgtgattaaagtaaaacttttagctgtgtgttccctttacttctaatactgatttatgttctaagcctccccaagttccaatggatttgccttctcaaaatgtacaactaagcaactaaagaaaattaaagtgaaagttgaaaaata

SEQ ID NO: 20882 - DNA, 1095 bp, Homo sapiens
  SIMILAR (469)..(1092): 1001254mologous to Homo sapiens Similar to CGI-112 protein,accession number BC002491,Smith-Waterman Score=1115.
atggccaagccgtgtggggtgcgcctgagcggggaagcccgcaaacagatggaaacagataagcaggagaagaaagaagtccataagtgtggatttctccctgggaatgagaaagtcctgtccctgcttgccctggttaagccagaagtctggactctcaaagagaaatgcattctggtgattacatggatccaacacctgatccccaagattgaagatggaaatgattttggggtagcaatccaggagaaggtgctggagagggtgaatgccgtcaagaccaaagtggaagctttccagacaaccatttccaagtacttctcagaacgtggggatgctgtggccaaggcctccaaggagactcatgtaatggattaccgggccttggtgcatgagcgagatgaggcagcctatggggagctcagggccatggtgctggacctgagggccttctatgcctcgctcgccatgggggaggtggagatctcggccctggcctacgtgaagatgtgcctgcatgctgcccggtacccacacgccgcagtcaacgggctgtttttggcgccagcgccgcggtctggagaatgcctgtgcctcaccgactgtgtgcccctcttccacagccacctggccctgtccgtcatgttggaggtcgccctcaaccaggtggatgtgtggggagcacaggccggtctggtggtggctggttactaccatgccaatgcagctgtgaacgatcagagccctgggcccctggccttgaaaattgctgggcgaattgcagaattcttccctgatgcagtacttattatgttggataatcagaaactggtgcctcagcctcgtgtgcccccggtcatcgtcctggagaaccaaggtctccgctgggtccctaaggataagaacttagtgatgtggagggactgggaagagtcacggcagatggtgggagctctactggaagatcgggcccaccagcaccttgtggactttgactgccaccttgatgacatccggcaggactggaccaaccagcggctcaacactcaaatcacccagtgggttggtcccactaatggaaatggaaatgcctga

SEQ ID NO: 20883 - DNA, 457 bp, Homo sapiens
  SIMILAR (232)..(396): 941254mologous to Homo sapiens proteasome activator PA28 beta,accession number AF079558,Smith-Waterman Score=260.
cttgtttgtgactttcccaatgtggagaatattaagctaaaagcattacctagaaaaactggtttgggcttcaacaaccttgacccttttctctgctcagtcctttgggatcctatttcttggtgctaagaaggggttcattctcaagttaacctatttcctataaaaggaaaccagactcatgtcccagcctcccatgggactgactcagctttgcctcccacattgcagatggattaccgggccttggtgcatgagccagattaggcagcctatggggagctcagggccatggtgctggacctgagggccttttatgctgagctttatcatatcatcagcagcaacctggagaaaattgtcaacccaaagggtgaagaaaagccatttatgtactgaacccgggactagaaggaaaataaatgatctatatgttgtgtggaaaaaaaaaaaaaaa

SEQ ID NO: 20884 - DNA, 865 bp, Homo sapiens
  SIMILAR (33)..(479): 481254mologous to Homo sapiens proteasome activator PA28 beta,accession number AF079558,Smith-Waterman Score=226.
gggcgactgaagcagcatggccaagccgtgttggggtgcgcctgagcgggaaaggccgcaaacaggtggaggtcttctaccgaaatcttttccaggaggctgaggaatttcttctcagagttcttgccaccagaaagtcatataccctgaaacaggctcttgcaagaggacttccccttcaatgtggcttgaccttgaacctttcgtccggggccccactggacatccccccatccccagacccctccaccccaaggatgatgagatggaaacagataaagcaggagaagaaagaagtccctaagtgtgatttcctcccctggaaatgagaaatgtccgtgtccctgcttgcccctggttaagcccagaagtctggatctctccaaagagaaatgccattctggtgatttacatggggatccagacacctggatcccccaagatttgaagatgggaaatgattttgggggtaagcaatccccggagaaggtgcctggagagggtgaaatgcccgtcaaagacccaaagtgggaagctttcccagccacccccatttcccaagtactttcttcagaacgtggggatgcttgtgggccaaggcctccacaggagactcatgtatatggattaccgggccttggtgcatgagcgagatgaggcagcctatggggagctcagggccatggtgctggacctgagggccttctatgctgagctttatcatatcatcagcagcaacctgggagaaaattgtcaaccccaaggggtgaagaaaagcccatctatgtacttgaacccggggactagaagggaaaataaatgatctatatgttgtgtggaaaaaaaaaaaaaaagggcggccgct

SEQ ID NO: 20885 - DNA, 752 bp, Homo sapiens
  SIMILAR (605)..(483): 811254mologous to Homo sapiens putative secreted protein,accession number AF072733,Smith-Waterman Score=143.
aatggatctggtcttcctggtagatctccagccgaggataggcacacagcttccgctccttgatgtaggtgtccaaggcaggatggacacggcgggtagccagccagatggacagaatggtggtgtaggggaaggtggctgtcaccacatggctgggtgccgggaaggagaacaccttgaagccaaatttctggtagaggtcgatgagctcaggggagggcgattcctcaccttcactcaggatgctgcccacggcacatcggcacttatcagggggcaccagggagcaggtgttgtgctgcactgtaactgatggcctccccatctctctccatcactccaggcctgtaggcaaaaaggtccaggatccatgtgggggttgtcatagtagacagcgatggagcggagcttgggagagatgctgcagctctcagtgaaaagccgcccagtctcaccatagggctccacatggaacttgtagggatggggggtgagccggcactcactgccaccccagccaactgccctgagtacccggcaaagcccagcagcatcagcagcagtaacagagtcaggtccagtagtaacagtaacaggtccgacatggctctggacccctgcaccgcaccccaaggcagctttttctttgcagccgccaatttgctctgtagggtttcttcagacattgcagggcaggaaggaatgtggggttggggccacgtcagctagattgcggcttaccactggggaac

SEQ ID NO: 20886 - DNA, 517 bp, Homo sapiens
  SIMILAR (298)..(137): 311254mologous to Canis familiaris D4 dopamine receptor,accession number AB030235,Smith-Waterman Score=63.
actcaccagaagaatcccccccagcctgcccaagacaggtttttcccttgtaccatcttcagagaggtcaggggaagagggtccaggtgggttaaggggggtcgctatggataaccactaagaccagactgctgccaggaggagtgggggataatgaggtggccccagggtcctggcacctggctttggttttccgtcttctttcctcaggacgcccctgaggcctgggacctgtgcctggcttcgaggagcatctgtggctgggtgatccagctgctggtgtgatcatgggcttccctcctctctagcagggcaggcgctcctgccccagagactgggcaactggctgtttctatgacgtatttatttttacttgtgtttcatgtcacttttttaaaaaaaagcaaacagaacaattgtaagtcagtataactgcctatcaggtttctttatttctctttttgaaaaagaaaatttaaactcaaaaagggccgggggaccctggagtgatactttg

SEQ ID NO: 20887 - DNA, 3642 bp, Homo sapiens
  SIMILAR (940)..(1905): 461254mologous to Homo sapiens golgin-95,accession number L06147,Smith-Waterman Score=587.
atgtctgaagaaaccctacagagcaaattggcggctgcaaagaaaaagattcaggacattctgaatgtcctggtgtctgaccttaaccgttccaatggggtagtgctccccacactggacaagtggaaggatgcccctgaggcctgggacctgtgcctggctttgaggagcatctgtggcttggcgatccagctgctgggggccgcgcctctcacgcgggctgcaaacttcagcgtcgctgaagttacagatgtgcgggactcggcaaggaggtgggagacaagaaaagctccatacctgtcttgtcggattgctttgaggatgaatgaagcagctgtgtttcgacacttagtgcctggcgtatatttccccaggtgtgaccagggctgccagctgacagctgccttggggtgcggtgcaggggtccagagccatgtcggacctgttactgttactactggacctgactctgttactgctgctgatgctgctgggctttgccgggtactcagggcagttggctggggtggcagtgagtgccggctcaccccccatccctacaagttccatgtggagccctatggggggaggctggtcccacctaggctgagtgtggacccaggaagtagcagaagagaggctaccagcaaggttgctgtggacctgctcgtgttagatgctgctggagctgatggccctgtgtcccagagtcctgtatggaaagaggctgcaggtgtggtctcacagctgcgcggtggcagacaggacttgttccacagtggtaactgggatagagctgatgtggccccaaccccacctcccttcccgccctgccatgtcggaagaaacccgacgagcaaattggcagcagcaaagaaaaagttgagagactatcagtggaggaacagccctggtgttcctacaggagtgaaaaagaaaattaaaaattgcagtaaccccgagacaaccacttctggtggttgccactcacctggagatgtaatggaggcatgtagacaaatacaactggagagagatacatttgctgagattcttaaaggagagagagccacatggcagcagaggatgaatcagatgtcggagcagatgcacacactgagggaggagaaggagtgtattatgaatcggttacaggagctggagacaagcttggtggaattgagaaaacagatgactgaactcccagccctggcacccccagcaaggccctccgaggtggagcagcagctacaagaggaggctgagcacctgagggaggagctggagagtctggcaggacagctccaagcccaggtacaggacaatgagggcttgagttgcctgaaccgggagcaggaggagaggctgctggagctggagcgggcagctgagctctggcggaagcaaactggacggagggtgggggagaaggaggggcgggggggggaggaggaggaggatgaggatgaggaggagaaggagaaggagaagaagaagaagaagaaggaggagaaggagaaggaggaggaggcgtctcggcccatgaagagcatcctgcaggacctggaaagccaggagtccatggtggcatttttaacatcagctgtagccagtgcagatggggagcaggctcggctccgtgggcagctgaaggagcaaaggctgcgctgccggtgcctggctcacctgctggcctgggcccagaagcagccagaggcagcagccccagccccagggactgggatggattctgtgtgtggggggacccaccgggccctgcagggtgccatggagaaactgcagagctgctttatgcagctgatgcaggaaaaggtggacctgaaagagcgggtggaggagctggaacatcgctgcatccagctctctggagagacagacaccatcgatctttgccaggtgaccctcaccagcagcgtggagcctgcacaaggagaggccggggagggttctcccctcgacaaccccagtgcacagcagatcatgcagctgtttggtgagatgcagaaccctcaggagcgcccaggcttgggcagcatcccctgcattctgttttcccaccaggctgacaaaaaccaccagtgctgttgtgtcctgggcagcctcctgagtgaaggtgaggaatctccctcccctgagctcatccacatctaccagaaatttgacttcaaggcattctccttccaggcacccagccacgtggtgacagccaccttcccctacaccaccatgctgtccatctgggtggctgcctgccatatccattctgccttggacacctacatcaagcccagggctggggcagcaatggcaggcccttctcctttacttcctaacctggtcactggccatggtggcagcacacccttcctggaggaaggagagccagccaccaggttgtctgacagaggaactgacatgatgagtgacacgagttctggaagcttggaggtgagccctggtagccgggagacttcatttgctaccgtgtcacctggggagagcggccgcggctgggaggatggtgacacctgcagtgagtgcagctgcagagagtcaggtgccagcggctcctcttttgaggagctggacctggaggactctccttccacgaaagacttgctgaagctcctgaggcacatgctgaactgtgatgtgggactctggagttccccaaccacgctaaaggaatgcagtagtgggatccacaaggtcaaccaccccatgattgctgactgtttccaccaccagtttcctggtgttcccatctgcgggatcctctcccatcagtactgtttcccccggtgtgaccagggcttccagctgacagctgccttggggtgcggtgcaggggtccagagccatttcggacctgttactactgggcctcacaggtggcctgactctgttactgctcctgacactgctggcctttgccgggtactcagggctgttggctggggtggcagtgagtgccggctcaccccccatccctacaagttccatgtggagccctatgaggtgcgcacccaacgccaggcagagggagctggcgtggggctgctggcggtcaatgtcacccgagatgaggaggatcttctaggaggggccccggggccacagaacgagaggggagtgtgcgctgagcccaccttgcaaagacgctctgacccagtagataagaagctgctggccaatccaaccacccaactcattcacttcaactgtccagacaccagccatcctacttcctccatttcctggatgaaaaactacaagaggtttcataaaaagcatcacatcaggacatcaagagtgctctcctcactggccattctgcatacatggctgctggtcaaccagactgtggtgctgggcggtgaggtgaagctccgctgtgaggtgtgcagggacttagcatttggaggcgaacagcagcaagcgtttggttacatcttctgtcactcagggcctgagggcggggggggggggggtcttaaacgttatccattcagcgacgctggcctgggaactgtccaatcaggcacgcagctggagcggaaagggcggcttccgggatgtggcggggtctttgtctctcgctgcagtcggagtatggtctag

SEQ ID NO: 20888 - DNA, 946 bp, Homo sapiens
  SIMILAR (701)..(940): 871254mologous to Homo sapiens cyclin,accession number M15796,Smith-Waterman Score=356.
atggatgcagctagaggccaatatcctaagctaattaacacagaaagaaaaccaaatactgcatgttctcacttgacttggctcttggatggcatttctggacctgctcaggtcaaagaggagcccactcctctgaaagccgcgttgttgccactctgccaccatgttcgaggtgcccctggtccagggctccatcctgaagaaggtgttggaggcactcaaggacctcatcaacgaggcctgctgggacatcagctcgagcggcgtgaacctgcagagcatggattcgtccacgtctccttgctgcagttcaccctgccgtctgagggctttgacacttaccgctgtgactgcaacctggccatgggcgtgaacctcactattatgtccaaaatactaaaatgtgctggcaatgaagatatcgttacactaaggattgaagataatgtgaataccttggtgctagtatttgaagcttcaaatcaggagaaggtttcagactatgaaattaagttgatggatttggatgttgaacaacttggaattgcagaacaagagtaccactatgtagtaaagatgctttctggtgaatttgcaagtatatgctgagatctcagccatattggagatgctgttgtaatttccggtgtaaaagatggaattatattttctgcaagtggagaccttggaaatagaaaacaaattgtcacagacaagtactgtcgataaagaggaggaagctgttaccatggagatgaatgaaccagttcaactaacttttgcactgaggtacctgaacttccttacaaaagccactccactctcttcaatggtgacactcaatatgtctgcagacatacaccttgttgtagactataaaattgctgatgtgggacacttaaagtactacttggctcccaagatggaggatgaagaaggaccttag

SEQ ID NO: 20889 - DNA, 1341 bp, Homo sapiens
  SIMILAR (205)..(840): 641254mologous to Mus musculus proliferating cell nuclear antigen (DNA polymerase delta auxiliary protein),accession number X57800,Smith-Waterman Score=605.
  misc_feature (1)...(1341): n = a,t,c or g
aggaagggtnnnnaaggggnnnnnnaatcgtagaccactagctcggtgtgccggaattcgcgtagcagagtggtcgttgtctttctaggtctcagccggtcgtcgcgacgttcgcccgctcgctctgaggctcctgaagccgaaaccagctagactttcctccttcccgcctgcctgtagcggcgttgttgccactccgccaccatgttcgaggcgcgcctggtccagggctccatcctcaagaaggtgttggaggcactcaaggacctcatcaacgaggcctgctgggatattagctccagcggtgtaaacctgcagagcatggactcgtcccacgtctctttggtgcagctcaccctgcggtctgagggcttcgacacctaccgctgcgaccgcaacctggccatgggcgtgaacctcacctgttgtcccaaaatatctaaaaggccccggcaatggaatttccttacaccttgggcccggagtataacccggataccttggcgctagtatttgaagcacccaaccagggggaagtttcagactatgaaatgaaggtgatggatttagatgttgacaaacctggaattccaggaacggaagtccagcggtttagtaaagatgccctcctgtgaatttgcaccgtatatgccgggatcccagcccatattggagatgctgttgtaaatttcctgtgcaaaagacggagtgaaattttctgcaagtggagaacttggaaatggaaacattaaattgtcacagacaagtaatgtcgataaagaggaggaagctgttaccatagagatgaatgaaccagttcaactaacttttgcactgagggtacctgaacttctttacaaaagccactccactctcttcaacggtgacactcagtatgtctgcagatgtaccccttgttgtagagtataaaattgcggatatgggacacttaaaatactaccttggctcccaagatccgaggatgaagaaggatcttaggcattcttaaaattcaagaaaataaaactaagctctttgagaacttgcttcctaagatgccagcatatactgaagtcttttctgtcaccaaatttgtacctctaagtacatatgtagatattgttttctgtaaataacctatttttttctctattctctgcaatttgtttaaagaataaagtccaaagtcagatctggtctagttaacctagaagtatttttgtctcttagaaatacttgtgatttttataatacaaaagggtcttgactctaaatgcagttttaagaattgtttttgaatttaaataaagttacttgaatttcaaacatcaaaaaaaaaaa

SEQ ID NO: 20890 - DNA, 423 bp, Homo sapiens
  SIMILAR (240)..(335): 961254mologous to Homo sapiens Similar to hypothetical protein DKFZp434G0522,accession number BC001044,Smith-Waterman Score=170.
agtccaaggtcttggagatgttctcctgttttattcttgaggtttgagcttagctagctgggctcttagcaggatggttttggtagttgatagatcagattaaatggtatttaatttgtgagcagtaagtgctcacaaaacagaaatcagtgtaaaaattggattttgtttgttgttgtcgtctttagaacaaccagaaattaagcaggttgatagtgtcttttagtttatttcattttagatcaacaggcggtccttcgggtcggagtggacatcggatggtggcctggaagagacaattgatcctgtttggtggcttccatgaaagtacacggttggtaccaagaacggaaaaatctttctcttctgaagcattaaggagtgggctttttatagaaagagcattctgaatacacaagaaat

SEQ ID NO: 20891 - DNA, 2253 bp, Homo sapiens
  SIMILAR (2023)..(2232): 981254mologous to Cloning vector pSacBII SacB,accession number U09128,Smith-Waterman Score=372.
atggcccggcctcttctgctacctcgccctccttcagagctccttgctggaaccccgtctcccctgcctacaagccccagcgctttgccttatagccacagggtgagtatgttctgcaagtgggaactcaactgcgccatgaaagccagccttgtaaaacacaccggcaccccagggaggtttcgccacgttctcctgcacaactcaccgcgccgatttcactccttaatgaccgtgtttcaaacgctgccagggcgacgcttcatctttaggcagccaggggccagaaggagcctggatcctccactggccccctccctctccttcagcggccgtgacactttccccagcgtccactgccctcttgggacgggccatcagccacagaaacatcctcatcttcgggtgggcattgacagcaaggcccacagcccggtgaaaggaaggacagccctggccatacccagagccagcgccagggccttggccaggacacctgtcacagtaataaacatgtaccaggtacaggagcatccgtggatagggttcagggtcagccacaatgaaaatcctctctgttggccacagaggctgctccctgggccgccggtcctcacctgcccccgagccaggcacagcaaactgcctgctggagacagcacagaggaagtggccggcagcttcatcagttccaggaagcccaggcagcctggtcccccagggtgcaccgggcacagcagttcgcacggggccggagagcggcagctgaccacagcaactacagctggcccgacaccgggcacagtcatcagagatgccagaccagaggaaatacagcaatcaaagcaggcaaacctgttgctaaatgtgtttttgagagtaaaactccttggccaaatacttcaagacgctgatgattctcaaagaacaaagcacatccaaaccatagcagaaaggatggtccccaagagccctaggagggaacgtggccctactggtaccttgatttcagagttctgcttccagaacgaacagtcactctggagcaaggagcttccacgtgagaaaccccactaccctcagactgccagaaatccacagacatacgcatacatgtgtcggaaacaaaagtggcaccgacagttctctcaaaggagccgtgttctgcgcagacacccgcagcccctgtccaacatacagccagagctacacaaggccccactaattgctctaattgccttgccgccacctggtgcagatgcagccgcctttccaaacggagctgccgggcagggctgtaactcatacttcctgcttgaatcatgtctgcctcttacatcagccaccagcctctttttcatccagcatgggaggggacgatgggagccaggatggctgccagcgtttcgagataacgccagccatgcagggcctggaagggggagcatcacccaggcacctcacagagcacacatatgcaaagccacccggtccacaccccagcagacacgggagagaggcttcgcaccaccagctcccagtgatgatgctgcctgcctgcagcctggactgtccccaggccctggagacccaccttctcctctcagccagcaccctcggctttgcccaaccacagtaaagctccaaattccccaattctctgagtactttgatgcaaaactgccaaatggggaagtgattctgctgagagtccgaggcccccgagcccgctgccgaagacggagctccaagaccgaacctcgtaaagggcccagccgcacctctacccggaagcggctcgaactcggggccggaagtgactccatttctgtgcgccgagctccgccccacgagcacctgtttccgagcggagagcgcgggccgttttctttcctggtgtcccgtcgcggcttgggacccggcaagatgggcaagaagggcaagaaggagaagaagggccgcggcgcggagaagacggccgccaagatggagaagaaggtgtctaagcgctcgcggaaggaggagatccctaaacagcagcaaaacgaaaaataccaagtgcctcaattcgatcaatcaacgattaaaaatattgagtctgcaaaaggacttgatgtgtgggacagctggccgctgcaaaacgctgacggaacagtagctgaatacaacggctatcacgttgtgtttgctcttgcgggaagcccgaaagacgctgatgacacatcaatctacaggggctgtctccagctttga

SEQ ID NO: 20892 - DNA, 1713 bp, Homo sapiens
  SIMILAR (1087)..(1479): 811254mologous to Homo sapiens unnamed protein product,accession number AK023986,Smith-Waterman Score=546.
atgtgcccaaagtctgtcaatatccatgagacacagagcgtgcccaaagcctgtgtcaatatccacgaggcactgagcgtgcctgaagtctgtgtcagtatccatgaggcacagagcatgcctgaagtctgtgtcactacccctgcgaccacagtagcgtggccgaagtctgtgtcaatatctagacaaggagagtcggagaagctcagggcccagaggaacctgaggaggcgacaggacgaaacggccagtgggaccctcgacgggatccctgggcaggatgagctgcggagcactggggcagtgaatgaagtgtgggccacgctcccggtaacgggtcagtgccggttcctgatccgtcacaagggcgccaaggagaggaagatgccacttttatcaactaaacgtggccagccacgtggacaccctgctctggtggtctacgcctgctgcgactgtgtcctcgtcacccgcaccaatcagagccttcactggccccgtcaatgccagcattacgaatatccaggacagacctcaagcaagccccgttctcccccaatacaggatgaaagtgatggacggctgtggggccacagtctgtccacccccgtcatgtgcggctctgtgctgaggaggctccgcaaagctgcccatcatgcccaccctcacaatgcccatggtgacaccgagtccagaaggttgcgattggagaaagaggctgaggatcccatgcgtctgacagcagcgctgctgtctcttgtttttcgtggtccatgtttgggggttacatctgggcctgtcccttctctgtgtagcctgaaggcagttcccaggcttgtgtccctcacctctccgcagacgccctttccagatcctgttcaaatcctggccctactcacgggaacttggcctggacttgccaccgattattctatcaatggcactgcactgggcaccaggatccaagcagtggactgcgggacaggacctgtccctgcactcttcaggcaaatctctggagcacccactgggtgccacacactgcggatgggacgcagggtaccgcacagccccggtcctcagggacccggcggggacagcactggtgaaaaaccacggaagtacattgatgtgtcacttcaacaggggcctacgcaggggcctgccctgtgccaggccctgtcgttgagagttaagaaagacgtggacaagggcacacggcactcagacatgttcctgctgaagccagaggacggaagagaagacaagtgggtttggactcggatgaacccttcgggggtcaagcccaccccacggtctggcttttccgtggccatggccccgaatcaccagacactgttcttcgggggtgtctgtgacgaggaagaggaggagagcctgtcgggcgagttcttcaacgatctgtacttctacgacgccaccaggaaccgttggtttgagggacagctgaagggtcctgccttgtccgtgtacctgatctctgccatcagccaccagtccagccaggctgttgatgcagccgattcctgccaagctgatcggcctcagggaggatcagagccacccgctctccgttatggagatcaggcagtgaaaggcctggcacggaggcactggaaaaggccggagcccttcgcagtggggctggaaagctctcctgcagcttcacagcctgtgggcctccgttcctga

SEQ ID NO: 20893 - DNA, 522 bp, Homo sapiens
  SIMILAR (204)..(521): 1001254mologous to Homo sapiens unnamed protein product,accession number AK023986,Smith-Waterman Score=581.
ttgatcgcagatcactagtccagagcggaggaattccggccacgtttctgtgttgattggtgtgttggtgtaagagcacaggagaaaaatggtttgagtttttcccccaacagtaggaaatttacctttaatttaaatcagttcagtttttaatgtcagggcttttcccaatgttacggaccctgacagctgctgttcttctaaccagggattacatctactacaacgacgtgtatgcctttaatctggacaccttcacatggagcaagctgtccccgtcagggacggggcccacacccagatcaggctgccagatgtccgtcactccccagggcggcatcgtcgtctatgggggctactcgaaacagagagttaagaaagacgtggacaagggcacacggcactcagacatgttcctgctgaagccagaggacggaagagaagacaagtgggtttggactcggatgaacccttcgggggtcaagcccaccccacggtctggcttttccgtggccatggccc

SEQ ID NO: 20894 - DNA, 2094 bp, Homo sapiens
  SIMILAR (1069)..(1386): 991254mologous to Homo sapiens unnamed protein product,accession number AK023986,Smith-Waterman Score=583.
atggacgcacccctgccccggctgcgcacagcttctctgctgagcatgtttcacagcaccagctctcctggcatccactgggggaaagcgaagacatctgtgcacaggaaaacctggaccgagagttggcagcagctttttaaattcacgacatcccacgctggagacaccccagatgcccttcaagggacagatgagcattttggaaacgacgaaactgaaggaatggagaacagctcagaggctgccagggcagcggtttcctcatctgtaaagcaagtgggcccctggaatgctggctccatcaagaaaggcatctcggagcgccggaaacaattctgcggccagaaacaagtttgcagcgctgtgatctcagcgagtgtgaccccagtccgaggcccccgagcccgctgccgaagacggagctccaagaccgaacctcgtaaagggcccagccgcacctctacccggaagcggctcgaactcggggccggaagtgactccatttctgtgcgccgagctccgccccacgagcacctgtttccgagcggagagcgcgggccgttttctttcctggtgtcccgtcgcggcttgggacccggcaagatgggcaagaagggcaagaaggagaagaagggccgcggcgcggagaagacggccgccaagatggagaagaaggtgtctaagcgctcgcggaaggaggagcccggggtctgcaggaggatccgtcctgaccttggggttgagtgttctgcggctgctgctcatggattccctaaccggggccagttttatggcctgccgtgcgccaggcacagctccctgggctttactcctcacgagcagtcacccaatgatgatgaggttcagccaaggtcaaagaccgctctaagtagcagcagcaaagctttcgcggaagacctggaagcgctcatagcccatttccagacactcgatgccaagaggactcagactgtggaacttccgtgccccccaccctcaccaaggaagtgtagaggcagccagtttgtggtgacagaggattctgtgaggaaggggacagcgctcaggttaaatgcctccctctcggttcatcctgagaaagatgagttaatcctttttggaggtgaatatttcaacggccaaaaaacttttttgtataacgagctctatgtctacaataccagaaaggacacctggaccaaagttgacatccccagtccacctccgaggcgctgtgctcaccaggcggtggtagtgcctcaaggtggcggacagctgtgggtctttggaggggagtttgcctctcccaacggagagcagttctaccactacaaggatctctgggtcctgcatttggccaccaagacctgggaacaagtcaagtaagaagccagatgagaagctgagctccgggcatggctcttctgtgcttgtgtgctgagcccgagtgctcggagcagacctcagaataccagggttcagaggaacttgggtcacagtcctggagcccagcctcgctgggtcctgggagaccacattttctctggacccttcatacagaagcctgggccgggtgtggggggtgccagctgcctggtgttgttctccaggttcctcttgttgttggccaccagcctctcgctgcctgtgttgcagctcttctcctgtggacttctgtttacatcattggaggcagctctggtgcccagcttgttggaaggggggccccatagcgatgtgtcattgactaaaggcacgttctttctgtgtcgagttggtgtagaaaccgtggagcggccgatgtgggcaactgttgcaccctcggagcccagcgcgagggtgggggtctgtggggagtcagccgcagccaccagcattgctgaatgtgtcagaatggtggtgcctcctgcaaacaaccttagcctctgttctcctgtcaccagggtccgggagcgtggcccacacttcttcactgccccagtgctccgcagctcatcctgcccagggatcccgtcgaggtcccactggccgtttcgtcctgtcgcctcctcaggttcctctgggcctgagcttctccgactctccttgtct

SEQ ID NO: 20895 - DNA, 3103 bp, Homo sapiens
  SIMILAR (361)..(831): 981254mologous to Homo sapiens unnamed protein product,accession number AK023986,Smith-Waterman Score=864.
ggaattcgctccgccccacgagcacctgtttccgagcggagagcgcgggccgttttctttcctggtgtcccgtcgcggcttgggacccggcaagatgggcaagaagggcaagaaggagaagaagggcctaaaccctgcatagcacggccggcacaacggagaaaaaggtggctaagcgctcgcggaaggaggaggaaaacctggaagcgctcatagcccatttccagacactcgacgcccataggactcagactgtggaacttccgtgccccccaccctcaccaagggtaaaagcctccctctcggttcatcctgagaaagatgagttaatccttttcggaggcgaatatttcaacggccaaaaaaacttttttgtataacgagctctatgtctacaataccagaaaggacacctggaccaaagttgacatccccagtccacctccgaggcgctgtgctcaccaggcggtggtagtgcctcaaggtggcggacagctgtgggtctttggaggggagtttgcctctcccaacggagagcagttctaccactacaaggatctctgggtcctgcatttggccaccaagacctgggaacaagtcaaatcaacaggcggtccttcgggtcggagtggacatcggatggtggcctggaagagacaattgatcctgtttggtggcttccatgaaagtacacgggattacatctactacaacgacgtgtatgcctttaatctggacaccttcacatggagcaagctgtccccgtcagggacggtgcccacacccagatcaggctgccagatgtccgtcactccccagggcggcatcgtccgtctatgggggctactcgaaacagatgccaccgcattcggggcagagccggggccggaagccagggagctgcctgctgctgctgctgctgctgctgctgctgctgctgctgctgctgctgtgtgtcctccccttagggtactccctgattgagctgagtagctcctaccgtctgcatggcaacgaaccagtaccagccacatttcacgggctcaacagccacatgggactagtcgccaccatattggacaatgtaaatccagaacattccatcagtgcagaaagctttattgggcaggcagcactggtctggagtaccttagaattggacgtagttaaaggaaagtttttccgtgagaccctcatgtccacagtgcttcccaagcctgagtgttacaagaaccacctggaaggtagctggctggcttctgccaacctcagcctggtcgcagctggcacctcctcaccaggtactaaaccagggtgtgcagaggcccgctcgatccatggggcagatcagcaaatggtagtgcaggatgccccatcatatgtgaatatcagccgctccgggtcctctgggaagctctggcctcttcaccagtcctgcgttccgagctctttggttttacatcacagtggcgccgtgcggcggcaagtagtccgtgttcggatgtgcttcatgcaggcggtggtagtgcctcaaggtggcggacagctgtgggtctttggaggggagtttgcctctcccaacggagagcagttctaccactacaaggatctctgggtcctgcatttggccaccaagacctgggaacaagtcaagccgggaatgttaaccagtcaaatgaagagtctgctgtgggtggggagggtgcagacagattccctgccctgggcccacctgctggaggaggacatgaccatagccttacagtgggacccggaaggtgctgtggtgtggggctttgctggttctgtcactcggatcgtgggtatctgttccaagggaatagggatgcactgtgggtacctggtcactttgggagtggccctggcccctctcttgggccggcagctgcggatggcagcccctacctcgtgtgcagctccagctgcatcccacactgcaggctcggtcgtacgcgggacatccgtggcagctgccctgggtctggattgtctgataaacagacacctcattcctcgaatgcttgctaatgaaagaaaaaccgtctttttagcagacaccccaccgtccccggtccctgctgtctgtgtctgtggatctgcctcttctgggtatttcataaaagcggaatcaaaacacgtggcctctgtgacgggctcttctttccgcgtggtgctgtcaggacgtgtcctgctgttgcgagtatcagcacttcactcccgtggccagatgaggtgctgtgttgctgtgaaagttcacggacagtgcatacatctttgtatgcaccggagcacttgggagatgatcggtactgtttggttggatgaagatatagatgtgtgtagcagtctgtgttgtggggtgccgcacccgggggaggggggggggcgacgcccagagcgacgggaaggttttccgaaaacacgcgtcaaagaggtgaagaaacaaaacgccactacagttaaagtccagtcaggcatcagacataacctggcatcgtaccgtccactgcagggtgttgcccccaaacactgcaagatcaagcctggaaactgggcccggccctgcagccgagttccttcaccctcatatgaactccgtaatctgatcccgtcgttgcagacataccggggcagaacgtggctcatctccccattcccacaggaagctgaagccccctctgcaaactggcccctggctaaggaaacttgccgggccatgcccccgggggactgcaacaaagaggagctggtttgcggtgacagcgttttcccggagccgcactccggcagggatttatcacacgttcttgtcgaaggccaccaggtgaccagtggacatgcgtggttacgccgggccgagtggtcgctggttcctgtgagaagagggcagagcggtggtcagagcccacgggagcagcatctccacgtggcactgactggcttggagaccacgcactgccctcctcagcaaccaggccccaacttccccctgcagttcacttcctgctatgcccgcaggacagtcctgagccgacagaagagcctgcctggtgacaagattctcaacgcagccaccaattag

SEQ ID NO: 20896 - DNA, 3027 bp, Homo sapiens
  SIMILAR (1538)..(2239): 601254mologous to Macaca fascicularis hypothetical protein,accession number AB055250,Smith-Waterman Score=679.
agtccgaggcccccgagcccgctgccgaagacggagctccaagaccgaacctcgtaaagggcccagccgcacctctacccggaagcggctcgaactcggggccggaagtgactccatttctgtgcgccgagctccgccccacgagcacctgtttccgagcggagagcgcgggccgttttctttcctggtgtcccgtcgcggcttgggacccggcaagatgggcaagaagggcaagaaggagaagaagggccgcggcgcggagaagacggccgccaagatggagaagaaggtgtctaagcgctcgcggaaggaggagcccggggtctgcaggaggatccgtcctgaccttggggttgagtgttctgcggctgctgctcatggattccctaaccggggccagttttatggcctgccgtgcgccaggcacagctccctgggctttactcctcacgagcaggaagacctggaagcgctcatagcccatttccagacactcgatgccaagaggactcagactgtggaagttccgtgccccccaccctcaccaaggaagtgtagaggcagccagtttgtggtgacagaggattctgtgaggaaggggacagcgctcaggttaaatgcctccctctcggttcatcctgagaaagatgagttaatcctttttggaggtgaatatttcaacggccaaaaaacttttttgtataacgagctctatgtctacaatatcagaaaggacacctggaccaaagttgatatccccagtccacctccgaggcgctgtgctcaccaggcggtggtagtgcctcaagttggcggacagctgtgggtctttggaggggagtttggcctctcccaacggagagcagttctaccactacaaggatctctgggtcctgcatttggccaccaagacctgggaacaagtcaaccgggaatggtaaccagtcaaatgaagagtctgctgtgggtggggagggtgcaaacagattccctgccctgggcccaaccgctggaggaggacatgaccatagccttacagtgggacccggaaggtgctgtggtgtggggctttgctggttctgtcactcggatcgtgggtatctgttccaagggaatagggatgcactgtgggtacctggtcactttgggagtggccctggcccctctcttgggccggcagctgcggatggcagcccctacctcgtgtgcagctccagctgcatcccacactgcaggctcggtcgtacgcgggacatccgtggcagctgccctgggtctggattgtctgataaacagacacctcattcctcgaatgcttgctaatgaaaaaaaaaccgtctttttagcagacaccccaccgtccccggtccctgctgtctgtgtctgtggatctgcctcttctgggtatttcataaaagcggaatcaaaacacgtggcctctgtgacgggctcttctttccgcgtggtgctgtcaggacgtgtcctgctgttgcgagtatcagcacttcactcccgtggccagatgaggtgctgggattacatctactacaacgacgtgtatgcctttaatctggacaccttcacatggagcaagctgtccccgtcagggacggggcccacacccagatcaggctgccagatgtccgtcactccccagggcggcatcgtcgtctatgggggctactcgaaacagagacaaggagagtcggagaagctcagggcccagaggaacctgaggaggcgacaggacgaaacggccagtgggaccctcgacgggatccctgggcaggatgagctgcggagcactggggcagtgaatgaagtgtgggccacgctcccggtaacgggtcagtgccggttcctgatccgtcacaagggcgccaaggagaggaagagagttaagaaagacgtggacaagggcacacggcactcagacatgttcctgctgaagccagaggacggaagagaagacaagtgggtttggactcggatgaacccttcgggggtcaagcccaccccacggtctggcttttccgtggccatggccccgaatcaccagacactgttcttcgggggtgtctgtgacgaggaagaggaggagagcctgtcgggcgagttcttcaacgatctgtacttctacgacgccaccaggaaccgttggtttgagggacagctgaagggacccaagtctgaaaagaagaaacgcaggcggggcagaaaagaggagcccgaaggtgggtagcaggccggcgtgtgggggagctggcacccaggggcctgtgcagctggtcaaggaggtggtggccgaggatggcaccgtggtcaccattaagcaggtgctcaccgcgccaggctcggcggggcagccccggtctgaggacgaagacagccttgaggaggccggcagccccgcacctgggccgtgtccacgctccaacgccatgctggctgtgaagcatggggtgctctacgtctatgggggcatgtttgaggccggcgaccgccaggtcaccctcagcgacctgcactgcctggacctgcacaggatggaggcgtggaaggccttggtggagatggacccagctgcgctgacgtgtatgtgcgttcattctgcttttgaagaaactcaggagtggctggaggagacgggacctcggaagaggacagtgaggaggttgagggcgccgagtggtggggtcgacgacgaagacagcggagaggagagcggtgcggaggactgagaagagccccctgccagggggcgcctggcaagtgcttgtgcccacgtccgcccaggacccagcccgtgttgagtgaagctcttggggcccagcgtgcgtcctgaccgcacaggagagagctgaaggtgggtggcccaggcccagggtgtgaactttctcccatggtttagtctcttgacgcggcactgggccggaagttcaactgagtgcagtgcaggtggattccctcagcagcctgtgtgttgtgtgaaataaattggacttgaaacaagaaaaaaaaaaaaaa

SEQ ID NO: 20897 - DNA, 477 bp, Homo sapiens
  SIMILAR (110)..(157): 1001254mologous to Homo sapiens phosphogluconate dehydrogenase,accession number U30255,Smith-Waterman Score=90.
gacgggtacagacatgagatgcttccagccagcctcatccaggctcagcgggattacttcggggctcacactatgaactctgggccaaaccagggcagtttatccacccaactggacaggccatggtggcaccgtgtcatcctcgtcatacaatgcctttgccctattttctgttcagttttttaaaagtgttgtaagagactcctgaggaagacacacagtttatttgtaaagtagctctgtgagagccaccatgccctctgcccttgcctcttgggactgaccaggagctgctcatgtgcgtgagagtgggaaccatctccttgcggcagtggcttccgcgtgccccgtgtgctggtgcggttcccatcacgcagacaggaagggtgtttgcgcactctgatcaactggaacctctgtatcatgcggctgaattccctttttcctttactcaataaaagctacatcagactgaaa

SEQ ID NO: 20898 - DNA, 443 bp, Homo sapiens
  SIMILAR (75)..(161): 1001254mologous to Homo sapiens Human secreted protein, SEQ ID NO: 6190,accession number G02109,Smith-Waterman Score=143.
gggagccgctgcgggtctttccctcactcgtcctccgcgcgtcgccgctcttgggttctgctctgtccgccgccatggcccaagctgacatcgcgctgatcggattggccgtcatgggccagaacttaattctgaacatgaatgaccacggctttgtggtaagcggcgtgggcgcgttgtcttctctctggttcccgggcgctttagccgaggccggcgataggtttgggagcttacgggtctcctggccgtgctttgctaatgtgctctgttgctgctcgtggcatttttgtatggaaaggagaagcaccctgtaggcgtgggcgggccgatcccgaacttagtcctgcggagtgtgcctgtgggtccgtgaggttcacagcccgaatgaacgaattagtgtcttaagtagagaagaagggtgcgggaggagaacccttgct

SEQ ID NO: 20899 - DNA, 804 bp, Homo sapiens
  SIMILAR (180)..(548): 871254mologous to Homo sapiens phosphogluconate dehydrogenase,accession number BC000368,Smith-Waterman Score=591.
gctgatcggattggccgtcatgggccagaacttaattctgaacatgaatgaccacggctttgtggactgtctccaaagttgatgatttcttggccaatgaggcaaagggaaccaaagtggtgggtgcccagtccctgaaagagatggtctccaagctgaagaagccccggcggatcatcctcctggtgaaggctgggcaagctgtggatgatttcatcgagaaattgagacggtgccgagacctcaaggccaagggaattttatttgtggggagcggagtcagtggtggagaggaaggggcccggtatggcccatcgctcatgccaggagggaacaaagaagcgtggccccacatcaagaccatcttccaaggcattgctgcaaaagtgggaactggagaaccctgctgtgactgggtgggagatgagggagcaggccacttcgtgaagatggtgcacaacgggatagagtatggggacatgcagctgatctgtgaggcataccacctgatgaaagacgtgctgggcatggcgcaggacgagatggccctttgccctattttctgttcagttttttaaaagtgttgtaagagactcctgaggaagacacacagtttatttgtaaagtagctctgtgagagccaccatgccctctgcccttgcctcttgggactgaccaggagctgctcatgtgcgtgagagtgggaaccatctccttgcggcagtggcttccgcgtgccccgtgtgctggtgcggttcccatcacgcagacaggaagggtgtttgcgcactctgatcaactgga

SEQ ID NO: 20900 - DNA, 2202 bp, Homo sapiens
  SIMILAR (139)..(1611): 501254mologous to Homo sapiens phosphogluconate dehydrogenase,accession number U30255,Smith-Waterman Score=920.
atgcttacgccaatcttggcacgaggttctggagggagccgctgcgggtctttccctcactcgtcctccgcgcgtcgccgctcttcggttctgctctgtccgccgccatggcccaagctgacatcgcgctgatcgtttttgttcgtcatgggccacaacttaattctgaacatgaaggaccatggctttgaggtctgtgcttttaataggactgtctccaaagttgatgatttcttggccaatgaggcaaagggaaccaaagtggtgggtgcccagtccctgaaagagatggtctccaagctgaataagcccccgcgggatcaatacctcctctgtggaaggctgggcaagctgtggatgatttcatcgagaaattggtaccattgttggatactggtgacatcatcatttgacggaggaaattctgaatattaggggacaccacaagacggttgccgagacctcaaggccaagggaattttatttgaggggagcaggagtcagtgctggagaggaaggggacccggtatggcccaatcgctcatgccaggagggaacaaaggaagcgtggccccacatcaagaccatcttccaaggcattgcttgcaaaagtgggaactggagaaccctgctgttgactgggtgggagatgagggagcaggccacttcgtgaagatggtgcacaacgggatagagtatggggacatgcagctgatctgtgaggcataccacctgatgaaagacgtgctgggcatggcgcaggacgagatggcccaggcctttgaggattggaataagacagagctagactcattcctgattgaaatcacagccaatattctcaagttccaagataccgatggcaaacacctgctgccaaagattcaggggacaagcgcgggggcaagaaggggcaacaggggaagtgggaccggccattctccggccctgggaaatacggcgtacccgtacaccctcattaggagaagctgtcttttgctcggtgcttatcatctcttgaaggatgagagaatttcaagctagcaaaaagctgaagggtccccagaaagttccagtttgatggtgattaagaaatcatttcctgggaggacattcggaaggcactctacgcttccaagatcatctcttacgctcaaggctttatgctgctaaggcatgcagctcaccgagtttggctggactctcaattatgggtggcatcgccctgatgtggagagggggctgcatcattagaagtgtattcctaggaaagataaaggatgcatttgatcgaaacccgggaacttcagaacctcctactggaccgacttctttaaagttcagctgtttgaaaactgccagggactcctggcgtgcgggcagtcagcactggggtccagggctgggcatttcccatgcccctgttttaccgactgcccctctccatttagacggggacaagccatgagatgcttccagcccagccttcatccaggcttcagcggggattactttcgggggctcacaccctatgaaactcttgggccaaaccaggggcagttttattccacaccaattggacaggcccatggtggcaccgtgtcatcctcgtcataccaatgccttgatcatgctgctcctgtcaccctccacgattccacagtaccaggacattccattggcctcaatggcactgcccacctggccctttgccctattttctgttcagttttttttaaaagtgttgtaagagactcctgaggaagacacacagtttatttgtaaagtagctctgtgagagccaccaatgccctctgcccttgcctttttgggacttgaccaggagctgctcatgtgcgtgagagtgggaaccatcttccttgcggcagctggcttccgcggtgcccccgtgtgctggtgcggttcccatcacgcagacaggaagggttgtttgggcactcttgatcaactgggaacctcttacaacacttttaaaaaactgaacagaaaatagggcaaagggcgaggtggcagtgccatgaggcacatggaatgtcctggtctgtggaatcgtggagggtgacaggagcagcatgatcaggcattgtatgacgaggatgacacggtgccaccatggcctgtcccgttggtgtggataaactgccctggtttggccaagagttcataggtgtgagccccgaa

SEQ ID NO: 20901 - DNA, 888 bp, Homo sapiens
  SIMILAR (409)..(840): 361254mologous to Homo sapiens Human secreted protein sequence encoded by gene 26 SEQ ID NO:149,accession number Y91476,Smith-Waterman Score=237.
atggatcctgaacacgccaaacctgagtcatccgaggcaccttcagggaacttgaaacaaccggagactgccgcagccctggcaagtagcggcagcgtagtgagttctgtacccaaggcacagcgcaacatctcagcgaagaccgcaccccggaagcaccccgcagtctcaattcgcagtgcgcagtccgcagccgccgcacgtccccaaggcagtgagggcaccgcaccctcaaggaaagccaccacacgcccacccccaaagcccacactcccaccccccacgccctctgcacacactgaatccaaactcttaaatgagatggcgatcaaagagcgcgtggagggccgagccaaagtcccgtacaaattcagggacagcctcaaacgtttctccttctcgcccactggaatgttgaagatcctgagactggtgagcggagagctgatcttggccctgattgcattcatctgcatagagaccatcatggcatgctccccgtgtgaaggcctctacttttttgagtttgtgagctgcagtgcgtttgtggtgactggcgtcttgctgattatgttcagtctcaacctgcacatgaggatcccccagatcaactggaatctgacagatttggtcaacactggactcagcgctttccttttctttattgcttcaatcgtactggctgctttaaaccatagagccggagcagaaattgctgccgtgatatttggcttcttggcgactgcggcatatgcagtgaacacattcctggcagtgcagaaatggagagtcagcgtccgccagcagagcaccaatgactacatccgagcccgcacggagtccagggatgtggacagtcgccctgagatccagcgcctggacacgtga

SEQ ID NO: 20902 - DNA, 5130 bp, Homo sapiens; identical to SEQ ID NO: 2332
  SIMILAR (2614)..(4473): 941254mologous to Homo sapiens putative p150,accession number U93572,Smith-Waterman Score=3044.

SEQ ID NO: 20903 - DNA, 2241 bp, Homo sapiens; identical to SEQ ID NO: 3056
  SIMILAR (628)..(2232): 911254mologous to Homo sapiens putative p150,accession number U93563,Smith-Waterman Score=2478.

SEQ ID NO: 20904 - DNA, 181 bp, Homo sapiens
  SIMILAR (112)..(180): 1001254mologous to Homo sapiens calbindin D28K,accession number S46006,Smith-Waterman Score=128.
atggaggagaaggaggagaggaaaaggagaaggaagaggaagaggaggagggaagagggaagagatggggaaagaaaaagaatggagaagcaaaaggagaaccaggatcctaaagatccacctacgacctcaggtcctcagaccgaccagcccaagaaacatctcaccaatttcaaatccg

SEQ ID NO: 20905 - DNA, 408 bp, Homo sapiens; identical to SEQ ID NO: 439
  SIMILAR (176)..(301): 881254mologous to Homo sapiens calbindin D28K,accession number S46006,Smith-Waterman Score=198.
  misc_feature (1)...(408): n = a,t,c or g

SEQ ID NO: 20906 - DNA, 667 bp, Homo sapiens; identical to SEQ ID NO: 3060
  SIMILAR (461)..(583): 901254mologous to Homo sapiens calbindin D28K,accession number S46006,Smith-Waterman Score=207.
  misc_feature (1)...(667): n = a,t,c or g

SEQ ID NO: 20907 - DNA, 419 bp, Homo sapiens; identical to SEQ ID NO: 18570
  SIMILAR (91)..(222): 861254mologous to Homo sapiens calbindin D28K,accession number S46006,Smith-Waterman Score=207.
  misc_feature (1)...(419): n = a,t,c or g

SEQ ID NO: 20908 - DNA, 443 bp, Homo sapiens; identical to SEQ ID NO: 9689
  SIMILAR (103)..(141): 761254mologous to Homo sapiens calbindin D28K,accession number S46006,Smith-Waterman Score=45.
  misc_feature (1)...(443): n = a,t,c or g

SEQ ID NO: 20909 - DNA, 436 bp, Homo sapiens; identical to SEQ ID NO: 15035
  SIMILAR (145)..(240): 961254mologous to Human endogenous retrovirus tripartite fusion transcript PLA2L,accession number Z14310,Smith-Waterman Score=169.
  misc_feature (1)...(436): n = a,t,c or g

SEQ ID NO: 20910 - DNA, 717 bp, Homo sapiens
  SIMILAR (594)..(713): 801254mologous to Homo sapiens Human secreted protein, SEQ ID NO: 5210,accession number G01129,Smith-Waterman Score=176.
atgcccctccagccactagcgactccgtttacttcccctggaagcccatcagttgctcaagtgacaaccaacaccggagagccagggttcgcccaacaggagtacgcggagacaccccagacgacagcgcgtcccccccacccccaccccgccctccgggcgctccaggccagcgtccaccagaccccacgcctgggggactgcttgggctctagcgagagtgccacggctctgcacggcagcggggagccgaacaagttagccccgccggggcgccctacggaacgcggtgggcttttcaagtgctcagtccctctgcggacagtgcgaggctgccgggccgggctccgggggaccgagactgtaccttccagccttcagcgccagcccgcgggagacgtaggatggatcaacaacaaaagcaccacagccctagacagaacgccgactgacacccagcggaccaggcgaccccggccgccaaaacagaaacaaagaggcagagcgctcaaggagcggcccagagactccgacagcgcgcgcgaaggcccactgaaggcggtcgcgggcctgtttggtggtctcttcacacggacgtgcatgaaatttggtgccgtgactcggatcgggggacctcccttgggagatcaatcccctgtcctcctgttctttgctccacgagaaagatccacctacgacctcaggtcctcagactga

SEQ ID NO: 20911 - DNA, 908 bp, Homo sapiens
  SIMILAR (360)..(512): 551254mologous to Homo sapiens calbindin D28K,accession number S46006,Smith-Waterman Score=126.
aaggcggaggtttcagtgaccgagatcgcaccatcgcactccagcctgggcaacaaatatggatgtggggaataggcaagcaggtaggtggatgtggctggctgcgtggaaagaacagggtggtgggggcagccaaggatcaatcaggcactggtgagaagttctacttcatcccgaaggcaatgggagccatggagggctctggacagaggagaacattgccagacccaggtgctcacaggaacccttctgggggctacagcgcaacagattgtgaagggagccggcctgcaccaggtgaaataaacagccatgcttctcacacaaagcctgtttggtggttcttcacacagacgcgcatgaaatttggtgccgtgactcggatcgggggcctcccttgggaggtcaatcccctgtcctcctgctctttgctccgtgagaagatccacctaccacctcaggtcctcagtccaaccagcccaggaaacacccaccaatttcaaatccggagcttgtacacgtgccggaaatctggccactgggccaaggaatgcccgctgcccggattcctcctaagccgcgtcccatctgtgtgggaccccactgaaaatcgactgttcaactcacctggcagccactcccagagcccctggaactctggccaaggctctctgactgactccttcccagatcttctcggcttagcggctgagactgacgctgcccgatcgcctcggaagccccgtagaccatcacggacccgagcttcgggtaactctcacagtggaagcggctgctgctgctttaatactttagaggccctcaaaatcacaaactttatcagtcctccaggcccaagttactctttagctgcagttgtcctccaaaaccaccgaggccttgactga

SEQ ID NO: 20912 - DNA, 1101 bp, Homo sapiens
  SIMILAR (351)..(473): 951254mologous to Homo sapiens calbindin D28K,accession number S46006,Smith-Waterman Score=213.
atgggggctgtctgtgaagccttgcagcagtacagcccaggtaatttgctgagcctaactggtgtcaggggggcttccgaggcgatcaggcagtgtcagtcttcagccgctaagctgagaagatctgggaaggagtcagtcagagagccttgggccagagttccaggggctctgggagtggctgccagccttggctgtgatgagaggaaagagcatgagcacatgaatctggccatcagagcctgcctgcaaccaggtgaaataaacagccatgttgctcacacaaagcctgtttggtggtctcttcacatggacgtgcatgaaatttggtgctgtgactcggatcgggggacctcccttgggagatcaatcccctgtcctcctgttctttgctccgtgagaaagatccacctacgacctcaggtcctccgaccgaccagcccaagaaacatctcaccaatttcaaatccgggagagacaaaggagacacgttttatccgtggacccaaaactccggcgccggtcacggactgggaaggcagccttcccttggtgtttaatcattgcagggacgcctctctgattatacacccacgtttcaagggtgtcagaccacgcagggatgcctgccttggtccttcacccttagcggcaagtcccacttttctggggaaggggcaacggctgaagactgacactgcccgattgcctcggaagccccctagaccatcaaggacgctgagcttcagcacagctcccaggattctgtccatagtggtgccaggaagtgggcacactttggcctttctggatgtgacaagacaccgtctttaccgggaaagcaagccagttgtgggggaagaagttgactattcagaatggctatctgatgtgggtaaaagtgagtggtcattctccacttgtgcttcctctacctctgtcaacaagcatgacacggggaggaggctgttaggcaagaggggaggaggaatggaatgcagcaagggcctctgcaattttataactatgacaaagaatatacgctctcttgctcaaatgaccatttggcagtatctctcaccttgccgagagccagtatag

SEQ ID NO: 20913 - DNA, 438 bp, Homo sapiens
  SIMILAR (210)..(329): 921254mologous to Homo sapiens calbindin D28K,accession number S46006,Smith-Waterman Score=199.
atgaaacccagctgtctgaatttagttcttattccaccaattcatagttgtgtgactttggccccacccttatctcccttcactgactcttttcggactcagcccacctgcacgcaggtgattaaaagctttattgctcacacaaagcctgtttggtggtctcttcacacggacgcgcataaaatttggtgccgtgactcggatcgggggacctcccttgggagatcaatcccctgtcctcctgctctttgctccgtgagaaagatccacctacgacctcaggtcctcggaccgatcagctcaagaaacatctcaccaatttcaaatccgagacaaaagggacatgttttatccatgaacccaaaactccggcaccggtcacggactgggaaggcagccttcccttggtgtttaatcattgcagggacgcctctctga

SEQ ID NO: 20914 - DNA, 483 bp, Homo sapiens
  SIMILAR (148)..(306): 831254mologous to Homo sapiens Human secreted protein, SEQ ID NO: 5210,accession number G01129,Smith-Waterman Score=238.
atggcagaggcaatggcaaaattgggatctgagagaaaaaaagagcagggattaattcaggaactgaaacaaaatcagtctctggaactctggtatgagaacaggaaaggcaaaatcaagactggagaatcaggtgatggagagcctgacgcgagtgaaatttggtgccatgactcagatcgggggacctcccttgggagatcaatcccctgtcctcctgctctttgctccatgagaaagatccacctacaacctcaggtcctcagaccgaccagcccaagaaacatctcaccaatttcaaatccgagacaaaggagacacattttatccatggacccaaaactccggcgccggtcatggacttgggtaggcagccttcccttggtgtttaatcattgcagggacgcctctctgattattcacccaggtttcagaggtgtcagaccacgcagggacgtctgccttggtccttcacccttagcg

SEQ ID NO: 20915 - DNA, 915 bp, Homo sapiens; identical to SEQ ID NO: 19777
  SIMILAR (609)..(794): 301254mologous to Homo sapiens lipase related protein 2,accession number M93284,Smith-Waterman Score=42.

SEQ ID NO: 20916 - DNA, 1596 bp, Homo sapiens
  SIMILAR (1000)..(1512): 471254mologous to Sus scrofa domestica polyprotein,accession number U77600,Smith-Waterman Score=426.
atgaataatgatccttacattcctgcatctgcttttggggctcgccctgttaaaaccacagaagctcccccactgagcaccttgagacccctgcccctgcccaccaaagaacaaccccctttgactgtaattttccattaccttcccaaatcctataaaacggccccacccctatctccctttgctgactctcttttcggactcagcccgcctgcacccaatgaaataaacagccatgttgctcacacaaagcctgtttggtggtctcttcacacggacgcgtatgaaatttggtgccgtgactcggatcgggggacctcccttgggagatcaatcccctgtcctcctgttctttgctccgtgagaaagatccacctacgacctcaggtcctcagacccaccagcccaaggaacatctcaccaattttaaatcagacaaaggagacatgttttatccgtggacccaaaactccagtgccggtcacggactgggaaggcagccttcccttggtgtttaataactgcagggacacctctctgattatacacccacgtttcaagggtgtcagaccacgcagggatgcctgccttggtccttcacccttagcggcaagtcccgcttttctggggaaggggcaagctgctcctcgccaggccgagctaggtcccaattcttcctcagcctctgctcctccaccctataatctttttatcacctcccctcctcacacctggtccggcttacagtttcgttctgtgactagccctcccccacctgcccagcaatttactcttaaaaaggtggctggagccaaaggcatagtcaagaccatcacagacgccgagcttcgggtaactctcacagtggaaggccgagacagtttaactaaattatctgcttccctgacgattcctggactacagccacatctcattgccgtccttctccccaacccaaagcctccttcgcgtcttcctctcatatccccctaccttaacccacaagtatgggacatctctactccttccctggcaactgatcacatgcccattaccatcccattaaaacctaatcacccttaccccactcaacgccaatatccaatccctcagcacgctttaaaaggattaaagcctgttatcactcgcctgctacagcatgggcttctaaaacctataaactctccttaccattcccccattttacctgtcctaaaaccagacaaggcttacaagttagttcagaatctgcgccttatcaaccaaattgttttgcctatccaccccatggtgccaaacccatatactctcctatcctcaatacctccctccacaacccattattctgttctggatctcaaacatgctttctttactattcctttgcacccttcatcccagcctctcttcgctttcacttggactgaccctgacacccatcaggctcagcaaattacctgggctgtactgccacaagccttcacagatagcccccattacttcagtcaagcccaaatttcatcctcatctgttacctatctcggcataattctcataaaaacacacgtgctctccctgctgttcgtgtttgactaa

SEQ ID NO: 20917 - DNA, 2206 bp, Homo sapiens; identical to SEQ ID NO: 15055
  SIMILAR (2)..(889): 1001254mologous to Homo sapiens potassium channel homolog; KvEBN2,accession number AF033347,Smith-Waterman Score=1565.

SEQ ID NO: 20918 - DNA, 831 bp, Homo sapiens
  SIMILAR (246)..(329): 681254mologous to Homo sapiens Membrane-bound protein PRO839,accession number Y66669,Smith-Waterman Score=75.
atgacgattaaggcatgtgctgaaagcactgatggaggacctgcacgaaggcaccttacacatgagttccgcttccgctctcttcccacaataaaaaaaaccaatgcttctgagtacctgggttgcccagcgctttatgtgaagacgacaaccagacaagccagacgacaagccagacgactcgggcaaagacccaaaccagacttccccaaattcctaagcctcctgggcacagagatcattgagatgcagtcgagttcatcctccgctccatgtccaggagcacgatttatggaatttgatgatatgaaggaaaacattcatcaaagtgacatcctcagatacctgtccctggacattagagaaagtgaaatatccaaaactggtgaagttacaaattccttcagaaattcaaaaacatcaaaagccaaagttgccattgtagggttcagccacagacctcaggacaacttcatttgtgagcagaagtcctggagttctttgggcatcgagtgggcccgacatgcaaggaagaggcctgtttggtggtctcttcacacggacgcgcatgaaatttggtgcatgactcggatcgggggacctcccttaggagatcaatcccctgtcctccgctctttgctccgtgagaaagatccacctaccatctcaggtcctcagacaaccagcccaagaaacatctcaccaatttcaaatccgattgcaatccgatataagttccggttcggcttaaatcgctatgaggaggtctctagggactatcggtgtgctgtcagaaccgtgcagaccatccagatatatagtggatcgtag

SEQ ID NO: 20919 - DNA, 534 bp, Homo sapiens
  SIMILAR (213)..(266): 1001254mologous to Homo sapiens Membrane-bound protein PRO839,accession number Y66669,Smith-Waterman Score=97.
agaatggctgtcttagtacttcgcctgacagttgtcctgggactgcttgtcttattcctgaccctgctatgcagacgacaaaccagacaagccagacgacaagccagacgactcgggcaaagacccaaagccagacttccccaaattcctaagcctcctgggcacagagatcattgagaatgcagtcgagttcatcctccgctccatgtccaaggagcacaggatttatggaatttgatgataatgaaggaaaacattcatcaaagtgacatcctcaggacacacccatgtggctcctggacaatccaagagcagccaaatcctgcttttccagtttggctccacaagtcctccaggacagagccctcaaagcaactcccaacgagttctcaggattcaggctctggcttcaaccaaacagaactcattttgaacaccctgactgcatttttgcttttagaaagttagaataaatatggcgctttgggatcacatagttgatggagaggaaaaaaaaaaaaaaaaaaaaaaaaa

SEQ ID NO: 20920 - DNA, 1191 bp, Homo sapiens
  SIMILAR (690)..(851): 741254mologous to Homo sapiens Human secreted protein, SEQ ID NO: 5210,accession number G01129,Smith-Waterman Score=192.
  misc_feature (1)...(1191): n = a,t,c or g
atggaaagaataggaagaaaaggaggaagaggaaaagatggaggagaaggaggagaggaaaaggagaaggaagaggaagaggaggagggaagagggaagagatggggaaagaaaaagaatggagaagcaaaaggagaaccaggatcctactcagcccacctgcacccaggtgaaataaacagccatgttgctcacacaaagcctgtttggtggtctcttcacacggacgcgcatgaaatttggtgccatgactcctatcgggggacctcccttgggagatcaatcccctgtccttctgctctttgctccttgagaaagatccacctacgacctcaggtcctcagaccgaccagcccaagaaacatctcaccaatttcaaatccggctgctcctcgccagaccgagctaggtcccaattcttcctcagcctccgctcctccaccctataatccttttatcgcctcccctcctcacacctggtccggcttacagtttccttccatgactagccctccccctcctgcccagcaatttactcttaaaaaggtggctggagctaaaggcacagtcaagaccatcacggacatcgagcttcaggtaactctcacagtggaagcccgcctgcgcccaggtgaaataaacagctttactgctctcacacaaagcctgtttggtggtctcttcacacggacgcgcatgaaatttggtgctgtgactcggattggggggacctcccattgggagaatcaatcccctgtcctcctgctctttgctccgtgagaaagatccacctatgacctcaggtcctcagaccaaccagcccaagaaacatctcatcaatttcaaatccggaccccactggaaatcggactgttcaactcacctggcagccactcccagagcccctggaactctggcccaaggctctctgactgactccttcccagatttactcggcttagcggctgaagaccgatgctgcccgatcgcctcggttgaagccccctagaccatcacggatgccgagcttcgggtaactctcacagtggaagaggccaggctaacagggactgctgatggggaaataagaattatcaaggatgaatcctatatctgggggcttgagcaaatacgttcaagtcctgacactggtacctgtgaatgtgatcttatctggnaagagagactttt

SEQ ID NO: 20921 - DNA, 685 bp, Homo sapiens
  SIMILAR (467)..(429): 691254mologous to Homo sapiens calbindin D28K,accession number S46006,Smith-Waterman Score=41.
tggcctgacattcctgccttcttccactgtgagagttacccgaagctcggcgtgcgtgatggtctagggggcttccgaggcaatcaggcagtgtgagtcttcagccgctaagccgagaagatctgggaaggagtcagtcagagaaccttgggccagagttccaggggctctgggagtggcttgcccaaggtgagttgaacaagtccgaattttcaagtggggtcccacacagatgggacgcggcttaggaggaatcccgggctgcgggcgttccttggcccagtggccagatttccagcaagtgtagcaagctccggatttgaaattggtgagaatgtttcttgggctggtcggtctgaggacccgatgtcgtaggtggatctttctcacggagcaaagagcaggaggacgagggattgatctcccaagggaggtcccccgatccgagtcacggcaccaaatttcatgcgcgtccgtgtgaagagaccaccaaacaggctttgtgtgagcaataaagctgtttatttcacctgggagcaggtgggctgagtcccagctcccttcagtcagtggccgagagatgttcagggacagctgtggctgggacctgatgatccaccagccctggggcaaggcacagtcaggcacattgattccaggctttggtaactgggggatgttggtg

SEQ ID NO: 20922 - DNA, 718 bp, Homo sapiens
  SIMILAR (547)..(711): 921254mologous to Homo sapiens Amino acid sequence of Smad3 interactor protein clone S3+103,accession number B07860,Smith- Waterman Score=258.
ggcgaagccagctgctggaggtgccgagaatctgagtttcggcaagcagccagaatattttaaaaatgactacaccaaacaagacacctcctggtgctgaccccaagcagttggaaaggactggaacagtacgggaaattgggtcacaagctgtttggtcactctcatcttgcaaaccaggatttggagtggatcagttacgagatgacaatctagaaacttattggcaatcagatggttcccagcctcatttagtgaacatccaattcagcaacttgagttggtggaaccaagtggcttggattcatgttcccttaacttgacaatcataaggaggccacttcgtacattcatgatacagattgctgttctagccaatcaccagaatggaagagacacccatatgagacaaattaaaatatacacaccagtagaagagagctccattggtaaatttcctagatgtacaactatagatttcatgatgtatcgttcaataaggtgcctttaaaatgagacgaaaatcattaaacgtatctttgttttatcctgtatttaaataatatatcatgtacctttattgaacaaggcatccgttatatctaattttgtatatgtttaaaaatattttattgtaactttgacaaataaatttggggtcatattatctttattttctttaacatgtaataaagctcacatattttacattactaaa

SEQ ID NO: 20923 - DNA, 896 bp, Homo sapiens
  SIMILAR (4)..(456): 661254mologous to Homo sapiens Amino acid sequence of Smad3 interactor protein clone S3+103,accession number B07860,Smith- Waterman Score=463.
atgacgtcattgagctgcgacccttgttcaacgccgttggcgaagccagctgctggaggtgccgagaatctgagtttcggcaagcagccaggtctggaaactaatattttaaaaatgactacaccaaacaagacacctcctggtgctgaccccaagcagttggaaaggactggaacagtacgggaaattgggtcacaagctgtttggtcactctcatcttgcaataccatgattcgtagtggaacacactagaatgaacaatctagaaacttattggcaatcagatggttcccagcctcatttagtgaacatccaattcagaagaaaaacaatgagtgaagacattatttttttatgcatactacacattttgatgaaagtctatctctcttcaagatctcagtcagagtaggaaataattttcacaaccttcaagaaattcggcaacttgagttgggtggaaccaagtggctggattcatgttcccttaactgacaatcataagaagccaactcgtacattcatgatacagattgctgttctagccaatcaccagaatggaagagacacccatatgagacaaattaaaatatacacaccagtagaagagagctccattggtaaatttccctagatgtacaactatagatttcatgatgtatcgttcaataaaggtgactttaaaatgagacgaaaatcattaaacgtatctttgttttatcctgtatttaaataatatatcatgtacctttattgaacaaggcatccgttatatctaattttgtatatgtttaaaaatattttattgtaactttgacaaataaatttggggtcatattatctttattttcttcaacatgtaataaagctcacatattttacattactaaaaaaaa

SEQ ID NO: 20924 - DNA, 484 bp, Homo sapiens
  SIMILAR (311)..(340): 801254mologous to Homo sapiens Amino acid sequence of a human secreted protein,accession number Y30713,Smith-Waterman Score=45.
atgcagatggaactagctggaacttgtagagaccaagtccgaatcaggtgcctgggaatgcagattgttaaactggcagagaagaagcggatagtattgaaggagtcaatatttgctgtgctcacaagcgtcttgacaaaggatgactggtggaatcttctgttgaaggccatatactccttatgtgacctatcccgatttcaagaggctgagttgcttgtagattcctcattggaatattactcattttatgatgacaggcaaaaacgcaaagaactagaatactttggtctgtctgctgcattctggacaaaaattcagaaaggcatacaactatatcagtttctctctcggtttgaaactgctttcttagagcttctatgcgttcagatgcaattctgcttccactttggactcttcagtcatccggtctctgttttgaagaagagaggtgataagtcacctttagaaatcattttaggag

SEQ ID NO: 20925 - DNA, 3547 bp, Homo sapiens
  SIMILAR (74)..(1954): 881254mologous to Homo sapiens transcription factor IIIC102,accession number AF133123,Smith-Waterman Score=2741.
tttcgtctggaaggcgctgctcttccggttctctgtcccggttcctggggttgcacagacagaccctgtaaacatgtcagggttcagtccggaactcatcgactacttggaagggaaaatctcctttgaggagttcgaacggcggagagaagagagaaaaacccgcgagaagaaaagtcttcaggaaaaaggcaagttatcagctgaagaaaatcccgatgactctgaagttccatcatcatcaggaattaactctaccaaatcccaagacaaagatgtcaatgaaggagaaacatcagatggagtgaggaagtcagttcacaaggtctttgcttccatgcttggagagaatgaagatgatgaggaggaagaggaagaagaggaggaggtggaggaggaggaagaaacacctgagcaacccactgcgggcgatgtatttgtattggagatggttctcaatcgtgaaaccaagaaaatgatgaaagagaaaaggcctcggagtaaacttcccagagctctgagaggtctcatgggtgaagccaacattcgttttgctcgaggagaacgtgaagaggcgatattgatgtgcatggaaatcataagacaagctcctctggcttatgagccattctctactctagccatgatatatgaggaccaaggtgacatggaaaaatcattgcagtttgagttgattgctgcgcatttaaatcccagtgacacagaagaatgggttagactggcagaaatgtctctggaacaagacaatattaagcaggctattttttgctatacaaaagctcttaaatatgaacctactaatgtccgttatctgtgggagcgatcaagcctttatgaacagatgggtgatcataaaatggccatggatggttataggcgtattttaaaccttttgtctccatctgatggcgaacgttttatgcagctggctagagatatggcaaagagttactatgaagccaatgatgttacttctgctattaacataattgatgaagctttctcaaagcaccagggcctagtctccatggaagatgttaacatagcagctgaactatatatttctaacaaacagtatgacaaagctttggagataattacagatttttctggaattgtgctggaaaaaaaaacttcagaagaaggcacctcagaagagaataaagctcctgagaatgttacctgcactatacctgatggcgtgccaatagatatcacagtgaagttgatggtctgccttgtacatctcaacattcttgaaccacttaatcctctcttgacaacactagtagaacagaatcctgaagatatgggagacctatacctagatgttgctgaagcttttctggatgttggtgaatataattctgcacttcccctcctcagtgctcttgtttgctctgaaagatacaaccttgcagtagtttggcttcgtcatgcagaatgtttaaaggccttaggctatatggagcgagctgctgaaagctatggcaaggtggttgatctggccccactccatttggatgcaaggatttcactttctacccttcagcagcagctgggccagcctgagaaagctctggaagctctggaaccaatgtatgatccagatactttagcacaggatgcaaatgctgcacagcgggaactggaagttattgcttcatcgttctactctgttgttttcacaagggcaaaatgtatgggttatgtgggatacctttacttactatgttaggccatggcttttttaaagggtaggcaatggaatcgaggcccaagtttgtttgatatccagttccaggtctgggagagaggcatctttatcttattaaagtatcgagagacaaaatatcagacagcaatgaccaagagtcagcaaattgtgactgcaaaagcgatattttgctgtgctcacaagcgtcttgacaaaggatgactggtggaatcttctgttgaaggccatatactccttatgtgacctatcccgatttcaagaggctgagttgcttgtagattcctcattggaatattactcattttatgatgacaggcaaaaacgcaaagaactagaatactttggtctgtctgctgcaattctggacaaaaatttcagaaaggcatacaactatatcaggataatggtaatggaaaatgtcaataaaccccagctctggaacattttcaatcaagttaccatgcactcccaagatgtacgacatcatcgcttctgtctccgtttgatgctgaaaaacccagaaaatcatgccctatgtgtcttaaatggacacaatgcatttgtatctggtagttttaagcatgcgcttggacagtatgtgcaagcctttcgcactcaccctgacgaacctctctatagcttctgtataggcctaacctttattcatatggcatctcagaagtatgtgttacggagacatgctcttattgtacagggcttttcctttcttaatcgatacctcagttttacgtgggccctgccaggaatcattctacaatttggggccgtggccttcatcagttgggggctgattcatcttgcaattccacttattatccaggaagggcccggggagctccctccacttgtggttaggaggggtattaggaacttggaccagttagacttacggaggagtttattgcctacaacttgttctctcatctattcagagcagtggggaattaccggaatgggctcaaacgcttttgtatacctattggttctatattaaagcacccgcaactgagaacagagcaatggcagctgccgtgtgaggacccagtgtcctcctgtcctcagggcttaattaatttgtaactcccaaaatagaaatgacaatttcagaattacctaacaaacagtgtatttatttttaatatgtgataatgatcttgtggtatatatgcaaaattattcctacaaaaatttgtatattggtctgtcattttcctttcacattctatagtgaattgttcccaatgttgaaatggacgtgtaagcctttgagctagcttggagtcgaatacactatttttcactcacaccatttattcatctttgtatttaatacctatagctctgtcaatatcacatgaggcagtttttcaaatacgtataaacagaggttgcttattattaaaggaaagacaaagtgggactctttatgatgtcatgacccatgataactaagcacctaagaaaattatttaaactagttatcgtggtaggcagaaagacaaataatttagttttttacttttcaccagcatgtatcttagctaccttaaactgaaacatgggaggctgggcttaattcaaaatatattgctccaaggcaaataaaaaaatgctttatctatatttgtggctttctgatgaaaaaatagagaagagcttgttcaataacaggacatggtttccatttcaagatcacaagtaatataagactgggcaagtagtacgtatggaataaaggacatactgctgattgataaagtaaaaaaa

SEQ ID NO: 20926 - DNA, 4350 bp, Homo sapiens
  SIMILAR (292)..(498): 921254mologous to Homo sapiens Ras-associated protein Rap1,accession number AF178983,Smith-Waterman Score=330.
tcctctacgcccccgagcatgcccgggtctcattcgatgtgtgcggctccgcgaacgaaactacccgacctttttgacctttccgttgccccctcgtcctccgacgccaatcttccggatatggtggctggggtggcctctacaccttgaatgtacccccatgacagtaacaaggcctgggtccccatgaggggccgacgacctacagaccttgcacgcgttctacggggccgttcgggaccgcgagatggaggatgatagtttagttcccccagccgggcctgggagccggcggaacgatatgggagctgtattatccagcgatactgtgagaaaagattcgtgtctaaatacctggcaacaattggtattgactatggagtcacaaaggtacacgtccgagactgagaaatcaaagttaacatctttgatatggctggacatcccttcttctatgaggttcgaaatgagttttacaaggacacacagggtgtgattactggtctatgatgttgggcagaaagactcctttgacgcccttgatgcgtggctggcagaaatgaagcaagagcttgggacctcatgggaaacatgggaaaatattatatttgtagtttgtgccaacaagattgattgtaccaaacatcgctgtgtaggatggaaagtggaaggacgtctttggggctggaagcaaaagggttcctgttacttttgaaactttcaggcacaaactgggaggagggctttattgaggtgtttccagaccttttatatatccatagttgatttatgtgaaaatggcgggaaacgccctaccaccaatagcagtgctagtttcaccaaagaacaagcagatgccattcgcagaattcgaaatagtaaagacagttgggacatgctgggagtcaaacctggggcctcaagggatgaagtcaataaagcgtatcggaaacttgctgtgcttcttcaccctgacaaatgtgtagcacctggcagtgaagatgccttcaaagcagttgtgaatgctcggacagccctcctgaaaaacatcaagtagaaagtacagaaaaaagccacatgtgggactcaaatgcaaacagactttccctagaggtgaaataaccaacggggaggttttcttcccaaaaatctcactgctcttttcattcatgtgttggcatttgtatatcagtaattcaggtacccatttcatagacattttactgagaaatgacctgcatttgtatgaagtgaactgagcgtcacaccctgtacttcatttcatatttctagataattctgaatttttttctcattcgtcagctctgtaattatagtatcacttagacatttcacttggggaaatccacaaggttcctggagggagggaagagaggacaaaaggaccctttcactttttcttttttacggaattcatcatcagagaagaaaataacaaaaatggaagcaaacaacatcagaacccctgtaagtttggtgtgaccttacagacaagttgctgcttttacaatgagttccttaggtggtattttaacccatcgatctaataatgatgaactcctgggccaacccctttgggaagttttgtaaaaaatgaaggtgaataacagttcctgaaattgagcaatccccttttatgaatattcactctgttccctcttctgcagcccacccagtgggagagacaagcccagtccctaagagaaaaggtggtggcagccacaaattctaggtacactggctgctgccctatcctgtcccctggatctgaggcctttcccttgccatagaaatggttgctggtagcagtagagagcactgtgcacctgggaatgaggaatcaggccccaagacagaagtacttggaggagccagctgcagtagtatccgcctgtagtcccagctactcaggaggctgagacaggaggattgcttaagcccaggagctcaagtcccacctgggcaacatagtaagatcttgtctcttaaagaaaaaaaaaaaaggtacttagaggtcgcacttaaagattatgcacatcagcagaggaaaggccagccaagcttggggcaagcttgatgcagtaggagagactccttatgaggcttagcccttgtcttactgccagcctttgccacaggcaggtgagaaaggcagggccactcctcagcaaagttggcctcttctacacttcctcaccagtgttgtttcttccttttttcccctcttccccttcccgtcttgtgttttttctgaaccccacatctgccatcatttctctcctctagagtccctggcttctggccactgcctcctccctcttctaagccttggcctgaatctggttgatcagaggcaagtgtggatcctttgggtggcagtcaggggagatctcagggcctctgttgggaggaatctctgtaattcctgcttgggctccaaatttctgaagagtaatatttttaaactatagcttacaaaatacattctctgaccacagtctcctccttgatatacaagggatggatgaagttcatgtattaggactggcactccttacggtgcttatagaactagtctcaccacttgactcattacgtcgtcattcttgttacatcactcatacttttagctgcaaccacactaattcacatttttatatactttcaattagctgtactaattggggcttgaaagtatataaaatcttcctgtcctgtgaattttaaaaagctatcccatatcgattgccaaagagcatctaccttacctcctaagaagaaaagccactttcttccaatccaagcccactgcagccttgtggattttccacacagcagcttttcactgtatgcctgtacttgggctgcactgagcttgtcttcaggaaaccagagcgttgctttatcatcgcacttttcatcttggtaatatcaaaacaactttttaaatgaactgattgatatatgttatttcttgcgaggttttcctctggcctttaactggcttctgaggctacagaactccaacccagagttcttcgggacctaaattttgcttaaggaaggcctttatcatgctgaaagcactcagacatgtctgtcctcacagcagaatgtagaagtcatatgaatgagggatcgtgcacggtagcgtcagcccgaattgacacgacaactctgaatgtgtggcccactatgaaagctggtgccagttttcatcactgttattaaatactagattgggaacctcattcagccgtattgcacagatgagcaattacagcagagaaaattcattagtgctcccactcatatccttatgtgtgagttggtgaaatttagcctgagcttgattcttaggtcttgagactcagtttccaacaccttcattattaatgttaagaatggccatataccacttcatttacgtaaaaggaataaaataagcaagttaagcttcagggtcctagaatttttctgatttctataatccttcagcagaatattaagaaataaagcatgatctgcaatggaaaggtttttttggcactaacttcatgcagaatttcacagacatctatgcattaatttaaattcttggtgcaaatgtgtgctttgtagttcaaccttattaaaaattcttcagccagttaggatttcaaaatacattagtgagagtaacagctagcagaataattacaatggctaaaacgtttttatagagaatcttgtttttcaaaaaagaataaaaagtttgaatagctattattaaagaaaagccatgtcttcaacatctgagtcaccaagaagtaacactttttaaacttgttagaaatccctggaggcatttccaaattccatcttctaacctaccttaggcacttttaaaatacagcctccttcgggtccctctggttcccccttcaggcctccttttggaaatggatatctcagctgtccaatatttctttggacttccagccattgttattttatttctctatatcaatgtgtccttagttttcttagcctgttaatttaaaaatcccagacttgggggtcattgtgttgcttacccaagagaaaaatgttacagttttatagattgcacatcattctttaaggcatacttttacctcaggaaacttactctagtatgttctcatatattgaattctcaactaagtaactatttctttatacctataaactagtacctaattcactgttagttaaatgagctatagataaggcagctaaattttctgaaagatagccagagtaagtaagcagccactgcaagctctgaatcagttttttaaaaaaaag

SEQ ID NO: 20927 - DNA, 807 bp, Homo sapiens; identical to SEQ ID NO: 12119
  SIMILAR (1)..(465): 901254mologous to Homo sapiens ART-4,accession number AB026125,Smith-Waterman Score=750.

SEQ ID NO: 20928 - DNA, 1803 bp, Homo sapiens
  SIMILAR (620)..(519): 411254mologous to Homo sapiens ART-4,accession number AB026125,Smith-Waterman Score=46.
  misc_feature (1)...(1803): n = a,t,c or g
tttttttttttttttttttaatggtagttcttagttttattataaccttgtattttctggcaaaaatataaatctaaaatgcatgatctctgggcacacagctcaagtaacacccttgatgatgacctaagcagcataaatttggccgatttatttaaatgcacaggaggttgcagccgcatttattaaaaaaatattatcctttggaaattcctttcttgaagattggctcccagggcggttggtctttctgtttttactgcaattgcacttcctttggcagggcagccaggcgctccgggtgctcacaggccatgggacaagtccaagttcccttcaagaaccaagcggggcaatgggcggacaagagccgcacccgttgaaagcccgcctgttaatttccaatcgggtgggtcctggaagacgacacgggctgggggaaatggggtcaccgggaaactccacggcgggccaaacgcccaatccaaattttgccctgcgggaaactcgctcttcaaccttttcttccacaaacttctttctggaagcgttgggatttaagcgtcttccgcccagctcccaaggtgctgtccccggacctgcagggtagctgagcgggttggagatgtcattctccgacaaagggtgacaccccggcgatgtagtcaggggcgaacacgttggttttcctgccctggcccttttgggaagagtccgccagctgagggaagcgctgatcctcggtgagatgggggttgatggcgtatttgccccctttgggagtgggaagcgagtaccggaggccgcgggggttcagcaccttggggttgcgggagaagtgcatgtgcagggtgccgtcgtcgctgacggtcacggacactttcttcagggtcttgttcccacagtgtgagcagaacactcgggttcatgtcaagacgttgtcttgaaacagccatggcagcgcaaagatgtagctcccgggcctcacgaatcagcatgccgttcaccgccagcacgtgcagccccatctgcagcagaacattcgtgcatggcgaagtctggtggtcaggcaagccaaacccgcacgtcctcggggacgtcaaaactgctcaagctcctgctggatctgcttgatgttactgggggttcatccagccacccccgtcgtcatcgctgtcatcttttctgtcttcaaacccgttttcttcctcctcctcctcctcacttggaacgtcctcacctctgtcaatcagcagctcctgcagttcatgatcggatgttgggcaaagggtttctccagaacatgaaggaactaaattccaggttctcaggctcacaagctgagtgtcctttttctgtttcttgtgggggttttaggcttgtagggcaagattggaaaccaagaaatgtgcagagggtgtttctggggtgctgaatcgatgagctcacctttaacctttcttgtggttcttgttttaggtgagaacacccccaacaaactctgctttccaactggtatgtggagtgcaagcacttggatgtccgtggcagagaggctggggtagtctcctgttttctttgaaaactcagtcaccaaccggcacgtattccgggtaagggctccttgaaccgcaggntcgtaggggcaggacagcgagccgcctgcgtgtggccttgtcccgaatctcaggtgacccacctcccggatggtgtaaatgttcttcccgatgtcctgcagagccgcatgccgcaggaaagccccagcatccgccacaacgtgctccactggagccatgttggctg

SEQ ID NO: 20929 - DNA, 381 bp, Homo sapiens
  SIMILAR (318)..(241): 341254mologous to Homo sapiens Human secreted protein, SEQ ID NO: 6140,accession number G02059,Smith-Waterman Score=43.
cctttttttcttttttgatggtgttccctgagcggttgctgcgggtgatggatactcttctgatactggctcttcgtgctataatttcttttctcaccaagagcaggtgccctttcagaagggaaaacgccaacgccgacgccttctccaacaaaagatggcctcggactcaagagtgcggctccagggcaatgcagccccaacctaaagatttagaggcctcccgtttcgctggcccccagagccgcccaccgcgactgcacttccccaccgataaaaggtggtttccagggtacctccctcagatggcggcggcggctcccgacggcttcctaaccagaatccctcgcgggcggcggctctcgccagcgcggcacgaaa

SEQ ID NO: 20930 - DNA, 3147 bp, Homo sapiens
  SIMILAR (382)..(1251): 841254mologous to Mus musculus ES18,accession number AF083929,Smith-Waterman Score=1285.
atggcaaagatcagtgccagtagagcagagaaagttttggagcatccaggagagagagagaagggcagagagatggcatctccctggaatcattccatccttgccctggcagctgtggtggtcattataagcatggtcctcctgggaagaagcatccaggcaagcagaaaagaaaagatgcagccaccagaaaaagaaactccagaagtcctgcatttggatgaggccaaggatcacaacagcctaaacaacctaagagaaactttgctctcagaaaagccaaacttggcccaggtggaacttgagttaaaagagagagatgtgctgtcagttttccttccggatgtaccagaaactgagagctacatctccgtcgtgaacatggccctgccaccattcttcggccagggtcgcccaggcccaccgcccccgcagccgccgcctcttgctcttttcggctgtccgccaccgccgctgccctccccggctttcccgccgcctctcccccagcggcccggcccttttccgggggcctccgcccccttccttcagcctccgctggctctgcagccccgagcctccgcgcaggcctcccgcggcggaggcggcgctggcgccttctacccggtgccaccaccgccgctgcctcctccgccgccccagtgtcggcccttcccggggaccgacgccggcgagcggccgcggccaccgcctcccggcccggggccgccctggagcccgcggtggcctgaggcgccgccgccgccggccgacgtgctcggggatgcggccctccaacgcctgcgcgaccggcagtggctggaggcggtgttcgggaccccgcggcgggcaggctgtccggtgccccagcgcacgcatgccgggcccagccttggcgaagtgcgcgcgcgattgctccgggctctgcgcctggtgcggcggctgcgcggcctgagccaggccctgcgcgaggccgaagccgacggcgcggcctgggtcctgctgtactcccagaccgcgccgctgcgcgcggaactggccgagcggctacagccgttgacccaggctgcctatgtgggcgaggcgcggaggaggctggagagggtccggcgccgccggctgcggcttcgcgagagggcccgggaacgcgaggccgagcgggaggcagaggccgcgcgggcagtggaacgcgagcaggagattgaccgctggagggtgaagtgtgtgcaggaggtggaggagaagaagcggtttttctgtgagattctcacagatgaattggtgctgtgggaaccatctggcagaccccagccacaacagctgcaaatccttacagccatgtctaccagcactttctatgacaaggagctgaagacggcaagggaaaacaaagaagaagagttaatcgacaaactggaggtggtcacaatgccttccccatcaccaaaaggactgccagtgaagcaatatgctgtgcagtctcagcttcccgtatatgagtggccggatgtgggatctggagaatatgatgttggagtagtggcttcgtttggccgacttttgaatgaggctcttattcttaaatttccctactccgcacttggcggctcaggctccccggcgccactcaccagacttgccagccccgcggcgccccaggatggccaggttgacctcgaggggcgcgctctgaggcccgctgcccgcgcggggttttccaaacaccgaggacatggcgacgccctggacggccacgcaggtctgcggccggaactccatgctccactgactgttgttgcagatgggcttttctccaagttcaggaaaagcctggtctccaataaagtttctgtatcatctcattttgtcggctttcttatgaagcacgacttcagcctggagaggacggcactcttctgggtggaggccgccggccagggacccagcccgtaccagtgcggtgacccggggacagcgtcagcccctccagcctggctcttgctagtcagccccgaacatgggctggcgcctgcgcccaccacaatcagagacccggaggccggacaccaggagaggccggaggaggagggtgaggacgaggcagaagcctcctctggcagcgaggaagagccggcccccagcagcctccaaccgggctccccggcgagccccggccccggccgtcgcctgtgctcgctggacgtgctacgcggcgtgcggttggagctggcaggggcgcggcggcggctctccgaggggaagctggtctcccggccccgcgccctcctgcatggcctccgcggccaccgcgcgctgagcctgtgcccgagccctgcgcagtcccccaggtctgcatcacccccggggcccgcgccccagcaccccgccgcccccgcgtcgcccccgcggccctccacggcaggcgccatccccccgctgcggagccacaagcctacggtcgcgatatacataacaacaaagcgcttaccctattttccaattgtaaactttctatttttgatcgctcagttgccaaaacttcaatacaacaaaaatgtggccctgaccgtgaagtttctgaccaagaggtttatcagtgaatatgaccccaacttgggaatggtctgccgaaaaccgaccgacccggttgattggccaccacttgtcctgggactgctcactttgatgaagcagttccattcccggtacaccgagcagttcctggcgctgattggccagtttatctgctccacggtggagcagtgtacaaggcaagtcaccaaggcagagggtgtggctttggcaggcaggtttgggtgcctgtttttcgaggtctctgcctgtttggactttgagcacgtgcagcatgttttccacgaggcagtgcgagaggcacggcgggagctggagaagagccccctgaccccccccctcttcatctccgaggagagggccctgccccaccaggccccgctcaccgcgcggcatgggctggccagctgcaccttcaacacgctctccaccatcaacctgaaggagatgcccactgtggcccaggccaagctggtcaccgtgaagtcatcccgggcccagagcaagcgcaaggcgcctaccctgactctcctgaagggcttcaagatcttctga

SEQ ID NO: 20931 - DNA, 2586 bp, Homo sapiens
  SIMILAR (1378)..(1677): 961254mologous to Homo sapiens squalene epoxidase,accession number D78129,Smith-Waterman Score=480.
atgcctgagaaagcagggcgactaccgcacccggatatggaaattccaggacgggttgagcaacgtgttggttgtacaattgaacaaattaatcatatgcgtgatgtgtttgggacgcgattgctacgtgctgaagacgtatttccaccggtgatcggggttgctgcccataaaggtggcgtttacaaaacctcaatttctgttcatcttgctcacgatctggctctgaatgggctacgtgttttgctcgtggaaggtaaactgaccaccgatccacacctgatgctccgactggacattgaaactgttgctcatgactatgatgtcatagttgttgacagcgcgcctaacctgtgtatcggcacgattaatgtcgcatgtgctgctgatgtgctgattgttcccacgcctgctgacttgtttgactacacctgcgcactgcaccttttcgatatgcttcgagatctgctcaagaacgggatcgccaaaaaatcattttactgggcaagaaaaacatctcattcctttgtcgtgaatatccttgctcaggctctttatgaattattttctgccacagatgcagaaggagcctctccccatggccaccagtgctccaggcctgcagtgagtactgcctggctgctgctggtgttcactcaaggctccagggctcttcagtcagctggtggtgaatgctgccagacctgggtctctcccttcagtacaatgggctcccctctcacccaggacggatccaaaaatgctgtccaggttgccaagcttactcatgctatttccatttttactgaaggcatcttaatgatgaaaacgactttggttggcatcatcaaggtggatccaaagcagttgctggaagatggaataaggaaagagcttgtgaagcgcgttgcctttgccctgcataggggactgatattcaaccctcgagccaagccaagtgaattgatgcccaagctgaaagagttgggagcgaccatggatggattccatcgttcttttgaatacatacaggactatgtcaacatttatggtctgaagatttggcaggaagaagtatctcgtatcataaattacaacgtggagcaagagtgtaataactttctaagaacgaagattcaagattggcaaagcatgtaccagtccactcatattccaatacccaagtttacccctgtggatgagtctgtaacgtttattggtcgactctgcagagaaatcctgcggatcacagacccaaacccctattccagtcacgggggtcctgcacttgtcaactcatattctgaccctttagggcaagggtccctaacccctgcgctgcagactgataccggtctgtcactcgtgaggaacctgaccgcacagcaagaggaactccatgctccactgactgttgttgcagatgggcttttctccaagttcaggaaaagcctggtctccaataaagtttctgtatcatctcattttgttggctttcttatgaagaatgcaccacagtttaaagcaaatcatgctgaacttattttagctaacccgagtccagttctcatctaccagatttcatccagtgaaactcgagtacttgttgacattagaggagaaatgccaaggaatttaagagaatacatggttgaaaaaatttacccacaaatacctgccacttacgcctttcgagtggagtttagtccatctacattgaatgttattattgcagaaggagcctctccccatggccaccagtgctccaggcctgcagtgagtactgcctggctgctgctggtgttcactcaaggctccagggctcttcagtcagctggtggtgaatgctgccagacctgggtctctcccttcagtacaatgggctcccctctcacccaggacggatccaaaaatgctgtccagggatgctctaaaataaaatcttcattacctctcttcataggtgttcttcttttgggagacgcatataatatgaggcatccacttactggtggaggaatgactgttgcttttaaagatataaaactatggagaaaactgctaaagggtatccctgacctttatgatgatgcagctattttcgaggccaaaaaatcattttactgggcaagaaaaacatctcattcctttgtcgtgaatatccttgctcaggctctttatgaattattttctgccacagatgagcatatacggccttctaaagaaccttgttccagtcctgcaaagtatcgtcacctagctagcactgtaactgtgacttcagaaggtcattctgccattctattaagccagctgcttcaggatgatgggaaacaagctgctactctgactggacggccaccatattttgggtctcctggaatcaatgtcagttcagagccagttgtcagtagttccctgaaagttctgattatttctctttccccaatgcgcagttaccctagtaaaaggccggagttcttaaagcagctcctgaagatgtcccttgaaattatgtctagggcagcaaaaggaaaagtcaaagtaattcttaaaatgattcaacccaaggtgaatctcagttga

SEQ ID NO: 20932 - DNA, 3089 bp, Homo sapiens
  SIMILAR (1036)..(2724): 381254mologous to Homo sapiens squalene epoxidase,accession number AF098865,Smith-Waterman Score=554.
  misc_feature (1)...(3089): n = a,t,c or g
cggacttctcgtcctgggacactgtttactggagtctggccggctctccgtgctcctcttggtacctcattttggggagaaccttaaacccactcgagcagataatctccgccttgaccggtgccaccaaagaagccttggaaccaccttttatcggtggggaagtgcagtcgcggtgggcggctctgggggccagcgaaacgggaggcctctaaatctttaggtggggcccttttggggcccaaccttttggggncccccccncctgagaagccgcactcttgagtccgaggccatcttttgttggagaaggcgtcggcgttggcgttttcccgaggttgggctgtacagtgtctccgtccgcgggaaaaagaagcctctgaatcccgcgccggcccgcagcccccgctcgcttccggccgctgctcgccgtcgcccagaggctaggccacgtttcccccagtgccgaggggtttcttgtgacccctcccctccaactcccaattcccttctgaaagggcacctgctcttggtgagaaaagaaattatagcacgaagagccagtatcagaagagtatccatcacccgcagcaaccgctcagggaacaccatcaaaaaagaaaaaaagggaatatctggatttcctgggcgaggaggagcgagtctgctcgggagctgttccagcaggcgatttttaaatactgctttctacgccctatacaacttggcttcacatacttttacactaactttatatgatttttaaaaactggtctgatcggacttctcgtcctgggacactgtttactggagtctggccaggctctccgtgctccgtcttggtacctcattttggggagaaccttaaacccactcgagcagataatctccgccgttggaccggtgccaccaaagaagccttggaaccatgtgggacttttctgggcattgccacctttcaccctatttttataagaagttcgggggacttcatcactttgggccaacagggaggtcctggttggtgcgtgctgggtgttcctctcgctggggccgggggcttctcctaccgctgtcgccaccagaaacgggggtctcctcgggcgccagcagagcggctcccagttcagccctcttctcggatattctctcaggcctgcctttcattggcttcttctgggccaaatcccccccttgaatcagaaaataaggagcagctccgaggccaggaggcgcagaaaaggaaccaatatttcagaaacaagcttaataggaacagctgcctggtacatcaacatcttctcagaatgacccagaagttatcatcgtgggagctggcgtgcttggctctgctttgggcagctgtgcttttccagagatggaagaaaggtgacagtcattgagagagactttaaaagagcctgacagaattagttgggagaattcctgcagccgggtggttattcagtttctcaaagaccttggtcttggagatacagtggaaggtcttgatgcccaggttgtaaatggttacatgattcatgatcaggaaagcaaatcagaggttcagattccttaccctctgttcagaaaacaatcaagtgcagagtgggaggagctttccctcacgggaaggttcatcatggagtctcccggaaagcagctatgggcagagcccaatgcaaagtttattccaaggtgttgtgtttacagttattagaggaagatgatgttgtgatgggagttcagtacaaggataaagagactggagatatcaaggaactccatgctccacatgactgttgttgcagatgggcttttctccaagttcaggaaaagcctggtctccaataaagtttctgtatcatctcattttgttggctttcttatgaagaatgcaccacagtttaaagcaaatcatgcctgaacttattttaggctaaccccgagtccagttctcatctaccaggattttcatccagtggaaactcgagtacttgttggacattagaggagaaattgccaaggggattttaaagagaattacatgggttgaaaaaaattttaccccacaaaataccctggattcacctggaaaagaaccattcttagaagccactgacaattctcactctgaggtccatgccagcaagctttctttcttctttcataagtgaagaaacgaggtgttcttcttttgggagacgcatataatatgaggcatccacttactggtggaggaatgactgttgcttttaaagatataaaactatgggagaaaactgctaaaagggtatccctgacctttatgatgatgcagctatttttcgaggccaaaaaattcatttttactgtgcatagaaaaacattctcattccttttgtcgtgaatatccttggctcaggctctttatgaattaatttcttgcaacagatgatttccctgcatcacctaagaaaaaccctgttttttttatttcaaacttgggtggcgaatgtgttgcgggtcctgttgggctgctttctggtattgtctcctaaccctctaagttttaattgggacacttctttgcctgttgcaatctatgcccgtgtattttgcctttaagtcagaaccttggattacaaaaccctcgcgccctcctcagtagtggtgctgtattgtacaaaggcgtgtcctgtaatatttccctctaatttactccagaaatggaagtatagggtcccattaagccttaaagggggaacccatttgtgaaatgaatattgggaaccttacccaagtccctaagagacttttggaagaggatatatatagccatagtacccatacccacttataaaagtggaaactccttggacccaagatttggattaatttgtttttgaagttttttgtatataaatatgtaaatacatgctttaatttgcaatttaaaatgaaggggttaaataagttagacatttaaaagaaatgattgttaccataaattagtgctaatgctgaggagaactacagtttttcttttgaatttagtatttgagatgagttgttgggacatgcaaataaaatgaagaatgaaaaaaaaa

SEQ ID NO: 20933 - DNA, 417 bp, Homo sapiens
  SIMILAR (381)..(208): 1001254mologous to Homo sapiens dJ579N16.3 (novel protein similar to worm, Arabidopsis and pine proteins),accession number AL096767,Smith-Waterman Score=332.
  misc_feature (1)...(417): n = a,t,c or g
nnnnnnnnnnnnnnnnnnnnnnnnnccttccaggtctttattgaccccaggcacaagttgccgtgaggggtggcgaccctaagggggtgagtggggtcccccaccgaggtgaaccctgatggcggctgtttgcccagggccaggcctttccaggcaggcggagggccaggcctaggtccagcagcagcttgggtggcaggagggtcaccagctcaggatgccagggcagtacttgtcaatgagcccctggtagtagggccgcagcttgtccacgtccggcaggtccgggcacttggtgtaaaggtcgaacttgttgaactcccgcacccagggcagcatggccaggtcctgctggctgcacagctgctggtagtcgcggcctcagggggcagtgagaacttgttaaacttcatcacc

SEQ ID NO: 20934 - DNA, 441 bp, Homo sapiens
  SIMILAR (13)..(435): 1001254mologous to Homo sapiens dJ579N16.3 (novel protein similar to worm, Arabidopsis and pine proteins),accession number AL096767,Smith-Waterman Score=780.
cccacgcgtccgggcttctcctacaagaaaatgacagtcatggaggccgtggacctgctggatgggctggtggatgagtcggacccggacgtagatttccccaactccttccatgccttccagacagcggagggcatccggaaggcccacccagacaaggactggttccacctcgtcgggctcctgcacgacctggggaaggtcctggccctgttcggggagccccagtgggctgtcgtcggcgacaccttccccgtcggatgccgtccgcaggcctccgtggttttctgcgactccaccttccaggacaaccctgacctccaggatcctcgatacagcacagagctcgggatgtatcagccccactgtgggctcgacagggtcctcatgtcctggggccatgatgagtacatgtaccaggtgatgaagtttaacacagtc

SEQ ID NO: 20935 - DNA, 1910 bp, Homo sapiens
  SIMILAR (1033)..(731): 781254mologous to Homo sapiens dJ579N16.3 (novel protein similar to worm, Arabidopsis and pine proteins),accession number AL096767,Smith-Waterman Score=419.
  misc_feature (1)...(1910): n = a,t,c or g
gttgttttctatgaatgtattattttagctattggggtattttttaaggggacggagcccagaggacttggtgactgttttgagcatgtgggggtgagctgggtgactcgtcccccaggctctgacacaggagctgggaggatgggcagatgtttaccacggccagtgtggtgggacacacacacctgaaagcctgggacttggcctccaccctgctggcaccatccctcggcctgggccacgccctgctgcagtaacacccagtggggcttcagaagcacaacatccttccaggtctttattgacgccaggcacaagttgccgtgaggggtggcgaccctaagggggtgagtggggtcccccaccgaggtgaanccctgatggcggctgtttgcccagggccaggcctctccaggcaggcggagggccaggcctaggtccagcagcagctttgggtggcaggaagggtcaccagctcaggatgccagggcagtacttgtcaatgagcccctggtagtagggccgcagcttgtccacgtccggcaggtccgggcacttggtgtagaggtcgaacttgctgcagcagggaggggcnggtgagcccccgtgaaaaaacccccaaggccccccacccaaccccctctttcactcccacaacacccctcggcgggtagcggggggcgttacttgaactcccgcacccagggcagcatggccaggtcctgctggctgcacagctgcttggtagtcgcggcccgtgtgccaggggtagaaaggagtggaccccgattcatgtagaaagcctcaggggggcagtgagaaacttgttaaacttcatcacctggtacatgtactcatcatggccccaggacatgaggaccctgtcgagcccacagtggggctgatacatcccgagctctgtgctgtatcgaggatcctggaggtcagggttgtcctggaaggtggagtcgcagaaaaccacggaggcctgcggacggcatccgacggggaaggtgtcgccgacgacagcccatgcagaaggacaggagggacgggcggccatggggggagtgggggaaggtgtcaccgatgactgcccactgcagagggacaggagggacgggcggccatggggggagtgggggaagatgttgccgatgactgcccactggggctccccgaacagggccaggaccttcccccagttcgtgcagaagccgtacgaggtggacccagtccttgtctgggtgggccttccggatgccctccgctgtctgtaaggcatgaagggagttggggaaatttacgtccgggtccgactcatccaccagcccatccagcaggtccacggcctccatgactgtcattttcttgtaggagaagcccccaaactgggcatgcttgctcctgacgaagtccactgtctggtgcgtgtgcatgagcttgtaggtggtgaagacacggtccaggaggggacctgacgtgtagttccggaagctggccttgtctttggccacctctgggtccacatcaggtcggtagaccagggaagggtctgggcctcccaggtcctcatctgcaaagcgaaagtcagcagacgtctgcttccggggtacaggggacaccacgcctgagcggcacccatggccacccttgaggggtggaagtggctttgggaggagactgagtccacagggagcatggaagtcggcagccgctggctcttgcccagctggacggaggaggagggctggccagtgccacgtagcaagagggcgggagtggctggccaccaggaacagcaatcagcagagcctctctgcatggggtctgggtactcaccaccgtcacattcatcctgagagggaggcggcgctcaggtggcaaagcacaggctggcgagtgtgtcc

SEQ ID NO: 20936 - DNA, 2652 bp, Homo sapiens
  SIMILAR (1099)..(1512): 971254mologous to Homo sapiens DWF-1,accession number AF239742,Smith-Waterman Score=694.
atggagctgaaaaccaaggctagagaactacgagaagaatgcagaagcctccggagccgatgcaatcaactggaagaaaggctatcagtgacggaagatgaaatgaatgaaataaagcaagaagggaagtttagagaaaaaagaataaaaagaaacgaacaaagcctccaagaaatatgggactatgtgaaaagaccaaatccccatgatacagataacctgtgtctaggtccctctacctttctggaaggatcagtatcagagttcacctggagcaccagatggctggcaggagcaaagaaagacgacactcaaaatctgctcaagaatttggagtctaatgcgcagaccccctcggaaactggctccccatcaaggaggaggaagagagaagtgcagatgtcgaaggacaaggaagctgttgatgtcccaagttcttatcctgcgtccaagaagaatgaagcacgcagacaagtggaggctttggctgaacttggggcttgtatgggcttcagaggggaggaagtgtatgccagttggtccatggatggccatgaatggcctggaaaaggcaccacaagttcccactctggtccgtgggaccggcagctgggcccccagcctacagatcctccctccctgaaggagggcctgaagagtggtatcctgtggcatgggtatagcacagtgtcttcaattgtccactggtttagggacacttctgttgtttccagagcctgcactgctcgcctggtgcctaatggcctcacagaatgtgaggaggaggagaaagagctgagactggcatcgtacctggcgaggatggccatggtgcccggggccacgcttcgccggctcctgagtgtggtactgcccacagcctcacagcctcagctgctggccctgctggattcggccaccgagagacatgtggaccacgcagctgagagcgatggcggagcggagcaggccgacgtgggcaggcggagaaaaggaaaaaagaaaacactttcagcaacagtttggggtctgacacgtgggataacatttggtgcgatttccaaccctccaagcctggagctacaatcagccctaactgctgcacaggaatgtgagccgccttccaacagcaatatcacagcattcgccctgaaggccaaagtcatctaccccatcaatcagaagttccggcctctggccgatggctcctccaacccgtctctgcatgaaaacttaaagcaggctgttttgccacaccagccggtagaggcctctccttccagcagtctggggagcctgagccagggtgagaaggacgactgcagctcctcatccagcgtccactcggccaccagcgatgacaggtttctcagccgcaccttcctccgggtgaacgccttccctgaagtgctggcctgcgagagtgtagacgttgacctgtgtatctacagccttcacttaaaagacctgctgcatttggacacggcactgaggcaggaaaagcatatggtaggtggagatgttcgcattccctccttttcatggggacaggagctgggagacaaggactctgtgtgcacccctccagaggtcatttcagtacagcagggtccaaggcacccatcacaactcattggcatcagctatctggtgtctgggtcgagtgaagcacagacagcccgcatatggctgcttgttaacaacaccaagacaacctcgtcagccaacctctcggagctgctcttgctggacagcattgctggtctcaccatttgggactctgtgggaaacaggacctcggaaggattccaggcttttagcaagaagtttctgcaagggtacctggatgaagaccaaatggaaatgctattggagcgggctcagacagaagtcttttcaatcaagcagaagttggacaatgacttaaagcaggaaaagaaaaagctccaccaaaaattaataactaagagaagacgagagttgctacaaaagcacagggagcagcgtagggagcaggcgtccgtcggcgaggccttccgaacggttgaggatgccggccagtacctgcaccagaagaggagcctgatggaggagcacggtgccaccctggaggagctgcaggagcgtctggaccaggccgccctggacgatctcaggaccctgaccctttcgctgtttgaaaaggccaccgacgagctgcggcgcctgcagaactcagccatgacccaggagctgctcaagcgtggggtgccctggctcttcctgcagcagatcctggaggagcacggcaaggagatggctgcacgggccgagcagctggagggggaggagagggacagggaccaggagggtgtccagagcgtgaggcagagactgaaggatgacgctcctgaggccgtgacagaggagcaggcagagctgcgacgctgggagcacctgatcttcatgaagctctgctcctcagtcttctccctgtctgaagaggagctgctcaggatgaggcaggaggtccatggctgctttgctcagatggacaggagcttggccctccccaagatccgggcccgagttctgctgcagcaatttcagactgcgtggcgagaagcagagttcgtgaagctggaccaggccgtggctgcccctgagctgcag

SEQ ID NO: 20937 - DNA, 3093 bp, Homo sapiens
  SIMILAR (1189)..(1953): 1001254mologous to Homo sapiens Ellis-van Creveld syndrome protein,accession number AF216184,Smith-Waterman Score=1277.
atggccctcgggcgccccatgccctgggtcctcccggggcccgcccccctcgtctggcccgcgcgcgccccgaggcctctggccgatggctcctccaacccgtctctgcatgaaaacttaaagcaggctgttttgccacaccagccggtagaggcctctccttccagcagtctggggagcctgagccagggtgagaaggacgactgcagctcctcatccagcgtccactcggccaccagcgatgacaggtttctcagccgcaccttcctccgggtgaacgccttccctgaagtgctggcctgcgagagtgagataattcctgttctgcgagagtgcagaaaggataagagagatgtgtatgatacacctagcaatgtcatagttggctgtgaatatgtgatggctgctgtcatcctcattatcacaaccaccaccaaaatcatcatcatcttcattatcaccaccagttttattttgtatcaccatcaccaccactattactatcacagttctcttcttcatcatgtcattgttgtcatcaccataaacaccatcatctttgctattgtcaccactgacatcatcattctttgtctttaccaccatcatcatcatcctcatgaccgctgtcatcaccaacaccatcaccatcctcatgtcctcattaccatcatcatgagcatcatttttatcattgttgtaattattggcattctcattactaccatcaccgccatcatcatcttcattaccaccataatcatcatcaccatccttattgccatcaccaccaccaatgttgcagggcaggcaagctccagaatagggtttagcctgggaggatcccattttgatcagcagggttgtgatcagaaaacaagtcctgccagtctcctacctcaccttatcctcaccatcattgtcatcattattctcgttactactatcaccagcctcttattcatcatcccctgccatcattttcattatcatcatcattgttattgtcatcattttcattactgccatcgtcatcgcatcattgttgtgatagtcttcatcagcaccaccatcatcaccatcttcatcagcaccaccatcaccacctttatcatctttcctgctacctctaccttcaccttcattagagtcctcattgtcatcgtcatcgtccttgttcctaccactgatttggaggaactagaaaagggacttcaggtcaaactgtcaaacacagaaatgtcgggggctggtgactctgagtacatcaccctggctgatgtggaaaagaaggagagagaatactctgaacagctaatcgataatatggaagctttctggaaacagatggcaaatatccagcactttcttgtggaccagtttaagtgttccagctccaaagcccgacagctgatgatgactctgacggaaagaatgattgcagccgaagggctattgtgcgattctcaggagctgcaggctctggacgccctggagaggacgatggggcgggcgcacatggcaaaagtgattgagtttctgaagctgcaagtccaggaggagaccaggtgccggctggctgccatctcccacggcctggagctgctggctggtgaggggaagctgtccgggcggcagaaggaggagctgctcacgcagcagcacaaggccttctggcaggaggcagagcgcttcagccgggagtttgtccagcgaggcaaagacctggtcacggcgtctctggctcaccaggtggagggaacggcaaaactcacgctggcccaagaggaggaacagagaagcttcctggctgaggcccagccgactgctgacccggaaaagtttctcgaggcttttcatgaggtcctggagaggcagaggctgatgcagtgtgacctggaggaagaggagaatgtcagagccaccgaggctgtggttgcactctgccaggagcaggctaaaatcctccattgccgattggagagctggctgcgccctcctggctgggcgtccttgggccagagcctggactgttctgagctctggtttccttctctgtgcaatggagactgggagcccatttactttaaaggctgggtgtgccgaggagagcaggtccaaggcccagacctggcacatgggaatacagctcccaaggtgaaatatggtgtcccatggggcaagaagccgccactgataatcagggggcagcttaaaattgtgcgtgtgaattactataggacactgatggaggcggcagtggagagcgtctacgtgaccagcgctggtgtcagccgcctggtgcaggcgtattaccagcaaatcggaaggatcatggaggaccacgaggagagaaaactgcagcacctgaagaccctgcagggtgagaggatggaaaattacaaactgcggaaaaagcaagaactcagcaacccttcgtcgggcagcaggacggcaggtggcgctcatgagacctcccaggcggtccaccagaggatgctgtcccagcagaagaggttcctggcccagttcccagtgcaccagcagatgcgtctgcacgcccagcagcagcaggcaggagtcatggaccttctggaagcccagctggagacccagctacaggaccctgagcccctggagggcaagtgtggcctgtgtggatccctacagcagctgcagcatgctaagcagggccaggccctgagcagctggtcaggcctcatctatggagctgacagagaattgagcattcccctgtgtgcgcatggccaccaggaggcttccggtgtaatggaagctgaacagaacttcatctccgagctggcagccttggcccgagtgccccttgctgaaagcaaactgttgcctgctaagcgtgggctgctagagaagcccctaaggactaaaaggaagaagcccctgccccaggaaagaggggacctgggggtgcccaacaatgaggaccttgcctccggggaccagacctcaggctcactcaggtatgactgggccccggacctgttgcctgtggctgggtttgtgctgagaggcagcgaggacggagaggacagcggcatctctaggctcttctga

SEQ ID NO: 20938 - DNA, 328 bp, Homo sapiens; identical to SEQ ID NO: 12619
  SIMILAR (23)..(289): 961254mologous to Homo sapiens nucleophosmin-retinoic acid receptor alpha fusion protein NPM-RAR long form,accession number U41742,Smith-Waterman Score=446.

SEQ ID NO: 20939 - DNA, 2073 bp, Homo sapiens
  SIMILAR (84)..(1772): 1001254mologous to Homo sapiens nucleophosmin-retinoic acid receptor alpha fusion protein NPM-RAR long form,accession number U41742,Smith-Waterman Score=2964.
ccgtcctgcgcggttgttctctggagcagcgttcttttatctccgtccgccttctctcctacctaagtgcgtgccgccacccgatggaagattcgatggacatggacatgagccccctgaggccccagaactatcttttcggttgtgaactaaaggccgacaaagattatcactttaaggtggataatgatgaaaatgagcaccagttatctttaagaacggtcagtttaggggctggtgcaaaggatgagttgcacattgttgaagcagaggcaatgaattacgaaggcagtccaattaaagtaacactggcaactttgaaaatgtctgtacagccaacggtttcccttgggggctttgaaataacaccaccagtggtcttaaggttgaagtgtggttcagggccagtgcatattagtggacagcacttagtagctgtggaggaagatgcagagtcagaagatgaagaggaggaggatgtgaacagggttttatttatgaaaccgaaaggcaggggcctcaagcatatgttcggggatttggtgtgcagttggaaattggcagccattgagacccagagcagcagttctgaagagatagtgcccagccctccctcgccaccccctctaccccgcatctacaagccttgctttgtctgtcaggacaagtcctcaggctaccactatggggtcagcgcctgtgagggctgcaagggcttcttccgccgcagcatccagaagaacatggtgtacacgtgtcaccgggacaagaactgcatcatcaacaaggtgacccggaaccgctgccagtactgccgactgcagaagtgctttgaagtgggcatgtccaaggagtctgtgagaaacgaccgaaacaagaagaagaaggaggtgcccaagcccgagtgctctgagagctacacgctgacgccggaggtgggggagctcattgagaaggtgcgtaaagcgcaccaggaaaccttccctgccctctgccagctgggcaaatacactacgaacaacagctcagaacaacgtgtctctctggacattgacctctgggacaagttcagtgaactctccaccaagtgcatcattaagactgtggagttcgccaagcagctgcccggcttcaccaccctcaccatcgccgaccagatcaccctcctcaaggctgcctgcctggacatcctgatcctgcggatctgcacgcggtacacgcccgagcaggacaccatgaccttctcggacgggctgaccctgaaccggacccagatgcacaacgctggcttcggccccctcaccgacctggtctttgccttcgccaaccagctgctgcccctggagatggatgatgcggagacggggctgctcagcgccatctgcctcatctgcggagaccgccaggacctggagcagccggaccgggtggacatgctgcaggagccgctgctggaggcgctaaaggtctacgtgcggaagcggaggcccagccgcccccacatgttccccaagatgctaatgaagattactgacctgcgaagcatcagcgccaagggggctgagcgggtgatcacgctgaagatggagatcccgggctccatgccgcctctcatccaggaaatgttggagaactcagagggcctggacactctgagcggacagccggggggtggggggcgggacgggggtggcctggcccccccgccaggcagctgtagccccagcctcagccccagctccaacagaagcagcccggccacccactccccgtgaccgcccacgccacatggacacagccctcgccctccgccccggcttttctctgcctttctaccgaccatgtgaccccgcaccagccctgcccccacctgccctgcccgggagtactggggaccttccctgggggacggggagggaggaggcagcgactccttggacagaggcctgggccctcagtggactgcctgctcccacagcctgggctgacgtcagaggccgaggccaggaactgagtgaggcccctggtcctgggtctcaggatgggtcctgggggcctcgtgttcatcaagac

SEQ ID NO: 20940 - DNA, 1944 bp, Homo sapiens; identical to SEQ ID NO: 18849
  SIMILAR (396)..(1643): 961254mologous to Homo sapiens nucleophosmin-retinoic acid receptor alpha fusion protein NPM-RAR long form,accession number U41742,Smith-Waterman Score=2132.

SEQ ID NO: 20941 - DNA, 2585 bp, Homo sapiens
  SIMILAR (90)..(335): 1001254mologous to Homo sapiens p80 protein,accession number D45915,Smith-Waterman Score=426.
gtgattccgtcctgcgcggttgttctctggagcagcgttcttttatctccgtccgccttctctcctacctaagtgcgtgccgccacccgatggaagattcgatggacatggacatgagccccctgaggccccagaactatcttttcggttgtgaactaaaggccgacaaagattatcactttaaggtggataatgatgaaaatgagcaccagttatctttaagaacggtcagtttaggggctggtgcaaaggatgagttgcacattgttgaagcagaggcaatgaattacgaaggcagtccaattaaagtaacactggcaactttgaaaatgtcctgtacagccaacggtttcccttgggggctttgaaataacaccaccagtggtcttaaggttgaagtgtggttcagggccagtgcatattagtggacagcacttagtagtgtaccgccggaagcaccaggagctgcaagccatgcagatggagctgcagagccctgagtacaagctgagcaagctccgcacctcgaccatcatgaccgactacaaccccaactactgctttgctggcaagacctcctccatcagtgacctgaaggaggtgccacggaaaaacatcaccctcattcggggtctgggccatggagcctttggggaggtgtatgaaggccaggtgtccggaatgcccaacgacccaagccccctgcaagtggctgtgaagacgctgcctgaagtgtgctctgaacaggacgaactggatttcctcatggaagccctgatcatcagcaaattcaaccaccagaacattgttcgctgcattggggtgagcctgcaatccctgccccggttcatcctgctggagctcatggcggggggagacctcaagtccttcctccgagagacccgccctcgcccgagccagccctcctccctggccatgctggaccttctgcacgtggctcgggacattgcctgtggctgtcagtatttggaggaaaaccacttcatccaccgagacattgctgccagaaactgcctcttgacctgtccaggccctggaagagtggccaagattggagacttcgggatggcccgagacatctacagggcgagctactatagaaagggaggctgtgccatgctgccagttaagtggatgcccccagaggccttcatggaaggaatattcacttctaaaacagacacatggtcctttggagtgctgctatgggaaatcttttctcttggatatatgccataccccagcaaaagcaaccaggaagttctggagtttgtcaccagtggaggccggatggacccacccaagaactgccctgggcctgtataccggataatgactcagtgctggcaacatcagcctgaagacaggcccaactttgccatcattttggagaggattgaatactgcacccaggacccggatgtaatcaacaccgctttgccgatagaatatggtccacttgtggaagaggaagagaaagtgcctgtgaggcccaaggaccctgagggggttcctcctctcctggtctctcaacaggcaaaacgggaggaggagcgcagcccagctgccccaccacctctgcctaccacctcctctggcaaggctgcaaagaaacccacagctgcagaggtctctgttcgagtccctagagggccggccgtggaagggggacacgtgaatatggcattctctcagtccaaccctccttcggagttgcacagggtccacggatccagaaataagcccaccagcttgtggaacccaacgtacggctcctggtttacagagaaacccaccaaaaagaataatcctatagcaaagaaggagccacacgagaggggtaacctggggctggagggaagctgtactgtcccacctaacgttgcaactgggagacttccgggggcctcactgctcctagagccctcttcgctgactgccaatatgaaggaggtacctctgttcaggctacgtcacttcccttgtgggaatgtcaattacggctaccagcaacagggcttgcccttagaagccgctactgcccctggagctggtcattacgaggataccattctgaaaagcaagaatagcatgaaccagcctgggccctgagctcggtcgcacactcacttctcttccttgggatccctaagaccgtggaggagagagaggcaatcaatggctcctttcacaaaccagagaccaaatgtcacgttttgttttgtgccaacctattttgaagtaccaccaaaaaagctgtattttgaaaatgctttagaaaggttttgagcatgggttcatcctattctttcgaaagaagaaaatatcataaaaatgagtgataaatacaaggccagatgtggttgcataaggtttttatgcatgtttgttgtatacttccttatgcttcttttaaattgtgtgtgctctgcttcaatgtagtcagaattagctgcttctatgtttcatagttggggtcatagatgtttccttgccttgttgatgtggacatgagccatttgaggggagagggaacggaaataaaggagttatttgtaatgact

SEQ ID NO: 20942 - DNA, 1592 bp, Homo sapiens
  SIMILAR (1189)..(560): 401254mologous to Homo sapiens nucleophosmin,accession number M23613,Smith-Waterman Score=198.
cacccctataaggagaaatctatgacgttgcacgcaagtgtaaagttgggcccctccaagggtcctttaaaacggctgcgccctttttgttttcttttcaatagaaaccgtgctactttattaaaatactgagtttttatttcacatgtattatttttgtctcccacaccattttccatgtctcccccaccgcctactacttatgtccctatccataacattcccatacatacttaaaacccaagcataagggtggagttcccatctttaaaaaactaaacaggcattttgggacaacacaattccttggcaaatagaacctggacaacatttatcaaaccccgggtaggggaaagttctcactctgcaattataaaaaggacagcccgatatcaactggtacaagaaatgggaattaagacgggaaaattttttaaccaaattgggtttaaaactattttcctaaaagagacttccctccacttgccagaagatcttggaattaggccctccttgggtcaagtccatccgggaagcaattccttcacataatttgatggaatttgggcttccactttggggaagaggaaccacctttttcctatacttggcttgcaatttttgcctttaatggtctctacagaaactagggtccctttgggtggttttaggagagttttttcctggtttcttgaaaggattcttgtcccttttgatacttgggtgtgaatgatggtttttggagtcttttcccattctgattttgactttcgctgcatttttgggctggagtattcccgtaaaaaattcctaacgggcggcttttcctttcagcttccctcatcaccaaaaatcatcatcatcatcatcaatcatcttcatcatcatcattatcatcatcatcctcttcatcattcggtcatcatctttccatcaagcaagcaaagtttttacttttttttctggggaaaccttgctaccaaccttccaaggggcagaccggctttccaagatatactttaaggagtttcacaatccttccttccttcttcaatcttctggactctggcatcttccctcccacagctaactaaagtgcttgtccacttaatatgccactggcccctgaaacccacactttcaaccctttaaggacccacctggttggtgttattttcaaaaagcccccccaaggggaaaacccgttgggctggtacagaccattttcaaaagttgcccaggtggttacttttaaattgggactgccctccgtaaattcaattgcctctgccttcaacaaatgtgcaactcatccttttgcaccaagcccctaaactgacccgttcttaaagataactggtgctcattttcatcatttatccaccttaaagtgataatctttgtcggcctttaggttcacaaccgaaaagatagttctggggcctcaggggggctcatgtccaatgtccatcgaatcttccatcgggtgaccggggggcacgccacttaggtaggagagaacggcggaccggagataggaagaacgctggctccagagaacaaccgcgcaggacggaatcacaccagggccc

SEQ ID NO: 20943 - DNA, 1585 bp, Homo sapiens
  SIMILAR (1199)..(450): 371254mologous to Homo sapiens cathepsin H,accession number BC002479,Smith-Waterman Score=244.
tttttttttttttttttttccaggaccagcatgctccatctggggaggtgctcactcaatgtttattgaacagcgaataccagaaaagacagtccctggagctctatatgtggaaaaataaccccttctggaacaaaaaaaaaaattgtggtcccatgtggttttaaatctgtttaaagaaaggaacaacttaaggcaacatggctggttgatctttgcgtcaataagacacgggtgaagctccatggtggaactcctccttgtctgtaggtttccagggctgggcacagacggtgacgggcagaatgtttgggggtcccagtggatcttcccaacaacttcctccagggcacggatttccacccagggcccagggctggcccgttcctctcctttctcggccagtcttgcgcttgcggcttgccacggtttcacaccagaggggatgggggttagggagggcgcaggcagccagggccacacattgttcttttccgcgcttcgatgaggaaagtaccccgttcatttccccactggggaaccccaagagtttttcacgatcccagtaaagggatcccatttttttcttccataacccaacaaccagtactgcatgggtttacttttatctggagttttatggcaggaagtactagtgagtagatgcccgttctatacatcatgaagtcctgagttcacctcaaaaggcaaagctcaaccaggttggagagggccacagccctccaccatcggctttctcgtcatagattgtgatgttggcttacatccttgacaaaagccgatggcctttccaggttggaactttgcaataaccatccttgcccctggtaagggtaaggtgtcttcaccccatgaacccccttgttgtaacaggatatactcgaaaaccctggctggggagacccccttggcaagccgtgattaattgaagtccctgggcgcaagtcccacccagctgcctgttcccgcccaaggaacagcatctttcccggttgcgaatggcgaatcgcagactccccagggccccagtggtggagaaagtcccagctaaactgccgcaggcaccctgatttttcacaggtgagacaaaatttccttttttccgccagtccacggaaggtgggtagggaccagtacctcgaaggtagttgccttttgggggctgagcaattctgagggctctgcccagagatacttgtgttttatgtcaccaaagctcatgtctgaaaattggttcagtgccattttaaatgtgtggttcccatggttgtgggcgtttatcttcctccagttgctggcaaacgtctgcagcctgtggtggtactcctccgtactgtaggtcttgcggtgcttagacatccatgacttgaagtgaagcttctctaaggagttcacggacagttcggcggcaccgcagacggggactcccaggagccaggccccggcgcagagcagcggcagcgtggcccacataacagcgctggcggcttggctcttgcgctcagggtccgcggaggtggcggcccagagcgtcaactcggacgcgagggtcgaccaggaattc

SEQ ID NO: 20944 - DNA, 1065 bp, Homo sapiens
  SIMILAR (1010)..(831): 401254mologous to Mus musculus proline-rich salivary protein,accession number M19419,Smith-Waterman Score=89.
ggctcctgctcccgggaggcggcgctgcgtggagcatcggggcagctccgttctccggacgcaggtaagagctcccggcgcctttgcaccccgctggccgatgccatgtgcagaatggcacctaccttcagcgagtgctgcagaactgcccctggcccatgagctgtccggggagcaggtaaatgaggtggagaaggaactgatggcattccaggatgagcagcagatttttggacaccaagagctgtgtttccaagcatggcgctaaagaggatgggctggcccagaaccatcctgagaaccaggcccagagacagctcaagggacagaagcattcagggcccccacagcagcacatgaacgtgaacatcagtctcaggatataccccaattccggaaacacaaatgtgcgaaaatgtagcctctgactcaaaggaacatggttggtgcccactcttgtcacctgcccagtgctgtctcttgaccctcgagccatagagctgcatcaccagggccaacaggacccagggcagcctggggtgggccaaaggaggagagggaacacctgccattctgtttatctgagcatgggtgacagagaagaggtagcacagagctgccctgtgcctcagtttccctacctggaaagtggaggtgaattggaggtgatactagcacccactcacagttacccaccttcctccatcctgggtgagattagccccctgtgcctgggcaagtcacaggcccttgaggagggtatgctggggatgcaggctcagcacgagtgaaggccgttcatgctgtttgacccagatacattgcctctcctctgggcctctgtgtcctacgctgagggcagtaggggtccctgctggggctacagtggtgggcaggggggcctgaggaggcaaggatcacatgctaccatgcggcggatggcgcttcggcccacagccttctcaggtgggtcctgggatagcttcttgaggtccccctgggcgcggctgaaggtgctggaggccaaggtgggtgagcagctccctcctgggtggttgttccctg

SEQ ID NO: 20945 - DNA, 400 bp, Homo sapiens
  SIMILAR (3)..(59): 521254mologous to Rattus norvegicus Pkd1,accession number AF277452,Smith-Waterman Score=38.
cgaacttgtcgtggagttggtgtctgctggcaagtcgggtcctgagcgaaacacctatgaggttcaggtggtcacggggaatgtgcccaaggccggcactgatgctaacgtctacctaaccatctacggcgaggagtatggagacacgggcgaacgacccctgaagaagtcagacaagtccaacaaatttgagcaggggcagacagacaccttcaccatctatgccattgacctgggggccctgaccaagattcggattcgccacgacaacacaggcaacagagcaggctggttcctggacagaatagacattactgacatgaacaacgagatcacgtactactttccatgccaacgttggctggcagtggaggaagatgatggccagctgtccagggag

SEQ ID NO: 20946 - DNA, 1992 bp, Homo sapiens
  SIMILAR (1675)..(1854): 901254mologous to synthetic construct chloramphenicol acetyltransferase,accession number A02739,Smith-Waterman Score=285.
atggacgatatcccgcaagaggcccggcagtaccggcataaccaagcctatgcctacagcatccagggtgacggtgccgaggatgacgatgagcgcattgttagatttcatacacgagactcagagagcagcactttctatagcgcacatccttcccctaccccccagacatctccatctgtggccagacggatggtgtggggtgcagagaccttgactttcccatgcgatcggtggcttgccacctctgaggatgacaaaaagaccattcgagaactggttccatatgacatcttcactgagaaatacatgaaagatgggtccttacggcaagtctacaaggaagtagaagagcctctggacagtaagtgtggtgtggccaccctcatcaccatgggaaggctccaggaccctggtcctcctgagcacatgccctgtgccaggctaagcctcttcacccaggaaaccccccagcttgaggcggccgacgtgggcgaggtctataagctccggctcgggcacacgggcgagggctttgggcccagctggttcgtggacaccgtgtggctgcggcacctggtggtgcgggaggtggacctcacgccggaggaggaggcccggaagaagaaggagaaggacaagctgcggcagctgctcaagaaggagcggctgaaggccaagctgcagaggaagaagaagaagaggaagggcagcgacgaagaggacgagggggaggaagaggagtcgtcctcatcagaggagtcctcgtcagaggaggaggagatggaagaagaggaggaagaggaggagtttgggccggggatgcaggaggtgattgagcagcacaagttcgaagcccaccgctggctggcccggggcaaggaggacaacgaacttgtcgtggagttggtgccagctggcaagccgggtcctgagcagtccatacgccaccacaccttggttaattgccagaactggctggaagcgcaggttccagcccccttctctgagagtatgcgaacttcattccagatgaccctgatgaacactctgaacaaagacaagtacaacttcaattgcaaccgctggctggatgccaatgaggatgacaatgagatagtgagggaaatgactgcagaaggcccaacagtgcgcaggatcatgggcaaacttagacctgcttgcagcctgctgtcgactctaaagatcccgtgcaaattctgggaaaagtgtttccgggctgagagaaaagcccctagagcagccccctatatgggccactgcttcaaatgccttctggaaacacagccctggcaaaactctaggcggggttccaagctctactgttaccagcgtctgggccctactctctctgcctccaatgccctcatcacaccctggaccaaggttaggcgcgctgtcaataactatgacatcatagtcatgagcaacagtttcaatggccagtcggagcatcaggtgtggatcgaagatccccaaaaaaataagcacaagttttatccggcctttattcacattcttgcccgcctgatgaatgctcatccggagttccgtatggcaatgaaagacgtgaataccacgacgatttccggcagtttctacacatatattcgcaagatgtggcgtgttacggagaaaacctggcctattatccctaaagggtttattgagaatatgtgtttcgtctcatccaatccctgggtgagtgtcaccagttttgatttaaacgtggccaatatggacaacttcttcgcccccgttttcaccatgggcaaatattatacgcaaggcgacaaggtgctgatgccgctggcgattcagcttgaggcggccgacgtgggcgaggtctataagctccggctcgggcacacgggcgatggctttgggcccagctggttcgtggacaccgacatgccctactaccggtcccagtttaagaagtgtgctgtagtgggcaacggagcatcttga

SEQ ID NO: 20947 - DNA, 4188 bp, Homo sapiens
  SIMILAR (2236)..(1910): 351254mologous to Nicotiana tabacum extensin (AA 1- 620),accession number X13885,Smith-Waterman Score=120.
atggctgtgaggcttcttcaccacctggaaagatggggtgatttagacagtgatgggaaggaggagcaggacatcctaggattggtgagtaaacccatgcccagccccaagccccttcttcatgtcttgaggaacctaaacctcccgagtgaaaagaagtcacagaggtccatcgctccccagatcccaattgagggcagcttggttcagtgccaaccccgtgtgcttcctgcgcccttgatcatggccaagaggaaatcacacctgcctaacttcacggggctgtggtggacatcagaggagatggacaatagacagaggatggttgggaaaatgggaaacttaagtcatgcaaggctaactgagcctgctgagattcatggggcagaaaccttaagcaagttcctctgggcctccttcagcctgctggatgtcccctgcgcacactccccaagtcgccagaggaaaaggccaacagcccccgtgggcaccatcttccaagacgcccttccaggccccagcccaggttctgcaccagctgtgccagatgccataggagaggagactggcacagccaaaaggcagcagagagaccatccagtcttccattttatagcagaggaaaccaaggcagagacacgaagatggagaagaaggcagaggagctatttgaccttgggcaagtcacttgaccctgaagtcctctgcctgcttatctacaaaatggaaatcacggaagcccttacctcaggtcctcacacatcccgtgtcctggacaccagcctccctgttctatcctcggatccatctgatgccaaagccagtgttccttcctccccacacacagcagtcagaagtaacagatttgatgtacgcacggccaaatggaggagcttaaaacagagccgagagaagaaagtcagctggccgcactgcccctgtatcaaggccacctgcaagtggaatcagagagagtcagaatttgaccatgtgaaggccccccgccaaggagatgtcaaccctgttcagggagaaactgtctccatgtgtcctgattggtttatttcttcttggagtcagatgcaggcaggaattgttcagctcattcctcagcggaatgaaagagacagggaggacttcctggagggctcagctgcacacagcggcacacccaggcatgtttcaaggaaaggacagcaggaggaagcagcagcatccgggggaatgtcccgctcagtggcccaacaagagcagcagcaccagacttatgccagccttgagctcggggtcaaggagccctgtgtctgtgcttccaggtttagcccatgccctggggctggacagcagtccaagggaggctgggaagagcacgagaacaaagagggccagagcagagagggcagccatggggggagaggagagttgcatgaagccacaaagaaggcaaggaagcgctgtggtcaggcaggggtgcacccgccagcgaggagcaggggacctgcctccttggcgttgggcctggcaggtggctgggagcggatggtgagggcagatgtcaggcagctccaggctctggcccctctagcccagaatccttaccctgatgggacacataaggataggatcttcacagggaacattcctggggcagggacggatgccaaggtgtacatcaccatctatggagacctcggggacactggggagcgataccttggcaagtcagagaaccggaccaacaagttcgagagaggaacgacagacaccttcaccatctatgccattgacctgggggccctgaccaagattcggattcgccacgacaacacaggcaacagagcaggctggttcctggacagaatagacattactgacatgaacaacgagatcacagcttgttttttctggagggtggaagtggtgtgtgtatcatggggtgtgaagaggaagggcagcgacgaagaggacgagggggaggaagaggagtcgtcctcatcagaggagtcctcgtcagaggaggaggagatggaagaagaggaggaagaggaggagtttgggccggggatgcaggaggtgattgagcagcacaagttcgaagcccaccgctggctggcccggggcaaggaggacaacgaacttgtcgtggagttggtgccagctggcaagccgggtcctgagcgaaacacctatgaggttcaggtggtcacggggaatgtgcccaaggccggcactgatgctaacgtctacctaaccatctacggcgaggagtatggagacacgggcgaacgacccctgaagaagtcagacaagtccaacaaatttgagcaggggcagagcctcagggctcttcctggcttccagcttggttaccaaggggttttaattagacaaattgatgactgtgactatgttgcccaggtaactaagacccttaatcttccagaaatgtctgagtctccagaaggctctgatgagagaatgcaaagccccttatctggggtacttctcctctcctatggcatctggcacagctggtgcagaacctgggctggggcctggaagggcgtcttggaagatggtgcccacgggggctgttggccttttcctctggcgacttggggagtgtgcgcaggggacatccagcaggctgaaggaggcccagaggaacttgccccagttgttccttacgagatcaccctctacaccagtgatgtctttgctgctgggacagatgccaacatcttcatcatcatctatggctgcgatgccgtgtgcacccagcagaagtatctgtgtaccaacaagagggaacagaagcagttctttgagaggaagtctgcctgccgcttcatcgtagaggtacttgggctcagcaggctgtccagggatggagtagcagtgtatgagggtgtctggctcaatgaggctccttccagctctgatgttccagacacttatgactctggcccaggtcctagttcagccaggactgtcttccctgggcaccggcagttagtggtggtttattcgaaggaattagaaggtaataatgagtttcaggtagcagcgagaaagcagagtgtacacttcactcaaggggagcctcctgaaaccagaggcaaccatgttgtgttacaagatatgggggggaacaaaaaagttattccctactatgtgtcagtcaccactgggaagcacaaggacgcggccactgacagccgagccttcatctttctcatcggggaggatgatgaacgtagtaagcgcatctggttggactacccccgagggaagaggggcttcagccgtggctctgtggaggagttctacgtcgcaggcttggatgtgggcatcatcaagaaaatagagctgggccatgacggggcctcccctgagagctgctggctggtggaagagttgtgtttggcagtgcccacccagggcaccaagtacatgttgaactgtaactgctggctggccaaggacagaggcgacggcatcacctcccgtgtcttcgacctcttggatgccatggtggtgaacattggggtgaaggcctgcacagaatacttcaaacctcacagtgtcctggcagagattctagatgctgccagaaaagcatgcaacccccaccaggacaatgatgggaacatgaccgctgtgattaatagctccggtttggagggtgcagagaccttgactttcccatgcgatcggtggcttgccacctctgaggatgacaaaaagaccattcgagaactggttccatatgacatcttcactgagaaatacatgaaagatgggtccttacggcaagtctacaaggaagtagaagagcctctggacagaagcctttggatcctgcagaaacacactcaggaccattatcaggatccacagtcgtccttgaacagtggtgtggacatgaaggaaagctgtgggtttcctgcttgtttggaggagtctatcagagccaatttagaagtaacctcgccaggagagctggtggtcagcgggaaggtgtctgcctgtcaggcagggcctggccagatgcaccccacacctcgagactgctctccaccggcccagaacaagagctgggaacagtcaccccttttcatgaccctctgcggcatcaacgggagcacagagaagatgcagctggacaaaaagaaagccagaccatga

SEQ ID NO: 20948 - DNA, 570 bp, Homo sapiens
  SIMILAR (14)..(484): 971254mologous to Homo sapiens Polypeptide fragment encoded by gene 58,accession number W88812,Smith-Waterman Score=793.
attcggcactccggaaggatagaaaatttctcttccaggacaaatggatggtacacctattacacctcttaaagatgggtttacagaggtccagctgtcctcagttaatcccccgtctttgtcaccaccaggaactacaggaattgaacagagtctgactggactttctattagctcaactccaccagctgtcagtagtgttctcagtacaggtgtaccaacagtaccgttattgccaccacaagtaaaccagtccctcacttctgtgccaccaatgaatccagctactacattaccaggtctgatgcctttaccagcaggactgcccaacctccccaacctcaacctcaacctcccagcaccacacatcatgccaggggttggcttaccagaacttgtaaacccaggtctgccacctcttccttccatgcgtccccgaaacttacctggcattgcacctgtgcccctgccatccgagttcctcactcactgtggatgtgacgccccccactgccaaggcccccaccaccgttgaggacagagtcggcgactccaccccagtcagcgaga

SEQ ID NO: 20949 - DNA, 2636 bp, Homo sapiens
  SIMILAR (1410)..(2375): 791254mologous to Homo sapiens Polypeptide fragment encoded by gene 58,accession number W88812,Smith-Waterman Score=1234.
ctacacttgctttgctgccggcctggatcccacacttgacaaggttgaggcaggtgtggagcagtgaggggtatgtgaacgagtgagcacaggttcttgcctctttgcacagccaggcacactggctgctgtggcagggtgggcagctccaggcactggcacaggcgctggctccatgtgacgctgcagctggacccgatataccacaagcggcttccactgggctcggccacaactgtgttccacaccagagtgggtgctagggatagggagaggccagggagtgggagcaggcacttctgagcttgtgggggaaggaggcttcctgagccctttacattgcatcacataggaatccacataatacctggttgacgcaacatcagtccaactgaccacaaagcaactaggggtttcagagggagtacacgtaaggggcaaaagcagcaacggaatacgacaacggaataagcatgaatacgacctggctacacacccggagaacagagagcttggtgtgtgttgagttcgctcctgttcatcagcagccctttccccgcctctggccaccagggggacctgcaaccaagtatgtgttctttcaggcgagcgggaacgcgtctgcataaatctagtccaatccagggccccgtagcaaggcgccaaagctgggggaagcgcatttctgttctctcgcgagcacgacgcggtgcctcccagtcctcctccggccctccctctccgccctcccggcccgcgagcgctcgggccccttccagtggctcgcggcaggtggcgctgtctgcggcgtcgcagcggcccgggctgcagcagagacgatctcccggcgggctgtgcggcccggctctccggcggcagcgagtgccacgtcccaagtgctacgcggaggattagagcaggcggtgcgctgggggcgggagcagcgcggagcccggctcggccacaccgatcgcccgccgccatgggctcctcgcaaagcgtcgagatcccgggcgggggcaccgagggctaccacgttctgcgggtacaagaaaattccccaggacacagagctggtttggagcctttctttgattttattgtttctattaatggttcaagattaaataaagacaatgacactcttaaggatctgctgaaagcaaacgttgaaaagcctgtaaagatgcttatctatagcagcaaaacattggaactgcgagagacctcagtcacaccaagtaacctgtggggcggccagggcttattgggagtgagcattcgtttctgcagctttgatggggcaaatgaaaatgtttggcatgtgctggaggtggaatcaaattctcctgcagcactggcaggtcttagaccacacagtgattatataattggagcagatacagtcattgaatgagtctgaagatctattcagccttatcgaaacacatgaagcaaaaccattgaaactgtatgtgtacaacacagacactgataactgtcgagaagtgattattacaccaaattctgcatggggtggagaaggcagggattgggtctgggtgggtcgccatcttgaaaatctggatgggcagagatctagcaaaggaagctcagcaggaggccagagggaaaaccaagcttcaagaaatcgaacacagtcagccatgtcaggtagtgcagagaagtcaggtgaaaggagtgaaaaaaaccatgtcctgggcgagagcaatttcagagacttgccaggggacaaacaaactgcaggaactacaggaattgaacagagtctgactggactttctattagctcaactccaccagctgtcagtagtgttctcagtacaggtgtaccaacagtaccgttattgccaccacaagtaaaccagtccctcacttctgtgccaccaatgaatccagctactacattaccaggtctgatgcctttaccagcaggactgcccaacctccccaacctcaacctcaacctcccagcaccacacatcatgccaggggttggcttaccagaacttgtaaacccaggtctgccacctcttccttccatgcctccccgaaacttacctggcattgcacctctccccctgccatccgagttcctcccgtcattccccttggttccagagagctcttctgcagcaagctcaggagagctgctgtcttccctcccgcccaccagcaacgcaccctccgaccctgccacaactactgcaaaggcagacgctgcctcctcactcactgtggatgtgacgccccccactgccaaggcccccaccaccgttgaggacagagtcggcgactccaccccagtcagcgagaagcctgtttctgcggctgtggatgccaatgcttctgaggaggacgtggctgaggtggcagcaccctcacatcaccctcatgtcactcacccctggccgccctgctggacactcgaggtcaacgccagcccagcactctcccaggaggcccagtaccagccagttttgggagtagatccgtttctggggccagaaaagccagtttcagtctttaacagtggtagatttggtaccaggttccagaaacacgatgtaagagagagtttccctgacagtgggccactctccgtggccttgtag

SEQ ID NO: 20950 - DNA, 1693 bp, Homo sapiens
  SIMILAR (386)..(607): 371254mologous to Vitis vinifera putative proline-rich cell wall protein,accession number AJ237984,Smith-Waterman Score=92.
gagactgggtctcgctctgtcgcccaagctggaatgcagaacaacactgtgtcaaaataaataagtaaataaaaggggatttaattttaaaaattaaataatatataaaaataaaagtgatctgagaaagacatattgtaacatattgggctcatatccggctcagcagcacagttctagaaatttaagacaaattctgaggttggtatagaaatacttaccagtcaaaagcacagcctaaggccttcacacaccataaaatcagtgaaactaattgcggttcttcagcatctgcggagcactggctaccagtaaggagaaagttggggatgcagataatcagtgcaccctgagaggacagtgcacctcccgccgtagcctgagagggatcggcccgattggccacgctccttcaaaccaccactttcccccgaaaaagggacgaaagcctcagcccgtagccaagaggcgagcgcggccggtgcccccggggctgccaggggccccgaagcaggcggcgctgactcccggacgccgcccgctcacacccgccgcctttgcacccaaggcctcgcgcgaccagcagaccctgccagaacattgccccaatgccctccacctggaaacttccccagtccttggaccaggccagctgggcctctttatccctgaaagcctgccactttctcttttggttccatctggaaaaagaacgtgtatgggcatcatagccaacaggaagatgagcccctgctttgtgcaagtctctgagcccgcatggagggagcatgggggctcagaacagttctttctggggcaaggttggtccttcagcgtcaagattcctgggccacttattaatagaaggcaccaggacacagaaattacaaagttcaagggttttagtgaggccacgactcagggagcccttgagagccaagctggcatcccactgctgtgcacacccagcctgggcacacagtatgaccctgcccaggcatctgcctgcggccgtctggtgaatgaccagaaacagaaccgaaagctctgtaaagtgctctcaagcagcgtccgttccgaggggctgagcacctactacctgcaagcccagcacaggcgcttcacacccccttcctaccccatggcaatgcctgagagctatagatggatctgtttcctcatccgtaaaatgggggtaagaacagtccttagcccatctgagttttgtgaggactaccgagtgaagatgtgtcaggacttagacccctgcctggcagctagcagctctccaacctctgtacctctccccgaacgcaggcccccctgcccgcaccccaacacttcaagacctcctaggagtgacctggctggggtctctctaggtcaggagttccctacccatctacggctgctgcacaccccaaccgtgcccgtggccctccacacctctgcccacactgtccccaatgccagcaacgcccctgcaactccccactgcctagaaaacctgtattcttccttccagtctcagctcagacttctttcctctcaaagtgcctctggactgccctgtctggcttttcataataggggtgacaccagcacctcacagtgttgtggtgaggatgaagtaagaaaaacacaaactgcctgggaagctgcttctgtcatcatcgccatgaggatgctctga

SEQ ID NO: 20951 - DNA, 2994 bp, Homo sapiens
  SIMILAR (1779)..(1988): 621254mologous to Homo sapiens atrial natriuretic peptide clearance receptor,accession number M59305,Smith-Waterman Score= 187.
gcatggtcgactacacgcccaaataagaagccacctctaagcaaaatagctatatgtataaacggagggcgaatatatacaagtatatatatatgtatattacagacgcacaggtttacacccggtgaactttttctttttctttttctttttcctttttttttaagaaaaactagtgacattggagagaaggacgcttcctctctatcttttggcgcattagtgaagggggtattctattttgttaaagcgcccaaggggaccgggaaccttggagagaagagtggggaggaaagaggaagggtgggtggggggcagagggcgagtcggcggcggcgagggcaagctctttcttgcggcacgatgccgtctctgctggtgctcactttctccccgtgcgtactactcggctgggcgttgctggccggcggcaccggtggcggtggcgttggcggcggcggcggtggcgcgggcataggcggcggacgccaggagagagaggcgctgccgccacagaagatcgaggtgctggtgttactgccccaggatgactcgtacttgttttcactcacccgggtgcggccggccatcgagtatgctctgcgcagcgtggagggcaacgggactgggaggcggcttctgccgccgggcactcgcttccaggtggcttacgaggattcagactgtgggaaccgtgcgctcttcagcttggtggaccgcgtggcggcggcgcggggcgccaagccagaccttatcctggggccagtgtgcgagtatgcagcagcgccagtggcccggcttgcatcgcactgggacctgcccatgctgtcggctggggcgctggccgctggcttccagcacaaggactctgagtactcgcacctcacgcgcgtggcgcccgcctacgccaagatgggcgagatgatgctcgccctgttccgccaccaccactggagccgcgctgcactggtctacagcgacgacaagctggagcggaactgctacttcaccctcgagggggtccacgaggtcttccaggaggagggtttgcacacgtccatctacagtttcgacgagaccaaagacttggatctggaagacatcgtgcgcaatatccaggccagtgagagagtggtgatcatgtgtgcgagcagtgacaccatccggagcatcatgctggtggcgcacaggcatggcatgaccagtggagactacgccttcttcaacattgagctcttcaacagctcttcctatggagatggctcatggaagagaggagacaaacacgactttgaagctaagcaagcatactcgtccctccagacagtcactctactgaggacagtgaaacctgagtttgagaagttttccatggaggtgaaaagttcagttgagaaacaagggctcaatatggaggattacgttaacatgtttgttgaaggattccacgatgccatcctcctctacgtcttggctctacatgaagtactcagagctggttacagcaaaaaggatggagggaaaattatacagcagacttggaacagaacatttgaaggtatcgccgggcaggtgtccatagatgccaacggagaccgatatggggatttctctgtgattgccatgactgatgtggaggcgggcacccaggaggttattggtgattattttggaaaagaaggtcgttttgaaatgcggccgaatgtcaaatatccttggggccctttaaaactgagaatagatgaaaacccgaattgtagagcatacaaacagctctccctgcaaatcatccaggtggcctagaagaatcggccagttgacaaggaattgtcgtgggggctttactaggagctggcttgctaatggccttctactttttcaggaagaaatacagaataaccattgaagaggcgaacccaggcaagaagaaagtgaccctgggaaaacctcgggaaattacgggaaggaatcccttcggatcccattttttcagtagcttaaaagaaagcccccccccactttttttttttctgcttgagatttctttaaagagaatagacggggtttaaagacatccaaatgaaccagaagggggcgttcttgaagaatttcataatttaaagcagttagtaatttcattttaaaatttctgtagaagctcaagaatttatgattaatcaccatctgcctccaggcctttcatctcatgacaaacaaatataataatgatatcgtgtcactctgttaaatgttccatactgtttcaagcccatatgattagatttatgtttttaaaatctgttgtctccatatcttgatggcttttgggagcatttcacacaaggatataaaatgcggttttcttaaatgaaatgttttgtagctagaataaaatcatttttacaagtacagcattcttggaaagaatttaacacccaaaaaggggaaaatgtaatgaaaaatctcaaggttggaaatacagccttactctctctagagctggaggacaggtttgtggttgaggacttctctgtccgatgtctacattcaggttctgacttcatatcttgaaaaaggatttcctccctgtctttttcagtgtctcataaacgctactctggattgttgtaaatattagtgagatgggaggatttacagaagaaaagcaagtcaaaaatatttaactttttgatgtaaaaaaaaaaagccctatttcgcactaacattttattttacaagtattttaatcttatattttggtattagaaaaatttgtctattttttcattttgaagattaaatgttgcttacattttaaaagcatgggtgaagtgtacaacaaaccaataatgataaaaaatacttctctttttctccctgtttccctttttcccttggccacagccaaatgctaattgctgctttaattacagagatgtgtaaatgtattcagattacaaactctacaggaatacatcaacaccttaactctaa

SEQ ID NO: 20952 - DNA, 733 bp, Homo sapiens
  SIMILAR (5)..(73): 911254mologous to Sus scrofa non-receptor tyrosine kinase Tyk2,accession number AF100454,Smith-Waterman Score=129.
  misc_feature (1)...(733): n = a,t,c or g
tttcgttgacattctgcgcacgctctaccacgagcacatcatcaagtacaagggctgctgcgaggaccaaggtgggcgggacccggcgagtcctagagactcgagggggcgtggctagagcgtgggtgtggccttgtgggcggggccagtctggcctagccaattagagactctcaaccccaggctgcagtacgcggttcttggcatctgggtgagcgtggctgggctgcctccttcccatctgggggagtgctaccctattgggcccagaatgaacggaagccaccaccagctccctccaagtaaggaatggggttctgattgggtccatcccacctgagacctgggtctagtgtgcgcgggtcttggccttccctcccgaccttggaggggctctgctgggctcaaggtaggcggtccccggcccgccctctatcgtcccccaccggggccgcccctctccgcggcaggcgagaagtcgctgcagctggtcatggagtacgtgcccctgggcagcctccgagattacttgccccggcacaagcatcggcttggcccagctgctgctcttcgcccagcagatctgcgaggttggtcggcnccgcccctgcttctggagcttgccccttcctcttcagcttgggctggcctgagcgatccggtgcagtctgctctcacgctccgcccctgctcgtttgcccaggctgtcttgtccttgcactgaccctgtatt

SEQ ID NO: 20953 - DNA, 1026 bp, Homo sapiens
  SIMILAR (160)..(897): 931254mologous to Homo sapiens protein tyrosine kinase,accession number X54637,Smith-Waterman Score=1230.
atgttgtccaggctggtcttgaactcccgggctcaagtgatcttcccgcctcggcctcccaaacaggaaaaagttttcttacctctagaatcggatcctggggtagctgtggctggctttgtgactcccaagtgtgggcctgctggggaaaggatcggggtcaggcctttacccaccgcaactcttccagatcttgctgacgtcttgactgtgaacccggactcaccggcgtcggaccctacggttttccacaagcgctatttgaaaaagatccgagatctgggcgagggtcacttcggcaaggtcagcttgtactgctacgatccgaccaacgacggcactggcgagatggtggcggtgaaagccctcaaggcagactgcggcccccagcaccgctcgggctggaagcaggagattgacattctgcgcacgctctaccacgagcacatcatcaagtacaagggctgctgcgaggaccaaggcgagaagtcgctgcagctggtcatggagtacgtgcccctgggcagcctccgagactacctgccccggcacagcatcgggctggcccagctgctgctcttcgcccagcagatctgcgagggcatggcctatctgcacgcgcagcactacatccaccgagacctagccgcgcgcaacgtgctgctggacaacgacaggctggtcaagatcggggactttggcctagccaaggccgtgcccgaaggccacgagtactaccgcgtgcgcgaggatggggacagccccgtgttctggtatgccccagagtgcctgaaggagtataagttctactatgcgtcagatgtctggtccttcggggtgaccctgtatgagctgctgacgcactgtgactccagccagagcccccccacggtctatcatctcatgaagaactgctgggagacagaggcgtcctttcgcccaaccttcgagaacctcatacccattctgaagacagtccatgagaagtaccaaggccaggccccttcagtgttcagcgtgtgctga

SEQ ID NO: 20954 - DNA, 4294 bp, Homo sapiens
  SIMILAR (676)..(2043): 721254mologous to Mus musculus tyrosine kinase TYK2,accession number AF173032,Smith-Waterman Score=1742.
gttcgagcttgtgttcccccggaagggtgagtctggacgcgggcgcggaaggagcgcggccggaggtcctcaggaagaagccgcggggactggctgcgcttgacaggctgcacttggatgggagcacctggtgcctcgggactgctccgatgcccgggtctgtgctgaatgtgtaatatgcggaactatattgaaacattacaaccatcttttgatggcaacaccctgaggaccttcccttttccagatggggaaactgaggcccagaattgctaagtggcttgcttgagttgacacagggagctccaggactcaccctcagctgagccacctgccgggagcatgcctctgcgccactgggggatggccaggggcagtaagcccgttggggatggagcccagcccatggctgccatgggaggccctgaaggtgcttctgcactgggctggtccaggcggcggggagccctgggtcactttcagtgagtcatcgctgacagctgaggaagtctgcatccacattgcacataaagttggtatcactcctccttgcttcaatctctttgccctcttcgatgctcaggcccaagtctggttgcccccaaaccacatcctagagatccccagagatgcaagcctgatgctatattttccgccataggttttattcccgggaactggcatggcatgaatcctcgggaaccggctgtgtaccgttgtgggcccccaggaaccgaggcatcctcagatcagacagcacaggggatgcaactcctggacccagcctcatttgagtacctctttgagcagggcaagcatgagtttgtgaatgacgtggcatcactgtgggagctgtcgaccgaggaggagatccaccactttaagaatgagagcctgggcatggcctttctgcacctctgtcacctcgctctccgccatggcatccccctggaggaggtggccaagaagaccagcttcaaggactgcatcccgcgctccttccgccggcatatccggcagcacagcgccctgacccggctgcgccttcggaacgtcttccgcaggttcctgcgggacttccagccgggccgactctcccagcagatggtcatggtcaaatacctagccacactcgagcggctggcaccccgcttcggcacagagcgtgtgcccgtgtgccacctgaggctgctggcccaggccgagggggagccctgctacatccgggacagtggggtggcccctacagaccctggccctgagtctgctgctgggcccccaacccacgaggtgctggtgacaggcactggtggcatccagtggtggccagtagaggaggaggtgaacaaggaggagggttctagtggcagcagtggcaggaacccccaagccagcctgtttgggaagaaggccaaggctcacaaggcagtcggccagccggcagacaggccgcgggagccactgtgggcctacttctgtgacttccgggacatcacccacgtggtgctgaaagagcactgtgtcagcatccaccggcaggacaacaagtgcctggagctgagcttgccttcccgggctgcggcgctgtccttcgtgtcgctggtggacggctatttccgcctgacggccgactccagccactacctgtgccacgaggtggctcccccacggctggtgatgagcatccgggatgggatccacggacccctgctggagccatttgtgcaggccaagctgcggcccgaggacggcctgtacctcattcactggagcaccagccacccctaccgcctgatcctcacagtggcccagcgtagccaggcaccagacggcatgcagagcttgcggctccgaaagttccccattgagcagcaggacggggccttcgtgctggagggctggggccggtccttccccagcgttcgggaacttggggctgccttgcagggctgcttgctgagggccggggatgactgcttctctctgcgtcgctgttgcctgccccaaccaggagaaacctccaatctcatcatcatgcggggtttcttgttccagccccaggacactcaacctcagccagctcagcttccaccgggttgaccagaaggagatcacccagctgtcccacttgggccagggcacaaggaccaacgtgtatgagggccgcctgcgagtggagggcagcggggaccctgaggagggcaagatggatgacgaggaccccctcgtgcctggcagggaccgtgggcaggagctacgagtggtgctcatagtgctgcaccctagtcaccatgacatcgccctggccttctacgagacagccagcctcatgagccaggtctcccacacgcacctggccttcgtgcatggcgtttgtgtgcgcggccctgaaaatatcatggggacagagtacgtggagcacggacccctggatgtgtggctgcggagggagcggggccatgtgcccatggcttggaagatggtggtggcccagcagctggccagcgccctcagctacctggagaacaagaacctggttcatggtaatgtgtgtggccggaacatcctgctggcccggctggggttggcagaaggcaccagccccttcatcaagctgagtgatcctggcgtggagcctgtgcgccctctccagggaggagcgggtggagaggatcccctggctggcccccgaatgcctaccaggtggggcctccagcttaagctccgccatggacaagtgggggtttggcccctccctcctggagatctgctttgacggagaggcctctgtgaagagccgcagtccctccgagaaggagcatttctaccagaggcagcaccggctgcccgagccctcctgcccacagctggccacactcaccagccagtgtctgacctatgagccaacccagaggccatcattccgcaccatcctgcgtgacctcacccggctgcagccccacaatcttgctgacgtcttgactgtgaacccggactcaccggcgtcggaccctacggttttccacaagcgctatttgaaaaagatccgagatctgggcgagggtcacttcggcaaggtcagcttgtactgctacgatccgaccaacgacggcactggcgagatggtggcggtgaaagccctcaaggcagactgcggcccccagcaccgctcgggctggaagcaggagattgacattctgcgcacgctctaccacgagcacatcatcaagtacaagggctgctgcgaggaccaaggcgagaagtcgctgcagctgggcatggagtacgtgcccctgggcagcctccgagactacctgccccgtcacagcatcgggctggcccagctgctgctcttcgcccagcagatctgcgagggcatggcctatctgcacgcgcagcactacatccaccgagacctagccgcgcgacaacgtgatgctggacaacgacaggctggctcaagatcggggactttggcctagccaaggccgtgcccgaaggccacgagtactaccgcgtggggcgaggcatggggacagccccgtgttctgggtatgccccagagtgcctgaaggagtactaagttctactatgcgtcagatgtctggtcccttcggggtgagcctgtatgatctgctgacgcacatgtgactccagcccagagccccccccacgatattcccttgaggctcataggcattgctcagggtcagatgacagttctgagacttcactgagtttgctggaaacgaaggggaaaaggctgccacggcccgacaaatgtccctgtgaaggtctatcatctcaatgaaagaactgctgggagacagaggcgtccttttcgccccaaaccttcgagaaccttcatacccattctgaaagaaagtcccatgagaaagtacccaaaggcccaggcccccttcaagtgttcaaacgtgtgctgagggcacaaatgggaagccctgccctgggaaggactggaccgagcaagtgggctgccagcaggagccttcttgctccctggctccaaggaatgaaacccaagaggggggatgtcagcctcacccacaccgtgtgccttacttcctgtctagagaccccacctttgtgaaacttatttttctttcttgggccgtgagcctaaccatgatctttgagggacccaacatttggtaggggcactaaatccagccctttaaaaatcccccagcttccaaacttgaggcccaccatctccaccatctggtaataaactcatgttttctctgaaaaaaaaaaaaaaagggcggccgct

SEQ ID NO: 20955 - DNA, 819 bp, Homo sapiens
  SIMILAR (2)..(481): 291254mologous to Drosophila melanogaster sperm protein,accession number X67704,Smith-Waterman Score=115.
atgccctccctccaggccctgctgcccgggagcccagcacccaccctggtggggagcagacagcacgtgctcctgccgcaagcagcactttctgggcttctgggcttccagctgcagtccccgctagcccctcccggcccctggccattacagcccattgcaggctgggaggctaaacaggaggccggggtcaccgaccagggttggttcactgctgggccctgtggacttgttctcatgctttgtcagtgtcgatgtcgaaagcccaaagtgtttcccaagtcctgctaccttgcccgtgtgagcgtgttgttggccgtgtgctgtgtgtacgtggaactctgtcccgtggtctcacactcagcccgtgtgagcgtgttgttggccgtgtgctgtgtgtacgtggaactctgtcccgtggtgtcacactcagcccgtgtgagcgtgttggccgtgtgctgcggctgcagcaagcagaccttcgcatcaacacagcagacaccaaaaaccagtgagagccccgctctctaccgcccggccccagcactcgctagctttcctgacacctggaactgtgcacctggcaccaagcggaaaataaactccaagcagccagtagccccgatgatgagtaaagaatgtcaattcctggcaggtcccagaatcttaagataccttagggacctcaagaagagaggaattcccctaaatctgtacttattgcaggcaaagtctgatggcaagtctttgcgatggcttcctagcctcaagaggcttttaaaagcccaatctcagattccttataaaaagttccagtag

SEQ ID NO: 20956 - DNA, 911 bp, Homo sapiens
  SIMILAR (808)..(449): 311254mologous to Pneumocystis carinii kexin-like serine endoprotease,accession number AF009223,Smith-Waterman Score=131.
ctactggaactttttataaggaatctgagattgggcttttaaaagcctcttgaggctaggaagccatcgcaaagacttgccatcagactttgcctgcaataagtacagatttaggggaattcctctcttcttgaggtccctaaggtatcttaagattctgggacctgccaggaattgacattctttactcatctgtaagggaaccacgtatgtgaggtaccaggccagcttttttccaaggggctttattggaccatgcagtcaaccctaactcctttagtcgtatctgaaaatagggcacaattgaaaacattggttatattaccaagtctttgactggaatgtcctattttcaattgtgcccatcggggctactggcctgcttggaagtttaattttccggcttggttgcccaggtgcacaggttccaggtgtcaggaaaagcttagcgagtgctggggccgggccggtaggagagcggggctctcactgggtttttggtgtcttcctgtgtggatgcgaaaggtctgctttgctgcagccgccctaagttaacagggtggggggtgggaggtggggaggggggcgagggatgcggagtggggagaggggcggggaggggctctggtggactagcgcctccgcaggccgtggggctcggtggtaaccgctcaggtcaggacgggggcccagcgctgtgctgtggtggactgatccgccgtgcttgctcctcgcgggatgccgaggcagtccaaaagggggcatgctgcgtgaaggcctgggcagtttcccgattgtctgcgggtggcagatacttggtgcttgagtggatcgtgctgttccgaaaaagaagtggcccccgaatgtgccgggtatcctttgtgaaacctgggggtgcgaatgtcctcccc

SEQ ID NO: 20957 - DNA, 1236 bp, Homo sapiens
  SIMILAR (702)..(740): 921254mologous to Homo sapiens DNA ligase I,accession number M36067,Smith-Waterman Score=64.
atggatgggagtgggggctaccggaaggagaaaagacccactgttttctgtcttcattccagccccccggaagccagcagtcaaaaaagaagtgaaggaagaggagccagggctccaggaaaggagggagctgctgagggacccctggatccatctggtacaatcctgccaagaacaactatcatcccgtggaagatgcctgctggaaccgggccagaaggttcttacctggctgtggcccggacgtttgagaagatcgaggaggtgtctgctgctccggatggtggagacgctgagcaacttgctgcgctccgtggtggcctgtcgcctccagacctcctccctgtcctctacctcagcctcaaccacctgggccaccccagcagggcctggagcttggcgtgggtgatggtgtccttccaaggcagtggcccaggccacagctcttcacccaggcgcccatgggacccagctctggacatgaccttgtcccgcctgtgctttaaatcccatccgcgccctgatgacaccggcccagatgtctccccgagtgtggtcatgctcgttcatccaccgctttcctggctccacgtgcattttgctgacttcctacagccagcgtggctgggggcacgttccccaagcctttctaccaagtggtccacagccaagaagatagacatcatcaaaggcctctttgtgcctgccgccactcagaagcccggttcatcgctagggcagctgagatgggaggtgctggtgcacctacttgtgcccctccccgtctatgctagtgggcaggatcattactgcctggctcagtttcctcatcgtcacatggggctgtgtgatatctggggtcccttccaggctctgaagatcttctggtttttgaggagagggtctacatacatcaaggtcgaggagatcgagaagggaggaggcaagattggggaggtccctgagcggacggctgcgccttgggctggagagcagtcggtgctggctgccctctcccaggcagtgagcctcacgccccgggccaagggatcccctgaaaccaatgttggcccatcccacccggggcatcagcgaggtccgaaacgctttgaggaggcagctttcacctgcgaatacaaatatgacgggagagggcacaggtatggggagtgggacatgtcccttccacagacaggaaacgtcaaagagcaggggtgtggggtcactgaggcctga

SEQ ID NO: 20958 - DNA, 822 bp, Homo sapiens
  SIMILAR (273)..(431): 421254mologous to Mus musculus DNA ligase I,accession number U04674,Smith-Waterman Score=82.
atgcagcaagatccacgccctggaaggcgggaggtgaagatcttcagcaggaatcaggaagacaacactgggaagtaccggacatcatcagccgcatccccaagattaaactcccatcggtcaatccttcatcctggacaccgaagccgtggcttgggaccgggaaaagaagagatccagccattccaagtgctcaccacccgcaaacgcaaggaggtggatgcgtctgagatccaggtgcagctgctccgggagaactttgtggagacagaggcgagtttgtcttcgccacctccctggacaccaaggacatcgagcagatcccgagttcctggagcagtcagtgaaagactcctgcgaggggcgatggtgaagaccctggatgttgatgccacctacgagatcgccaagagacgcacaactggctcaagtgttgtatatgccctaagcaatatggcaacaggacctgaatgcccgcacaagagttttcaacttggaactggcttcagtgatgaggagctggaggagcataccagagcctcaaggcgctggtgctgcccagcccacgcccttactgcggatagatggcgctgtgattcccgaccactggctggaccccagcgcgtgtgggaggtggatagtgacaaggcatctcccttcgcttccctcggtttattcgagtccgtgaagacaagcgccggagcaggccaccaccagtgctcaggtggcctgtttgtaccggaagcaaagtcagatcagaaccaacaaggcgaggactcaggctctgaccctgaagatacctacaagccctcgccctcctag

SEQ ID NO: 20959 - DNA, 387 bp, Homo sapiens
  SIMILAR (42)..(80): 921254mologous to Homo sapiens DNA ligase I,accession number M36067,Smith-Waterman Score=64.
tccacagccaagaagatagacatcatcaaaggcctctttgtgcctgccgccactcagaagcccggttcatcgctagggcagctgagatgggaggtgctggtgcacctacttgtgcccctccccgtctatgctagtgggcaggatcattactgcctggctcagtttcctcatcgtcacatggggctgtgtgatatctggggtcccttccaggctctgaagatcttctggtttttgaggagagggtctacatacatcaaggtcgaggagatcgagaagggaggaggcaagattggggaggtccctgagcggacggctgcgccttgggctggagagcagtcggtgctggctgccctctcccaggcagtgagcctcacgccccgggccaag

SEQ ID NO: 20960 - DNA, 367 bp, Homo sapiens
  SIMILAR (190)..(264): 961254mologous to Mus musculus DNA ligase I,accession number U04674,Smith-Waterman Score=123.
ggaatgaggttgtcggaattagctaagagccgttaacgatccagcacctggagccagcagcatggccgccctcacagatgggcagccagttaggtggcgagagggagaccggtagatgaatgctgtcggcctcaggcacagtgccccgtctcaccttcctgcactcacgaactccgttgtgccccaacccaggaggtggatgcgtctgagatccaggtgcaggtgtgtttgtacgccttcgacctcatctacctcaatggagaggtgagttccagcttcctgcccctctgacttccatttccgactctgccacttcacatggccaggaagccacacttgggcagcagttctcaaagtgtggtctgag

SEQ ID NO: 20961 - DNA, 1260 bp, Homo sapiens
  SIMILAR (7)..(921): 911254mologous to Homo sapiens DNA ligase I,accession number M36067,Smith-Waterman Score=1399.
atgaagaagaaaatgatgatccacgccctggaaggcggggaggtgaagatcttcagcaggaatcaggaagacaacactgggaagtacccggacatcatcagccgcatcccccaaggtgggcgtctgcctcacacttgcactctgccagggtctgtgattaaactcccatcggtcacatccttcatcctggacaccgaagccgtggcttgggaccgggaaaagaagcagatccagccattccaagtgctcaccacccgcaaacgcaaggaggtggatgcgtctgagatccaggtgcaggtgtgtttgtacgccttcgacctcatctacctcaatggagagtccctggtacgtgagcccctttcccggcgccggcagctgctccgggagaactttgtggagacagagggcgagtttgtcttcgccacctccctggacaccaaggacatcgagcagatcgccgagttcctggagcagtcagtgaaagactcctgcgaggggctgatggtgaagaccctggatgttgatgccacctacgagatcgccaagagatcgcacaactggctcaagctgaagaaggactaccttgatggcgtgggtgacaccctggacctggtggtgatcggcgcctacctgggccgggggaagcgggccggccggtacgggggcttcctgctggcctcctaccgaccgaggacagtgaaggagctgcaggccatatgcaagcttggaactggcttcagtgacgaggagctggaggagcatcaccagagcctcaaggcgctggtgctgcccagcccacgcccttacgtgcggatagatggcgctgtgattcccgaccactggctggaccccagcgctgtgtgggaggtgaagtgcgctgacctctccctctctcccatctaccctgctgcgcggggcctgaagtcagtaatgcctactactggtgagtatatggagcacaaatcagacgaaggaaacaccccgcagcctgcacatgctcagatggagctctgggcccgcgggttctactgcgcaggccctcacactcagcaaagggacttggacgcgaaagcgctggtggcgctcagccggctgggagttgtagctttctggctgctacagcaggagatacaggtggccaatgggagagagctgtcttttgaagaaatccatcgcacgaaaagcaggcgagagaggggaaacctgacattgtttgagcccctgcagtcagctgccatcaaagcctttgacttcgcatga

SEQ ID NO: 20962 - DNA, 3178 bp, Homo sapiens
  SIMILAR (1270)..(2928): 651254mologous to Homo sapiens DNA ligase I,accession number M36067,Smith-Waterman Score=1569.
tttcgtcgcgaacttgggactgcagaggcgcgcctggcggatctgagtgtgttgcccgggcagcggcgcgcgggaccaacgcaaggagcagctgacagacgaagaaaagtgctggacaggaagggagaattctgacgccaacatgcagcgaagtatcatgtcatttttccaccccaagaaagagggtaaagcaaagaagcctgagaaggaggcatccaatagcagcagagagacggagccccctccaaaggcggcactgaaggagtggaatggagtggtgtccgagagtgactctccggtgaagaggccagggaggaaggcggcccgggtcctgtgcagcgaaggggaagaggaggatgaagcccttagccctgctaaaggccagaagcctgcccttgactgctcacaggtctccccgccccgtcctgccacatctcctgagaaacaatgcttccctctctgacacctctcccatggacagttccccatcagggattccgaagcgtcgcacagctcggaagcagctcccgaaacggaccattcaggaagtcctggaagagcagagtgaggacgaggacagagaagccaagaggaagaaggaggaggaagaagaggagaccccgaaagaaagcctcacagaggctgaagtggcaacagagaaggaaggagaagacggggaccagcccaccacgcctcccaagcccctaaagacctccaaagcagagaccccgacggaaagcgtttcagagcctgaggtggccacgaagcaggaactgcaggaggaggaagagcagaccaagcctccccgcagagctcccaagacgctcagcagcttcttcaccccccggaagccagcagtcaaaaaagaagtgaaggaagaggagccaggggctccaggaaaggagggagctgctgagggacccctggatccatctggttacaatcctgccaagaacaactatcatcccgtggaagatgcctgctggaaaccgggccagaaggttccttacctggctgtggcccggacgtttgagaagatcgaggaggtgtctgctcggctccggatggtggagacgctgagcaacttgctgcgctccgtggtggccctgtcgcctccagacctcctccctgtcctctacctcagcctcaaccaccttgggccaccccagcagggcctggagcttggcgtgggtgatggtgtccttctcaaggcagtggcccaggccacaggtcggcagctggagtccgtccgggctgaggcagccgagaaaggcgacgtggggctggtggccgagaacagccgcaggcacccagaggctcatgctgccaccacctccgctcactgcctccggggtcttcagcaagttccgcgacatcgccaggctcactggcagtgcttccacagccaagaagatagacatcatcaaaggcctctttgtggcctgccgccactcagaagcccggttcatcgctaggtccctgagcggacggctgcgccttgggctggcagagcagtcggtgctggctgccctctcccaggcagtgagcctcacgcccccgggccaagaattcccaccagccatggtggatgctgggaagggcaagacagcagaggccagaaagacgtggctggaggagcaaggcatgatcctgaagcagacgttctgcgaggttcccgacctggaccgaattatccccgtgctgctggagcacggcctggaacgtctcccggagcactgcaagctgagcccaggggattcccctgaaaccaatgttggcccatcccacccggggcatcagcgaggtcctgaaacgctttgaggaggcagctttcacctgcgaatacaaatatgacgggcagagggcacagatccacgccctgggaaggcggggaggtgaagatctttcagcaggaatcaggaagacaacactggggaagtacccggacattcatcagccgcatccccaagatttaaattcccttcggttcacatcctttcatcctggggacacccgaagccgtggctttgggggacccggggaaaagaagcagttcccagccttttccaagttgtttaaccaccccgcaaacgcaaggaggtggatgcgtctgagatccaggtgcaggtgtgtttgtacgccttcgacctcatctacctcaatggagagtccctggtacgtgagcccctttcccggcgccggcagctgctccgggagaactttgtggagacagagggcgagtttgtcttcgccacctccctggacaccaaggacatcgagcagatcgccgagttcctggagcagtcagtgaaagactcctgcgaggggctgatggtgaagaccctggatgttgatgccacctacgagatcgccaagagatcgcacaactggctcaagctgaagaaggactaccttgatggcgtgggtgacaccctggacctggtggtgatcggcgcctacctgggccgggggaagcgggccggccggtacgggggcttcctgctggcctcctacgacgaggacagtgaggagctgcagccccatatgcaagcttggaactggccttcagtgatgaggagctggaggagcatcaccagagccctcaaggcgcgtggtgctgccccagccccagccccttacgtgcgggatagatggccgctgtgattcccggacccacttgcctggacccccagcgcttgtgtgggaggtgaagtgcgctgacctctccctctctcccatcctaccctcgtgcgcggggcctggtggaataagtgaccaagggccatctccccttcgcttcccctcggtttattcgagtcccgtgaagacaagccagccggaagcaggcccacccacccagtgtctcaggtggccctgtttgtacccggaagcaaagtcaagatttcaagaaccaacaaaggcgaggacttcaggctcttgaccctgaaagataccttactaaagccctcggccctccctagggccctgggtacagggcaatgaagttggacggaccccaagggttattattgcctttgctttttagcaaatctgctgtggcaggctgtggattttgagagtccaggggaggggtgtgtgtgtgagggggtggcttactccggagtctgggattcatcctcgtcatttctttcaataaataatatatcggataaaaaaa

SEQ ID NO: 20963 - DNA, 403 bp, Homo sapiens
  SIMILAR (64)..(402): 941254mologous to Homo sapiens chromosome-associated polypeptide-C,accession number AB019987,Smith-Waterman Score=555.
cccggagccgaaacaccggtaggagcggggaggtgggtactacacaaccgtctccagccttggtctgagtggactgtcctgcagggtgaagttgaacaaattgctatgatgaaaccaaaaggccagactgaacacgatgagggtatgcttgaatatttagaagatataattggttgtggacggctaaatgaacctattaaagtcttgtgtcggagagttgaaatattaaatgaacacagaggagagaagttaaacagggtaaagatggtggaaaaggaaaaggatgccttataaggagagaaaaacatagctatcgaatttcttaccttggaaaatgaaatatttagaaaaaagaatcatgtttgtcaatattatatttatgagttgcagaaacgaattgctg

SEQ ID NO: 20964 - DNA, 637 bp, Homo sapiens
  SIMILAR (1)..(63): 851254mologous to Homo sapiens chromosome-associated polypeptide-C,accession number AB019987,Smith-Waterman Score=90.
  misc_feature (1)...(637): n = a,t,c or g
ttacagggtgaagttgaacaaantgctatgatgaaacaaaaggcccagactgaacacgatgaggttaaacagggtaaagatggtggaaaaggaaaagnatgccttagaaggagagaaaaacatagctatcgaatttcttaccttgganaatgaaatatttagaanaaagaatcatgtttgtcaatattatatttatgagttgcagaaacgaattgctgaaatggaaactcaaaaggaaaaaattcatgaagataccaaagaaattaatgagaagagcaatatactatcaaatgaaatgaaagctaagaataaagatgtaaaagatacagaaaagaaactgaataaaattacaaaatttattgaggagaataaagaaaaatttacacagctagatttggaagatgttcaagttagagaaaagttaaaacatgccacgagtaaagccaaaaaactggagaaacaacttcaaaaagataaagaaaaggttgaagaatttaaaagtatacctgccaagagtaacaatatcattaatgaaacaacaaccagaaacaatgccctcgagaaggaaaaagagaaagaagaaaaaaaattaaaggaagttatggatagccttaaacaggaaacacaagggcttcag

SEQ ID NO: 20965 - DNA, 4902 bp, Homo sapiens
  SIMILAR (1444)..(3147): 991254mologous to Homo sapiens chromosome-associated polypeptide-C,accession number AB019987,Smith-Waterman Score=2838.
atgactgtaacccagtcttttccagctacacccggagccccgctgccgccagggagacagaaaatgatgctccacgaagcacacagcttcaaaacaggaaagatgggatccagtgatggctacaacttccaaacccttttctcaccaggtccagaggtgaagggatttacctcaagttccaggaaagcggtggcgattgctctcaaatacctggtcttgttaagaaaccagtcctgccttcttgccactcgtgtctttcgatggctcccttcccgaagtcccgctgcctctaagcggagtgttaagcggggctctcggaagccggtggaccgagatttccccggagaggaagggccgccgccgccgtcccctgacggcgccagcagcgacgcggagcctgagccgccgtccggccgcacggagagcccagccaccgccgcaggaacaccagtgtattcagtagcgtggggccctgattcagaaaaggttctttatacagcaggcaagcagctaatcattaaacctcttcaaccaaatgctaaagttttgcagtggaaagctcatgatggcattattttaaaagtagattggaactcggtcaatgatcttattttatctgctggtgaagactgtaaatataaggtatgggatagttacggccgcccactgtacaattcacaacctcatgagcatcccattacttcagttgcctgggctccagatggagaattatttgctgttggatcgtttcatactttacgcttgtgtgataaaactgggatagtgaagtggaacttgttaaccagtgaaacaactcaaatagtaaagcttcctgatgatatttaccctattgattttcactggtttccaaaaagtttgggtgtaaagaaacaaacccaggcagaaagctttgtcctcacaagttctgatggtaaatttcatctgatttccaagttaggaagagtggaaaaaagtgtagaagctcactgtggagcagtacttgcaggaagatggaattatgaaggaacagcattagttacagcagtgaccatcttgttgcaggaaaacaagttcagggctcccactgattctatgttatggaagcttttgtccagtgatcgaaatccaccaattgatgacttaataaaatctggaatattgcccattttagtccattgtcttgaaagagatgacaatccttctttacagtttgaagctgcatgggctttgacaaacattgcatctggaacttctgaacaaactcaagcagtagttcagtccagtgatgggccccagtgtagagattatgtcataagtcttggagttgtgaaacctttactttccttcataagtccatctattcctataacattcttaagaaatgttacttgggttatggtcaacttatgtcgccacaaagacccaccaccaccaatggaaaccattcaggagatggctgtatgggcgaaaaagatgaccgaaattcaaactcctgaaaatactcctcgtttatttgatttagtaaaagtaaaagatgagaaaattcgccaagctttttattttgctttacgagataccttagtagctgacaacttggatcaagccacaagagtagcatatcaaaaagatagaagatggagagtggtaactttacagggacaaatcatagaacagtcaggtacaatgactggtggtggaagcaaagtaatgaaaggaagaatgggttcctcacttgttattgaaatctctgaagaagaggtaaacaaaatggaatcacagttgcaaaacgactctaaaaaagcaatgcaaatccaagaacagaaagtacaacttgaagaaagagtagttaagttacggcatagtgaacgagaaatgaggaacacactagaaaaatttactgcaagcatccagcgtttaatagagcaagaagaatatttgaatgtccaagttaaggaacttgaagctaatgtacttgctacagcccctgacaaaaaaaagcagaaattgctagaagaaaacgttagtgctttcaaaacagaatatgatgctgtggctgagaaagctggtaaagtagaagctgaggttaaacgcttacacaataccatcgtagaaatcaataatcataaactcaaggcccaacaagacaaacttgataaaataaataagcaattagatgaatgtgcttctgctattactaaagcccaagtagcaatcaagactgctgacagaaaccttcaaaaggcacaagactctgtcttgcgtacagagaaagaaataaaagatactgagaaagaggtggatgacctaacagcagagctgaaaagtcttgaggacaaagcagcagaggtcgtaaagaatacaaatgctgcagaggaatccttaccagagatccagaaagaacatcgcaatctgcttcaagaattaaaagttattcaagaaaatgaacatgctcttcaaaaagatgcacttagtattaagttgaaacttgaacaaatagatggtcacattgctgaacataattctaaaataaaatattggcacaaagagatttcaaaaatatcactgcatcctatagaagataatcctattgaagagatttcggttctaagcccagaggatcttgaagcgatcaagaatccagattctataacaaatcaaattgcacttttggaagcccggtgtcatgaaatgaaaccaaacctcggtgccatcgcagagtataaaaagaaggaagaattgtatttgcaacgggtagcagaattggacaaaattacttatgaaagagacagttttagacaggcatatgaagatcttcggaaacaaaggcttaatgaatttatggcaggtttttatataataacaaataaattaaaggaaaattaccaaatgcttactttgggaggggacgccgaactcgagcttgtagacagcttggatcctttctctgaaggaatcatgttcagtgttcgaccacctaagaaaagttggaaaaagatcttcaacctttcgggaggagagaaaacacttagttcattggctttagtatttgctcttcaccactacaagcccactcccctttacttcatggatgagattgatgcagcccttgattttaaaaatgtgtccattgttgcattttatatatatggggattttggcactcaaaaagaagctgcttgggccataagtaacttaacaattagtggaaggaaagatcaagtggcttaccttatccaacaaaatgttatcccacctttttgcaacttgctgactgtaaaagatgcacaagttgtgcaagtagtactcgatggactaagtaatatattaaaaatggctgaagatgaggcagaaaccataggcaatcttatagaagaatgtggagggctggagaaaattgaacaacttcaaaatcatgaaaatgaagacatctacaaattggcctatgagatcattgatcagttcttctcttcagatgatgtatttaataattttgtagttttcttaattttatatataaacatagatctggataaagtaatatatataggtgaagttgaacaaattgctatgatgaaaccaaaaggccagactgaacacgatgagggtatgcttgaatatttagaagatataattggttgtggacggctaaatgaacctattaaagtcttgtgtcggagagttgaaatattaaatgaacacagaggagagaagttaaacagggtaaagatggtggaaaaggaaaaggatgccttagaaggagagaaaaacatagctatcgaatttcttaccttggaaaatgaaatatttagaaaaaagaatcatgtttgtcaatattatatttatgagttgcagaaacgaattgctgaaatggaaactcaaaaggaaaaaattcatgaagataccaaagaaattaatgagaagagcaatatactatcaaatgaaatgaaagctaagaataaagatgtaaaagatacagaaaagaaactgaataaaattacaaaatttattgaggagaataaagaaaaatttacacagctagatttggaagatgttcaagttagagaaaagttaaaacatgccacgagtaaagccaaaaaactggagaaacaacttcaaaaagataaagaaaaggttgaagaatttaaaagtatacctgccaagagtaacaatatcattaatgaaacaacaaccagaaacaatgccctcgagaaggaaaaagagaaagaagaaaaaaaattaaaggaagttatggatagccttaaacaggaaacacaagggcttcagaaagaaaaagaaagtcgagagaaagaacttatgggtttcagcaaatcggtaaatgaagcacgttcaaagatggatgtagcccagtcagaacttgatatctatctcagtcgtcataatactgcagtgtctcaattaactaaggctaaggaagctctaattgcagcttctgagactctcaaagaaaggaaagctgcaatcagagatatagaaggaaaactccctcaaactgaacaagaattaaaggagaaagaaaaagaacttcaaaaacttacacaagaagaaacaaactttaaaagtttggttcatgatctctttcaaaaagttgaagaagcaaagagctcattagcaatgaatcgaagtagggggaaagtccttgatgcaataattcaagaaaaaaaatctggcaggattccaggaatatatggaagattgggggacttaggagccattgatgaaaaatacgacgtggctatatcatcctgttgtcatgcactggactacattgttgttgattctattgatatagcccaagaatgtgtaaacttccttaaaagacaaaatattggagttgcaacctttataggtttagataaggtgcccgccaccacacccagctaa

SEQ ID NO: 20966 - DNA, 396 bp, Homo sapiens
  SIMILAR (162)..(395): 961254mologous to Homo sapiens chromosome-associated protein- C,accession number AF092564,Smith-Waterman Score=385.
gtgatgggccccagtgtagagattatgtcataagtcttggagttgtgaaacctttactttccttcataagtccatctattcctataacattcttaagaaatgttacttgggttatggtcaacttatgtcgccacaaagacccaccaccaccaatggaaaccattcaggagatggctgtatgggcgaaaaagatgaccgaaattcaaactcctgaaaatactcctcgtttatttgatttagtaaaagtaaaagatgagaaaattcgccaagctttttattttgctttacgagataccttagtagctgacaacttggatcaagccacaagagtagcatatcaaaaagatagaagatggagagtggtaactttacagggacaaatcatagaacagtcag

SEQ ID NO: 20967 - DNA, 408 bp, Homo sapiens
  SIMILAR (1)..(75): 301254mologous to Homo sapiens A human RIP60 polypeptide proline-rich domain,accession number Y93990,Smith-Waterman Score= 43.
tcgagtgacggacccggagccgaaacaccggtaggagccccggaggtgggtactacacaaccgtctccaagccttgggtctgagtggactgtcctgcaggtaaagtacttctcttcctggtcaggttgtcacgctcttacttcctgccttgtccgcgagcgcctggaaaatagaggccttgagcccgagcggcgaagtccgggcttgaagctgccgctgggagatttctcttgctgtcacccctcccccctcggccgctccccggcggcccgggctcccgcgcgcaagctcccgggcgccacttttccaagctactcaaatgtctcggggaggccctgaagcctcgcagatcttttctttaaaaaatcctaagtctctatctggaaaagggcgtctccccctacccct

SEQ ID NO: 20968 - DNA, 1218 bp, Homo sapiens
  SIMILAR (442)..(816): 1001254mologous to Homo sapiens importin alpha 3,accession number U93240,Smith-Waterman Score=634.
atgactgtaacccagtcttttccagctacacccggagccccgctgccgccagggagacagaaaatgatgctccacgaagcacacagcttcaaaacaggaaagatgggatccagtgatggctacaacttccaaacccttttctcaccaggtccagaggtgaagggatttacctcaagttccaggaaagcggtggcgattgctctcaaatacctggtcttgttaagaaaccagtcctgccttcttgccactcgtgtctttcgatggctcccttcccgaagtcccgctgcctctaagcggagtgttaagcggggctctcggaagccggtggaccgagatttccccggagaggaagggccgccgccgccgtcccctgacggcgccagcagcgacgcggagcctgagccgccgtccggccgcacggagagcccagccaccgccgcagcactcctgacacatcccaaagagaaaattaataaagaagcagtgtggttcctctccaacatcactgcaggaaatcagcagcaggtacaggcagtaattgatgccaatcttgtaccaatgataatacaccttttggataagggggattttggcactcaaaaagaagctgcttgggccataagtaacttaacaattagtggaaggaaagatcaagtggcttaccttatccaacaaaatgttatcccacctttttgcaacttgctgactgtaaaagatgcacaagttgtgcaagtagtactcgatggactaagtaatatattaaaaatggctgaagatgaggcagaaaccataggcaatcttatagaagaatgtggagactctggaacatctgaaatggtgaatccacaggtagtaaatgggaaggagataacagaaaaattgaaggaagtggaagaagcactgggagggcactggaagcttttgtccagtgatcgaaatccaccaattgatgacttaataaaatctggaatattgcccattttagtccattgtcttgaaagagatgacaatccttctttacagtttgaagctgcatgggctttgacaaacattgcatctggaacttctgaacaaactcaagcagtagttcagtccaaccacactctgtgtactaggacccccagaattctggccaaacaccctgagtgcacttctaatgcctgtataaggcctcttatgctggcatccacagcaggcaaaggaatgagtaaaaggtag

SEQ ID NO: 20969 - DNA, 1761 bp, Homo sapiens
  SIMILAR (1)..(471): 1001254mologous to Homo sapiens chromosome-associated polypeptide-C,accession number AB019987,Smith-Waterman Score=826.
atgaccaatgaagctggagctcctcggcttatgataactcatattgtaaaccagaacttcaaatcctatgctggggagaaaattctgggacctttccataagcgcttttcctgtattatcgggccaaatggcagtggcaaatccaatgttattgattctatgctttttgtgtttggctatcgagcacaaaaaataagatctaaaaaactctcagtattaatacataattctgatgaacacaaggacattcagagttgtacagtagaagttcattttcaaaagataattgataaggaaggggatgattatgaagtcattcctaacagtaatttctatgtatccagaacggcctgcagagataatacttctgtctatcacataagtggaaagaaaaagacatttaaggatgttggaaatcttcttcgaagccatggaattgacttggaccataatagatttttaattttacaggaaatgcacaattttgaggaagagttaacttgtcccatatgttatagtatttttgaagatcctcgtgtactgccatgctctcatacattttgtagaaattgtttggaaaacattcttcaggcatctggtaacttttatatatggagacctttacgaattccactcaagtgccctaattgcagaagtattactgaaattgctccaactggcattgaatctttacctgttaattttgcactaagggctattattgaaaagtaccagcaagaagaccatccagatattgtcacctgccctgaacattacaggcaaccattaaatgtttactgtctattagataaaaaattagtttgtggtcattgccttaccataggtcaacatcatggtcatcctatagatgaccttcaaagtgcctatttgaaagaaaaggacactcctcaaaaactgcttgaacagttgactgacacacactggacagatcttacccatcttattgaaaagctgaaagaacaaaaatctcattctgagaaaatgatccaaggcgataaggaagctgttctccagtattttaaggagcttaatgatacattagaacagaaaaaaaaaagtttcctaacggctctctgtgatgttggcaatctaattaatcaagaatatactccacaaattgaaagaatgaaggaaatacgagagcagcagcttgaattaatggcactgacaatatctttacaagaagagtctccacttaaatttcttgaaaaagttgatgatgtacgccagcatgtacagatcttgaaacaaagaccacttcctgaggttcaacccgttgaaatttatcctcgagtaagcaaaattttgaaagaagaatggagcagaacagaaattggacaaattaagaacgttctcattcccaaaatgaaaatttctccaaaaggatgtcatgttcctggcctgatactggtagacacagtctgggccctctcttaccttactgatgctggcaatgaacaaatacagatggtaatagactctggaatagttcctcatttggttcctctgctcagccaccaggaagttaaagttcagagaccagtccaccaacggcaacaacccggagggggacaactcgcaggccggcaaagacaaaacgggccagactcggagccgaccggcgccccacgacaccgaggagcgggcgaacccgcaaccctcgaccccttacaaccctatcgacaagcccgcacaacacgctcccgccaggccgcgccaaaaacgatgagaaccggataa

SEQ ID NO: 20970 - DNA, 1290 bp, Homo sapiens
  SIMILAR (1)..(1182): 881254mologous to Homo sapiens chromosome-associated polypeptide-C,accession number AB019987,Smith-Waterman Score=1665.
atggtggaaaaggaaaaggatgccttagaaggagagaaaaacatagctatcgaatttcttaccttggaaaatggaaatattttaggaaaaaagaatcatgtttgtcaatattatatttatgagttgcagaaacgaattgctgaaatggaaactcaaaaggaaaaaattcatgaagataccaaaggaaattaatgagaagagcaatatactatccaaatgaaatgaaagctaagaataaagatgtaaaagatacagaaaagaaactgaataaaattacaaaatttattgaggagaataaagaaaaatttacacagcttagatttggaagatgttcaagttagagaaaagttaaaacatgccacgagtaaagccaaaaaactggagaaacaacttcaaaaagataaagaaaaggttgaagaatttaaaagtatacctgccaagagtaacaatatcattaatgaaacaacaaccagaaacaatgccctcgagaaggaaaaagagaaagaagaaaaaaaattaaaggaagttatggatagccttaaacaggaaacacaagggcttcagaaagaaaaagaaagtcgagagaaagaacttatgggtttcagcaaatcggtaaatgaagcacgttcaaagatggatgtagcccagtcagaacttgatatctatctcagtcgtcataatactgcagtgtctcaattaactaaggctaaggaagctctaattgcagcttctgagactctcaaagaaaggaaagctgcaatcagagatatagaaggaaaactccctcaaactgaacaagaattaaaggagaaagaaaaagaacttcaaaaacttacacaagaagaaacaaactttaaaagtttggttcatgatctctttcaaaaagttgaagaagcaaagagctcattagcaatgaatcgaagtagggggaaagtccttgatgcaataattcaagaaaaaaaatctggcaggattccaggaatatatggaagattgggggacttaggagccattgatgaaaaatacgacgtggctatatcatcctgttgtcatgcactggactacattgttgttgattctattgatatagcccaagaatgtgtaaacttccttaaaagacaaaatattggagttgcaacctttataggtttagataagatactggtagacacagtctgggccctctcttaccttactgatgctggcaatgaacaaatacagatggtaatagactctggaatagttcctcatttggttcctctgctcagccaccaggaagttaaagttcag

SEQ ID NO: 20971 - DNA, 3482 bp, Homo sapiens
  SIMILAR (152)..(1972): 671254mologous to Homo sapiens chromosome-associated polypeptide-C,accession number AB019987,Smith-Waterman Score=1833.
atggtggaaaaggaaaaggatgccttagaaggagagaaaaacatagctatcgaatttcttaccttggaaaatgaaatatttagaaaaaagaatcatgtttgtcaatattatatttatgagttgcagaaacgaattgctgaaatggaaactcaaaaggaaaatattcatgaagataccaaagaaattaatgagaagagcactatacttatcaaatgaaatgaaagctaagaataaagatgtaaaagatacagaaaagaaactgaataaaattacaaaatttattgaggagaataaagaaaaatttacacagctagatttggaagatgttcaagtttagagaaaagttaaaacatgccacgagtaaagccaaaaaactggagaaacaacttcaaaaagataaagaaaaggttgaagaatttaaaagtatgacctgccaagagtaacaatatcattaatgaaacaacaaccagaaacaatgccctcgagaaggaaaaagagaaagaagaacaaaaattaaaggaagttatggatagccttaaacaggaaacacaagggcttcagaaagaaaaagaaagtcgagagaaagaacttatgggtttcagcaaatcggtaaatgaagcacgttcaaagatggatgtagcccagtcagaacttgatatctatctcagtcgtcataatactgcagtgtctcaattaactaaggctaaggaagctctaattgcagcttctgagactctcaaagaaaggaaagctgcaatcagagatatagaaggaaaactccctcaaactgaacaagaattaaaggagaaagaaaaagaacttcaaaaacttacacaagaagaaacaaactttaaaagtttggttcatgatctcttttcaaaaagttgaagaagcaaagagctcattagcaatgaatcgaagtagggggaaagtccttgatgcaataattcaagaaaaaaaatctggcaggattccaggaatatatggaagattgggggacttaggagccattgatgaaaaatacgacgtggctatatcatcctgttgtcatgcactggactacattgttggttgatctatttgatatagcccaagaaatgtgtaaacttccttaaaagacaaaaatattggagttgcaacttttataggtttagataagatggctgtatgggcgaaaaagatgaccgaaattcaaactcctgaaaatactcctcgtttatttgatttagtaaaagtaaaagatgagaaaattcgccaagctttttattttgctttacgagataccttagtagctgacaacttggatcaagccacaagagtagcatatcaaaaagatagaagatggagagtggtaactttacagggacaaatcatagaacagtcaggtacaatgactggtggtggaagcaaagtaatgaaaggaagaatgggttcctcacttgttattgaaatctctgaagaagaggtaaacaaaatggaatcacagttgcaaaacgactctaaaaaagcaatgcaaatccaagaacagaaagtacaacttgaagaaagagtagttaagttacggcatagtgaacgagaaatgaggaacacactagaaaaatttactgcaagcatccagcgtttaatagagcaagaagaatatttgaatgtccaagttaaggaacttgaagctaatgtacttgctacagcccctgacaaaaaaaagcagaaattgctagaagaaaacgttagtgctttcaaaacagaatatgatgctgtggctgagaaagctggtaaagtagaagctgaggttaaacgcttacacaataccatcgtagaaatcaataatcataaactcaaggcccaacaagacaaactttgataaaataaataaagcaatttagatgaatgtgcttctgctattactaaagcccaagtagcaatcaagactgcttgacagaaaccttcaaaagggcacaagaactctgtcttgccgtacagagaaagaaataaaagatactggagaaagaggtggatgacctaacagcagagctgaaaagtctttgaggaccaaagcagcagaggtcgtaaagaatacaaatgctgcagaggaatccttaccagagatccagaaagaacatcgcaatctgcttcaagaattaaaagttattcaagaaaatgaacatgctcttcaaaaagatgcacttagtattaagttgaaacttgaacaaatagatggtcacattgctgaacataattctaaaataaaatattggcacaaagagatttcaaaaatatcactgcatcctatagaagataatcctattgaagagatttcggttctaagcccagaggatcttgaagcgatcaagaatccagattctataacaaatcaaattgcacttttggaagcccggtgtcatgaaatgaaaccaaacctcggtgccatcgcagagtataaaaagaaggaagaattgtatttgcaacgggtagcagaattggacaaaattacttatgaaagagacagttttagacaggcatatgaagatcttcggaaacaaaggcttaatgaatttatgggcaggtttttatataataacaaataaattaaaggaaaattaccaaatgcttactttgggagggggacgccgaactcgagcttgtagacagcttggatcctttctctgaagggatcatggttcagtgttcgaccacctaagaaaagttggaaaaagatcttcaacctttcgggaggagagaaaacacttagttcattggctttagtatttgctcttcaccactacaagcccactcccctttacttcatggatgagattgatgcagcccttgattttaaaaatgtgtccattgttgcattttatatatatgaagcagtgtggttcctctccaacatcactgcaggaaatcagcagcaggtacaggcagtaattgatgccaatcttgtaccaatgataatacaccttttggataagggggattttggcactcaaaaagaagctgcttgggccataagtaacttaacaattagtggaaggaaagatcaagtggcttaccttatccaacaaaatgttatcccacctttttgcaacttgctgactgtaaaagatgcacaagttgtgcaagtagtactcgatggactaagtaatatattaaaaatggctgaagatgaggcagaaaccataggcaatcttatagaagaatgtggagggctggagaaaattgaacaacttcaaaatcatgaaaatgaagacatctacaaattggcctatgagatcattgatcagttcttctcttcagatgatgtatttaataattttgtagttttcttaattttatatataaacatagatctggataaagtaatatatataggctcttcactcatgaagcagactcctagtcctggagtgactgtgtacgagagcgtggttgtggtgctgtatgtgaacgcatgcaagcttgattcaccttcagggggctga

SEQ ID NO: 20972 - DNA, 5279 bp, Homo sapiens
  SIMILAR (4272)..(1774): 881254mologous to Microtus arvalis putative SMC4 protein,accession number AJ299713,Smith-Waterman Score=3717.
  misc_feature (1)...(5279): n = a,t,c or g
ttttttttttttttttttcttgctttctttaaatctttatttaaaagtccatgctaataatgtgtttacatttttacagttacattatgatagaaactgttggattttttaaatatctaaaacaatggcccactgaagaaaggaacaattaactctttaattaattccttaggataaatacccagaaatttaacagctagggcagacttctaatacaataccgaaagtccttccaaaaaccaagtggttgccaacttatgtcccttagcattataacattcttgaggccaatagtgtaaaaatacggctgacaattttatagggcaaacattactcaagggtatcttactttccacttattacttaaaggtaattaacccctaaataggatgctccctcaacagtgggggacttacatcctggggtaaacctatcataaggttggaaactatcaagttgaaatggcatttaggtacccggataaacctatcataaagttggaaatttggtaaattggaaccagtggtaaatccagagggccatcttacttcatactcatggaggcactatagtgggatatttttcaacttacgagatagcctaggcttgttgaaacactgtcctaatttactggctctctggtaattaagtcataaatggtcaaacatcaaattctagaaaagcatatatttaaattctcatcactataattcagaatgactggtttacaaaaatatgttcatagtatttgggtaataactgtggtgattgtctcaactggcaagctaagtggaatgccttaaagaatctaatcaaggattagttggcaggcatttccagtgttggtaaatcaaaggcccacgaaggtatgctgagccttgatagcacaaccttgcttaggactttgcctcaactaacatactttttagtttggcaagttacctgaccctccaggtaactcatttttctccatagtctgctacttacaagattgtcatatttttgtaatctagaagcaattatagagaatattttattagactttacaaatgacaactgcataaaacagaaaccagtttcatgatctagtttagggagtatgtattttatacaactcataatcctttacaaatagaaaaaaaatcagtaatacactgaatcaacttgaagaatcttcagcataaagttcaacaaagtcccttagatgcaatttcttttggatttacagcaacactttttgttatgttgtatgtcttgtaaattccaataagtctatccgaaatctcaaacatattatttcgaagagaaattattatgaactgtgcattttttgtttgttcatatatataaaatgcaacaatggacacatttttaaaaatcaaggggctgcatcaatctcatccatggaagtaaagggggagtggggcttgtagtgggtggaagaggcaaatactaaaagccaatggaactaaggtggttttctcctccctcccgaaaaggttgaagatctttttccaacttttcttaggtggtcgaacactgaacatgattccttcagagaaaggatccaagctgtcttcaagctcgagttcggagtcacctcccaaagtaagcatttggtaattttcctttaatttatttgttattatataaaaaccggccataaattcattaagcctttgtttcggaagattttcatatgcctgtctaaaacggtctctttcataagtaattttgtccaattctgctacgcgttgcaaatacaattcttccttcatttttatactctgcgatggcaccgaggtttggtttcatttcatgacaccgggcttccaaaagtgcaattggatttgttataaaatctggattcttgatcgcttcaagatcctctgggcttagaaccgaaatctcttcaataggattatcttctataggatgcagagatatttttgaaatctctttgtgccaatattttattttagaattatgttcagcaatgtgaccatctatttgttcaagtttcaacttaatactaagtgcatctttttgaagagcatgttcattttcttgaataacttttaattcttgaagcagattgcgatgttctttctggatctctggtaaggattcctctgcagcatttgtattctttacgacctctgctgctttgtcctcaagacttttcagctctgctgttaggtcatccacctctttctcagtatcttttatttctttctctgtacgcaagacagagtcttgtgccttttgaaggtttctgtcagcagtcttgattgctacttgggctttagtaatagcagaagcacattcatctaattgcttatttattttatcaagtttgtcttgttgggccttgagtttatgattattgatttctacgatggtattgtgtaagcgtttaacctcagcttctactttaccagctttctcagccacagcatcatattctgttttgaaagcactaacgttttcttctagcaatttctgcttttttttgtcaggggctgtagcaagtacattagcttcaagttccttaacttggacattcaaatattcttcttgctctattaaacgctggatgcttgcagtaaatttttctagtgtgttcctcatttctcgttcactatgccgtaacttaactactctttcttcaagttgtactttctgttcttggatttgcattgcttttttagagtcgttttgcaactgtgattccattttgtttacctcttcttcagagatttcaataacaagtgaggaacccattcttcctttcattactttgcttccaccaccagtcattgtacctgactgttctatgatttgtccctgtaaagttaccactctccatcttctatctttttgatatgctactcttgtggcttgatccaagttgtcagctactaaggtatctcgtaaagcaaaataaaaagcttggcgaattttctcatcttttacttttactaaatcaaataaacgaggagtattttcaggagtttgaatttcggtcatctttttcgcccatacagccatcttatctaaacctataaaggttgcaactccaatattttgtcttttaaggaagtttacacattcttgggctatatcaatagaatcaacaacaatgtagtccagtgcatgacaacaggatgatatagccacgtcgtatttttcatcaatggctcctaagtcccccaatcttccatatattcctggaatcctgccagattttttttcttgaattattgcatcaaggactttccccctactcgaattcattgctaatgagctctttgcttcttcaactttttgaaagagatcatgaaccaaacttttaaagtttgtttcttcttgtgtaagtttttgaagttctttttctttctcctttaattcttgttcagtttgagggagttttccttctatatctctgattgcagctttcctttctttgagagtctcagaagctgcaattagagcttccttagccttagttaattgagacactgcagtattatgacgactgagatagatatcaagttctgactgggctacatccatctttgaacgtgcttcatttaccgatttgctgaaacccataagttctttctctcgactttctttttctttctgaagcccttgtgtttcctgtttaaggctatccataacttcctttaattttttttcttctttctctttttccttctcgagggcattgtttctggttgttgtttcattaatgatattgttactcttggcaggtatacttttaaattcttcaaccttttctttatctttttgaagttgtttctccagttttttggctttactcgtggcatgttttaacttttctctaacttgaacatcttccaaatctacgtgtgtaaatttttctttattctcctcaataaattttgtaattttattcagtttcttttctgtatcttttacatctttattcttagctttcatttcatttgatagtatattgctcttctcattaatttctttggtatcttcatgaattttttccttttgagtttccatttcagcaattcgtttctgcaactcataaatataatattgacaaacatgattcttttttctaaatatttcattttccaaggtaagaaattcgatagctatgtttttctctccttctaaggcatccttttccttttccaccatctttaccctgtttaacttctctcctctgtgttcatttaatatttcaactctttgacacaagacttttattgngggtcatttagccgtccacaaccaattatatcttctaaatattcaagcataccctcatcgtgttcagtctggccttttggtttcatcatagcaatttgttcaacttcaccctgtaaaataaaaaatctattatggtccaagtcaattccatggcttcgaagaagatttccaacatccttaaatgtctttttctttccacttatcaggatagacagaagtattatctctgcaggccgttctgaaaacatagaaattactgttaggaatgacttcataatcatcccattccttatcaattatcttttgaaaatgaacttctactgtacaactctgaatgtccttgtgttcatcagaattatgtattaatactgagagttttttagaatctatttttttgtgctcgagggccaaacaccaaaaaggctaggaaccaaaactatggggttgggcccgggccttttggcccgaataattccaggaaaagggcgttttgggaagggccccagaattttctccccagcataggatttgaaagttctggttttacaatatgaagttatcataagccgaggagctccagcttcattggtcattgctgaaggccgggggaggaggaatgctgttcaaaatctcttctaaacttctattatcaagttcctcacttgcagtctctgcggcggtggctgggctctccgtgcggccggacggcggctcaggctccgcgtcgctgctggcgccgtcaggggacggcggcggcggcccttcctctttgcgccgggcagtggacgggctgggtgcctttacggggcatggtcgctgcaggacagtccactcagaccaaggctggagacggttgtgtagtacccacctccccgctcctaccggtgtttcggctccgggtccttcactcgaaaatggcgcctaaaatacaaactcgaacggaaattcgttacaaatgcgcgcaataatataagggatccactaatttgaaaaaaagtgcggcg

SEQ ID NO: 20973 - DNA, 495 bp, Homo sapiens
  SIMILAR (2)..(163): 981254mologous to Homo sapiens MDS015,accession number AF182416,Smith-Waterman Score=262.
tctgtcactggagaagcctttgcttctacatactggaatgggacgcttctgcacactggatgaatctgtctccctggcaaccatgattgatcgaataaaaagacacctaaaactatctcatattcgcttagcccttggggtggggagaaccttagagtctcaaagtcaaaagtcgtggccctgtgtgctggttctgggagcagcgttctgcagggtgttgaggctgacctttacctcacaggtggtataattgcagaaacatcaggataacacattctacaaatcagctggatgccaacttaaatttgtaacatgagtcagtgggactggtgtgcttccagagagtgtcttcgagggtatcatcatttccggtttgttaatcttattcaccaaatgttctatcgctcgtaaggtaaaactgtaatataactaccatattaaataacaaatgttcattataaactctaggaaagattgaataaaatctgtttactt

SEQ ID NO: 20974 - DNA, 370 bp, Homo sapiens
  SIMILAR (131)..(229): 471254mologous to Homo sapiens Human secreted protein, SEQ ID NO: 7367,accession number G03286,Smith-Waterman Score=58.
cccttaatggaaatagtgcccaggccacaatatcgcgagatttacacgtaaagctggaaacaactcccgtcctagagtaagcactgtttactattaagcagcatcagtagggcccctttgcaacctgcaaaccgctccctcgacgttacctcatctatgcctcatttcagtgccacttcaggccttttccaggacagtgaaaaaccacgagacacagccagttaagtctgagtcaggacccctgtcccactagtgcgctgtgctctggtgcggcagggcagttttctgacccaatctcctcttttgctgtcctctgcagcaccaagataacaatcacagccggccccaaccggcacctaccgcgaaggtc

SEQ ID NO: 20975 - DNA, 522 bp, Homo sapiens
  SIMILAR (326)..(520): 731254mologous to Homo sapiens My018 protein,accession number AF060513,Smith-Waterman Score=229.
gtttacatggctagatttaccaagcagtagaccattctgtgtattatctgaaaatgtatgaatcagtctttcttgtccaagtttttcagagatttaagaatcttttggaaaataattctgaaaataatttgattttgtatgtccatgccaaagccctagattatggggactggtgatgtatatctaagggatgtgtgtatgttatgtaagcatgagaatgaatctttttaaaaagtcatttcttagaaattttgcctataatagtttacttttaaatcttaatctctcaccccccaaaactcccattttcccacaatattttctcctaggagcttgtacctccaggcccatacatccttccaaagctcccaactaccctacagagggaaaccaccgagtaagaattcaacgttaactacacccaagacctggacaaagtccatgtctggcagtgaaaggaattgacggtgtttctggcacttctttttctgctaggactggtaatgaggaacaaacacggtt

SEQ ID NO: 20976 - DNA, 1686 bp, Homo sapiens
  SIMILAR (1169)..(291): 751254mologous to Homo sapiens NIF3L1 protein,accession number AF283538,Smith-Waterman Score=978.
  misc_feature (1)...(1686): n = a,t,c or g
ttttttttttttttttagaatgttaagtaaacagattttattcaatctttcctagagtttataatgaacatttgttatttaatatggtagttatattacagttttaccttacgagcgatagaacatttggtgaataagattaacaaaccggaaatgatgaataccctcggaagacactctctgggaagcacaccagtcccactggactcatgttacaaaatttaagttgggcatccagctgatttgtaggaatgtgttatcctggatgtttctgcaattataccacctggaagagggtccctgtcaggtctctggatagggataatatttatcttattctccaaggtgaggattccaggcatatctcggagggtcaggaaaggaaaggcctcgttcagtgtttgctggtgtttcacagaggattgacatttaattccttggggaagcagcatcccaaaatatcatgatgggacatctcacctacctgtgaggtaaagggtcagccctcaacaccctgcagaacgctgctccccagaaccagcacacagggccacgactttgacttgagactctaaggttctccccaccccaagggctaagcgaatatgagatagttttaggtgtctttttattcgatcaatcatggttgccagggagacagattcatccagtgtgcataaccgtcccattccagtatgtagaagcaaaggcttctccagtgacagaatttccgtcttctgataaagttgtttgttccgggaaagaaaatctaccacctgcatcaaagccttctgagtacaattcagattaatccgtgtttgttcctcattaccagtcctagcagaaaaagaagtgacagaaacaccgtcaaattcctttcactgccagacatgactttgtcccaggtcttgggtgtagttaacgttgaattctactcggtggtttccctctgtagggtagttgggagctttggaaggatgtatgggcctggaggtacaagctccaagccctttagccaaccagttgttgacgccctggggcgcagcatcataggctgtatgaggagagtagataccgactctgttctccagagcccggatcaccaggcgctccttcccatgtgttcccggttaatgcgccttccatgggtcgggaagataaggcggatgggtaggagagaatgaggtctgcccttcttttgcagcacctccctcccatcacttccctcagtcaggtcattggtccaggaaagagtgtatttaacanttatgtggtgggccttggttcccaccagtaatcccaaacattgtccccaactctcagcaaaacgaagagggatgcaaaagtcattccaaggaagaaaggagagctcttcaaatccatgaaggaacgggaagaattgcagatcagggaatatacaaaccggactgtcgtggggactcatctatgcctcatttcagtgccacttcaggccttttccaggacagtgaaaaaccacgagacacagccagttaagtctgagtcaggacccctgtcccactagtgcgctgtgctctggtgcggcagggcagttttctgacccaatctcctcttctgctgtcctctgcagcaccaagataacaatcacagccggccccaaaaggcacctaccgcgaaggtcgcaactacactcgcgggtttttaaat

SEQ ID NO: 20977 - DNA, 411 bp, Homo sapiens
  SIMILAR (71)..(187): 1001254mologous to Homo sapiens 19kD SRP-protein (AA 1 - 144),accession number X12791,Smith-Waterman Score=204.
agccgggttcctcccgggtttctgccgggtttctccctgcggctcctgggttgttgagactcttgtgaagatggcttgcgctgccgcgcggtccccggccgaccaggacaggtttatttgtatctatcctgcttatttaaataataagaagaccatcgcagagggaaggcgaatccccataagtaagctacagagattcaagatgtatgttcagcagttggacttaacgtatttcttgagaaaaataaaatgtactctagagaatggaatcgtgatgtccaatacagaggcagagtccgggtccagctcaaacaggaagatgggagcctctgccttgtacagttcccatcacgttaagaatgtctgaggggtcaggcggtgctggcaagatggctgcacttgagaagatga

SEQ ID NO: 20978 - DNA, 439 bp, Homo sapiens
  SIMILAR (80)..(277): 961254mologous to Homo sapiens 19kD SRP-protein (AA 1 - 144),accession number X12791,Smith-Waterman Score=319.
  misc_feature (1)...(439): n = a,t,c or g
tttcgtcagagccgggttcctcccgggtttctgccgggtttctccctgctgctcctgggttgttgagactcttgcgaagatggcttgcgctgccgcgcggtccccggccgaccaggacaggtttatttgtatctatcctgcttatttaaataataagaagaccatcgcagagggaaggcgaatccccataagtaaggctgttgaaaatcctacagctacagagattcaagatgtatgttcagcagatggacttaacgtatttcttgaggttaagaatgtctgaggggtcaggcggtgctggcaagatggctgcacttgagaagatgacgtttcccaggaagatgacatttccagagaagccaagccacaaaaagtacagggccgccctgaagaaggagaaacgaaagatacgtcggcaggaacttgctcgactgatagn

SEQ ID NO: 20979 - DNA, 459 bp, Homo sapiens
  SIMILAR (237)..(458): 911254mologous to Homo sapiens U2AF1-RS1,accession number D49676,Smith-Waterman Score=334.
ccttttcctgggtcgacgatttcgtcgggtttctgccgggtttctccctgcggctcctgggttgttgatactcttgtgaagatggcttgcgctgccgcgcggtcgcccggccgaccaggacaggtttatttgtatctatcctgcttatttaaataataagaagaccatcgcagagggaaggcgaatccccataagtaaggttaagaatgtctgaggggtcaggcggtgctggcaagatggctgcacttgagaagatgacgtttcccaagaagatgacatttccagagaaaccaagccacaaaaagtactgggccgccctgaagaaggagaaacgaaagaaacgtcggcaggaacttgctcgactgagagactcaagactctcacaggaggaggaagaggacacttttattgtagaacaccatctacaagaagagaagctattggaaagagagagggaaa

SEQ ID NO: 20980 - DNA, 429 bp, Homo sapiens
  SIMILAR (1)..(291): 971254mologous to Homo sapiens U2AF1-RS1,accession number D49676,Smith-Waterman Score=479.
atggctgcacttgagaagatgacgtttcccaagaagatgacatttccagagaaaccaagccacaaaaagtacagggccgccctgaagaaggagaaacgaaagaaacgtcggcaggaacttgctcgactgagagactcaggactctcacaggaggaggaagaggacacttttattgaagaacaacaactagaagaagagaagctattggaaagagagagggaaagattacatgaggagtggttgctgagggagcagaaggcacaagaagaattcagaatagagaagtacaaggggggatctataagtggactgcgcaagctagctcgaacctcccggtgtcatcggactggtggccttgtacctggtgttcggttatggagcctctctcctctgcaacctgataggatttggctacccagcctacatctc

SEQ ID NO: 20981 - DNA, 574 bp, Homo sapiens
  SIMILAR (70)..(150): 1001254mologous to Homo sapiens 19kD SRP-protein (AA 1 - 144),accession number X12791,Smith-Waterman Score=146.
gccgggttcctcccgggtttctgcggggtttctccctgcggctcctgggttgttgagactcttgtgaagatggcttgcgctgccgcgcggtccccggccgaccaggacaggtttatttgtatctatcctgcttatttaaataataagaagsaccatbcgvasvgggaaggcgaatccccataagtaaggctgttgaaaatcctacagctacagagattcaagatgtatgttcagcagttggacttaacgtatttcttgagaaaaataaaatgtactctagagaatggaatcgtgatgtccaatacagaggcagagtccggggtccagctcaaaccaggaagatggggagcctctgccttgtacagttcccatcacattatacactaagcctaacttctggttcctaggtaagtcagtaatgttgtatgcagcagaaatgatacctaaactaaaaacaaggacacaaaaaacaggaggtgctgaccaaagtcttcaacaaggagagggaagtaaaaaagggaaaggaaagaaaaagaagtaacctagtatcagcatcaagtatgtggtactactg

SEQ ID NO: 20982 - DNA, 1301 bp, Homo sapiens
  SIMILAR (3)..(281): 981254mologous to Homo sapiens U2AF1-RS2,accession number D49677,Smith-Waterman Score=465.
gactctcacagaaggaggaagaggaggacacttttattgaagaacaacaactagaagaagagaagctattggaaagagagaggcaaagattacatgaggagtggttgctaagagagcagaaggcacaagaagaattcagaataaagaaggaaaaggaagaggcggctaaaaaacggcaagaagaacaagagagaaagttaaaggaacaatgggaagaacagcagaggaaagagagagaagaggaggagcagaaacgacaggagaagaaagaaaaagagaagacgttcatgtggaaacctagtgttgatctcttcagtcatttagcaagtcttcgaacacctattatatgccaggacaaaggtaatgcgtaccaggagcacttccctgagaagaagaaaaagaggagtagtcagttagctatacccgagggggcatttggatacccacaccatttattggccatccttggcctaagatgttcacgtaaacataatttcccaacatccagtcctacccttcttattaagagcatgtttacgacgtttggaatggagcagtgcaggagggatgactatgaccctgacgcaagcctggagtacagcgaggaagaaacctaccaacagttcctagacttctatgaggatgtgttgcccgagttcaagaacgtggggaaagtgattcagttcaaggtttatttgaaatacaacaatgtccaagaggaaagcactgcaactttcttcatgtgttcagaaatcccaacaatgaattctgggaagctaatagagacatctacttgtctccagatcggactggctcctcctttgggaagaactccgaaaggagggagaggatgggccaccacgacgactactacagcaggctgcggggaaggagaaaccctagtccagaccactcctacaaaagaaatggggaatccgagaggaaaagtagtcgtcacagggggaagaaatctcacaaacgcacatcaaagagtcgggagaggcacaattcacgaagcagaggaagaaatagggaccgcagcagggaccgcagccggggccggggcagccggagccggagccggagccggagccgcaggagccgccgcagccggagccaaagttcctctaggtcccgaagtcgtggcaggaggaggtcgggtaatagagacagaactgttcagagtcccaaatccaaataaactagttttgttcttaaatgattgtatatcttatttattatggttgctacatactcggatagaaggctatgaacgcagatgggttcgcaagtctggctga

SEQ ID NO: 20983 - DNA, 926 bp, Homo sapiens
  SIMILAR (694)..(392): 531254mologous to Homo sapiens 19kD SRP-protein (AA 1 - 144),accession number X12791,Smith-Waterman Score=206.
tttttttttcagtttcaaattttatttcattaacttaaaaggtggacataatgtttattttaaatctaattgaaatttatctgaaacaacttatttcaagtaacttattgtacagtccattgtccatttaaaaatattttcttccaaaaaactgcattgaaagacaaaaaaattcttttatacgggcattatacgcgagatggcaaacttctggatggtaaattttgtttcactgtccaactccggatgataaagatgagagggcacaagggttcacagttcagttaaatgatgcaaacaaaaagcttctgtttccctccgatacaaattagaagtctccattcatgtctcttacagtagtaccacatacttgatgctgatactaggttacttctttctctttcctttccctttttttacttccctctccttgttgaagactttggtcagcacctcctgttttttgtgtccttgtttttagtttaggtaatcatttctgctgcatacaacattactgacttacgtgatgggaactgtacaaggcagaggctcccaatcttcctgtttgagctggacccggactctgcctcttgtattggacatcacggattccattctctagagtacattatatatttatctcaagaaatacgttaagtccaactgctgaacatacatcttgaatctctgtagcttgtaggattttcaacagccttacttatggggattcgccttccctctgccgatggtcttcttattatttaaataagcaggatagatacaaataaaccctgtccctggtcggccggggaccgcgcggcagaaagcccattctttcacaagagtctcaacaacccaggagccgcagggagaaacccggcagaaacccgggaggaacccggctctgagtttccgagacagcccgc

SEQ ID NO: 20984 - DNA, 1844 bp, Homo sapiens
  SIMILAR (368)..(856): 951254mologous to Homo sapiens U2AF1-RS2,accession number D49677,Smith-Waterman Score=797.
cgctctgcaggaattccgcaatagccgcgcgttccccggccgaccaggacaggtttatttgtatctatcctgcttatttaaataataagaagaccatcgcagagggaaggcgaatccccataagtaaggctgttgaaaatcctacagctacagagattcaagatgtatgttcagcagttggacttaacgtatttcttgagaaaaataaaatgtactctagagaatggaatcgtgatgtccaatacagaggcagagtccgggtccagctcaaacaggaagatgggagcctctgccttgtacagttcccatcacgttaagaatgtctgaggggtcaggcggtgctggcaagatggctgcacttgagaagatgacgtttcccaagaagatgacatttccagagaaaccaagccacaaaaagtacagggccgccctgaagaaggagaaacgaaagatacgtcggcaggaacttgctcgactgagagactcaggactctcacagaaggaggaagaggaggacacttttattgaagaacaacaactagaagaagagaagctattggaaagagagagggaaagattacatgaggagtggttgctgagggagcagaaggcacaagaagaattcagaataaagaaggaaaaggaagaggcggctaaaaaacggcaagaagaacaagagagaaagttaaaggaacaatgggaagaacagcagaggaaagagagagaagaggaggagcagaaacgacaggagaagaaagaaaaagaggaagctttgcagaagatgctggatcaggctgaaaatgagttggaaaatggtaccacatggcaaaacccggaacccccccttggatttcagagtcatggagaaggatggagttaattgtcccttctacagtaaaacaggagcttgcagatttggagatagatgttcacgtaaacattatttccccacatcccagtcctacccttcttattaagagcatgttcacaacgcttggaatggagcagtgcacggagggatgactatgaccctgacgcaagcctggagtacagcgaggaagaaacctaccaacagttcctagacttctatgaggatgtgttgcccgagttcaagaacgtggggaaagtgattcagttcaaggtcagctgcaatttggaacctcacctgaggggcaagtatatatgttcagtaccagtcggaagaagaatgccaagcagctctttctctgtttaacggacgatggtatgtacgcaggacgacagcttcagtgtgaattctgaacaggagatcggtggaaaatggcgatttgtggtttatttgaaatacaacaatgtccaagaggaaagcactgcaactttcttcatgtgttcagaaatcccaacaatgaattctgggaagctaatagagacatctacttgtctccagatcggactggctcctcctttgggaagaactccgaaaggagggagaggatgggccaccacgacgactactacagcaggctgcggggaaggagaaaccctagtccagaccactcctacaaaagaaatggggaatccgaaaggaaaagtagtcgtcacagggggaagaaatctcacaaacgcacatcaaagagtcgggagaggcacaattcacgaagcagaggaagaaatagggaccgcagcagggaccgcagccggggccggggcagccggagccggagccggagccggagccgcaggagccgccgcagccggagccaaagttcctctaggtcccgaagtcgtggcaggaggaggtcgggtaatagagacagaactgttcagagtcccaaatccaaataaactagttttgttcttaaaaa

SEQ ID NO: 20985 - DNA, 495 bp, Homo sapiens
  SIMILAR (294)..(220): 881254mologous to Homo sapiens Human secreted protein encoded by gene 19,accession number Y04311,Smith-Waterman Score=109.
tttgtgtgtaaagggtttttattggagagcctgtgccctagaagtgccaccaaggatttggaaggtcactttcagcagccgccatttctgccaggaccagtggcaagcacctggcagatggagcccgggtgtttctgcgtaaggcagaggaatccagcttttccatgagattcagctgcagttgtcgaaaaccctgtgtgagccagcagttccagttcaaaggttgagggggcgaacagctgcgaggtggccaggctcccgtgagtcaccactcaggcctgtatttgatgtcgaatactgtggagtcctcatcttcatcatcctcttcatttagtggcgccatttccactcgctctgctggagtggtgatgatatcatacttgcgtgtcttctttaacctctttcccgactcttccaagacaaaagcagcacacagtaaatccggcaacagcaaatgccccaagacctgttcctccagctctcgggtgtgtttgc

SEQ ID NO: 20986 - DNA, 1352 bp, Homo sapiens
  SIMILAR (922)..(1251): 951254mologous to Gallus gallus histone H2A,accession number V00414,Smith-Waterman Score=514.
atggatgaagaaattcgggttcatgacgagaggcttgctcagaagcacaccaacaggggaattgcagggctgacccctgaacctcagtcgctgcactttgagttggtggctctgactgtcacactcaaaactgaactgagtctaaagggtttagtcctgttttattctcttcgtgggtcgggaaagaggttaaagaagacacgcaagtatgatatcatcaccactccagcagagcgagtggaaatggcgccactaaatgaagaggatgatgaagatgaggactccacagtattcgacatcaaatacagagcccgcaggcctgccgtggccagatctgctctggcgcagctatggcgatcaggtccctgccctcagctccgattcttggtctttaaaatcttcactgctcctctccagttcctgtgcccccacccttcatcctcgacattgaccttccagcaagatgcagtggaaggcctgatggtggaatcagacctgggttttcgacaactgcagctgaatctcatggaaaagctggattcctctgccttacgcagaaacacccgggctccatctgccaggtgcttgccactggtcctggcagaaatggcggctgctgaaagtgaccttccaaatccttggtggcacttcagcgccacaggctctccaataaaaaccctttacacacaaaccatgagtaccttgggcttggatgttttctgtggtgccggccagcggggcaccttttgtgaagacagagttggaatcaccatccatggaaaatacttcctggaaacgttttggaatagaaagggaagaagaaatagaaatgaggtgaaggagagcggcggcggcggcgcgggtcggcagcgggagggcgcgcggcggggcggaggcggaggcggagtcggcgccgagaacatggccggaggcaaagctggaaaggacagtgggaaggccaaggctaaggcagtatctcgctcacagagagctgggctacagtttcctgtgggccgcatccacagacacttgaagactcgcaccacaagccatggaagggtgggtgccactgctgccgtgcacagggctgcgattccggggtacctcactgcagaggtgctggagctggcaggtaatgcttctaaggatctcaaagtaaagcgtatcactccgcgtcacttgcagcttgcaatccgtggtgatgaagagttggattctcttatcaaggctaccatagctgggggtggtatgtattactacttaagccttgattcttattggtctttctgactaatatatcgttcatatcaatggtataggatatttgatctggtagacataaagcatataaa

SEQ ID NO: 20987 - DNA, 662 bp, Homo sapiens
  SIMILAR (186)..(422): 401254mologous to Homo sapiens Human secreted protein encoded by gene 19,accession number Y04311,Smith-Waterman Score=94.
tggatgaaaactccagcctttcctgactcacctccatcttcggttcttcagttttctgagaagagttgggatatgcgggaaggggcatgggagctcggcagcctccgcctgccaggaaggcagtttcgcctctgcaggaaagagcagagcccgtgggaagccctgggtgagggtggcgcagccggcccagcacgcatggtattgccagccacggggggcctgcgtgtagtctctgctccctgcatttcaccttctttgttgactttccttctctgttttcccccatctgtttgccagaggggtgggactggcaacaagaacagccgtgtctgctttatctctcctctccacggtgtactcaggcctgagctcgtgactcacgggagcctggccacctcgcagctgttcgccccctcaacctttgaactggaactgctgggttcacacaggggttttcgacaactgcagctgaatctcatggaaaagctggattcctctgccttacgcagaaacacccgggctccatctgccaggtgcttgccactggtcctggcagaaatggcggctgctgaaagtgaccttccaaatccttggtggcacttcagcgccacaggctctccaataaaaaccctttacacacaaaaaaaagtcgacgcggccgc

SEQ ID NO: 20988 - DNA, 991 bp, Homo sapiens
  SIMILAR (80)..(475): 351254mologous to Gallus gallus histone H2A,accession number V00414,Smith-Waterman Score=99.
cggcggcgcgggtcggcagcgggagggcgcgcggccgagcggaaggcggaagtcggcgcgatgaacatggctggaggcaaagctggaaaggacagtgggaaggccaaggctaaggcagttatctcgctcacagagaagctgggctacagtttcctgtgggccgcatccacagacacttgaagactcgcacccacaagccatgggaggggtgggtgccactgctgccgtgtaccagtgctgcgattctgtgagtacctcactggcagaggtgctggagctgggcaggttatgcttcctaaggatcttcaaagtaaaagcgtatcactcccgcgtcacttgcagcttgcaattccgtgggtgattgaagagttggattctcttatccaaggcttaccataagctgggggtggtgtgatcccctcacatccccacaaatcccctgattgggaaagaaggggacagcaagaaaactgccttagaggggatgcttttaacccaacccctctccctcccccgtcatttgtactgtaactgggacaaaaaaaataatggggatatgtggaattttttaccaccagttaaatggaaaagcatagacaattactgtagacatgataaaagaaacatttgtatgttcttagactccgaagtttgataaaagtaccttttcatgtggtgacagttgtggtgttgattggctaggtttctccccgtgtgttttatacaaaaatggaattgataaaccattttattacaaaattaatttgtctcaaaactgttctgttcatggtgtattagaaatattttactcagactttaaatattttaaatctcagattggttattcagagtaaccttagaacagaaattgggaatatatctttacaatgattgataccatggtatattgactcttagatgctattgatctgtagcaccattttttacaaacgactaaggaaaaaacctgccaattaaatcatgatatgcc

SEQ ID NO: 20989 - DNA, 1123 bp, Homo sapiens
  SIMILAR (73)..(924): 421254mologous to Homo sapiens C321D2.1 (Ribosomal Large Subunit Pseudouridine Synthase (EC 4.2.1.70, Pseudouridylate Synthase, Uracil Hydrolase) LIKE protein),accession number AL031033,Smith-Waterman Score=374.
tctgtatgctgggctgggggcgcaccacgtgctcacagcacacgcacccacgcgtggctcggcaggccggccatggagccaggcagcgtggagaacctgtccatcgtgtaccggagccgcgacttcctggtggtcaacaagcactgggacgttcgcattgacagcaaggcgtggcgggagacggggcggccggagccccacggtggcgtctgtggaggaaagtggctcagactctggactctgtcccactccaggttctgccaccagctggatttctccaccagcggggcgctgtgcgtggccctattggtgttaggtgggctccccggcagcactgggctgccccgtgaactgcgtgcgattctccctctcctgcagctgcgggggcacatccaggagagccgggtaagcatcgtgcgttggggtgggcctgggccccgggtcagtcccactaacctcacacctgccttctgcgccccaggttgtgagaacccaaagccaagcctcacagggtcctggtcagggagataggtgtggatcggccccgctcccagcttgatccggcaccgccctcatcccgcaggccggacacaccagctgcgcgtcgcactgcagtgccctgggccaccccgtggtgggcgacctgacctacggagaagtctcgggccgggaggaccggccgttcagaatgatgctgcacgctttctacctgcgcatccccacggacaccgagtgtgtggaggtctgcacgcctgaccccttcctgccctccctgggatgcctgctggagcccccacacactgctgcagtcgctgggaccagcttcgttgcaggccttaaggggcaaccccccgacccttgaacccgaggataagggggccccaggccaggcagcccctccgcactcctgcctgggcacggccggcctcctccacccacaaccaagccccctgagactgaggcacagcggggcccctgcctgcagtggctgtcggagtggacgctggaaccggacagctgagagccgtggggctggggcagggggtgtcagctgcacagcggagactctagggagatgggcgagcgagcgtctgctcactggctctggggcctcgacccggga

SEQ ID NO: 20990 - DNA, 1824 bp, Homo sapiens
  SIMILAR (995)..(1171): 1001254mologous to Homo sapiens dJ79C4.1.1 (Homeobox protein PMX-1 (PHOX1) isoform 1),accession number Z97200,Smith-Waterman Score=299.
gctgggactacaggcctgtgaactaccaggaggagaggctaagtcggctggtctgtagagactgaagccacccctccttctaggggctcaggcccagggagatccaaattctgtccctgaggctctggctggagttattggagatcctgcaggaaagccctatttttcaatgagagcctcctaatgctgttgcttcttgtcagccatcttggcccttcccccagcccccgtccccgtcccccatccccgtcgtccccagtccccacccccgtaccccggacccccacccccgtcgctgtgagacaattaatgtctgttgtttaagccactcagttcctggtactttgttatggcagccctagcaaatgactacactgatcctcacctgacactaccttctgttaattgttctttggcttcaagcactgaagccaaaggcaggatgccgctaccctatggaaacacagtgagccaagcccagagaactttggtccttcaatttcccccttgctccacccctcttgtgagcaggacctggagcctggaggtcaaggagaggctaggagcagcgacctatggcgctctgggaaggagctcccggcttgcctatgggtgccctggggagagcatcacccagctccgaggactcaaagacagtctccgttcctcactcttcaaagaccacctccttttctagaggtgggctccccgaagaggattatccgtagacttagatgggggttcctccgcccctctctgtcctcctgccaccacagccaggctggacgcagaaccgcacggaagcctccccaactcctgcctctgggagtgctcctgcctgcttcaaggaatctgggcagcgggaccctctggtctctctctccactacccccctctttcttccccactcggctcctctcccccctcgcgcccacagcgtttggtgttgattcgagcgggaagaggggggtgggtgggatcggtgggggagaccatgacctccagctacgggcacgttctggagcggcaaccggcgctgggcggccgcttggacagcccgggcaacctcgacaccctgcaggcgaaaaagaacttctccgtcagtcacctgctagacctggaggaagccggggacatggtggcggcacaggcggatgagaacgtgggcgagttcatcccgcacgcggggcggcggggctgggctgggaaaaggtcttagcggggtgcaaactcagagagccagcgctgtttgggaaagcagcaggttaaagatgctgagtcgggttggaagggcttctctcgggcagcgtatgacggcttgagggagactgcaattgtatccccatgcccccaagtctgtaacagaccggtcaccctgttcatcccaggtgacgaaatcgtggaaccggggggccctccagcattctatgattttcacaaaacgttgcctatttcagactctcaaagaatagacatacaaatcaaactgcacatagaaacaattggaaaaaccagggccaaggccagcggcctcggccagcctagggaacaagccagccgtggtggccctcagatactgcaggggaagagggatgaaaattgtaccggttggaggtggtgatttcggtttattttacatgcagaagtaggggcccgggttacctccttctcttagaattttggggaaattgatagtccagtgactcctacccacttttgggtgaaggacgatttggaatttgaagtgtggggagacaggcctgtgaagtccgaaggactcactgggtctccagatcccccaactctggaatgcagtgaataccc

SEQ ID NO: 20991 - DNA, 1905 bp, Homo sapiens
  SIMILAR (192)..(701): 461254mologous to Mus musculus non-catalytic region of tyrosine kinase adaptor protein 1,accession number BC002015,Smith- Waterman Score=283.
agcggccgcagtggcgtcctggagccctcctcagtgctgaagctgctgaaagatggcagaagaagtggtggtagtagccaaatttgattatgtggcccaacaagaacaagagttggacatcaagaagaatgagagattatggcttctggatgattctaagtcctggtggcgagttcgaaattccatgaataaaacagggttttgtgccttctacctatgtgggaaggggaaaacagtgctcggaaagcatctattgtgaaaaacctaaaggataccttaggcattggaaaagtgaaaagaaaacctagtgtgccagattctgcatctcctgctgatgatagttttgtttgacccaggggaacgtctctatggacctcaacatgcccgctttatgtgaaatttaacttacatggctgagagagaggatgaattatcatttgataaagggggacaaaggtgatcgtcatggagaaatgcagtggatggttggtggcgtggtacctacaatggacaagttggatggttcccttcaaactatgtaactgaagaaaggggaaagtcctttgggtgaccatgtgggttctctgtcagagaaattagcagcagtcgtcaataacctaaatactgggcaagtgttgcatgtggtacaggctctttacccattcagctcatctaatgatgaagaacttaatttcgagaaaaggagatgtaatggatgttattgaaaaacctgaaaatgacccagagtggtggaaatgcaggaagatcaatggtatggttggtctagtaccacaaaaactatggtaaccgctattgcagagtattcaattaacctcaggtttgggaaccttaaccttccagtgtggattcattaggccttacattcctggaaagtttgttggcaatccttggtattatggcaaagtcaccaggcatcaagcagaaatggcattaaatgaaagaggacatgaaggggatttcctcattcgtgatagtgaatcttcgccaaatgatttctcagtatcactaaaagcacaagggaaaaacaagcattttaaagtccaactaaaagatgactgtctactgcatttggcagcgtaaatcatgcaccatggaatgacttgtagaacattacaaaaacggcaccaaatttttacaacgtgaacaaaggagaaaaattatatcttgtcaagcatttatccatgatactgctgacccagaagtgactgctgtgtagctgtaatttgtcatgtaattgaattgaagactgagaaaatgttgggtccagtcgtgcttgattgggaaattggttgtttctaaatccatatggagaatttgaccattaagtatttttattataactcagcccatacatatatactatgtatgcagtgcatctgcatagaacagttccttatccttggccttctgttttatggtttttttctttgctgttttcccccttggcttctaatattacagttttgtattttgtaaacaaaaaatcaaataatggcatatcagaatctttatatggaagaaatcctttattgccctttcctttgtttccttgtaaaggcaccctgttctgttatggtttttcattatataaaattattatatctatatatgacatatgctaaaatttcttggagagtgttaatcttttctgtgactaaatagcaataataagtggaaaattagaaattatttccaggtattatatttgtcacaggccattgtaaataccaagtatattgtgtctgccataatttttaaaaatacattcattgtcttcagtcatacagcaagacacatgagacatagattagaaaacatgttgtacaattttaatttacaactgttgaaaataacacaccccttaatttttttccaaaaaaaaaa

SEQ ID NO: 20992 - DNA, 428 bp, Homo sapiens; identical to SEQ ID NO: 2659

SEQ ID NO: 20993 - DNA, 1098 bp, Homo sapiens; identical to SEQ ID NO: 2660
  SIMILAR (68)..(346): 321254mologous to Homo sapiens Human normal ovarian tissue derived protein 47,accession number Y59770,Smith-Waterman Score=89.

SEQ ID NO: 20994 - DNA, 2787 bp, Homo sapiens
  SIMILAR (621)..(1154): 351254mologous to Herpesvirus papio NTR,accession number AF200364,Smith-Waterman Score=176.
gctcagtgccctttgatggcccagatgccagaaaacacagctgccccagcagcgacctgtcctcatcctccccacttcctccaatagaaagcctgtctagggtgcaatggcttagatcagagacacgtgactctgaagagccaatggccaggaatggcttctggcaccttctttatgttgccttcctgaatagcgcggccgcagcccggagcccgcagcccggagcccgcagcctggggcccgcagcccgtagcccgcagcccgcagagccgcgctgtccggggcatcccagtgcacggcgtccgtggaccctgggacctcgaacctgggacgggcggaaaatccactgggaacacttgcatttctgtaggtgcttatttcacattcttgtcttttcttgcttgctcgagctgttcgtgggttactttctgccttagttaaaccaaaagggaaaaggcggaagaggggaagccctcaagaatgatttagtggttgccccgcctccttctccaaggagaggtgttcgctgagaggctctccacgtccccgacactggcccctttaagaagccaagaaaaaggaaatgaaaccagagacagagggaagctgagcgaaaatagaccttcccgagagaggaggaagcccggagagagacgcacggtcccctccccgcccctaggccgccgccccctctctgccctcggcggcgagcagcgcgccgcgacccgggccgaagggagcgcggtgactgtccttgagcgcggaggggcgagctcgccggcggagcgccggagcaagcggaggcgcaggagcggcggcgacggcggcggcggcggcggcgcccgagcacccgagggggtccgagccccggcagccggccagccccgcgccacaaagggagcgcccccgccgcccggcaccccgcctccctccccaatgtcctcggccatcgaaaggaagagcctggacccttcagaccaccacgggccagaaagtttgcacgggagcaggcacgaggagagcctggaggcgcgcaggtgcagtccggagagcgttctgggcttgactctgctcccttcttccctctccttctcggtcctttctctttgtccatttggtcttggaaaggggaacattccaagtggcggcctccggggtccccaacggccgccttcccggtccgcaggtggagccgctgccagccttgcggataacgggcgggccatcaccgtaactcttttactttacattcctcctgttgtccagtatcctactagatgcttcattgtgtacttcctcaaatccagcttgggtcattacaatcagcatctccaaattacagatggagacttgcctagctatatgcaaatgaaacatttggacagaaagccagccagaattcatgaacacagattcccttgctgtgctactggtggcccccactgcctcccctgtggagatattaaagcaggatataaggcatcaggaaaaacctggttttctgtatccctggtcattgctctgccaactcacccctgcccagatcagttggccttatttcctcagtggaaatctactcactatgatgtggtagttggcgtgttgtcagctcgcaataaccatgaacttcgaaacgtgataagaagcacctggatgagacatttgctacagcatcccacattaagtcaacgtgtgcttgtgaagttcataataggtgctcatggctgtgaagtgcctgtggaagacagggaagatccttattcctgtaaactactcaacatcacaaatccagttttgaatcaggaaattgaagcgttcagtctgtccgaagacacttcatcggggctgcctgaggatcgagttgtcagcgtgagtttccgagttctctaccccatcgttattaccagtcttggagtgttctacgatgccaatgatgtgggtttccagaggaacatcactgtcaaactttatcaggcagaacaagaggaggccctcttcattgctcgcttcagtcctccaagctgtggtgtgcaggtgaacaagctgtggtacaagcccgtggaacaattcatcttaccagagcatgccagagttgggcttccggagtctcatgtggtcagtaacgttattactaatccaacttgtgctcaagcaaccttggccccactggaaagcagtctccatcaacttgttctgcattcagagactgttcttgggccttcccatacgcagctcacatttgaaactcctgcccctggtgccttaatgcatctgactggcagccacacagcccctccatgtggctcagtttcagtgggtaggcttgccagtcttcaccccgaaactcacataaaggaactatgccagtccttgctgaccgcgggtggccgcggcttagccggccgaagccccgccccctccgcctggccttcccaccggctccgcccaccttttctcccactcgccccgccctctcctcccgcgtttccacacgcgccagccagccggccgggagctgaagtcccgctctgggcccaggcagggggcgcccgcggtttagaaaccacatttcccatgagcctaagcacgcgcttccgtcactcggcggccgcgggggcgaagcgcgaggccccacacagagcatgcgcatcccccttgacgtttgctgccaccccacggcccaggggaggtagtgccggagacccggtgctcggaggctgcccggagccgcgaagggaaatgcgctttgcctcagatttgaaggaaatccgagtggctcttgtgtga

SEQ ID NO: 20995 - DNA, 927 bp, Homo sapiens
  SIMILAR (253)..(504): 901254mologous to Homo sapiens gamma-C-crystallin,accession number K03008,Smith-Waterman Score=439.
atgtgtggcttggctggctggtccagggcctggaaggagaaagattggaagattagggacaagaaggtctggggtagaggaatgtgcagggagatatgggattgggcacaaagggcgaagatagttgtatcccatgtgaaggcccagtgtagggcatccaccattgaagaggcactaaacaaccaagtagaaaaaatgatttggtcatttgattccagtcagcgtctgccatcagccaccctactgctggcaatcaccttctacgaggacagggccttccagggccgcagctacgaatgcaccactgactgccccaacctacaaccctatttcagccgctgcaactccatcagggtggagagcggctgctggatgatctatgagcgccccaactaccagggccaccagtacttcctgcggcgtggggagtaccctgactaccagcaatggatgggcctcagcgactccatccgctcctgctgcctcatccccccggcacatcggggcacactaatcatgacactgccacacatgtccatagcaaagaacatgaagagagtgatactacaggaatcaaagctggactgtgtcttgcacatatttaatatgctccacaggccctcgtacagtgttggccagtggagtacacagatggccagctcccacaggctcaggatctatgagcgagaggactacaggggccagatggtggagatcactgaggactgctcctctcttcacgaccgcttccacctcagtgagatccactccttcaacgtgctggagggctcctgggtcctctacgagctgcccaactaccaggggcggcagtacctgctgaggccgggggactgcaggtggtgccaggactggggggccacggatgcgagagtgggctccctaaggagagctgtggagctctactga

SEQ ID NO: 20996 - DNA, 438 bp, Homo sapiens
  SIMILAR (1)..(246): 641254mologous to Rana catesbeiana gamma-M1-1 crystallin,accession number X86072,Smith-Waterman Score=313.
atggggaagatcaccctctacgaggaccggggcttccagggccgccactatgaatgcagcagcgaccaccccaacctgcagccctacttgagccgctgcaactcggcgcgcgtggacagcggctgctggatgctctatgagcagcccaactactcgggcctccagtacttcctgcgccgcggcgactatgccgaccaccagcagtggatgggcctcagcgactcggtccgctcctgccgcctcatcccccacgaccgcttccgcttcaatgaaatccactccctcaacgtgctggagggctcctgggtcctctacgagctgtccaactaccgaggacggcagtacctgctgatgccaggggactataggcgctaccaggactggggggccacgaatgccagagtgggctctctgaggagagtcatagatttctcctga

SEQ ID NO: 20997 - DNA, 590 bp, Homo sapiens
  SIMILAR (1)..(522): 1001254mologous to Homo sapiens gammaD-crystallin,accession number U66583,Smith-Waterman Score=963.
atggggaagatcaccctctacgaggaccggggcttccagggccgccactatgaatgcagcagcgaccaccccaacctgcagccctacttgagccgctgcaactcggcgcgcgtggacagcggctgctggatgctctatgagcagcccaactactcgggcctccagtacttcctgcgccgcggcgactatgccgaccaccagcagtggatgggcctcagcgactcggtccgctcctgccgcctcatcccccactctggctctcacaggatcagactctatgagagggaggactacagaggccagatgatagagttcactgaggactgctcctgtcttcaggaccgcttccgcttcaatgaaatccactccctcaacgtgctggagggctcctgggtcctctacgagctgtccaactaccgaggacggcagtacctgctgatgccaggggactataggcgctaccaggactggggggccacgaatgccagagtgggctctctgaggagagtcatagatttctcctgaaatatgtcctcctttgttgtttcttaatttggaaactaataaaatattttctgtgtgttcctggc

SEQ ID NO: 20998 - DNA, 672 bp, Homo sapiens
  SIMILAR (113)..(325): 911254mologous to Homo sapiens gammaD-crystallin,accession number U66583,Smith-Waterman Score=368.
atggggaaggggagcccagcccacgcccagggccccggcagcttcctgcatggtggggccggagaccagggcaggggcaggcctatcaccctctacgaggaccggggcttccagggcccgccactacgaatgcagcagcgaccaccccaacctgcaagcctacttgagccgctgcaactcggtgcgcgtggacagcggctgctgggtgctctatgagcagcccaactactcgggcctccagtagttcctgcgccgcggcgactatgccgaccaccagcagtggatgggcctcagcgactcggtccgctcctgccgcctcatccccccacgccagctcccacaggctcaggatctatgagcgagaggactacaggggccagatggtggagatcactgaggactgctcctctcttcacgaccgcttccacctcagtgagatccactccttcaacgtgctggagggctcctgggtcctctacgagctgcccaactaccaggggcggcagtacctgctgaggccgggggactgcaggtggtgccaggactggggggccacggatgcgagagtgggctccctaaggagagctgtggagctctactgaaatgtttgtactctatcccttgcttcatctggaaactaataaaatatttcctgtgtgttctatgcaaaaa

SEQ ID NO: 20999 - DNA, 1239 bp, Homo sapiens
  SIMILAR (655)..(1170): 241254mologous to Saccharomyces cerevisiae Soi1p,accession number AF001317,Smith-Waterman Score=151.
atggaaagggcagagtttgtcttcactggaatagacgcttactccagatacgggtttgcctatcctgcatgcaatgcttctgccaagactacctctgtggactcatggaatgccttatccactgtcatggtattccacacagcattgcctctgaccaaggcactcaccttacggctaaagaaactagtgaccgtgtccttggttgattccacagtggttttatggctctggcagctgcaaacacaactcaaggtggccaaagacagagctttctccccttgtccctccgtcggggaggaaaaccctccctatgagtccctgcagatttcccctgatgtcccattgaggaggacaaggtcacgttgtcaggttcacaactataccaaatgccctgcttggggtcaggttccagcccatgctgaggttcgaggggagtgggcagatgggcagttacctcagcctatccttgaccaaagcacacccatgatcctgacacgcgtgctctggccttacagcaagggaggcaagaaagtgagtctgccattgtcagcccctggggagaaaggagggccctgccggcagggcagcaagtcgggagcagctgtgggtggtgtcctacaggctctgctgtggaggaagagctgctgccctgagtggaggcaaggatggatgtgggtggacaatcagctcattggtaccacgcagcccttcatgctctatgtgactcccctgagcaatgagaatgaggtcatcgagaccggcccagctgtgcaagtcaacgcagtgaagttccccagtaagagtgcactgaccaacatctacaagcatctgatgatcacagctcagagattcacagtgcaaattgaggagaaactgctcctcaagctgctaagtttctttggctacgatcaagcagaatcagaggtggaaaaatatgatgaaaacctccatgaaaagacagctgagcaaggtggaacaccaattcgatactactttgaaaatctcaaaatcagcattcctcagatcaagctaagtgtgttcacctccaacaagctcccattggatcttaaggaactcctcagccaggcagctcgaatcctgggatcagtggattttcttggcaatcctatggggcttttgaatgatgtttctgaaggggttactggactgataaaatatggaaatgtcgggggcctcatcagaaatgttacacacggagtatcaaactctgctgccaag

SEQ ID NO: 21000 - DNA, 408 bp, Homo sapiens
  SIMILAR (395)..(180): 1001254mologous to Homo sapiens ribosomal protein L6,accession number X69391,Smith-Waterman Score=370.
  misc_feature (1)...(408): n = a,t,c or g
caaaaataaaggtccttctcaaaaatccccaggtaggttataatacgcctccctataaggaaaaaactattaccttgccagcccgcgtaaactttggcccccccaaggatcctttaaaacggcccccccnnnnnnnnnnnnnngtagtcagctatttaattaggttcttaagacatttagaacaccaatttgtgaggataaattccattcgtcagagcaaacacagatcgcaggtagccctggagctgaggaatagctttgatttttggtaaaatttgtgagtccacagctttctgatcaatcttgcgctgctccgtaatctcatatttctctttttctgtgtcgaagatctcaccttcctggtgtctgggcttccgcagcttcttcttcttgaagcggacgcgtggg

SEQ ID NO: 21001 - DNA, 422 bp, Homo sapiens
  SIMILAR (278)..(93): 351254mologous to Homo sapiens Fragment of human secreted protein encoded by gene 3,accession number Y36366,Smith-Waterman Score=97.
  misc_feature (1)...(422): n = a,t,c or g
cccacgcgtccggatttgtttacaaatgtgcaaattatttagagcatagactttataagcattaaaaaaaactaatggaggtaaaacctaaatgcgatgtgaaataattttagtgttgataccgtatgtgtatttttattctaataaacttttgtgttccagattgnnnnnnnnnnnnnnngggggggccgttttaaagaatccttgggggggccaaagtttacccgggcttgcaaggtaatagttttttccttatagggagccgtattataacctacttgggaatttttgnnnnnnnnnnnnnnnnnnnnnnnnnnnnnnnnnnnnnnnnnnnnnnnnnnnnnnnnnnnnnnnnnnnnnnnnnnnnnnnnnnnnnnnnnnnnnnnnnnnnnnnnnnnnctgcatatgctggctgtttgaaa

SEQ ID NO: 21002 - DNA, 492 bp, Homo sapiens
  SIMILAR (305)..(210): 401254mologous to Homo sapiens Fragment of human secreted protein encoded by gene 3,accession number Y36366,Smith-Waterman Score=78.
  misc_feature (1)...(492): n = a,t,c or g
attgatcgcctgcggnaccgattgataaccntcgggacgacccacgcgtccggccccctccaaatagccatacttagcctcagcaggagcctggcctgtaacttataaagtgcacctcgcccccgcaagccccagccccgaggaccgtccatggaccttatttttatatgagattaataaagatgtttgcnnnnnnnnnnnnnnnnnngggggggccgttttaaagaatccttgggggggccaaagtttacgcgggctggcaaggtaatagttttttccttatagggggccgatttaaaacctacttgggaatnnnnnnnnnnnnnnnnnnnnnnnnnnnnnnnnnnnnnnnnnnnnnnnnnnnnnnnnnnnnnnnnnnnnnnnnnnnnnnnnnnnnnnnnnnnnnnnnnaaagggggaaacctaactggattagcttgctggttggaagttttgctttactgggttgattttttgaaattttttcccccgg

SEQ ID NO: 21003 - DNA, 1286 bp, Homo sapiens
  SIMILAR (828)..(1025): 1001254mologous to Homo sapiens dJ888M10.1 (KIAA0453),accession number AL031296,Smith-Waterman Score=322.
gatgtttttcctttgtgtttgtaaggcattcttctaggcactgcagagaatatgaaacattaattactgctgacttcccaccagaagcctcttatttgatgtcactgtgtagctggtcagtgaccactatggtagcattcttggcacaaagcaggccctcaggaagtgctggtgcccaccgtcattctcgtgttaggtctagcacagcactggggcacagcaagcgcttagcagatactgacctggctctcatgaagccagcatggacgccagcttttcagcattgtatgcagcaccccaaccagccttgtgaagaaaagagatatgaacaaatggtcacacaacagtcggatacccacactcagaaagccacgtgcagaggcagcacatgctgggcactagggcagccgcagctcctagttagccacgtgatcatgaagagggaacaaatactctacagtgggccctgctgccagatgacttcgcccagctgtcagctaatattgtcttgtgacaaaacagagttttatgtcctttttatcccagctttgatggatgagacagcttttctggttaaatttgctggaacattatcagatggcttagggaagacgatggacaatcggcatcagtcagagcgggagtacatcaggtaccatgcagccacaagtggtgaacaccttgtagccggcatccatggcctggctcatggtaagtcatgggtgacatcaggctctgctgctgctggtcctcagaggcgcctttgtatcaatctgattgcagctataaaaaaagaaaggttacaacagcccttgtctttttcactaggtatcattggtggactgaccagtgttataacttcgacagtggaaggtgtgaaaacagaagggggtgtcagcggtttcatatctggccttggaaaagggcttgttggcactgtaaccaagccagtggcaggcgccctggattttgcatcagaaacagcccaggcggtgagagacacagccacactcagcggccccagattaaaatacttccaagttcctctccttgttggagtgcgctggcattccaagcgacagccacctaactttcctctgaaatttccaggcaacccaatagttctcaggaaggcagatgaggcactaaaaagccaattgggagctcttggtttgaggctgagggggccttactgtggaatgatcaagtggggacctgctgactctgggctcctgttgagaggagcaaaactgaatggggatgagagaggggacctgaagctctaa

SEQ ID NO: 21004 - DNA, 6999 bp, Homo sapiens
  SIMILAR (2821)..(3066): 681254mologous to Homo sapiens dJ888M10.1 (KIAA0453),accession number AL031296,Smith-Waterman Score=242.
  misc_feature (1)...(6999): n = a,t,c or g
gacagcctgggcataccatatatctcctgccaactgtggtaatctgcaacttgctaccctgtgaacttgatttttatgttaaaggaatgccaattaatgggacgctgaaacctggcaaggaggcagctctccatacagctgatacatcccagaacattgagctgggggtatcactggagaatttccccctctgtaaagaattgctcattccacctggaacccaaaactatatggtgagaatgcgactctatgacgtcaaccgtcggcagctgaacctcaccatccggattgtgtgtcgagcagaaggatccttaaagatcttcatttctgctccatattggctgattaacaaaacagggttgccactgatcttcagacaggacaatgccaagacagatgctgcaggccagtttgaggagcatgagctggcccgtagcctgagtcctctcttattctgctatgctgacaaagagcagccaaacctctgcacgatgagaatcggaagggggattcatccagaaggcatgccgggctggtgtcagggcttctccctggatggtggtagtggtgtccgagctttgaaagtcatccagcaaggaaaccgcccagggctgatctataacattggtattgatgtcaagaaaggccgaggtcgatacattgatacctgcatggtcatctttgccccccgttacctgttagataataaatcatctcacaagcttgcatttgcacagagggaatttgccaggggacagggaacagccaatcccgaaggttacatttccacccttcctggttccagtgtggtgttccactggcctcggaatgactatgatcagctattgtgtgtcagactgatggacgttcccaattgtatttggtctggaggctttgaagtcaacaagaataattccttccatatcaacatgagggattctcttgggaaaatgcttcttcctacgagtggaaattactctccgaggagctacgtataggatctcatttagtgacacagatcagttacctcctcctttccgaattgacaacttttctaaagtcccggttgtctttactcagcatggcgtagctgaacccaggctccggactgaagtgaagcccatgacttcattggattatgcctgggacgaacccaccttgccaccttttatcactctgactgttaaaggggcagggtcctctgagatcaactgcaacatgaatgatttccaggataatcggcagctttattatgaaaatttcatttacattgctgctacatatacattctctggcttgcaggagggaacaggcaggcctgtggcttccaacaaggccattacctgtgcggagctcgttttggatgtctcacccaagacacaaagagtcattttaaaaaagaaggaaccaggaaagcgttctcagctgtggaggatgacaggaacaggaatgctggcccatgagggctcctcagttcctcacaatcccaataagccctcagccgcccgctccaccgaggggtctgccatcttagatattgctggtctcgctgcagtgactgacaacagatacgagccactgatgctgagaaagcctgaccgcaggcgaagcacaactcagacgtggagtttccgagaaggaaaactgacctgtgggttacatgggttggtcgtccaggccaaaggaggactttctggtttgtttgatggagctgaagttgttcttggtcctgacacttccatggagcttttggggccagttccacctgaacaacaatttattaatcaaaaaatgagacctggttctggaatgttatccatcagagtcatcccagatggaccaactagagcactccagataacagatttctgccaccggaaaagcagccgttcatatgaagtggatgaacttcctgtcaccgaacaagagctgcagaaattaaagaatccagatacagagcaggaattggaagtgcttgtgaggttagaaggtggaattgggttgtccttaattaataaagtcccagaagaactggtctttgcaagtcttacaggaatcaatgtgcactatacacagctggcaaccagtcacatgcttgaactcagcatacaggatgtacaggtggacaatcagctcattggtaccacgcagcccttcatgctctatgtgactcccctgagcaatgagaatgaggtcatcgagaccggcccagctgtgcaagtcaacgcagtgaagttccccagtaagagtgcactgaccaacatctacaagcatctgatgatcacagctcagagattcacagtgcaaattgaggagaaactgctcctcaagctgctaagtttctttggctacgatcaagcagaatcagaggtggaaaaatatgatgaaaacctccatgaaaagacagctgaccaaggtggaacaccaattcgatactactttgaaaatctcaaaatcagcattcctcagatcaagctaagtgtgttcacctccaacaagctcccattggatcttaaggccctaaaaagcaccttggggtttcctttgatacggtttgaagacgctgtgattaatctagatccattcactcgggtacatccctatgagaccaaggagttcatcatcaatgatatcctcaaacatttccaggaggaactcctcagccaggcagctcgaatcctgggatcagtggattttcttggcaatcctatggggcttttgaatgatgtttctgaaggggttactggactgataaaatatggaaatgtcgggggcctcatcagaaatgttacacacggagtatcaaactctgctgccaagtttgctggaacattatcagatggcttagggaagacgatggacaatcggcatcagtcagagcgggagtacatcaggtaccatgcagccacaagtggtgaacaccttgtagccggcatccatgggcctgggctcatgggtatcattgggtgggcttgaccagtgttataacttcgaccagtggaagggtgtgaaaacagaaagggggtgtcagcggtttcatatctggccttggaaaagggcttgttggcactgtaaccaagccagtggcaggcgccctggattttgcatcagaaacagcccaggcggtgagagacacagccacactcagcggccccaggactcaagcacagagggttcggaaaccgcgttgctgcacggggccccaggggctgcttccccgatattctgagagccaggcggaaggacaggagcagctcttcaaactcacagacaacatacaggacgaattcttcatcgctgtggagaacattgacagctactgcgtggcttcatctcctccaaagctgtttacttcctgaaaagtgggagactacgtgggatcgagaagccattttcctaggaagttcaaatacgatgacctctaccactgccttgtctccaaagaccatgggaaggtgtatgtgcaggtgaccaagaaagccgtgagcacgagcagtggagtgtccatccccggcccctcccaccagaagcccatggtccatgtgaaatctgaggtccttgctgtcaagttgtcacaagaaataaactacgcaaagagcctctactatgaaccagcagcttatgttaagactcagcgaaaaccgagagccgctggagctggactcctgaagccccgctgctgagatgggcgctcccgacacagcgcagacccaccaggaggaaagaaggcccagctctcagctgacgatggaggcagaaccggagtcgggtttggggaagttgtcaaggaatgagggaaagtaaatcctcatgaggaaaaagtacaaatggaaatcgtattaatttgtgaggcagggagttattttagattatgggaaataatttttaaaggtattggttaaataacgtttaaaaacatgtactgagatgaatctaatttttagattgccctgcattttggtaaacatgtatatatgtacaaacaggggggtttggaaatattatagggaacggtttctgaacagggtctgtgctatgtgtaaaggtttgttaactgtaaagtaatataaagttatattggatcttctattgcactaattctagatgtctaattcaggatactgtctatagaaaggcattcttaaaagttaaagaatgttacgtcttagttttggagactaaagtattcccagtaaagtgggttgaggtgagggctgtggtcctgaaagggacgcctttgacatcgtggctgtccagttgggctgtgagctgtggcacccaggactggcgctggcccttcagaaggatctaggagagggggcttgggagcccacttttaatttctcacccccattttacaaagagtgcttagattcttacaaattatgatgtaagttatccatttggctttttcctaactagtcttaccaaacttagggggaaacctgtgctccattaccacatgggtgcaagtcagcattgtaagttttctcaggttattattattagagaggttggaaacattggtaaactctgttgattgagaaggaaaaaaaaaagtccccattgaactgttgcaacaaattcagaaatccaccataaaagtgctctccctgcctgggcagcaacaacccaagaacaaagccccgggactgttttctttttaataataccacaggcagggcatcgtagctccacagcccgaggggacacaggatgggaaaccccagggntgagaagggagcaggggagagttcccagaaagggggatgaaatagggagtttttaaaaagcctgccgttggtaagtttttcatggaaccaagatttgacaaaggcatctcttatccttggttttaaattcctgctgggagcaaggcctggtatgagcgccctgggtcttgtttttggtgtttcgcttttctgtaaggattaagcagatagggagaagggaaaaggggcctcactttagaatgaatgagtcaccttgtgatttttaaatttttattttaataaagctaatcaatttctacaaccttgtcacatgtagctgagtctgggatgactcagtggatcagtggatgcgtggaaggttttggtgtttataactcatgacccaaatccttccaagacacaaatgaagctaatcttcttcccctccctttcctctcccacttcccctctgtgtctgtgtctgtgtgtgtgtgtgtgtgtgtgtgtgtgcgcgcgcgcgcgtgcatgcagagaggaaggaagggagctttagcacaagtagctacatagtgttcaaggatcagctttcttgaactccgaggcttggttgcctttgctgaactccaagttagtggattgcagaatggaaacttggcttttgcggcactgggtgagttttagtttgtgtgtgtcttgctggggggtggtgatgattgtctcagcactcacgcactgcacaagatggcagcaggatacagcactgcacaagatggcagctcctctgcagcttcctcctcagcctccctcgcttgcacccccacaggtttggcttgtggtttttgtcatcagtaacctactgcctgagatcatgatctcttaaaagatgagactctcggaagggttgattgtatgcgtcagtgagccttctatcaccttctggaacaaagtcacttgaaatctcttgatgagattaaggagtttagtgttactaagaccatctgctttgggccgcagcagtgctgggtgttctcagacctgactgaggaagttagctgcgggctgccctgtgggctggtgcttcaggaggaatccagagaagtgttcagatgccccccttgggctcctttctaattttaatcagctctttaaatagctgcccatctcctgtgattgcacaaccaagcactttgacatttgcaccttaggagaggcagatgttaaaatggaatccaaagaccacctagggcggggctgggtgggagatgggagggccaactgcgagctgctccacttctcagctctcccctgccctgcagccctgggccagacaaggccagaaggtttcaggggcatttgacatcccctcctggttctcaccaggaaaacatccaaagctttggaggaaacaggccctgcccctggctccttaaatgccccgtctctttgtaaactgatattcagccagcaatgcctaagactttgttaagatcatttctactgcttttctttctgcttcaaacacacagttcgtctctgaggaaagtaaaataaatggaataagagtaaatttgggtaaggagatatccaaaagctacccaagtcccttgaccccagcacaagttggccgacccgtgtcaactcccctgggctgtcgctgcttctctgtgctcacttgaagggtgaagccaggccagtgcttcccccaggccctgggcgctggtcactacacagtggaaaacagacaagcggccccttccccaaatcccaaaagtgttcttgctgcttggtgggtgctcatcgcaatgttctgaagggtggcagggccactttgtttgtaggtatgatctgggcctcaaaataccatagtagctgcttgataaaattctaaaaatatctggttctctattatgtaaacacttattacagtcaccaagtgtgtgaagactcttgagtctggttctcatatcagagtcatcatttttcttcctgtggagataaaatgccttaatggacttcccacnnnnnnnnnnnnnnnnnngggggggcgcttttaaggttcccttgggggggccaaactttacgcgggcttggcaaggaaatagttttttccttatggggggcggaattaaaacctacttgggaatttttggaaagaacctttctttttggggggggacttattgggccaaccttccctacaaaatttaaaggctttagggnnnnnnnnnnnttttaaggggaaaagggggtaaaacaacctccaaatccttgctgttgaaaaagtggg

SEQ ID NO: 21005 - DNA, 451 bp, Homo sapiens
  SIMILAR (105)..(434): 321254mologous to Homo sapiens plexin-B1/SEP receptor,accession number AJ011415,Smith-Waterman Score=137.
  misc_feature (1)...(451): n = a,t,c or g
tgcagtcctggcagccgccgcgggaggctgaatccctgcagcccatgacggtggtgggtacagactacgtgttccacaatgacaccaaggtcgtcttcctgtccccggctgtgcctgaggagccagaggcctacaacctcacggtgctgatcgagatggacgggcaccgtgccctgctcagaacagaggccggggccttcgagtacgtgcctgaccccacctttgagaacttcacaggtggcgtcaagaagcaggtcaacaagctcatccacgcccggggcaccaatctgaacaaggcgatgacgctgcaggaggccgaggccttcgtgggtgccgagcgctgcaccatgaagacgctgacggagaccgacctgtactgtgagcccccggaggtgcagcccccgcccaagcggcagcagttccaagaccaccccacccctttttgtaaatn

SEQ ID NO: 21006 - DNA, 281 bp, Homo sapiens
  SIMILAR (2)..(25): 1001254mologous to Homo sapiens KIAA0315,accession number AB002313,Smith-Waterman Score=37.
gctggagggcctggaggagagcgtcgggaccgctgcaagaaggaattcacagacctgatgatcgagatggactcacggctgctgggccccacgtcaaaggtcaagtgagacgtaggtcaagtcctacgtcggggcccagacatcctggggtcctggtctgtcagacaggctgccctagagccccaacagtccggggggactgggagcagttccaagaccaccccacccctttttgtaaatcttgttcattgtaaatcaaatacagcgtctttttcactctg

SEQ ID NO: 21007 - DNA, 602 bp, Homo sapiens
  SIMILAR (196)..(555): 291254mologous to Homo sapiens Similar to zinc finger protein 162,accession number BC000773,Smith-Waterman Score=90.
  misc_feature (1)...(602): n = a,t,c or g
gccgggcatccccgtgctggctacagaacctacaccgacggctttttctccctgccctccaaggacggcgacaaggacgtaatgatcaccggcaagctggacatcctgaagccgcagaaccagcatcgggtgttcactgtcgagtctcgagtgatttganaatgtgccttacgctgccacgctgggggcagctggcctccgcctccgcccacgcaccagcagccgcctccatgccntaggttgggcccctgggggatctgagggcctgtggcccccagggcaagttcccagatcctatgtctgtctgtccaccacgagatgggaggaggagaaaaagcggtacgatgccttcctgacctcaccggcctccccaagggtgccggcactctgggtggactcacggctgctgggccccacgtcaaaggtcaagtgagacgtaggtcaagtcctacgtcggggcccagacatcctggggtcctggtctgtcagacaggctgccctagagccccacccagtccggggggactgggagcagttccaagaccaccccacccctttttgtaaatcttgttcattgtaaatcaaatacagcgtctttttca

SEQ ID NO: 21008 - DNA, 6561 bp, Homo sapiens
  SIMILAR (4110)..(4280): 701254mologous to Homo sapiens plexin-B1/SEP receptor,accession number AJ011415,Smith-Waterman Score=192.
  misc_feature (1)...(6561): n = a,t,c or g
tttcgtgcggcggacgtgcagagaatctcgatgctggcctggagcagaaactgagctggaccactggagcctcggtgagggggtgcggggggcaatggcactgcagctctgggccctgaccctgctgggcctgctgggcgcaggtgccagcctgaggccccgcaagctggacttcttccgcagcgagaaagagctgaaccacctggctgtggatgaggcctcaggcgtggtgtacctgggggcggtgaatgccctctaccagctggatgcgaagctgcagctggagcagcaggtggccacgggcccggccctggacaacaagaagtgcacgccgcccatcgaggccagcccagtgccatgaggctgagatgactgacaatgtcaacccactgctgctggtcgaccctcccaggaaacgcctggtggagtgcgggcagcttcttaagggcatcctgcgctctgcgcgccctgagcaacatctccctccgcctgttctacgaggacggcagcggggagaagtctttcgtggccagcaatgatgagggcgtggccacagtggggctggtgagctccacgggtcctggtggtgaccgcgtgctgtttgtgggcaaaggcaatgggccacacgacaacggcatcatcgtgagcactcggctgttggaccggactgacagcagggaggcctttgaagcctacacggaccacgccacctacaaggccggctacctgtccaccaacacacagcagttcgtggcggccttcgaggacggcccctacgtcttctttgtcttcaaccagcaggacaagcacccggcccggaaccgcacgctgctggcacgcatgtgcagagaagaccccaactactactcctacctggagatggacctgcagtgccgggaccccgacatccacgccgctgcctttggcacctgcctggccgcctccgtggctgcgcctggctctggcagggtgctatatgctgtcttcagcagagacagccggagcagtggggggcccggtgcgggcctctgcctgttcccgctggacaaggtgcacgccaagatggaggccaaccgcaacgcctgttacacaggcacccgggaggcccgtgacatcttctacaagcccttccacggcgatatccagtgcggcggccacgcgccgggctccagcaagagcttcccatgtggctcggagcacctgccctacccgctgggcagccgcgacgggctcagaggcacagccgtgctgcagcgtggaggcctgaacctcacggccgtgacggtcgccgccgagaacaaccacactgttgcttttctgggcacctctgatggccggatcctcaaggtgtacctcaccccagatggcacctcctcagagtacgactctatccttgtggagataaacaagagagtcaagcgcgacctggtactgtctggagacctgggcagcctgtacgccatgacccaggacaaggtgttccggctgccggtgcaggagtgcctgagctacccgacctgcacccagtgccgcgactcccaggacccctactgcggctggtgcgtcgtcgagggacgatgcacccggaaggccgagtgtccgcgggccgaggaggccagccactggctgtggagccgaagcaagtcctgcgtggccgtcaccagcgcccagccacagaacatgagccggcgggcccagggggaggtgcagctgaccgtcagccccctccctgccctgagcgaggaggacgagttgctgtgcctttttggggagtcgccgccacaccccgcccgcgtggagggcgaggccgtcatctgcaactccccaagcagcatccccgtcacaccgccaggccaggaccacgtggccgtgaccatccagctcctccttagacgaggcaacatcttcctcacgtcctaccagtaccccttctacgactgccgccaggccatgagcctggaggagaacctgccgtgcatctcctgcgtgagcaaccgctggacctgccagtgggacctgcgctaccacgagtgccgggaggcttcgcccaaccctgaggacggcatcgtccgtgcccacatggaggacagctgtccccagttcctgggacccagccccctggtgatccccatgaaccacgagacagatgtgaacttccagggcaagaacctggacaccgtgaagggttcctccctgcacgtgggcagtgacttgctcaagttcatggagccggtgaccatgcaggaatctgggaccttcgcctttcggaccccaaagctgtcccacgatgccaacgagacgctgcccctgcacctctacgtcaagtcttacggcaagaatatcgacagcaagctccatgtgaccctctacaactgctcctttggccgcagcgactgcagcctgtgccgggccgctaaccccgactacaggtgtgcgtggtgcgggggccagagcaggtgcgtgtatgaggccctgtgcaacaccacctccgagtgcccgccgcccgtcatcaccaggatccagcctgagacgggccccctgggtgggggcatccgcatcaccatcctggggtccaatttgggcgtccaagcaggggacatccagaggatctctgtggccggccggaactgctcctttcagccggaacgttactccgtgtccacccggatcgtgtgtgtgatcgaggctgcggagacgcctttcacggggggtgtcgaggtggacgtcttcgggaaactgggccgttcgcctcccaatgtccagttcaccttccaacagcccaagcctctcagtgtggagccgcagcagggaccgcaggcgggcggcaccacactgaccatccacggcacccacctggacacgggctcccaggaggacgtgcgggtgaccctcaacggcgtcccgtgtaaagtgacgaagtttggggcgcagctccagtgtgtcactggcccccaggcgacacggggccagatgcttctggaggtctcctacggggggtcccccgtgcccaaccccggcatcttcttcacctaccgcgaaaaccccgtactgcgagccttcgagccgctacgaagctttgccagtggtggccgcagcatcaacgtcacgggtcagggcttcagcctgatccagaggtttgccatggtggtcatcgcggagcccctgcagtcctggcagccgccgcgggaggctgaatccctgcagcccatgacggtggtgggtacagactacgtgttccacaatgacaccaaggtcgtcttcctgtccccggctgtgcctgaggagccagaggcctacaacctcacggtgctgatcgagatggacgggcaccgtgccctgctcagaacagaggccggggccttcgagtacgtgcctgaccccacctttgagaacttcacaggtggcgtcaagaagcaggtcaacaagctcatccgcgcccggggcaccaatctgaacaaggcgatgacgctgcaggaggccgaggccttcgtgggtgccgagcgctgcaccatgaagacgctgacggagaacgacctgtactgtgagcccccggaagttgcagcccccgcccaagcggcggcagaaacgagacaccacacacaaccctgcccgagttcattgtgaagttcggctctcgcgagtgggtgctgggccgcgtggagtacgacacacgggtgaagcgacgtgccgctcaagcctcctcttgccgctggtcatcgtgcccatggtggtcgtcatcgcggtgtctgtctactgctactggaggaagagccagcaggccgaacgagagtatgagaagatcaagtcccagctggagggcctggaggagagcgtgcgggaccgctgcaagaaggaattcacagacctgatgatcgagatggaggaccagaccaacgacgtgcacgaggccggcatccccgtgctggactacaagacctacaccgaccgcgtcttcttcctgccctccaaggacggcgacaaggacgtgatgatcaccggcaagctggacatccctgagccgcggcggccggtggtggagcaggccctctaccagttctccaacctgctgaacagcaagtctttcctcatcaatttcatccacaccctgggagaaccagccggagttctcggcccgcgccaaggtctacttcgcgtccctgctgacggtggcgctgcacgggaaactggagtactacacggacatcatgcacacgctcttcctggagctcctggagcagtacgtcgtggccaagaaccccaagctgatgctgcgcaggtctgttatctgtgttggagaggatgctgtccaactggatgtccatctgcctgtaccagtacctcaaggacagtgccggggagcccctgtacaagctcttcaaggccatcaaacatcaggtggaaaagggcccggtggatgcggtacagaagaaggccaagtacactctcaacgacacggggctgctgggggatgatgtggagtacgcacccctgacggtgagcgtgatcgtgcaggacgagggagtggacgccatcccggtgaaggtcctcaactgtgacaccatctcccaggtcaaggagaagatcattgaccaggtgtaccgtgggcagccctgctcctgctggcccaggccagacagcgtggtcctggagtggcgtccgggctccacagcgcagatcctgtcggacctggacctgacgtcacagcgggagggccggtggaagcgcgtcaacacccttatgcactacaatgtccgggatggagccaccctcatcctgtccaaggtgggggtctcccagcagccggaggacagccagcaagaacctgccctggggagcgccatgccctcctggaggaggagaaccgggtgtggcacctggtgcggccgaccgacgaggtggacgagggcaagtccaagagaggcagcgtgaaagagaaggagcggacgaaggccatcaccgagatctacctgacgcggctgctctcaagtcaagggcacactgcagcagtttgtggacaacttcttccagagcgtgctggcgcctgggcacgcggtgccacctgcagtcaagtacttcttcgacttcctggacgagcaggcagagaagcacaacatccaggatgaagacaccatccacatctggaagacgaacagcttaccgctccggttctgggtgaacatcctcaagaacccccacttcatctttgacgtgcatgtcgcacgaggtggtggacgcctcgctgtcagtcatcgcgcagaccttcatggatgcctgcacgcgcacggagcataagctgagccgcgattctcccagcaacaagctgctgtacgccaaggagatctccacctacaagaagatggtgggaggattacttacaaggggatccgggcagatggtgcaggtcagcgaccagggacattgaacacacaccttggcagagattttcccgggcggcacacggactccttgaacaccctcgtggcactccaccagctctaccaatacacgcagaagtactatgacgagatcatcaatgccttggaggaggatcctgccgcccagaagatgcagcttggccttccgcctgcagcagattgccgctgcactggagaacaaggtcactgacctctgacctacaatctccagtgctgccttgggacataggtacctgaggtacctgagagcccctcaggggaggaggccgagtggctgtggctgagggcccccaccctcccctgggaacgcgccccaagccggagtgggtgcagccggaacccgcccagcgtctagactgtagcatcttcctctgagcaataccgccgggcaccgcaccagcaccagccccagccccagctccctccggccgcagaaccagcatcgggtgttcactgtcagagtctcgagtgatttgaaaatgtgccttacgctgccacgctgggggcagctggccttccggcctccgcccacgcaaccagcagccgcctcccatgccctaaggtttgggcccccctggggggaatcctgaagggcctgtggccccccagggcaaagttcccaagatcctatgtctgtctgtccacccacgagatgggaggaggagaaaaaaggcggtacgatgctttacctgacctcaccggcctccccaagggttgccggcactctggatgggactcacggctggctgggggccccacgttcaaaggttcaaanttgagacgtaggtcaaagtcctaacgttcgggggcccagacaatcctgggggtcctggtctgtcagacaggctggccctagagacccactacagtccggggggaattgaaggcagtttcaaagaccaccccaccccctttttgtaaatcttgttcattgtaaatcaaatacagccgtctttttcactctgnnnnnnnnnnnnnnnnnnnngggggggcccgtttaaagggatcaagttttatttcccggggttggcgaggaaaaattttttttatggggcccccaaaataaaatcccggggccgggttttaacaccgcggggaggggaaaaccccgggggtaccccaatta

SEQ ID NO: 21009 - DNA, 6886 bp, Homo sapiens
  SIMILAR (2768)..(4975): 931254mologous to Homo sapiens myasthenia gravis autoantigen gravin,accession number AF001504,Smith-Waterman Score=3387.
  misc_feature (1)...(6886): n = a,t,c or g
ccttcttttaaggagtttgccgcgagcgcgtctccttcattcgcaggctgggcgcgttcgcagtcggctggcggcgaaggaaggcgctctcgggacctcacgggcgcgcgtcttttggctcttgcccctgtccctgcggcttggggaaagcgtaacccggcggctaggcgcgggagaagtgcggaggagccatgggcgccgggagctccaccgagcagcgcagcccggagcagccgcccgaggggagctccacgccggctgagcccgagcccagcggcggcggcccctcggccgaggcggcgccagacaccaccgcggaccccgccatcgctgcctcggaccccgccaccaagctcctacagaagaatggtcagctgtccaccatcaatggcgtagctgagcaagatgagctcagcctccaggagggtgacctaaatggccagaaaggagccctgaacggtcaaggagccctaaacagccaggaggaagaagaagtcattgtccggcaggttgatcacatagactctgaagatgtgagcgacagagactccgatacagagatgactactaagtcagcggtagttcacgacatcacagatgatgggcaggaggagacacccgatataatcgaacagattccttcttcagaaagcaatttagaagagctaacacaacccactgagtcccaggctaatgatattggatttaagaaggtgtttaagtttgttggctttaaattcactgtgaaaaaggataagacagagaagcctgacactgtccagctactcactgtgaagaaagatgaaggggagggagcagcaggggctggcgaccaccaggaccccagccttggggctggagaagcagcatccaaagaaagcgaacccaaacaatctacagagaaacccgaagagaccctgaagcgtgagcaaagccacgcagaaatttctcccccaagcggaatctggccaagcagtggaggaatgcaaagaggaaggagaagagaaacaagaaaaagaacctagcaagtctgcagaatctccgactagtcccgtgaccagtgaaacaggatcaaccttcaaaaaattcttcactcaaggttgggccggctggcgcaaaaagaccagtttcaggaagccgaaggaggatgaagtggaagcttcagagaagaaaaaggaacaagagccagaaaaagtagacacagaagaagacggaaaggcagaggttgcctccgagaaactgaccgcctccgagcaagcccacccacaggagccggcagaaagtgcccacgagccccggttatcagctgaatatgagaaagttgagctgccctcagaggagcaagtcagtggctcgcagggaccttctgaagagaaacctgctccgttggcgacagaagtgtttgatgagaaaatagaagtccaccaagaagaggttgtggccgaagtccacgtcagcaccgtggaggagagaaccgaagagcagaaaacggaggtggaagaaacagcagggtctgtgccagctgaagaattggttggaatggatgcagaacctcaggaagccgaacctgccaaggagctggtgaagctcaaagaaacgtgtgtttccggagaggaccctacacagggagctgacctcagtcctgatgagaaggtgctgtccaaaccccccgaaggcgttgtgagtgaggtggaaatgctgtcatcacaggagagaatgaaggtgcagggaagtccactaaagaagctttttaccagcactggcttaaaaaagctttctggaaagaaacagaaagggaaaagaggaggaggagacgaggaatcaggggagcacactcaggttccagccgattctccggacagccaggaggagcaaaagggcgagagctctgcctcatcccctgaggagcccgaggagatcacgtgtctggaaaagggcttagccgaggtgcagcaggatggggaagctgaagaaggagctacttccgatggagagaaaaaaagagaaggtgtcactccctgggcatcattcaaaaagatggtgacgcccaagaagcgtgttagacggccttcggaaagtgataaagaagatgagctggacaaggtcaagagcgctaccttgtcttccaccgagagcacagcctctgaaatgcaagaagaaatgaaagggagcgtggaagagccaaagccggaagaaccaaagcgcaaggtggatacctcagtatcttgggaagctttaatttgtgtgggatcatccaagaaaagagcaaggagagggtcctcttctgatgaggaagggggaccaaaagcaatgggaggagaccaccagaaagctgatgaggccggaaaagacaaagagacggggacagacgggatccttgctggttcccaagaacatgatccagggcagggaagttcctccccggagcaagctggaagccctaccgaaggggagggcgtttccacctgggagtcatttaaaaggttagtcacgccaggaaaaaaatcaaagtccaagctggaagagaaaagcgaagactccctagctgggtctggtgtagaacattccactccagacactgaacccggtaaagaagaatcctgggtctcaatcaagaagtttattcctggactaaggaagaaaaggccagatgggaaacaagaacaagcccctgttgaagacgcagggccaacaggggccaacgaagatgactctgatgtcccggccgtggtccctctgtctgagtatgatgctgtagaaagggagaaaatggaggcccagcaagcccaaaaaaagcgcagagcagcccgagcagaaggcagccactgaggtgtccaaggagctcagcgagagtcaggttcatatgatggcagcagctgtcgctgacgggacgagggcagctaccattattgaagaaaggtctccttcttggatatctgcttcagtgacagaacctcttgaacaagtagaagctgaagccgcactgttaactgaggaggtattggaaagagaagtaattgcagaagaagaaccccccacggttactgaacctctgccagagaacagagaggcccggggcgacacggtcgttagtgaggcggaattgacccccgaagctgtgacagctgcagaaactgcagggccattgggtgccgaagaaggaaccgaagcatctgctgctgaagagaccacagaaatggtgtcagcagtctcccagttaaccgactccccagacaccacagaggaggccactccggtgcaggaggtggaaggtggcgtacctgacatagaagagcaagagaggcggactcaagaggtcctccaggcagtggcagaaaaagtgaaagaggaatcccagctgcctggcaccggtgggccagaagatgtgcttcagcctgtgcagagagcagaggcagaaagaccagaagagcaggctgaagcgtcgggtctgaagaaagagacggatgtagtgttgaaagtagatgctcaggaggcaaaaactgagccttttacacaagggaaggtggtggggcagaccaccccagaaagctttgaaaaagctcctcaagtcacagagagcatagagtccagtgagcttgtaaccacttgtcaagccgaaaccttagctggggtaaaatcacaggagatggtgatggaacaggctatcccccctgactcggtggaaacccctacagacagtgagactgatggaagcacccccgtagccgactttgacgcaccaggcacaacccagaaagacgagattgtggaaatccatgaggagaatgaggtcgcatctggtacccagtcagggggcacagaagcagaggcagttcctgcacagaaagagaggcctccagcaccttccagttttgtgttccaggaagaaactaaagaacaatcaaagatggaagacactctagagcatacagataaagaggtgtcagtggaaactgtatccattctgtcaaagactgaggggactcaagaggctgaccagtatgctgatgagaaaaccaaagacgtaccatttttcgaaggacttgaggggtctatagacacaggcataacagtcagtcgggaaaaggtcactgaagttgcccttaaaggtgaagggacagaagaagctgaatgtaaaaaggatgatgctcttgaactgcagagtcacgctaagtctcctccatcccccgtggagagagagatggtagttcaagtcgaaagggaggaataccagtagcagagcccaacccatgtgaatgaagagaagcttgagcacgaaacagctgttaccgtatctgaagaggtcagtaagcagctcctccagacagtgaatgtgcccatcatagatggggcaaaggaagtcagcagtttggaaggaagccctcctccctgcctaggtcaagaggaggcagtatgcaccaaaattcaagttcagagctctgaggcatcattcactctaacagcggctgcagaggaggaaaaggtcttaggagaaactgccaacattttagaaacaggtgaaacgttggagcctgcaggtgcacatttagttctggaagagaaatcctctgaaaaaaatgaagactttgccgctcatccaggggaagatgctgtgcccacagggcccgactgtcaggcaaaatcgacaccagtgatagtatctgctactaccaagaaaggcttaagttccgacctggaaggagagaaaaccacatcactgaagtggaagtcagatgaagtcgatgagcaggttgcttgccaggaggtcaaagtgagtgtagcaattgaggaggatttagagcctgaaaatgggattttggaacttgagaccaaaagcagtaaaacttgtccaaaacatcatccagacagccgttgaccagttttgtacgtacagaagaaacagccaccgaaatgttgacgtctgagttacagacacaagcttcacgtgataaaagctgacagccaggacgctgggacaggaaacggagaaagaaggagaggaccctcaggcctctgcacaggatgaaacaccaattacttcagccaaagaggagtcagagtcaaccgcagtgggacaagcacattctgatatttccaaagacatgagtgaagcctcagaaaagaccatgactgttgaggtagaagggttccactgtaaatgatcagcagctggaagaggtcgtcctcccatctgaggaagagggaggtggagctggaacaaagtctgtgccagaagatgatggtcatgccttgttagcagaaagaatagagaagtcactagttgaaccgaaatgaagatgaaaaaggtgatgatgttgatgaccctgaaaaccagaacttcagccctggccgcataactgatgcctcagggaggctttaaccaaaggagtccccagatacaaatggaccaaaacaaaaagagaaggaggatgtcccagggaagtagtaattgtcaggaaggaaaagtgtcacagtgaatcagataaagtcgatcacaccccaagtcacaggaggagttacagaaacaagagagagaatctgcaaagtcagaacttacagaatcttaaaacatcatgcagttaaactcattgtctgtttggaagaccagaatgtgaagacaagtagtagaagaaaatgaatgctgctgctgagactgaagaccagtatttcagaactttgagaattggagagcaggcacatcaactgatctcatttctaagagagcccctgacaatcctgaggcttcatcaggagctatgagccatttaacatttcctctttccaagaccaaccctacaattttccccttgataaaccatataaattctgatttaagggtcctaaattcttaacctgggaactggagttggcaatacctagttctgcttctgaaactggagtatcattctttacatatttatatgtatgttttaaagtagtcctcctgtatctattgtatatttttttcttaaaggtttaagggaaatgtggcagggatactacatgcctttttgtatcaccacagtatatggatggggggcatgtgccatagtnccaggcttgggggagcttttaaggcctcagttattattaaccccacgaaaaaacagagcctcctaggatgttaacattcctggatccagggtacaatttcttttaaaattcactaatggattgaggtcccatatttagtggtactctgaaagtgtcacgtttcctagggacgctgagtgtgcctaaaactaaaaagcattttgaaacataccagaatgttctattgtccattgggaaatttttctttctaacccagtggaggttaagaaagaagttatattccggggtagcaaattaacctttaccatccctttttccccacctgttatggttgtttgggacccgataagtgtgtgctttaatccctgagggcaaagtagtgaatatggttttatatggttatgaagaaaagaattgttggtaagtttttgattctactctctatatgctggactgcatctcacacatgtgcatgaaataagtccagtttctttaacaatggtattttgatagattacggattgtgtttggggccatattgttgccattctgttaagaacaatggtggcaacacattcatttgggataggttgtgatttgacgactgatttaaataaaatatttgcttcacttagatttgctggttttattagataccaggaagcctgggacatatgtgtaccacattagaattctaaagataatgattgataagctagaactttttgatgtagtcattacatgaaaccccttgtcactggtttgtgtgttcagaggaagccatggccgagatagctttcctgaaataaaccagtagcttaacagattgaaa

SEQ ID NO: 21010 - DNA, 1377 bp, Homo sapiens
  SIMILAR (927)..(1028): 641254mologous to Homo sapiens Human secreted protein, SEQ ID NO: 7595,accession number G03514,Smith-Waterman Score=108.
atggtgaagaaggtgagtgctggaatcaaactgcctgcgctccgtagggctctgcccatgacctctgcacccgggttttcccgtatgtcaactggttgtaatagcaataacccctacccgggtgacaaaagtcttcctaatgagaaataccagagggttaaaattgcctggagccctcgccagtttctgccgattggcacctgtagccactgtgatgctgctgcatccactttggaggtgtcggtgctacctctcctgctggtacagacaccgccagtgctggtgccaccaccaccacgattcgtctgttcttacaactttgaactctatgtggatgttgtctatcaggatcttcagtcctcccttttctctgggataccaatgctactcaagctctacacatctaacacccaatgcatcatatcgcctccatcaaaaccagatgacgcactgatcctatttccgttaactatcacagaattctacaagcagaggaagtatctagaactgaggacgcacactaagttctgtaatcgcatgatacctggcaggtacaatgaagccaggaaggcacttcggattgaaaagggcaaggacataggcagcattctggagagggaacggagaaaagacagagcagcgagcgcaaataccatcctagctccaataaaagggaacgacttttaccgcaggaagaacctaggcctggaagccacgcgagatctgggggtcgggatcacgttgcgttgcctagcgacagcagggacgctcgtgggaccccaggctaaaccccgctgtagccttaaatctcctaccatggaggaagaaggcggcggccgcagctgtgggaccactagggagctgcagaagctgaagcagcaggcgatggagtactaccgggagaacgacgttccgcgcaggctggaagagctgctcaactccaccttctacctccagcctgccgacgtctacgggcacctggtagggacctgggacaagcgctctcctcccgccaacccctctccccccgccccgcgctgcggcaacgccttgcgcctgcgcctgcgcctcagaatctcgcatgccagccgcccgggccctgggcctgcgtgtgcggaggagacttctggagggaaggagcgggaaggacacccaggggtgaagggatctccccagagaaagtggcagaaaggaggcagctggaggaaagagggcgctaggcgtatttgacctgcagcggcagcccaggggctggcaggcttcctcgctgcctaagaggcctctccgtttgtgggccggcccaccgcccatgcttgccaattgtcatttttaacacataccttaatgccctcagctcagctcaccgaccttaagcag

SEQ ID NO: 21011 - DNA, 562 bp, Homo sapiens
  SIMILAR (1)..(561): 721254mologous to Homo sapiens zinc finger protein ZNF224,accession number AF187990,Smith-Waterman Score=765.
gagaaactgtataattgtaaggaatgtgggaagagctttagtcgggccccatgtcttttgaaacatgagagactccacagtggagaaaaaccattccaatgtgaagagtgtgggaagagatttactcaaaattcacatcttcattcccatcagagagttcacactggagaaaagccatacaaatgtgagaagtgtggaaagggctacaatagtaagtttaatcttgatatgcaccagaaggtccacacaggagagagaccatacaatcacagtggagaaaaaccattcaaatgtgaagaatgtgggaaaggattttacacaaattcacaatgctattcccgccagagatcccatagtggagaaaaaccatacaaatgtgtggagtgtgggaagggctacaaaaggaggttggatcttgactttcaccagcgcgtccatacaggagagaaactgtataattgtaaggaatgtgggaagagctttagtcgggccccatgtcttttgaaacatgagagactccacagtggagaaaaaccattccaatgtgaagagtgtgggaaga

SEQ ID NO: 21012 - DNA, 489 bp, Homo sapiens
  SIMILAR (1)..(489): 871254mologous to Homo sapiens ZNF255,accession number AC021092,Smith-Waterman Score=802.
  misc_feature (1)...(489): n = a,t,c or g
gagaaactgtataattgtaaggaatgtgggaagagctttagtcgggccccatgtcttttgaaacatgagagactccacagtggagaaaaaccattccaatgtgaagagtgtgggaagagatttactcaaaattcacatcttcattcccatcagagagttcacactggagaaaagccatacaaatgtgagaagtgtggaaagggctacaatagtaagtttaatcttgatatgcaccagaaggtccacacaggagagagaccatacaattgtaaggaatgtgggaagagttttggctgggcctcgtgtcttttganacatcagagactgcacagtggagaaaaaccattcaaatgtgaagagtgtgggaaaagatttacttgtaaggaatgtgggaagagttttggctgggcctcgtgtcttttganacatcagagactgcacagtggagaaaaaccattcaaatgtgaagagtgtgggaaaagatttact

SEQ ID NO: 21013 - DNA, 2920 bp, Homo sapiens
  SIMILAR (1178)..(2917): 641254mologous to Homo sapiens zinc finger protein ZNF224,accession number AF187990,Smith-Waterman Score=2047.
atgaccacgttcaaggaggcaatgaccttcaaggacgtggctgtggtcttcactgaggaagagctggggctgctggaccttgctcagaggaagctgtatcgagatgtgatgctggagaacttcaggaacctgctctcagtgggacatcaagcattccacagggatactttccacttcctaagggaagaaaagatttggatgatgaagacagcaatccaaagggaagggaattcaggagacaagatccaaactgagatggagactgtttcagaagcaggaacacatcaagagtggtccttccagcaaatctgggaaaaaattgcaagtgatttaaccaggtctcaagacttggtgataaatagctctcagttctccaaagaaggtgatttcccctgccagactgaggcaggactatctgtaattcacacaagacagaaatcttcccagggcaatggatataaaccatccttcagtgatgtctcccactttgattttcatcaacaattacactcaggagagaaatctcatacgtgtgatgagtgtggaaagaacttttgttacatctcagcccttcgtattcatcagagagtccacatgggagagaaatgctataagtgtgacgtgtgtggtaaggaattcagtcagagttcacatctgcaaactcatcagagagtccacactggagagaaaccgttcaaatgtgtggaatgtgggaaaggcttcagtcgtagatcagcacttaatgttcatcacaaattacacacaggagagaaaccttataattgtgaggaatgcgggaaggccttcattcacgattcccagcttcaagaacatcagagaatccatacgggggagaagccattcaaatgtgatatatgtggtaagagcttctgtggtagatcaagacttaataggcattccatggttcacacggcagagaaaccattccgatgtgatacgtgtgataagagctttcgtcagagatcagcacttaatagtcatcgcatgatccacacaggagagaaaccatacaaattgtgagaagtgtggaaaaggctttatttgtaggcgagatctttatacgcatcatatggtccacacgggagaaaagccatataattgtaaagagtgtgggaagagcttcagatgggcctcgtgtcttttgaaacatcagcgagtccacagtggagaaaaaccattcaaatgtgaagaatgtgggaaaggattttacacaaattcacaatgctattcccaccagagatcccatagtggagaaaaaccatacaaatgtgtggagtgtgggaagggctacaaaaggaggttggatcttgactttcaccagcgcgtccatacaggagagaaactgtataattgtaaggaatgtgggaagagctttagtcgggcctcatgtcttttgaaacatgagagactccacagtggagaaaaaccattcaaatgtgaagagtgtgggaaaagatttactcagaattcacatcttcattctcatcaaagagtgcacactggagaaaagccatacaaatgtgatgagtgtgggaagggcttcagatggtcctcaactcgtctgacccatcagagacgccacagcagagaaacacctctcaaatgtgagcagcatgggaagaacattgtacagaattcattctctaaagtgcaagaaaaagttcacagtgtagaaaagccatacaaatgtgaggactgtgggaagggctacaacaggcgcttgaatcttgatatgcatcagagggtccacatgggagagaaaacatggaagtgtagggagtgtgatatgtgctttagtcaggcctcaagccttcgacttcatcagaatgttcatgttggagaaaaaccttagcaagaacatcagagaatccatacgggggagaagccattcaaatgtgatatatgtggtaagagcttctgtggtagatcaagacttaataggcattccatggttcacacggcagagaaaccattccgatgtgatacgtgtgataagagctttcgtcagagatcagcacttaatagtcatcgcatgatccacacaggagagaaaccatacaaatgtgaggagtgtggaaaaggctttatttgtaggcgagatctttatacgcatcatatggtccacacgggagaaaagccatataattgtaaagagtgtgggaagagcttcagatgggcctcgtgtcttttgaaacatcagcgagtccacagtggagaaaaaccattcaaatgtgaagaatgtgggaaaggattttacacaaattcacaatgctattcccaccagagatcccatagtggagaaaaaccatacaaatgtgtggagtgtgggaagggctacaaaaggaggttggatcttgactttcaccagcgcgtccatacaggagagaaactgtataattgtaaggaatgtgggaagagctttagtcgggcctcatgtcttttgaaacatgagagactccacagtggagaaaaaccattcaaatgtgaagagtgtgggaaaagatttactcagaattcacatcttcattctcatcaaagagtgcacactggagaaaagccatacaaatgtgatgagtgtgggaagggcttcagatggtcctcaactcgtctgacccatcagagacgccacagcagagaaacacctctcaaatgtgagcagcatgggaagaacattgtacagaattcattctctaaagtgcaagaaaaagttcacagtgtagaaaagccatacaaatgtgaggactgtgggaagggctacaacaggcgcttgaatcttgatatgcatcagagggtccacatgggagagaaaacatggaagtgtagggagtgtgatatgtgctttagtcaggcctcaagccttcgacttcatcagaatgttcatgttggagaaaaaccttag

SEQ ID NO: 21014 - DNA, 3189 bp, Homo sapiens
  SIMILAR (1092)..(1445): 921254mologous to Homo sapiens zinc finger protein 2,accession number AF067164,Smith-Waterman Score=585.
ttttttttttatattacttttgtttaaaattggttttgattcatattttattatatacacaatttattagcttcataatttaccatgcaagattttagactgattaggaaattcactaggaagagtagcaggtataatgtttgtatcatattaattttattattgtcttttatttttattaaaaattttatttcagtagtctttttttattttattaaagtatatactggtttttggttacatggatgaattgtctaatggtgaagtctgagattttagtgtacccatcacctgagtagtgtacattgtacccaaacttgtaggctttttatcccttaccctaccttccaccctccccattttgagtctgcatagtccattatatcactctgtatgcctttgcatacccatagcttaactcccacttataagtgaaaacacggtatttggttttccattcctgagttacttcacttaggaataatagcctccagctccatccaagttgctgcaaaagacattatttcatttttttatggctgaataggtattccctggtgaatatataccatattttctttatccactcattggttgatgggcacttaggttggttccatatctttgaaattgtgaattgtgctgtaataaatataggcatgcaggtgtccttttgatgtaaggacttcttttcctttgggtagatagtagtgggattgctggatcaaatggtagatccacttttagttctttagagaatctccatactgtatttcatagaggttgtactaatttaccttcacaccagcagtgtataggcgtttcttttcaccacacccatgtcaacatctattgtttttcgtcttttatttctatcaagtattttacatatgatacttggtttagttcgaaattggcctcatccaaaccaaagattatggtgcacttgaaaaatacaaactgaatgttgtctatactcatgagagtttcctgccatggcctaagtgaaatcttgataacactgaacaaaggcttcacttgtcctcatcttttaattctgtattctgataggagacaagatccaaactgagatggagactgtttcagaagcaggaacacatcaagagtggtccttccagcaaatctgggaaaaaattgcaagtgatttaaccaggtctcaagacttggtgataaatagctctcagttctccaaagaaggtgatttcccctgccagactgaggcaaggactatctgtaattcacacaagacagaaatcttcccaagggcaattggatataaaccatccttcagtgatgtctccctctttgattttcatcaacaattacactcaggagagaaatctcatacgtgtgatgagtgtggaaagaacttttgttacatctcagcccttcatattccatcaaagagtccacatgggagagaaatgctataagtgtgacgtgtgtggtaaggaatttagtcagagctcacatcttcaaactcatcagagagtccacactgtagagaaaccattcaaatgtgtggaatgtgggaaaggcttcagtcgtagatcagcacttaatgttcatcacaaattacacacaggagagaaaccttataattgtgaggaatgcgggaaggccttcattcacgactcccagcttcaagaacatcagagaatccatacgggggagaagccattcaaatgtgatatatgtggtaagagcttctgtggtagatcaagacttaataggcattccatggttcacacggcagagaaaccattccgatgtgatacgtgtgataagagctttcgtcagagatcagcacttaatagtcatcgcatgatccacacaggagagaaaccatacaaatgtgaggagtgtggaaaaggctttatttgtaggcgagatctttatacgcatcatatggtccacacgggagagaagccatataattgtaaagagtgtgggaagagcttcagatgggcctcgtgtcttttgaaaacatccagcgagtcccacagtggcagaaaaaccattcaaatgtgcaagaatgtgggaaaggattttacacaatttcacaatgctattccccaccagagatcccatagtggagaaaaaccatacaaatgtgtggagtgtgggaagggctacaaaaggaggttggatcttgactttcaccagcgcgtccatacaggagagaaactgtataattgtaaggaatgtgggaagagctttagtcgggccccatgtcttttgaaacatgagagactccacagtggagaaaaaccattccaatgtgaagagtgtgggaagagatttactcaaaattcacatcttcattcccatcagagaggttcacactggagaaaagccatacaaatgtgagaagtgtggaaagggctacaatagtaagtttattctttatatgcaccaggagggtccacacaggagagagaccatacaattgtaaggaatgtgggaagagttttggctgggcctcgtgtcttttgaaacatcagagactgcacagtggggaaaaccctttcaaatgtgaagagtgtgggaaaagatttactcagaattcacagcttcattctcatcaaagagtgcacactggagaaaagccatacaaatgtgatgagtgtgggaagggcttcagctggtcctcaactccgtctgacccatcagagaccgccaccagcagagaaacacctctcaaatgtgagcagcatggggaagaacattgtaccagaattccttctctggaagttgccagaaaaagttcaccagtgttagaaaaagccatacaaatgtgaggacctgttgggaagggctacaacaggcgcctttgaatcctttgatatgcatcagaggggtccacatgggagagaaaacatggaagtgtagggagtgtgatatgtgcttttagtcaggcctcaaagccttcgacttcatcagaatgttcatgttggagaaaaaccttagtgatgtgatggtgcaataaagtcttcactcaggtcttcatgaatgcagtctcatctgaaagttcacaaaggagagacacattaaaatatgaggcacatagtaagcacttccctttgagtattttatctctgaatccatgctggtgataaatttcacccattcttggaagagggaaaacatttgtttaagataacatca

SEQ ID NO: 21015 - DNA, 1933 bp, Homo sapiens
  SIMILAR (377)..(1177): 401254mologous to Homo sapiens LIM and cysteine-rich domains protein 1,accession number AF169284,Smith-Waterman Score=332.
cacagagctccctcccaggcccgcgaacttggccattcagccgccgctgtccccgctgcgcgccctcgcgcctctgcctgagaagccaggcgctgttcccccaccccagaagaggatggcaaaggtggctaaggacctcaacccaggagttaaaaagatggtgatcacatgggatatacatataaagtaatcgagcgaatactggagattggtgcatttcgaccgcatatgtccctgggccagctgcagtcagcaagaggtgtggcatgtttgggatgcaaggggacgtgttcgggcttcgagccacattcatggaggaaaatatgcaagtcttgcaaatgcagccaagaggaccactgcctaacatctgacctagaagaacgatcggaaattgggccgctggctgagggactccaagtattccaccctgcacttgctcgggtgaaaggcggggacggcatccggattttacaagaggaacccggatgatcattgaccaaccctattgctactgggaaagatcccacttttgacaccatcacctacgagtggggctccccctgggagttcacccaggaaactggggactgcagttacatgggagctcattccccaagggaggaaggcagccagttgacagggcaccagcggggggccttttaccgcgccgcccgcccagctcatgcaccagggctccccatctatgacccaggatcccctcgcgctgcccgtggacttttggagaaatgagttgaaaactgaatggaaagaatttgtcaagcaaatataagagcgaaggcccttcggcgttgggagaagtggccctcccggggcaggggtggcttgccccaaggaaggaaggggaagcagcaggaaaaagccagaagggggcagaagaccactgctgctaccaccaacggcagtctcagtgacccgtccaaagaagtggaatacgtctgcgagctctgcaagggagcggcccctcctgacagccccgtggtctacttcggacagggcaggctacaacaagcagtggcaccccacctgctttgtgtgtgccaagtgctccgagccgctggtggaatctcatctacttctggaaggatggtgcaccctggtgcggccgccattactgcgagagtctgcggccccgggtgctccggcttgcgatgagatatatattcgctgaggactaccagcgtgtggaagatctggcctggcaccgaaagcactttgtctgtgagggttgtgagcagctgctgagcggcctgggcgtacatcgtcacccaggggtccagcttcttgtgccccaacttgcagcaagtcccaaacgctccctgaagggctgccccaccccacagccagaatcaccagggatccccaccgagaaggataagccagggtgtgcccgagacccatccctaagggtcccggatgtgaccagcaagccaagtgaaataaaccaatgattttgctttttcagtgaggaatatatatatggaggatatatattaggatattattatttctagggtttggggtgggttggtaggatcctttgaggggttcagtagttttccaaaacccaaaattattcttaaggaagtcttagggatgggagtttcctttttctgttgttgtttgtttgttttcccagcttacaaccaacttaaaggacacaaatggcgttctggcaaggggactctgggaggagttttccgagaatgcaattcccgagtggagcaaagtcgcatagctgtaagaatgtgcgtgcttttttgtggacacaggaagctcctccaggagcaggctgggatcccaactatcgcttgttgcctctttttcaagtggaattttaaattttaaataaacaactttttttggcatgataaacagatcaataaaagttttgtgaattccacataaaaaaaaa

SEQ ID NO: 21016 - DNA, 1335 bp, Homo sapiens; identical to SEQ ID NO: 12204
  SIMILAR (244)..(690): 681254mologous to Rattus norvegicus nuclear RNA helicase,accession number AF063447,Smith-Waterman Score=545.

SEQ ID NO: 21017 - DNA, 434 bp, Homo sapiens
  SIMILAR (268)..(224): 601254mologous to Canis familiaris brain-specific synapse associated protein, Bassoon,accession number AJ012166,Smith- Waterman Score=44.
tttgtgtgtggaaatgtttaatgcccacagctaaagtagtgaggcagtggactgaaccctgctgaagatagtacctaatacggaggccagatgatgactggacccaaatccgacttcagtgttcttgggctcagtatactcctgagatgttcctgatccatgaagccgccttcaggaattctttctgcagcctttcaccactctcctggccttggctgactgagccaggggtgggccctggattcaagccaggcccgtcagtctttccctgaggtctttgaggtctttcaagcttcttcagtttcttgcgggccccactgtggttcccctgcgccaggtctgctcctcccaggagccggtatgtctctgccacctcgggactgaaatcgccaaatgcttccactttggcttccagggactctctcaggatcgag

SEQ ID NO: 21018 - DNA, 374 bp, Homo sapiens
atctggaaaagccactgttcagtgggttcctgctgctgagttgaaaacttaggggaggcagctgctgctgtgataaacacgagagccaccgtcgccgggtggtgcttagctctaggaactgctggcttcacagagctgaatgctaaatatggcatttgagaaactccagtcagcagcagatgtgaaaagcatgtttcaagtccccatttgtgccctggtattcacagagcagtcagcctgtcctcacataggtacatgtgggaggagttggagatcagaacttcacggaccacagtcaacaaacctttcaggaaatacggagttgccccttcattttctctttggagcctggcaaacaggtgtctttaagatgc

SEQ ID NO: 21019 - DNA, 6891 bp, Homo sapiens
  SIMILAR (3)..(1439): 351254mologous to Gallus gallus synemin,accession number U28143,Smith-Waterman Score=589.
agctgggtgcgcagcagcgcgagctgcaggaggcgctgggcgctcgcgccgccctcgaggcgctgctgggccggctgcaggccgagcgccgaggcctcgacgcggcccacgaacgcgacgtgagggagctgcgcgcgcgcgccgccagccttaccatgcatttccgcgcccgcgccaccggccccgccgcgccgccgccacgcctgcgggaggtgcacgacagctacgcactgctggtggccgagtcgtggcgggagacggtgcagctgtacgaggacgaggtgcgcgagctggaggaggcgctgcggcgcggccaggagagcagactccaggcggaggaagagacgcggctgtgcgcgcaggaggcagaagcgctgcggcgcgaggcgctcgggttggagcagctgcgcgcgcggctggaggacgcgctgctgcggatgcgcgaggagtacgggatacaggccgaggagcggcagagagcgattgactgcctggaggatgagaaggcaaccctcaccttggccatggctgactggctgcgggactatcaggacctcctgcaggtgaagaccggcctcagtctggaggtggcgacctaccgggccttattggaaggagaaagtaatcccgaaatagtgatctgggctgagcacgttgaaaacatgccgtcagaattcagaaacaaatactatcactataccgactcactactacagagggaaaatgaatggaatctattttcaaggcagaaagcacctttggcaagtttcaatcacagctcggcactgtattctaacctgtcagggcaccgtggatctcagacgggcacatctattggaggtgatgccagaagaggcttcttgggctcgggatattcttcctcggccactacccagcaggaaaactcatacggaaaagccgtcagcagtcaaaccaacgtcagaactttctctccaacctatggccttttaagaaatactgaggctcaagtgaaaacattccctgacagaccaaaagccggagatacaagggaggtccccgtttacataagtgaagattccacaattgcccgcgagtcgtaccgggatcgccgagacaaggtggcagcaggtgcttcggaaagcacacggtcaaatgagaggaccgtcattctgggaaagaaaacagaagtgaaagccacgagggagcaagaaagaaacagaccagaaaccatccgaacaaagccagaagagaaaatgttcgattctaaagagaaggcttctgaggagagaaacctaagatgggaagaattgacaaagttagataaggaagcgagacagagagaaagccagcagatgaaggagaaggctaaggagaaggactcaccgaaggagaagagtgtgcgagagagagaggtgccgattagtctagaagtatcccaggacagaagagcagaggtgtccccgaaaggtttgcagacgcctgtgtaaggatgctggtggtgggaccggtagagaggcagaagcaagagagctacggttcaggttgggcaccagtgatgccactggttctctgcaaggcgattccatgacagaaaccgtagcagaaaacatcgttaccagtatcctgaagcagttcactcagtctccagagacagaagcatctgctgattcttttccagacacaaaagtcacttacgtggacaggaaagagcttcctggggaaaggaaaacaaagactgaaatagttgtggagtcttaaactgactgaggatgttgatgtttccgatgaagctggcctggactaccttttaagcaaggatattaaggaagtggggctgaaaggcaagtcagccgagcagatgataggagacatcatcaacctcggcctgaaagggagggaggggagagcaaaggtcgtcaacgtggagatcgtggaggagcccgtgagttatgtcagcggggagaagccggaggagttttccgtcccattcaaagtggaggaggtcgaagatgtgtcgccaggcccctgggggttggttaaggaggaggaaggttatggagaaagcgatgtcacattctcagttaatcagcatcgaaggaccaagcagccccaggagaacacgactcacgtggaagaagtgacagaggcaggtgattcagagggcgagcagagttattttgtgtccactccagatgaacaccccggggggcacgacagagatgacggctcggtgtacgggcagatccacatcgaggaggaatccaccatcaggtactcttggcaggatgaaatcgtgcaggggactcgaaggaggacacagaaggacggtgcagtgggcgagaaggttgtgaagcccttggatgtcccagcgccctctctggagggggacctgggttccactcactggaaagaacaagctagaagcggtgaatttcatgccgaacccacagtcattgaaaaagaaattaaaataccccacgaattccacacctccatgaagggcatctcctccaaggagccccggcagcagctggtggaggtcatcgggcagctggaggaaacccttcccgagcgcatgagggaggagctgtccgccctcaccagagaggggcagggtgggccggggagcgtttccgtggatgtcaagaaggtccagggtgctggtggcagttccgtgaccctggttgctgaagtcaacgtctcacaaactgtggatgccgatcggttagacctggaggagctgagcaaagatgaggccagtgagatggagaaggctgtggagtcggtggttcgggagagcctgagcaggcaacgcagcccagcgcctggcagcccagatgaggaaggtggagcggaggccccggctgctggcattcgcttcaggcgttgggccacccgggagctgtacatcccttcaggcgagagcgaggttgctggtggggcctctcacagctcgggacagcgcactccccagggcccagtgtcggccactgtggaggtcagcagccccacaggctttgcccagtcacaggtgctggaggatgtgagccaggctgcaaggcacataaaactcggcccctctgaagtctggaggactgagcgaatgtcatatgaaggacccactgcagaagtggtggaggtaagtgcgggaggtgacctaagtcaggcagcgagcccgaccggagccagccggtctgtgaggcatgtcacgctgggtcccggtcaaagtccactgtccagagaagtcatcttcctaggccctgcccctgcctgtccagaggcatggggctcgccagaacctggcccagcagagtcttctgcagatatggacggatcagggaggcacagcacatttggctgcagacaatttcatgctgaaaaggagattatttttcagggccccatttctgctgcagggaaggttggtgattattttgcaacagaagagtcagtgggtacccagacttctgtcaggcaactccagttaggccctaaagaagggttcagtgggcaaatccagttcacagctccactttcagacaaggtggagttgggtgtcataggagattctgtacacatggaagggttgccagggagcagcacatccatcaggcacatcagcattgggcctcagaggcatcagaccacccagcagatagtttaccatgggctggttccccaactgggggaatctggtgactcagagagcactgtgcacggagagggctcagcagatgtgcaccaggccactcacagtcatacctcgggtagacaaaccgttatgactgaaaagagcaccttccaaagtgtcgtttctgaatctccccaggaggatagtgcaggggacacatcaggggcagaaatgacatcgggtgttagcagatcctttaggcacattcgactaggtcctacagaaacggaaacctctgaacacattgccatccgtggacccgtgtccagaacatttgtgcttgctggttcagcggactcccctgagctaggcaagttagcagacagcagcagaacgctaaggcacattgcaccagggcccaaagaaacttcgtttacctttcagatggatgtgagtaacgtagaggcgatccgcagccggacacaggaagcgggagctctcggtgtgtctgaccgtggttcctggagagacgcggacagtaggaatgaccaggcagttggtgtgagctttaaggcctctgctggggaaggagaccaggcccacagagaacagggcaaggagcaggccatgtttgataagaaggtgcagctccagagaatggtagaccaaaggtcggtgatttcagatgaaaagaaagttgccctcctctatctagacaatgaggaggaggagaatgatgggcattggttttaataagcagaaacattttgttttaatggcagcctgttggcgacgtgccaacatccaaaggccttaacttattttaagaggccgagggagtctatgaaaatctccccttttttacttttttaaagagtactcccggcatggtcaatttcctttatagttaatccgtaaaggtttccagttaattcatgccttaaaaggcactgcaattttatttttgagttgggacttttacaaaacacttttttccctggagtcttctctccacttctggagatgaatttctatgttttgcacctggtcacagacatggcttgcatctgtttgaaactacaattaattatagatgtcaaaacattaaccagattaaagtaatatatttaagagtaaattttgcttgcatgtgctaatatgaaataacagactaacattttaggggaaaaataaatacaatttagactctaaaaagtcttttcaaaaagaaatgggaaataggcagactgtttatgttaaaaaaattcttgctaaatgatttcatctttaggaaaaaattacttgccatatagagctaaattcatcttaagacttgaatgaattgctttctatgtacagaactttaaacaatatagtatttatggcgaggacagctgtagtctgttgtgatatttcacattctatttgcacaggttccctggcactggtagggtagatgattattgggaatcgcttacagtaccatttcattttttggcactaggtcattaagtagcacacagtctgaatgcccttttctggagtggccagttcctatcagactgtgcagacttgcgcttctctgcaccttatcccttagcacccaaacatttaatttcactggtgggaggtagaccttgaagacaatgaagagaatgccgatactcagactgcagctggaccggcaagctggctgtgtacaggaaaattggaagcacacagtggactgtgcctcttaaagatgcctttcccaaccctccattcatgggatgcaggtctttctgagctcaagggtgaaagatgaatacaataacaaccatgaacccacctcacggaagctttttttgcactttgaacagaagtcattgcagttggggtgttttgtccagggaaacagtttattaaatagaaggatgttttggggaaggaactggatatctctcctgcagcccagcaccgagatacccaggacgggcctggggggcgagaaaggcccccatgctcatgggccgcggagtgtggacctgtagataggcaccaccgagtttaagatactgggatgagcatgcttcattggattcattttattttacacgtcagtattgttttaaagtttctgtctgtaaagtgtagcatcatatataaaaagagtttcgctagcagcgcattttttttagttcaggctagcttctttcacataatgctgtctcagctgtatttccagtaacacagcatcatcacactgactgtggcgcactggggaataacagtctgagctagcaccaccctcagccaggctacaacgacagcactggagggtcttccctctcagattcacctggaggccctcagacccccagggtgcacgtctccccaggtcctgggagtggctaccgcaggtagtttctggagagcacgttttcttcattgataagtggaggagaaatgcagcacagctttcaagatactattttaaaaacaccatgaatcagatagggaaagaaagttgattggaatggcaagtttaaacctttgttgtccatctgccaaatgaactagtgattgtcagactggtatggaggtgactgctttgtaaggttttgtcgtttctaatacagacagagatgtgctgattttgttttagctgtaacaggtaatggtttttggatagatgattgactggtgagaatttggtcaaggtgacagcctcctgtctgatgacaggacagactggtggtgaggagtctaagtgggctcagtttgatgtcagtgtctgggctcatgacttgtaaatggaagctgatgtgaacaggtaattaatattatgacccacttctatttactttgggaaatatcttggatcttaattatcatctgcaagtttcaagaagtattctgccaaaagtatttacaagtatggactcatgagctattgttggttgctaaatgtgaatcacgcgggagtgagtgtgcccttcacactgtgacattgtgacattgtgacaagctccatgtcctttaaaatcagtcactctgcacacaagagaaatcaacttcgtggttggatggggccggaacacaaccagtctttttgtatttattgttactgagacaaaacagtactcactgagtgtttttcagtttcctactggtggttttgatattgtttgtttaagatgtatatttagaatgacatcatctaagaagctgattttgctaaactcctgttccctacaatgggaaatgtcacaagaatgtgcaaaaataaaaatctgagg

SEQ ID NO: 21020 - DNA, 4620 bp, Homo sapiens
  SIMILAR (744)..(2477): 361254mologous to Gallus gallus synemin,accession number U28143,Smith-Waterman Score=781.
agagtgattgactgcctggaggatgagaaggcaaccctcaccttggccatggctgactggctgcgggactatcaggacctcctgcaggtgaagaccggcctcagtctggaggtggcgacctaccggattgtggaacatgtggcagtggagggtgtgagcaagctgtggaaaccgctttggcagaagagtcaaagtctggtcatctccagtggtgtctccttcacaggtggcagattaaacctggagaggttaagaaggggaccaactcccctggctagcacagagtcggtaaagcaggtgcttgtgaataatcggatgataattgatgatgagatggtgaaaaccctagcaatgtccagaacctgcagcgccccaaaccctctcactgccgatgtgaagacctggtccagatcctacagaagcgaggatgcagccacaggccctgtgttgggggtggcttcgacggtggccttattggaaggagaaagtaatccagagatagtgatctgggctgagcacgttgaaaacatgccgtcagaattcagaaacaaatcctatcactataccgactcactactacagagggaaaaatgaaaggaatctattttcaaaggcagaaagcacctttggcaagtttcaatcacagctcggcactgtattctaacctgtcagggcaccgtggatctcagacgggcacatctattggaggtgatgccagaagaggcttcttgggctcgggatattcttcctcggccactacccagcaggaaaactcatacggaaaagccgtcagcagtcaaaccaacgtcagaactttctctccaacctatggccttttaagaaatactgaggctcaagtgaaaacattccctgacagaccaaaagccggagatacaagggaggtccccgtttacataggtgaagattccacaattgcccgcgagtcgtaccgggatcgccgagacaaggtggcagcaggtgcttcggaaagcacacggtcaaatgagaggaccgtcattctgggaaaataaacagaagtgaaagccacgagggagcaagaaagaaacagaccagaaaccatccgaacaaagccagaagagaaaatgttcgattctaaagagaaggcttccgaggagagaaacctaagatgggaagaattgacaaagttagataaggaagcgagacagagagaaagccagcagatgaaggagaaggctaaggagaaggactcaccgaaggagaagagcgtgcgagagagagaggtgccgattagtctagaagtatcccaggacagaagagcagaggtgtccccgaaaggtttgcagacgcctgtgaaggatgctggtggtgggaccggtagagaggcagaagcaagagagctacggttcaggttgggcaccagtgatgccactggttctctgcaaggcgattccatgacagaaaccgtagcagaaaacatcgttaccagtatcctgaagcagttcacccagtctccagagacagaagcatctgctgattcttttccagacacaaaagtcacttacgtggacaggaaagagcttcctggggaaaggaaaacaaagactgaaatagttgtggagtctaaactgactgaggatgttgatgtttccgatgaagctggcctggactaccttttaagcaaggatattaaggaagtggggctgaaaggcaagtcagccgagcagatgataggagacatcatcaacctcggcctgaaagggagggaggggagagcaaaggtcgtcaacgtggagatcgtggaggagcccgtgagttatgtcagcggggagaagccggaggagttttccgtcccattcaaagtggaggaggtcgaagatgtgtcgccaggcccctgggggttggttaaggaggaggaaggttatggagaaagcgatgtcacattctcagttaatcagcatcgaaggaccaagcagccccaggagaacacgactcacgtggaagaagtgacagaggcaggtgattcagagggcgagcagagttattttgtgtccactccagatgaacaccccggggggcacgacagagatgacggctcggtgtacgggcagatccacatcgaggaggaatccaccatcaggtactcttggcaggatgaaatcgtgcaggggactcgaaggaggacacagaaggacggtgcagtgggcgagaaggttgtgaagcccttggatgtcccagcgccctctctggagggggacctgggttccactcactggaaagaacaagctagaagcggtgaatttcatgccgaacccacagtcattgaaaaagaaattaaaataccccacgaattccacacctccatgaagggcatctcctccaaggagccccggcagcagctggtggaggtcatcgggcagctggaggaaacccttcccgagcgcatgagggaggagctgtccgccctcaccagagaggggcagggtgggccggggaaccgtttccggggatgtcaagaaggtccagggtgctggtggcagttccgtgaccctggttgctgaagtcaacgtctcacaaactgtggatgccgatcggttagacctggaggagctgagcaaagatgaggccagtgagatggagaaggctgtggagtcggtggttcgggagagcctgagcaggcaacgcagcccagcgcctggcagcccagatgaggaaggtggagcggaggccccggctgctggcattcgcttcaggcgttgggccacccgggagctgtacatcccttcaggcgagagcgaggttgctggtggggcctctcacagctcgggacagcgcactccccagggcccagtgtcggccactgtggaggtcagcagccccacaggctttgcccagtcacaggtgctggaggatgtgagccaggctgcaaggcacataaaactcggcccctctgaagtctggaggactgagcgaatgtcatatgaaggacccactgcagaagtggtggaggtaagtgcgggaggtgacctaagtcaggcagcgagcccgaccggagccagccggtctgtgaggcatgtcacgctgggtcccggtcaaagtccactgtccagagaagtcatcttcctaggccctgcccctgcctgtccagaggcatggggctcgccagaacctggcccagcagagtcttctgcagatatgggacggatcagggaggcacagcacatttggctgcagacaattttcattgctgaaaaggagattatttttcagggccccatttctgctgcagggaaggttggtgattattttgcaacagaagagtcagtgggtacccagacttctgtcaggcaactccagttaggccctaaagaagggttcagtgggcaaatccagttcacagctccactttcagacaaggtggagttgggtgtcataggagattctgtacacatggaagggttgccagggagcagcacatccatcaggcacatcagcattgggcctcagaggcatcagaccacccagcagatagtttaccatgggctggttccccaactgggggaatctggtgactcagagagcactgtgcacggagagggctcagcagatgtgcaccaggccactcacagtcatacctcgggtagacaaaccgttatgactgaaaagagcaccttccaaagtgtcgtttctgaatctccccaggaggatagtgcagaggacacatcaggggcagaaatgacatcgggtgttagcagatcctttaggcacattcgactaggtcctacagaaacggaaacctctgaacacattgccatccgtggacccgtgtccagaacatttgtgcttgctggttcagcggactcccctgagctaggcaagttagcagacagcagcagaacgctaaggcacattgcaccagggcccaaagaaacttcgtttacctttcagatggatgtgagtaacgtagaggcgatccgcagccggacacaggaagcgggagctctcggtgtgtctgaccgtggttcctggagagacgcggacagtaggaatgaccaggcagttggtgtgagctttaaggcctctgctggggaaggagaccaggcccacagagaacagggcaaggagcaggccatgtttgataagaaggtgcagctccagagaatggtagaccaaagaagacaaggggagtgctcaggtcagaataatgggagagcaacctcgatcctgagagagtccctggaagccaaagtggaagcatttggcgatttcagtcccgaggtggcagagacataccggctcctgggaggagcagacctggcgcaggggaaccacagtggggcccgcaagaaactgaagaagcttgaaagacctcaaagacctcagggaaagactgacgggcctggcttgaatccagggcccacccctggctcagtcagccaaggccaggagagtgcattcagctctgtgaagccagcagttcctagagctaagcaccacccggcgacggtggctctcgtgtttatcacagcagcagctgcctcccctaagttttcaactcagcagcaggaacccactgaacagtggcttttccagatgtaccctcctgcactgaatggtccaggcatggacccacaggcctga

SEQ ID NO: 21021 - DNA, 455 bp, Homo sapiens
  SIMILAR (2)..(346): 971254mologous to Mus musculus smooth muscle gamma- actin,accession number U20365,Smith-Waterman Score=593.
  misc_feature (1)...(455): n = a,t,c or g
ttatgtgggggttgaggctcagagcaagcgggggatcctaactctcaattaccctattgaacacggcatcatcaccaactgggatgacatggagaagatctggcaccactccttctacaatgagctgcgtgtagcacctgaagagcaccccaccctgctcacagaggctcccctaaatcccaaggccaacagggagaagatgacccagatcatgtttgaaaccttcaatgtccctgccatgtacgtcgccattcaagctgtgctctccctctactcctctggccgcacgacaggcatcgtcctggattcaggtgatggcgtcacccacaatgtccccatctatgaagtgcttctaaagtcagaacaggttctccaaggatcccctcgagactactctgttaccagtcatgaaacattaaaacctacaagccttnnnnnnnnnnnnnnnnnnnnnn

SEQ ID NO: 21022 - DNA, 1236 bp, Homo sapiens
  SIMILAR (172)..(933): 861254mologous to Homo sapiens AMSH,accession number U73522,Smith-Waterman Score=1104.
atgtgtgaagaggagaccaccgcgctcgtgtgtgacaatggctctggcctgtgcaaggcaggcttcgcaggagatgatgccccccgggctgtcttcccctccattgtgggccgccctcgccaccagggtgtgatggtgggaatgggccagaaagacagctatgtgggggatgaggctcagagcaagcgagggatcctaactctcaaataccccattgaacacggcatcatcaccaactgggatgacatggagaagaagaaggaagcagaggaattggcccggaacatggccatccagcaagagctggaaaaggaaaaacagagggtagcacaacagaagcagcagcaattggaacaggaacagttccatgccttcgaggagatgatccggaaccaggagctagaaaaagagcgactgaaaattgtacaggagtttgggaaggtagaccctggcctaggtggcccgctagtgcctgacttggagaagccctccttagatgtgttccccaccttaacagtctcatccatacagccttcagactgtcacacaactgtaaggccagctaagccacctgtggtggacaggtccttgaaacctggagcactgagcaactcagaaagtattcccacaatcgatggattgcgccatgtggtggtgcctgggcggctgtgcccacagtttctccagttagccagtgccaacactgcccggggagtggagacatgtggaattctctgtggaaaactgatgaggaatgaatttaccattacccatgttctcatccccaagcaaagtgctgggtctgattactgcaacacagagaacgaagaagaacttttcctcatacaggatcagcagggcctcatcacactgggctggattcatgtaagcaattctgagctgtccgagagcatggagtccgctggaattcatgagacaacctacaattccatcatgaagtgtgacattgacatccgtaaggacttatatgccaacaatgtcctctctgggggcaccaccatgtaccctggcattgctgacaggatgcagaaggagatcacagccctggcccccagcaccatgaagatcaagattattgctcccccagagcggaagtactcagtctggatcgggggctctatcctggcctctctctccaccttccagcagatgtggatcagcaagcctgagtatgatgaggcagggccctccattgtccacaggaagtgcttctaa

SEQ ID NO: 21023 - DNA, 1375 bp, Homo sapiens
  SIMILAR (328)..(582): 681254mologous to Oxytricha nova actin II,accession number U06071,Smith-Waterman Score=301.
cccacgcgtccgcccacgcgtccgcccacgcgtccggtcactgggagaagaacctctcataccctcggtgctccggtccccagctcactcagccacacacaccatgtgtgaagaggagaccaccgcgctcgtgtgtgacaatggctctggcctgtgcaaggcaggcttcgcaggagatgatgccccccgggctgtcttcccctccattgtgggccgccctcgccaccagggtgtgatggtgggaatgggccagaaagacagctatgtgggggatgaggctcagagcaagcgagggatcctaactctcaaataccccattggaacacgggcatcatcaccaactgggatgacatggagaagatctgggcaccactccttcttacaatggagctgcgtgttagcacctggaagaggcaccccaccctgctcacagaggctcccctaaatcccaaggccaacagggaaaagatgacccagatcatgtttgaaaccttcaatgtccctgccatgtacgtcgccattcaagctgtgctctccctctatgcctctggccgcacgacaggcatcgtcctggattcagggtgatggcgtcacccacaatgtccccatctatgaaggctatgccctgccccatgccatcatgcgcctggacttggctgggccgtgacctcacggactacctcatgaagatcctcccaagagaggaggctattcctttgtgaccacagctgagagagaaattgtgcgagacatcaaggagaagctgtgctatgtggccctggattttgagaaatgagatggccacagcagcttcctcttcctccctggaagaagagctatgagctgccagatggggcagggttatcacccattggcaaatggacgctcccgtgaccctgagacccttttccaaccttactttattagcaatggagttccgctggaattcaatgacgacaaccttacaattccatccatgaaagtgtgacattgacatcccgtaaggacttatatgcccaacaatgttcctctctgggggcaccacacatgtaccctgggcattgctggacaggattcagaaagagaatcccagccctgggcccccaggcaccatgaagatcaagatttattgctcccccagagcgggaagttacttcagtctgggatcggggggctctatcctggcctctctctccaccttccaagcagatgtggatcagcaagcctgagtatgatgacgcagggccctccattgtccacaggaagtgcttctaaagtcagaacaggttctccaaggatcccactcgagacctactctgttaccagtcatgaaacattaaaacctacaagccttaagaaaaaaaaaaaaaaaaaa

SEQ ID NO: 21024 - DNA, 676 bp, Homo sapiens
  SIMILAR (332)..(676): 611254mologous to Homo sapiens 14-JAN-1997 Human sex comb on midleg isoform encoding DNA,accession number V00012_cd1,Smith- Waterman Score=335.
aaccctcttctgttccaagcactgtgtgagaccctgccttggataagtcaaatgcatgagcttaggaaagtagagtaactgctacaaataataaaaaacagatacatctgcagtcaagacagtcaccaccgaagagtacctggtgaaccctgtgggcatgaaccgctacagcgtggacacctccgcctccacctttaaccacaggggctccttgcacccctcctcctcgctgtactgcaagaggcagaactctggagacagccaccttgggggtggtcctgcttgcaccgctggtggtccccgcactagccccatgtcttctggtggcccctcggcacctgggctgaggcctccagcctccagccccaagagaaacacgacctctcttgaaggaaacagatgtgcctcaagcccttctcaggatgcgcaggatgccaggcggccacggagcaggaacccctccgcctggactgtggaggacgtggtgtggtttgtgaaggacgccgacccacaggctctggggcctcacgtggagctcttcagaaagcacgagattgatggcaacgctctgctgttgctgaagagtgacatggtcatgaagtacctgggcctgaagctgggacctgcactgaaactctgctaccacattgacaaactgaagcaagccaagttctga

SEQ ID NO: 21025 - DNA, 1539 bp, Homo sapiens
  SIMILAR (1187)..(1333): 421254mologous to Homo sapiens PRO2831,accession number AF119901,Smith-Waterman Score=81.
atggggggtggggagcaagggacactgaggacagctgagaaccaggggctgcaggtctgccctggggaggcaggcagctctcttggttttagtggaaacactcccaccaatggccttcctgccagaggagatcagacatcctacagagacttctggtctggtcctcagttccccgacacctccctgagaactgcagcacctggagcccgagagcaatgtggaacccacgggggagaaggttctactctggaggggagccgtccagatgtcccccaagacctcttttccccaactctaggattctacggttctacatatcctgagctggagcaagggatgcttgggggacatgtagaagcttccagagagtaccagatgttgtcccatgtggggaatccagactacccccatgcccttgctacagagcaggccaccagcccctctactgagagtggctcagccggctttaaaggtgtagctttagctatgctttctaaaattacaatgtgtgtgaggattggaattcttgtcttccaacaggaccaagggtctatgtgcaaagccttttctactacgggaatgggactagtcacatacctacttacgtgccgcgcctggtcaaggctgcagtgtggagcctcttacagggcccatgatgtgaatgtgcttccaggatgtagtggccctgcagccttgctgctaggagactggttctcacttcattcgagtgatgctgtgctccccgcgcaagggcaagggatgttaagtcagggggaagctgatgcatgcattacattaccacatctgtttccttcaagagaggtcgtgtttctcttggggctggaggctggaggcctcatcccaggtgccgaggggccaccagaagacatggggctagtgcggggaccaccagcggtggcagcaggaccacccccaaggtggctgtctccagagttctgcctcttgcagtacagcgaggaggaggggtgcaaggagcccctgtggttaaaggtggaggcggaggtgtccacgctgtaccggttcatgcccacagggttcaccagaggcccgtttaacatagagcacagagagtgggggaacaccacagccacgtggactagaatgatttccaatcacaataaacactcccaaagagggaggaagatgacagcgcggctgccatgtggaggggctcctcacttctcagaccgaacggatgacaaatggaggcgctcctcacttctcacacggagcggctgccagacagagaggctcctcacttctcaaacggaaccactgccggccggagggtctcctcacttctcaaacggagagaccgggcagagacgctcctcacctccccaacggggttgcgaccggccacaggcgctcctcacatccaagacggagcaacagcgcaaaagcgcttcccacatctcatacgatgagcggccaggcaaagacgctcctcacttcctagatgggatggtggccggaaaaaggcgctcctcactttccagactgggcagccaggcatag

SEQ ID NO: 21026 - DNA, 2337 bp, Homo sapiens
  SIMILAR (1819)..(2037): 571254mologous to Mus musculus cytokeratin 17,accession number AB013608,Smith-Waterman Score=174.
atgggcagaagctcaggggacagacggacaaaaacatcagaatgggctgcaaacacagggattgaggcactggaggactgctactgcctgaaggctaaggagatggcaacattcaaggcaagcaatgtgctgcaagcacacaggatggagactcacacggctggcacgggctgcaggaccaagaaatggagacttctgacagggggcataaagtgcaggcagaggacagaccaggtgacaatacacaagggcagacgtgggcttcagtcattacgggatggtgatactggagagaagatacaggcttcaggcacaaggatggagacacacgcgtggctgacactaagtacactcaccaggcccgagacgttgggagaatggagaagcgcttgcgagccaaaagtcctccaggagcacctgaaggaagcttcgcctgcacctgggacacccttccctgatgctggcctcaaggcaggcgcgccgcacacgcttccggtccatgacgaccacagctcagaagagcacgcgaacccagcctccacgaagagaaaatggcggaatgggccttcgcctcccttttataacggctgtactcaaccgctgtatcttggaagcttggttttgattgggctggccactcagtattccttgtccctggcctcgcagcccacccgggaagccacagtgaccagccaccagccccacctcaagggccatggcacagccatcagctccagctgccagcatgctactgccatgccccgagtgtccatctgggccccggttcatgacctgttgtctttctgtatctactttctgcagcccctcactgaggaggcctcctggctccatcaagggctcctccggcctggggggcggcgtcgtcccgcacctcctgccggctgtctggcggccttgggtgccggctcctgcaggctgggatctgctggcggcctgggcagcaccctcgggggtaagcagctactccagctgctacagctttggctctggtggtggctatggcagcagctttggggggtgttgatgggctgctggcttggaggtgagaaggccaaccatgcacaaccttattgacttttctggcctcctacctggacaaggtgccgtgcccttggaaggaggccaacactgagctggaggtcgaagatccgtgactaggtaccagaggcagggccccggggcccgcccgtgactacagccagtactacaggacaattgaggagctgcagaacaagatcctcacagccaccgtggacaatgccaacatcctgctacagattgacaatgcccgtctggcctgcctgatgacttccgcaccaaggtttgatgacagagcaggccctgcgcctgaggtgtggaggccgacatcaatggccttgcgcagggtgctgggatgagctgaccctggccagagccgaccttggagatgcagattgagaacctcaaggaggaagcttggcctaccttgaaagaaagaaccaccgaaggaaggagattgaacgcccttcgaggccaggtgggttggtgaagatcaatgttggagatggacgctgccccaggcgtggacctgagccgcatcctcaacgagatgccaagctgcgtggaccacagggtcacacgctgcatcaacagacctggagctgagctcaagctgggatctggggggtggacagaggaactgaaacgcgaggtggctaccaacagcgaactggtccagagcggcaagagcaagatttcggagctcccggcgcaccatgcaggccttggagatagagctgcagtcccagctcagcatgaaagccatccctggagggcaacctaggcggagacagagcaaccgcctactgcgtgcagctgtccccagatccaggggcttgattggcagcggggaggaccagctggtcccagcttcggctgcgtagatggagcagcagaaaccaggattacaaaatcctgctggatgtgaagacgcggctggagcaggagattgccacctaccgccgcctgctggaaggaagaggatgcccacctgacttcagtgcaagaaagaaccggtgaccacccgtcaagtggcgtaccattgtgggaaagaggtccagggattggcaaggtcatcttgcttccgcggagcaggttccaccagaccacccgctgaggaattaggtaaccccgggccggacaccccagaaggcagggaggcagccgccccagtctgccccacagtcttccggcctgtccagccttagcccccttgttcaattcctttccccatgcttccttgcctgatgacaataaagcttgttgactcagctatga

SEQ ID NO: 21027 - DNA, 252 bp, Homo sapiens
  SIMILAR (115)..(252): 971254mologous to Homo sapiens Human pre-mRNA cleavage factor I 68 kDa subunit,accession number X67337,Smith-Waterman Score=272.
  misc_feature (1)...(252): n = a,t,c or g
catggtcagaatcctgttgtaactccatgcaataaacagttcctgagtcaatttgaaatgcagtccaggaaaactacacaatcaggacaaatgtntggggaaggtaaagctggtcctcctctagctgggcctcctaatcgaggagatcgccctccaccaccagttctttttcctggacaaccttttgggcagcctccattgggtccacttcctcctggccctccacctncagttccaggctacggnccccct

SEQ ID NO: 21028 - DNA, 297 bp, Homo sapiens
  SIMILAR (2)..(187): 1001254mologous to Homo sapiens Human pre-mRNA cleavage factor I 68 kDa subunit,accession number X67337,Smith-Waterman Score=333.
aagacgtgaacgatcaagagagagggaccatagtagatcacgagaaaagagtcgacgtcataaatcccgtagtagagaccgtcatgacgattattacagagagagaagcagagaacgagagaggcaccgggatcgtgaccgagaccgtgaccgagagcgtgaccgagagcgcgaatatcgtcatcgttagaagaaattttgacaattccgatttgatgctgcaattacttgctgtttttattgatcttatggtttatttcttaagccatagtcagtgtaaatacagccctgcagcag

SEQ ID NO: 21029 - DNA, 432 bp, Homo sapiens
  SIMILAR (5)..(214): 841254mologous to Homo sapiens Human pre-mRNA cleavage factor I 68 kDa subunit,accession number X67337,Smith-Waterman Score=311.
gaagatggcggacggcgtggaccacatagacatttacgcggatgtcggcgaagagttcaaccaggaagctgaatatggtgggcatgatcagatagatttgtatgacgatgtcatatctccatctgcaaataatggagatgccccagaagaccgagattacatggatactccacctccagttccaggctacggcccccctcctggcccaccacctccacaacagggaccacctccacctccaggcccctttccacctcgtccacccggtccacttgggccaccccttgacacttagctcctcctccgcatcttcctgggaccaccttccaggtggccccaccgccagcttccgcatgtggaacccagctttcttttccttccaccaattaacagtgggcatggcttacattcagataggccgaggttccacca

SEQ ID NO: 21030 - DNA, 1077 bp, Homo sapiens
  SIMILAR (289)..(432): 321254mologous to Homo sapiens Human pre-mRNA cleavage factor I 68 kDa subunit,accession number X67337,Smith-Waterman Score=44.
atgggaggaatcggagcccgagcggcagcggcggggaaggggcggcggcggcgggcacgcgccccgccagggcttcctcctccgaccagcgacgggggagggggcgcggcggcggccagttctctccgccgcttacacgcggccccaccgcccgggcctagcgcggcgggaagcgccagccgggtgccgccaacaatagggagcgaggcagcgccggcgagggaggaccggcggcagctgcacagcggccgcgtccgcgcatccgggtctccgcgacttacgcgcccgcggcccgtgaaacgacgcggtagaacgaggggcgggggggcgccacgccaggggtcggcggcgcggcccagaggcggcaagggcgcacactctgcagtcgcttcggctcgcgccgcagcgggccccgggtcagcttcccggccgcatggcgccgcgtcggcggcggggacctgggctctcacgtacctggttgaactcttcgccgacatccgcgtaaatgtctatgtggtccacgccgtccgccatcttccttcagcctgcgccgccgccgccgccgccgcctcctgcaggtttgcccttgttggtgttggatctgaagcatcttcaaaaaagttaatggatctgttacctaaaagagaacttcatggtcagaatcctgttgtaactccatgcaataaacagttcctgagtcaatttgaaatgcagtccaggaaaactacacaatcaggacaaatgtctggggaaggtaaagctggtcctccaggaggcagttcccgagcagcatttccacaaggtggtagaggacggggccgttttccaggggctgttcctggtggggacagatttcctgggccagcaggaccaggagggccacccccacctttccaggacccatcagtaaacagtgacccggtttgtggaaccttcgggggcattagccgccaggataccaaacgccctcaaacctctccgttcggccaatggcgaagcctaagcccgaaggcacggacctttcaaggtcccgggaaggtttcttcaaatctcgattcgctccgaattagatattaa

SEQ ID NO: 21031 - DNA, 3815 bp, Homo sapiens
  SIMILAR (819)..(1400): 891254mologous to Homo sapiens Similar to cleavage and polyadenylation specific factor 6, 68kD subunit,accession number BC000714,Smith-Waterman Score=968.
  misc_feature (1)...(3815): n = a,t,c or g
acgctgctgccgcggcggncatacctgcatgattttgcggtgtcggcggcggccgatgctgaatgaagatggcgggcggtgtgaaccacatagacatttacgcggatgtcggcgaatagttcaaccaggaagctgatatatggcgggcatgatcagatagatgtgcatgacgatgccatatctccatctgcaaataatggagatgccccagaagaccgagattacatggatactctcccaccaactgttggtgatgatgtgggtaaaggagcagcaccaaatgttgtctatacatatactggaaagagaattgcattatatattggaaatctaacatggtggacaacagatgaagacttaactgaagcagttcattctttgggagtaaatgatattttggaagataaaattttttgaaaatcgggcaaatggccagtcaaaggggtttgcccttgttggtgttggatctgaagcatcttcaaaaaagttaatggatctgttacctaaaagagaacttcatggtcagaatcctgttgtaactccatgcaataaacagttcctgagtcaatttgaaatgcagtccaggaaaactacacaatcaggacaaatgtctggggaaggtaaagctggtcctccaggaggcagttcccgtgcagcatttccacaaggtggtagaggacggggccgttttccaggggctgttcctggtggggacagatttcctgggccagcaggaccaggagggccacccccaccttttccagctggacagactccaccacgtccacccttaggttccttccagggcccacctggttccaccaggtcctccacctcctggtcaggttctgcctcctcctctagctgggcctcctaatcgaggagatcgccctccaccaccagttctttttcctggacaaccttttgggcagcctccattgggtccacttcctcctggccctccacctccagttccaggctacggcccccctcctggcccaccacctccacaacagggaccacctccacctccaggcccctttccaacctcgtccaaccgggtccaacttgggccaccccttaacactagctcctccctccgcatccttccctggaccaacctcccaggtgccccaccgcccagtccgcatgtgaacccagctttctttcctccaccaactaacagtggcatgcctacatcagatagccgaggtccaccaccaacagatccatatgggcgacctccaccatatgataggggtgactatggcccccctggaagggaaatggatactgcaagaacgccattgagtgaagctgaatttgaagaaatcatgaatagaaatagggcaatctcaagcagtgctatttcgagagctgtgtctgatgccagtgctgggtggattatgggagtgctattgagacactggtaactgcaatttctttaattaaaacaatcccaaagtatcctgctgatgatcgtgcacaaagttccttattagttctttgcaagattgccttcatggaattgagtccaagtcttatggttctggatcaagaagacgtgaacgatcaagagagagggaccatagtagatcacgagaaaagagtcgacgtcataaatcccgtagtagagaccgtcatgacgattattacagagagagaagcagagaacgagagagggcaccgggatcgtgaccgagacccgtgaccgagagcgtgaccgagagcgcgaatatcgtcatcgttagaaggctgaagggaaggagggatcaccttcccaagactaaaacagtcttccatgggggggaaaaatggacgctttgtccagccagttttgctttctttgtggattggaactggaacctgttaagggatttcatgggttaaaatgaacagggattagatctgaataaaggcaaatctgcataaatggtaaccagtagctctacttttattttttatgttgcttaactgttttatttgaaggaaacctgtgtgatttaaaaagttatagctctttgccaactttattactggttatatacatttggccacttatgaatgtgcaaagccaattggaaaaaaaagtcaaagtaaatagcttgtttttgtagtagtgttgttctttgttaaaaatgtttatatgaataatgtctgtaaacagcactcactttgtattacaatagatgtagtgttgtaataaactgtttaatggggctgatgtgtaaagctgttcaagttatttgatgtttacgacctcagggaaagtcttgtgttcagcaatatctaaagataatgttactatgacaacatttttactgtcctttaaagcattgcaatagcgtttttggatatgcctcgaatctaatcttgcgttcagtgaattaaacatagtaattaagtgtcttttgcccttgattttgatattagaataggtgattacatggatatttaatatttctatattctgcttttctagctgtttttacctagttagcttgtgactttgctgaatggtatgtaaacttgtaaaaatagagatttgacagacatagcaatctagtcaatgtgtaaggggtcaaaaaaaacagaggttttaacacataagtaaaaacccgtacatatttgatgtgtaatgcaggttaattacaacacagatgtaccgaaacacttaattgtgaaccgctaacattgaagaaattttgacaattccgatttgatgctgcaattacttgctgtttttattgatcttatggtttatttcttaagccatagtcagtgtaaatacagccctgcagcaggtaaatgtgagtaaagagagccttatattttccaattggtataaaatttttgaaggatgtgatgttcattaacattcggttgtattccccagtatttgtaatgggaaattacagataaaccgtgtctgcacagtttaaggaatactatgtatattcatgcaccgtattgattcatgctatagttacttaatcaaagatttttttcaaacctgccttacatataggcccactttaaaagcacctgactagcatgtgttcttgattgcaaaattggcagaggcagggtgtcaacttgattaggtgtttttatgggaatgtaatttgaaatcactacttcagaaatttgacttaaaattcttgagcacgttaatatgtttttaagatctgattatctttgagagatcttctgttaatacacattggttgttaaagagtacccaaattctaggacaatgcttaaagtgttaaaataccctagatactgtgttatgtgcaactgtagaaaccctccagaaatttccactgctgttcttcactttcatcttgtctgctatcaaaccacttctgacaaaattagctgttttgaattacccatatcactgccagttttattttaaaatattttgtgtttgaagtatctgtgcatgggatcgttgatgtttatcagaactgttcactttcagaaatgattttttaaagcattttgttgaaaatgcggttgcttttttaacattattttagagttgtatcaaaattttcctgttttctgtatattgttgtgtcatttcttggctttttaatattttgactacaatgccctaatgcgaagaagtatggacatataaatattacaagagaaattagttaatagtaaagggttaaaaggtaagtaaaatgtccatgaaaataaaattttctttgaacagtttaaaaatggaatcacaaaaatctaactgcacttgaaatgaaactggaaattttatactaattaaatcctttatttaccttttc

SEQ ID NO: 21032 - DNA, 483 bp, Homo sapiens
  SIMILAR (1)..(96): 751254mologous to Homo sapiens neutral protease large subunit,accession number M27826,Smith-Waterman Score=115.
accaatttcaaatctggtcttctcggcttagcggctgaagactgacactgcccgatcgcctcggaagccccctagaccatcacggatgccgagctttagtataagaagacaggaatgtcaggcctctgagcccaagctaagccatcatatcccctgtgacctgcacatacacatccacatggccggttcctgccttaactgatgacattccaccacaaaagaagtgaaaatggcctgttcctgccttaactgttgacattatcttgtgaaattccttctcctagctcatcctggctcaaaagctcccctactgagcaccttgtgacccctactcctgcccgccagagaacaacccccctttttcctttacctacccaaatcctataaaacagccccacccttatctcccttcactgactttcttttcggactcagcccacctgcacccaggtgaaataaacagctttattgctcacaaaaaaa

SEQ ID NO: 21033 - DNA, 1059 bp, Homo sapiens; identical to SEQ ID NO: 806
  SIMILAR (328)..(459): 881254mologous to Homo sapiens calbindin D28K,accession number S46006,Smith-Waterman Score=211.

SEQ ID NO: 21034 - DNA, 408 bp, Homo sapiens; identical to SEQ ID NO: 808
  SIMILAR (372)..(271): 581254mologous to Homo sapiens reverse transcriptase homolog= pol {retroviral element},accession number S61070,Smith-Waterman Score=96.

SEQ ID NO: 21035 - DNA, 505 bp, Homo sapiens
  SIMILAR (289)..(179): 831254mologous to Homo sapiens Human secreted protein, SEQ ID NO: 5576,accession number G01495,Smith-Waterman Score=154.
caattttaaatcccgtaagtggcctctttttattctcttctccactatccctcaacctctcctcactatccctcaacctctttctcctttcaatcttggcgccacacttcaatctctccattctcttaatttcaattcctttcattttcccactggaaatcgaactgtccaactcgcccggcagccactcccagagcccctggaactctggcccaaggctctctgactccttcccagatcttcttggcttagcagctgaagagtgacactgcccgatcgcctcggaagctttttcccaaacatatcgagcatatctctctctctctctctctctctctctctctcctgagccacctacagctggggatggagtgacacaagcagccctgtggcctccaccactatcactgtgctgggtcagacctgaagccagcacagtgctggcccttgcccaaggtctgttgtcaccactccctgacttctgactatgttcacccaaggccat

SEQ ID NO: 21036 - DNA, 420 bp, Homo sapiens; identical to SEQ ID NO: 20387
  SIMILAR (315)..(202): 841254mologous to Homo sapiens Human secreted protein, SEQ ID NO: 5576,accession number G01495,Smith-Waterman Score=161.

SEQ ID NO: 21037 - DNA, 480 bp, Homo sapiens
  SIMILAR (279)..(160): 771254mologous to Homo sapiens Human secreted protein, SEQ ID NO: 5576,accession number G01495,Smith-Waterman Score=163.
ctataacaaaatatcataaactgggtggatttcaaacaacagaaattgatttctcacagttctggaggctgggaagtccaagatcaaggtgccagcagattccgagtctggtgagggccccttttttgggtcaatagatgacgtcttcttgctgcatcctggcagccactcccagagcccctggaactctggcccaaggctctctgactccttcccagatgttcttggcttagcggctgaagaccgatgctgcccgatcgccttggaagccccctcaatgcgttctccaaatgcatgaattacaaccaggaaaaaaagaaggttttgatatcctgaactctttgctggtttaacatgtatgtttctgtcacatgtttcaggtgggacagggacagtacccgtgtaacgcagaagaggagcaccaggatggagaaactctagcctcaccgactgtttaggttgtgagagcacacggggcat

SEQ ID NO: 21038 - DNA, 433 bp, Homo sapiens
  SIMILAR (268)..(351): 821254mologous to Homo sapiens neutral protease large subunit,accession number M27826,Smith-Waterman Score=116.
tcagtgggatggatggggagctagaaaggggatggagtgggaagatgatcttcctctggaatttggccgtcccacagccagtctcctctccgatcgtccccagccaaactcctctcgaggttcagatgttccctttcttctctccttctctgccttgccactcttctgcttgtctggcagccactcccagagcccctggaactctggcccaaggctctctgactgactccttcccagatcttctgggcttagcggctgaagactgactgcccgatcccctcggaagccccctagaccctcacggacgccgagcttcgggtaactctcacagtggaaggtaagtccatcccctttggtgctggcaaggaggtaacattggaaagttactgggtttctttgaccctcagtttcctcatttgttatatgattatac

SEQ ID NO: 21039 - DNA, 411 bp, Homo sapiens
  SIMILAR (11)..(106): 381254mologous to Bombyx mori nuclear polyhedrosis virus ARIF -1=AcMNPV orf20/21,accession number L33180,Smith-Waterman Score=42.
  misc_feature (1)...(411): n = a,t,c or g
acgtcatccatgtcacaactcattgtgttttctttatatagataactttgctcactttagcacaaatatggaagtcaagtacaagcatatactcatttgcatagcaaattttaaagggggcattgaaatagtaaccaattgataaaggtatnnnnnnnnnnnnnnnnnnnnnnnnnnnnnnnnnnnnnnnnnnnnnnnnnnnnnnnnnnnnnnnnnnnnnnnnnnnnnnnnnnnnnnnnnnnnnnnnnnnnnnncagnnnnnnnnnnnnnnnnnnnnnnnttgtgatttgttcctgccccaccctaactgatcaatgtactttgtaatctcccccacccccaagaaggttctttgtaattctccccacacttgaaaatgtactttgtgagatccacccctgcccaccagag

SEQ ID NO: 21040 - DNA, 1190 bp, Homo sapiens
  SIMILAR (45)..(209): 891254mologous to Homo sapiens Human secreted protein, SEQ ID NO: 5210,accession number G01129,Smith-Waterman Score=262.
atggacacatatagaggaacaacagacactggggcctacctgaagacacgcatgaaatttggtgccgtgactcagatcgggggacctcccttgggagatcaatcccctgtcctcctgctctttgtttcgtgaggaagatccacctacgacctctggtcctcagaccaaccagcccaaggaacatctcaccaattttaaatccgcggctgaagactgacgctgccagttcgcctcagaagccccctaaaccatcacggacgccaagcttcgggtatctctcacagcagaaggtctgctggcaactttgttccttaacccaaagcctgaatactaataatgtgaaaagtctaatgttattcaggccacataactgctttcctcctgaaataccaccttgtaaagatagagaaaatgactgtatagaggtgggaaggccaaaccaaggaattatgtctgacagaagggaagaaatgaccgtggtggccttgtcagaccctgtaggaaaggcctctacccatctagtgaaagtgtctacccagactaagaggcttctgaggcgatcgggcagtgtcagtcttcagctgctaagccgagaagatctgggaaggattcagtcagagagccttgggccagagttccaggggctctgggagtggctgccaggtgagttggacagtccgatttccagtggggtcccgcacagatgggacgcagcttaggaggaatcccgggctgcaggcattccttggcctggtggccagatttctggcacttgtagcaagctccttccagaaaagcgggaaaggggttgggtcgtggaaataaggggttggggtgcagagataagaggtcggggcatggaaataagggattggggcacagagatataagaggttggggtgcagaaataagggattgggccacagagataagaggtcggggcgtggaaataagggactggggcacagagatacgaggttggggtacttgctcctctagaaaagcggacttgccactcagggtgaaggagaaggggttgggtgtttcttgccccccagaaaggcggagaaggggtagagacacagagagaaggggttggggtacttgccccttccccagaaaagcgggacttgccgctaagggtgaaggaccaaggcaggcgtccctgcgtggtctgacacctctgaaac

SEQ ID NO: 21041 - DNA, 1268 bp, Homo sapiens
  SIMILAR (1268)..(810): 1001254mologous to Salmonella typhi RcsB,accession number AB000683,Smith-Waterman Score=749.
tcatgggcctctggattggtcatgtggcatcccaaccactagactgagtggggatagctgccacagcaagccccaaccagactggtccttgtgcccatgtgtgggtatgtgagcatttggctgctttactactggagtgggcagagttactgacagtgatgggcccttgtacactggtccttgggcccctggcagccactcccagagcccctggaactctggcccaaggctctctgactccttcccagatcttctcggcttagcggctgaagactgacactgcccgatcgcctcggaagcccccttcctaactctgattttcctcctgtgtgtaatacagtgatctgatattcggtgctgttcagttcttcaaagcgcgccagacgtgctttacctttcgactgacggcctttagtaccttgacgtacccattccagctctttctcaatcgacttacgacgcgccgcttcttgtgaagcttcattaaaaggcccatgaattgaaggaaaacgtttcaaccgtaaccgattttgccaggttacgcggctgcaggcatgcaagctttggcgcttcccagacgctgcgttataccccgagaggtccagaaatcccggaattcctaggacgataaagcgtttaccccgcatccggcattcagcgcaaatgccagatgcgacgctgacgcgtcttatctggcctactttaatgtaatttgttgaaataatgggaatcgtaggccggataaggcgtttacgccgcatccggcaatcggtgcaaatgccagataagacactaacgcgtcttatctggcttaaggtcactgaagagagataattcagcagggcgatatcgttctcgacacccagcttcatcatcgcagatttcttctggctactgatggttttaatactgcggttcagctttttagcgatctcggtcaccaggaagccttccgcaaacaggcgcagaacttcactctcttttggcgagagacgcttgtcaccgtaaccaccagcactgattttttccaacaggcgagaaacgctttccggggtaaatttcttccctttctgcagcgcggcgagagctttcggcagatcggtcggtgcaccttgtttcagcacgatcccttcgatatccagatccaataccgcactaagaatcgccgggttgttgttcatagtcagaacaatgatcgacaggcttgggaaatggcgcttgatgtacttgattaaggtaatgccatcgccgtacttatcgccaggcat

SEQ ID NO: 21042 - DNA, 656 bp, Homo sapiens
  SIMILAR (424)..(371): 941254mologous to Homo sapiens super cysteine rich protein; SCRP,accession number U63332,Smith-Waterman Score=156.
ccctcttgctcacccttgacttggaaaaaccagtttctcttttattaggcgggctttcaccatgttgcccagactggtcttgaactcctgagcttaagcaatccacctgcctcggcctcccaaagtgttgggatcacaggcgtgacaggcgcatccggcctcatgttctttttcattaaagagagaaatcaactattcaggaccggcccccacctttccctcaggagtcatttcctgttccgcaacaggccctgctgaactgggtgcctttatataggatttcagtggagtgaaagttcaggaggccatggagctgacaacccatgaggcctcggcagcccaccgcccacccaccgccgccgccaccaccgtaacaacagcagcagcagcagcagcagcagcagcagcagcagcagcagcagcaagagttaactctgatttagggattagagacagccagagagaaatgtgatcaatgaaggagacatctggagtgtgcgtgcttcttcaaagggacgggtgatgggcagattggaaaaagccccgcagatgggaaccttaatctttcttttctaaaattgatgctatgaaaatttgcgttttctgtaacttgtaaaaactaaaagttgcttgtctactgaaaaaaaaaaaaaaaa

SEQ ID NO: 21043 - DNA, 724 bp, Homo sapiens
  SIMILAR (280)..(405): 661254mologous to Homo sapiens neutral protease large subunit,accession number M27826,Smith-Waterman Score=132.
  misc_feature (1)...(724): n = a,t,c or g
atttttggtcagcctcatgctgcctccagcagtggtgatgttaaaccattgctattcattgatttttacaaatgctctggtgaaaaggttgtttgcatggaacatgctctcagagcttgctacatgtgccggaaatctggccactgggccaaggaatgcccgcagcccgggattcctcctaagctgtgtcccatctgtgcgggaccccactggaaatcagactgttcaactcacctggcagccactcccagagcccctggaactctggcccaaggctctctgactgactccttcccagatcttctcggcttagcgactgaagactgacacagcccgatcgcctcggaagccccctgggccatcatggacgccgagcttcgggtaactcttacagtggaggacaggaannnnnnnnnnnnnnnnnnnnnnnnnnnnnnnnnnnnnnnnnnnnnnnnnnnnnnnnnnnnnnnnnnnnnnnnnnnnnnnnnnnnnnnnnnnnnnnnnnnnnagnnnnnnnnnnnnnnnnnnnnnnnttgtgatttgtttctgccccaccctaactgatcaatgtactttgtaatctcccccacccttaagaaggttctttataatgtcacccacccttaagaagtttctttgtaattctccccacccttgagaatgtactttgtgagatccatcccctgcccccaaaacattgctcttaactctactgcctatccca

SEQ ID NO: 21044 - DNA, 723 bp, Homo sapiens
  SIMILAR (300)..(464): 541254mologous to HERV-H/env62 envelope protein,accession number AJ289709,Smith-Waterman Score=135.
tagacgctcctttttattaggccccagtctcattccagacaccagaccaacttagactgtggcccaaaaaacttgtcatccctactatcttctgtctagtcatactcctattcaccgttctcaactactcatacatgccctgctcttgtttacactgccggtttacactgtttctccaagccaatcacagctgatatctcctggtgctatccccaaaccgcccaccactcttaactccctcttaaagtaaataaataatctttactggcagggctatgctgaacctccttgggcactcatctaatcagatatcctgagtcgtcccaattcttagaccttttatacctgtttttctcctcttattcggaccttgtgtcttccgtttagtttttcaattcatccaaaaccggtatccaggccatcaccaatcattctatatgacaaatgtttcttcttacatccccacaatatcaccctttaccacaagacctcccttcagcttaatctctcccactctaggttcccacgctgcccctaatcccacttgaagcagccctgagaaacatcgcccattctctctccctaccacccctcaaaaattttcaccaccccaacacttcaacactattttgttttatttttcttatgtaatataagaaggcaggaatgtcaggcctctgaggcccaagccaagccatcgcatcccctgtggacttgcgcgta

SEQ ID NO: 21045 - DNA, 2187 bp, Homo sapiens
  SIMILAR (521)..(1000): 751254mologous to Homo sapiens neutral protease large subunit,accession number M27826,Smith-Waterman Score=576.
  misc_feature (1)...(2187): n = a,t,c or g
tcaacaagtggcctgacccttgaagggtttcttcaccgtgtctggtaaagtttccaaattagttacaggaaactcaatacctcgcacataagcccattccttcttctttgtttggtttattccataggcaatggagcccccaatttgtttttcaactggcacagagtcgatgctcatggaatgatacgtgatggggagagtgagtaagtgaatgaatgaatgaatgctattcctgtagcgagcccatgcatggtttgttctctgatcgtgcatgtgcttggctctagacccatgtaaccatggtgaaggccaccaaccagatttcagtggagtgaagttcaggaggcatggagctgacaaccatgaggcctcggcagccaccgccaccaccgccgccgccaccaccgtagcagcagcagcagcagcagcagcagcagcagcagcagcaagagtaactctgactggcagccacttccagagcccctggaactctggcccaaggctctctgactccttcccagatcttctcagcttagcgactgaagattgacgctgcccgatcgcctcggaagtcccctggaccatcacagaagccgagcttcgggtaactctcacagtggagggtaagtccatcccctgtttaatcgatacgggggctacccactccacgttgccttcttttcaagggcctgtttcccttgcccccataactgttgtggggtattgacggccaagcttcaaaacccctggaaaactcccccactctgggtgccaattgggacaacactcttttatgcactcttttttagttattccccacctggncccattttccttattaggggccgaaatattttaaccaaattatctggcttccctgactattccggggagtacagctaacatctcattggtggccttttttcccaatccaaagcctcctttgtgtcctctaacatccccacaatatcaccccttaccacaagacctcccttcagcttaatctctcccactctaggttcccacgccgcccctaatcccacttgaagcagccctgagaaacatcgcccattctctctccataccaccccccaaaaattttcgccgctccaacacttcaacactattttgttttatttgtcttattaatatcagaaggcaggaatgtcaaggcctctgaagccccaggccagggccatcgcatccccctgtggacttggcacgtgtaacatccaggatgggcctggaagttaactggaaggttccacaaaaggaaggtaaaaacagcctttaacttgatggacatttccaccattgtggatttgttttcctggccccaccctaactgattcaatgtactttgtaatctccccccacccttaaggaaggttctttgtcattctccccacccttgagaatgtactttgtgagatccatcccctgcccaccagagaacaaaccccctttgattgtaattttttattaccttcccaaatcctataaaacagccccacccctatcttccttcactgactctcttttcggactcagcccaccggcacccaggtgaaataaacattttttattgctcacacaaagcctgttcggtggtctcttcacacagacgcgcatgaaatttggtgccgtgactcagatcggcggacctcccttgggagatcaatcccctgtcctcctgttctttgctccatgagaaagatccacctacaagctcaggtcctcagaccgaccagcccaaggaacatctcaccaattttaaatcggagaaaaaggagacacgttttatccgtggacccaaaactccggcaccggtcatggactagggaaggcagccttcccttggtgtttaacctttgcagggatgcctctctgattattcacccaggtttcagaggtgtcagaccacgcagggacacctgccttggtccttcacccttagcagcaagtcccacttttctgggggaaggggcaagagcttgctacaagtgccagaaatctggccaccaggccaaggaatgcctgcagcccaggattcctcctaagctgtgtcccatctgtgcgggaccccgctggaaatcggactgtccaactcacctggcagccactcccaaagcccctggaactctggcccaaggttctctgactccttcccagatcttcttggcttag

SEQ ID NO: 21046 - DNA, 288 bp, Homo sapiens
  SIMILAR (123)..(188): 951254mologous to Homo sapiens pregnancy-specific glycoprotein 13,accession number U25988,Smith-Waterman Score=105.
  misc_feature (1)...(288): n = a,t,c or g
cctgacagccctgctcaggaagtctctggatcctaggctcatctccacaggggagaacacacagacagcagagaccatgggacccctctcagcccctccctgcactcagcacatcacctgggaaggggctcctgctcacagcggagactcccaagccctccatctccagcagcaacttaaaccccaggggaggtcatgggaggctgtgcgctttaatcttgttgatccttgaggactccggattncaagcttaccttgtgggtttgcttgaatggntcaggaaccttc

SEQ ID NO: 21047 - DNA, 324 bp, Homo sapiens
  SIMILAR (48)..(323): 1001254mologous to Homo sapiens fetal liver non-specific cross-reactive antigen-2 precursor protein,accession number M25385,Smith-Waterman Score=500.
atcattccttgcactctgctctatctttagaggtcactggttcaacgaagctgcccaagccctacatcaccatcaacaacttaaaccccagggagaataaggatgtcttaaacttcacctgtgaacctaagagtgagaactacacctacatttggtggctaaatggtcagagcctcccggtcagtcccagggtaaagcgacccattgaaaacaggatcctcattctacccagtgtcacgagaaatgaaacaggaccctatcaatgtgaaatacgggaccgatatggtggcatccgcagtgacccagtcaccctgaatgtcctct

SEQ ID NO: 21048 - DNA, 552 bp, Homo sapiens
  SIMILAR (3)..(365): 1001254mologous to Homo sapiens pregnancy-specific beta-1 glycoprotein,accession number L36606,Smith-Waterman Score=639.
catcacttttaaacttctggaacctgcctatcactgctcaagtcacgattgaagccctgccacccaaagtttccgaggggaaggatgttcttctacttgtccacaatttgcctcagaatcttgctggctacatctggtacaaaggacaactgatggacctctaccattacattacatcatatgtagtagacggtcaaataaatatatatgggcctgcatacactggacgagaaacagtatattccaatgcatccctgctgatccagaatgtcacccgggaagacgcaggatcctacaccttacacatcataaagcgaggtgataggactagaggagtaactggatatttcaccttcaacttataccacacaagctacctgtggtggatgaatggtcagagcctccctatgactcacaggttgcagctgtccaaaaccaacaggaccctctttatatttggtgtcacaaagtatattgcaggaccctatgaatgtgaaatacggaacccagtgagtgccagccacagtgacccagtcaccctgaatctcctcc

SEQ ID NO: 21049 - DNA, 435 bp, Homo sapiens; identical to SEQ ID NO: 18507
  SIMILAR (3)..(278): 1001254mologous to Homo sapiens pregnancy-specific beta-1 glycoprotein precursor,accession number M34420,Smith-Waterman Score =490.

SEQ ID NO: 21050 - DNA, 1952 bp, Homo sapiens
  SIMILAR (51)..(443): 931254mologous to Homo sapiens pregnancy-specific beta-1 glycoprotein precursor,accession number M34420,Smith-Waterman Score =647.
ggggggccgtgcggacctggggaagaggattccaaacagaaaaatgccaagcatcacttttaaacttctggaacccgcctaccactgcccaagtcacgattgaagccgagccaaccaaagtttccaaggggaaggacgttcttctacttgtccacaatttgccccagaatcttgctggctacatctggtacaaagggcaaatgaaggacctctaccattacattacatcatacgtagtagatggtcaaataattatatatgggcctgcatacagtggacgagaaacagtatattccaatgcatccctgctgatccagaatgtcacccgggaggacgcaggatcctacaccttacacatcgtaaagcgaggtgatgggactagaggagaaactggacatttcaccttcaccttataccgtcattccttggactctgctctatctttagaggtcactggctcaagtcagccactatgagacacctgggaaaactgccccaccttgtggctccactgcctgatgactgaactgacctccggacttgactctgttctcccctgtgttatttctgctgaagtacccagtcccaggtcaggctttccagtatccaaagggtttaaagacaattggaagttccatcacccatctctaggatgtccttggcaagggaagctgcagagaaaacatacctcgggcggcaaagtaagactgaaactaagaagattccagcactgcatgctccaagtgaggaccacaagtggagactcccaagccctccatctccagcagcaacttataccccagggaggacatggaggctgtgagcttaacctgtgatcctgagactccggacgcaagctacctgtggtggatgaatggtcagagcctccctatgactcacagcttgcagttgtccaaaaacaaaaggaccctctttctatttggtgtcacaaagtacactgcaggaccctatgaatgtgaaatacggaacccagtgagtgccagccgcagtgacccagtcaccctgaatctcctcccgaagctgcccaagccctacatcaccatcaacaacttaaaccccagggagaataaggatgtcttagccttcacctgtgaacctaagagtgagaactacacctacatttggtggctaaatggtcagagcctcccggtcagtcccagggtaaagcgacccattgaaaacaggatcctcattcttacccagtgttcacgagaaatgaaacagggaccctattcaatgtgaaatacagggaccgatatggtgggcatccgcagttacccagtcaccctggaatgtcctctattactacaaagcatagcgggctctatgcttgctctgttcgtaactcagccactggcatggaaagctccaaatccatgacagtcaaagtctctgctccttcaggaacaggacatcttcctggccttaatccattatagcagccgtgatgtcatttctgtatttcaggaagactggcagacagtggctttcattcttcctcaaagtatttacccatcagctacagtccaaaattgctttttgttcaaggagatttatgaaaagactctgacaaggactcttgaatacaagttccctgataacttcaagatcataccactggactaagaactttcaaaattttaatgaacaggctgatacttcatgaaattcaagacaaagaaaaaaacccaattttattggactaaatagtcaaaacaatgttttcataattttctatttgaaaatgtgctgattctttgaatgttttattctcccagatttatgcacttttttttcttcagcaattggtaaagtatacttttgtaaacaaaaattgaaacatttgcttttgctccctaagtgccccagaattgggaaactattcaggagtattcatatgtttatggtaataaagttatctgcacaagttc

SEQ ID NO: 21051 - DNA, 2321 bp, Homo sapiens
  SIMILAR (1261)..(1443): 751254mologous to Homo sapiens pregnancy-specific beta-1- glycoprotein,accession number M34715,Smith-Waterman Score=215.
gaattcgggctgaccctgcccatgagcttgagaattgctcctgccctgggaagaggctcagcacagaaagaggaaggacagcacagctgacagccgtgctcagagagtttctggatcctaggcttatctccacagaggagaacacacaagcagcagagaccatgggaaccctctcagcccctccctgcacacagcgcatcaaatggaaggggctactgctcacagcatcacttttaaacttctggaacctgcccaccactgcccaagtcacgattgaagcccagccacccaaagtttccgaggggaaggatgttcttctacttgtccacaatttgccccagaatcttaccggctacatctggtacaaagggcaaatgagggacctctaccattacattacatcatatgtagtagacggtgaaataattatatatgggcctgcatatagtggacgagaaacagcatattccaatgcatccctgctgatccagaatgtcacccgggaggacgcaggatcctacaccttacacatcataaagggagatgatgggactagaggagtaactggacgtttcaccttcaccttacacctggagactcctaagccctccatctccagcagcaacttaaatcccagggagaccatggaggctgtgagcttaacctgtgaccctgagactccagacgcaagctacctgtggtggatgaatggtcagagcctccctatgactcacagcttgaagctgtccgaaaccaacaggaccctctttctattgggtgtcacaaagtatactgcaggaccctatgaatgtgaaatacggaacccagtgagtgccagccgcagtgacccagtcaccctgaatctcctcccgaagctgcccaagccctacatcaccatcaacaacttaaaccccagggagaataaggatgtcttaaacttcacctgtgaacctaagagtgagaactacacctacatttggtggctaaatggtcagagcctcccggtcagtcccagggtaaagcgacccattgaaaacaggatcctcattctacccagtgtcacaagaaatgaaacaggaccctatcaatgtgaaatacgggaccgatatggtggcgtccgcagtgacccagtcaccctgaatgtcctctatggtccagacctccccagaatttacccttcattcacctattaccgttcaggagaagtcctctacttgtcctgttctgcggactctaacccaccggcacagtattcttgggacaattaatgagaagtttcagctaccagggacaaaagctctttattccgccatattactacaaagcatagcgggctctatgttttgctctgttcgtaactcagccactggcaaggaaagctccaaatccatgacagtcgaagtctctggtaagtggatcccagcatcgttggcaatagggttttaggtggagtctatctggcattcagagaagagtcaggaaaacaattgtattcccagcctgtgtcccatgggcacaagcaaatcccaaattctcctcctgaaccctccaaatttgtctaagaacttcgaaaactttaacaaacaggctgatatcttcataatattcccagcctagaccaagcaggaagaacattgatttcattgaaataattgataataatgaagataatgtttttatgatttttatttgaaaatttgctgattctttaaatggtttgttttctacattgatggaatttttctcttaattaatctatctacagcttatagcagttcaataaactatacttctgggaaccgtaattgaaacatttacttttgctttctacctgactgccccagaattgggcaactattcatgagaattgatatgtttatggtaatacacatatttgcacaagtacagtaacaatctgctttctttgtaacatgacacatttgaaatcattggttatattaccaatgctttgattcggatgttatattaaaaacatagatagaatgaatgaaccaatatgaactgcaggcaaagtctgaagtcagccttggtttggcttcctattctcaagaggtttgtgaagatttaatctcagattccttataaaaacttagagaaaagaaaattttagaagacagcctacatggtccattgctactcttgctgcacttatgtaaacaatcagaccacatttgaagaaactccacctattttgcaaacaaacttattctactgaaattatcattggtaaaagtagagatgcccatagagggaaaaattatgtggaaaataaaaactgtagtatacctgtacccgaattc

SEQ ID NO: 21052 - DNA, 1888 bp, Homo sapiens
  SIMILAR (87)..(1376): 901254mologous to Homo sapiens pregnancy-specific beta- glycoprotein c,accession number M20879,Smith-Waterman Score=2029.
ggacagcacagctgacagccgtgctcagagagtttctggatcctaggcttatctccacagaggagaacacacaagcagcagagaccatgggaaccctctcagcccctccctgcacacagcgcatcaaatggaaggggctcctgctcacagcatcacttttaaacttctggaacctgcccaccactgcccaagtcacgattgaagccgagccaaccaaagtttccgaggggaaggatgttcttctacttgtccacaatttgccccagaatcttaccggctacatctggtacaaagggcaaatgagggacctctaccattacattacatcatatgtagtagacggtgaaataattatatatgggcctgcatatagtggacgagaaacagcatattccaatgcatccctgctgatccagaatgtcacccgggaggacgcaggatcctacaccttacacatcataaagggagatgatgggactagaggagtaactggacgtttcaccttcaccttacacctggagactcctaagccctccatctccagcagcaacttaaatcccagggagaccatggaggctgtgagcttaacctgtgaccctgagactccagacgcaagctacctgtggtggatgaatggtcagagcctccctatgactcacagcttgaagctgtccgaaaccaacaggaccctctttctattgggtgtcacaaagtatactgcaggaccctatgaatgtgaaatacggaacccagtgagtgccagccgcagtgacccagtcaccctgaatctcctcccgaagctgcccaagccctacatcaccatcaacaacttaaaccccagggagaataaggatgtcttaaacttcacctgtgaacctaagagtgagaactacacctacatttggtggctaaatggtcagagcctcccggtcagtcccagggtaaagcgacccattgaaaacaggatcctcattctacccagtgtcacgagaaatgaaacaggaccctatcaatgtgaaatacgggaccgatatggtggcatccgcagtgacccagtcaccctgaatgtcctctatggtccagacctccccagaatttacccttcattcacctattaccgttcaggaggaagtcctcttacttgtcctgttctgcgggactcttaacccaccgggcacagtattcttggacaattaatgaaaagtttcagctaccaggacaaaagctctttatccgccatattactacaaagcatagcggggctctatgtttgctctgttcgtaactcagccactggcaaggaaagctccaaatccatgacagtcgaagtctctgcttatagcagttcaataaactatacttctgggaaccgtaattgaaacatttacttttgctttctacctgactgccccagaattgggcaactattcatgagaattgatatgtttatggtaatacacatatttgcacaagtacagtaacaatctgctttctttgtaacatgacacatttgaaatcattggttatattaccaatgctttgattcggatgttatattaaaaacatagatagaatgaaccaatatgaactgcaggcaaagtctgaagtcagccttggtttggcttcctattctcaagaggtttgtgaagatttaatctcagattccttataaaaacttagagaaaagaaaattttagaagacagcctacatggtccattgctactcttgctgcacttatgtaaacaatcagaccacatttgaagaaactccacctattttgcaaacaaacttattctactgaaattatcattggtaaaagtagagatgcccatagagggaaaaattatgtggaaaataaaaactgtagtatacctgttatgagactgc

SEQ ID NO: 21053 - DNA, 1713 bp, Homo sapiens
  SIMILAR (945)..(1250): 651254mologous to Homo sapiens pregnancy-specific beta-1 glycoprotein precursor,accession number M34421,Smith-Waterman Score =352.
cacagaaggaggaaggacagcacagctgacagccatgctcagacagcttctggatcctaggctcatctccacagaggagaacacgcaggcagcagagaccatggggcccctcccagccccttcctgcacacagcgcatcacctggaaggggctcctgctcacagcatcacttttaaacttctggaacccgcccaccactgccgaagtcacgattgaagcccagccacccaaagtttctgaggggaaggatgttcttctacttgtccacaatttgccccagaatcttcctggctacttctggtacaaaggggaaatgacggacctctaccattacattatatcgtatatagttgatggtaaaataattatatatgggcctgcatacagtggaagagaaacagtatattccaacgcatccctgctgatccagaatgtcacccggaaggatgtcaggaaccttacaccttacacatcatcaaagcgaggtgatgagactagagaagaaattcgacatttcaccttcaccttatacttggagactcccaagccctacatctccagcagcaacttaaaccccagggaggccatggaggctgtgcgcttaatctgtgatcctgagactctggacgcaagctacctatggtggatgaatggtcagagcctccctgtgactcacaggttgcagctgtccaaaaccaacaggaccctctatctatttggtgtcacaaagtatattgcaggaccctatgaatgtgaaatacggaacccagtgagtgccagtcgcagtgacccagtcaccctgaatctcctcccgaagctgcccatcccctacatcaccatcaacaacttaaaccccagggagaataaggatgtcttagccttcacctgtgaacctaagagtgagaactacacctacatttggtggctaaacggtcagagcctccccgtcagtcccggggtaaagcgacccattgaaaacaggatactcattctacccagtgtcacgagaaatgaaacaggacccctatcaatgtgaaatacgggaccgatatggtggcatccgcagttacccagtcaccctgaatgtcctctatggtccagacctccccagaatttacccttcattcacctattaccgttcaggagaaaacctcgacttgtcctgcttcacggaatctaacccaccggcagagtatttttggccaatttatgggaaagtttcagcaatcaggacaaaagctctttatcccccaaattactagaaatcatagcgggctctatgcttgctctgttcataactcagccgctggcaaggaaatctccgtgagtcttttcaggcattaatgagcgtgcacatagagatagcggtcgcgagtatcaggcatgactgcgcctcctgagacactgagaaaacgcccaggctgataccttcatgaaattcaagacaaagaagaaaaaaactcaatgttattggactaaataatcaaaaggataatgttttcataattttttattggaaaatgtgctgattctttgaatgttttattctccagatttatgaactttttttcttcagcaattggtaaagtatacttttgtaaacaaaaattgaaatatttgcttttgctgtctatctgaatgccccagaattgtgaaactattcatgagtattcataggtttatggtaataaagttatttgcacatgttccgta

SEQ ID NO: 21054 - DNA, 2212 bp, Homo sapiens
  SIMILAR (244)..(582): 761254mologous to Homo sapiens pregnancy-specific beta-1- glycoprotein,accession number M17908,Smith-Waterman Score=425.
  misc_feature (1)...(2212): n = a,t,c or g
atgacccagttccctatggataaacgtcagggtcgttcccgatctgtggccatcaccaacactgccgtgactagtctagaatgggtgccatttcatgcatttgcaattcccagaagtacactggttagtcagcagaggctcagcacagaaagaggaaggacagcacagctgacagccgtgctcagagagtttctggatcctaggcttatctccacagaggagaacacacaagcagcagagaccatgggaaccctctcagcccctccctgcacacagcgcatcaaatggaaggggctcctgctcacagcatcacttttaaacttctggaacctgcccaccactgcccaagtcacgattgaagccgagccaaccaaagtttccgaggggaaggatgttcttctacttgtccacaatttgccccagaatcttaccggctacatctgggtacaaaggggcaatgaggggacctctaccattatgttacatcatatgtagtagacggtcaaataattaaatatggggcctgcatatagtggacgagaaacagcatattccaatgcatccctgctgatccagaatgttcacccgggaggaccgcaggatcctacaccttacacatcataaagggagatgatgggactagaggagtaactggacgtttcaccttcaccttacacctggagactcctaagccctccatctccagcagcaacttaaatcccagggagaccatggaggctgtgagcttaacctgtgaccctgagactccagacgcaagctacctgtggtggatgaatggtcagagcctccctatgactcacagcttgaagctgtccgaaaccaacaggaccctctttctattgggtgtcacaaagtatactgcaggaccctatgaatgtgaaatacggaacccagtgagtgccagccgcagtgacccagtcaccctgaatctcctcccgaagctgcccaagccctacatcaccatcaacaacttaaaccccagggagaataaggatgtcttaaacttcacctgtgaacctaagagtgagaactacacctacatttggtggctaaatggtcagaagcctccgggtcaagtcccagggtaaagcgaccccattgaaaaacaggatccctcattcctaccccagtgttcacgagaaatgaaacaggacccctatcaatgtgaaatacgggcccgcatatggtgggcatccgcagtgacccagtcaccctgaatgtcctctatggtccagacctcccccagaatttacccttcattcacctattaccgttcagggagnaagtcctcttacttgtcctgtttctgcgggacttctaacccaccgggcacagtattcttgggacaattaattgaaaagttttcagcttaccagggacaaaagctctttattcccgccatattactacaaagcatagcgggctctatgtttgctctgttcgtaactcagccactggcaaggaaagctccaaatccatgacagtcgaagtctctgactggacagttccctgaattctactagtacctccaattccattttctcccatggaatcactaagagcaagacccactctgttccagaagccctataagctggaggtggacaactcaatgtaaatttcatgggaaaacccttgtacgtgaagcatgagccactcagaactcaccaaaatattcgacaccataacaacagatgctcaaactgtaaaccaggacaacaagtggatgacttcacactgtggacagtttttcccaagatgtcagaacaagactccccatcatgatgaggctctcccccctcttaactgtccttgctcatgcctgcctctttcacttggcaggataatgcagtcattagaatttcacatgtagtataggagcttctgagggtaacaacagagtgtcagatatgtcatctcaacctcaaacttttacataacatctcaggaggaaatgtggctctctccatcttgcatacagggctcccaatagaaatgaacacagagatattgcctgtgtgtttgcagagaagatggtttgtatgaagacgtaggaaagctgaaattataatagagtcccctttaaatccacattgtgtggatggctcttgccgtttcctaagagatacattgtaaaacgtgacagtaagactgattctagcagaataaaacatgtactacatttgctaaa

SEQ ID NO: 21055 - DNA, 30274 bp, Homo sapiens
  SIMILAR (20211)..(20762): 301254mologous to Homo sapiens sco-spondin-mucin-like; similar to P98167 (PID:g1711548); details of intron/exon structure uncertain,accession number AC004877,Smith-Waterman Score=88.
gaattcgggaggtggtacatgttttattctgctagaatgtcttactgtcacgttttacaatgtatctcttaggaaacggcaagagccatccacacaatgtggatttaaaggggactctattataatttcagctttcctacgtcttcatacaaaccatcttctctgcaaacacacaggcaatatctctgtgttcatttctattgggagccctgtatgcaaggtggagagagccacatttccccctgagatgttatgtaaaagtttgaggttgagatgacatatctgacactctgttgttactctcagaagctactacatgtgaaattctaatgactgcattatcctgccaagtgaaagaggcaggcatgagcaaggacagttaagaggggggagagcctcatcatgatggggagtcttgttctgacatcttgggaaaaactgtccacagtgtgaagtcatccacttgttgtcctggtttacagtttgagcatctgttgttatggtgtcgaatattttggtgagttctgagtggctcatgcttcaggtacaagggttttcccatgaaatttacattgagttgtccacctccagcttatagggcttcagagacttcgactgtcatggatttggagctttccttgccagtggctgagttacgaacagagcaaacatagagcccgctatgctttgtagtaatatggcggataaagagcttttgtcctggtagctgaaacttttcattaattgtccaagaatactgtgccggtgggttagagtccgcagaacaggacaagtagaggacttctcctgaacggtaataggtgaatgaagggtaaattctggggaggtctggaccatagaggacattcagggtgactgggtcactgcggacgccaccatatcggtcccgtatttcacattgatagggtcctgtttcatttcttgtgacactgggtagaatgaggatcctgttttcaatgggtcgctttaccctgggactgaccgggaggctctgaccatttagccaccaaatgtaggtgtagttctcactcttaggttcacaggtgaagtttaagacatccttattctccctggggtttaagttgttgatggtgatgtagggcttgggcagcttcgggaggagattcagggtgactgggtcactgcggctggcactcactgggttccgtatttcacattcatagggtcctgcagtatactttgtgacacccaatagaaagagggtcctgttggtttcggacagcttcaagctgtgagtcatagggaggctctgaccattcatccaccacaggtagcttgcgtctggagtctcagggtcacaggttaagctcacagcctccatggtctccctgggatttaagttgctgctggagatggagggcttaggagtctccaggtgtaaggtgaaggtgaaacgtccagttactcctctagtcccatcatctccctttatgatgtgtaaggtgtaggatcctgcgtcctcccgggtgacattctggatcagcagggatgcattggaatatgctgtttctcgtccactatatgcaggcccatatataattatttcaccgtctactacatatgatgtaatgtaatggtagaggtccctcatttgccctttgtaccagatgtagccggtaagattctggggcaaattgtggacaagtagaagaacatccttcccctcggaaactttgggtggctgggcttcaatcgtgacttgggcagtggtgggcaggttccagaagtttaaaagtgatgctgtgagcaggagccccttccaggtgatgcgctgtgtgcagggaggggctgagaggagccccatggtctctgctgtctgtgtgttctcctctgtggagatgagctttttgatggggttgtttgtttttttcttgtaaatttgtttgagttcattgtagattctggatattagccctttgtcagatgagtaggttgtgaaaattttctcccattttgtaggttgcctgttcactctgatggtagtttcttttgctgtgcagaagctctttagtttaattagatcccatttgtcaattttggcttttgttgccattgcttttggtgttttagacatgaagtccttgcccatgcctatgtcctgaatggtaatgcctaggttttcttctagggtttttatggttttaggtctaacatttaagtctttaatccatcttgaattgatttttgtataaggtgtaaggaagggatccagtttcagctttctacatatggctagccagttttcccagcaccatttattaaatagggaatcctttccccattgcttgtttttctcaggtttgtcaaagatcagatagttgtagatatgcggcgttatttctgagggctctgttctgttccattgatctatatctctgttttggtaccagtaccatgctgttttggttactgtagccttgtagtatagtttgaagtcaggtagcatgatgcctccggctttgttcttttggcttagaattgacttggcgatgcgggctcttttttggttccatatgaactttaaagtagctttttccaattctgtgaagaaagtcattggtagcttgatggggatggcattgaatcttcaggacatcccgggggcctcctggctggtgtggggatacaggagtctctcgggaggctccatgatgcagtccttcagaacctccgctgcttccctggagggcaggatgggtggcttctgggtcctgggctcctccacatagagggctcccatctcctccttcctgagcctggcgcttgcaggggagcgggctggcacctgggcacaggtgtagacatggctgaaacgccggcctgaggaggtcaggtaccagtgctggatggcgggctgggggtcgtactccgtgacggccacgccgttcacagctgtcatcatgagcatgttgagcacctcgttggagagcttggtcctctcatcggtcctgattcggttcatggccttgaacccccgctcacagcaagaggtggagatgggcacacagaccaccacggccatgagcttgcttagcagggggaagcggcagtgctgggccagggcgtttttgcagagcatggagaacgggaggtgctgggcaatggttttcaggcccagccactcctccagcagagcttcctcactgtatcctgttgggagggagcactcgaaatacctggccaggttgagaatgtcatcattcccaaaactggcaagttcaatcccacttggccaggccatggtgtcaaacacctccatgttcttcagctgtgggggtcggtctgcgtcaaacctctgctggaggtactcaatccccgtcaggactgtcctctccctatccgcctggaaccgctgttccgctacctccagtttgtccaagcagatgccgtggagccgcccatccttgaagctggcgttgaattcttcctctttgggccctgcctggtgacggaggctctccagtgccacgtaggcgcggcccagcgtggcgttcacctctgtaatcagcacgatctccttctggcacacctcggacagaggcctgtagatgctcaggaagtccaacaggaagtggcagaacttgacaaagtggaagccgcgcatgagcttcagcatccctttggcccggtgcccaatctggcccccagcctctgccaccctctggaggtgcctggccagggcgggccagctcacgagcagcgcgtgcagcgtgcgcctcctgctggccacccagcggaccgcattcagatccttcaggcggatgatctcctgctccagaggcgccgcaccttcctgcagctcgttcagcctcttgtttgaggactgataaaacttgaagacggtgcggatgtgccggtcacacttcttcaccagatcgatgctcccgcaggcgtccaccacagccaggtgcagccggtgggccacgcagtggacaggcagcagctgcgggatgacctcctggaacttttccacaaggcctcctctgcagctcaacatggctgagccatccgtccccagccccaccacccagccaggcttccggaaggggatgtccagctcatccagggcagaaacgatggtctcgaagtacccatctgctgtctcactgtagagaggggccagagtgatgtaggactctttcacctccatctgcttgaagtagcggatgtaaatccccacgcaggcctgctcggaggcgtcggtggagctgtccagcagcacgctcacacagggcgagttccgcacgtcctccaggatctccctcttcagggtctctgagatgtacttgatgaactgagtgcacgccgtgcgattgcggtacttgcctaatatcacggtccccgtgctttggaggagctgcaggatcttctcaaagtcattcaggggccttgagtggtatgcaatggagtaggcggcattgaaaaagtgctccatgttggccatgaggtcgctggagatctctggaacgagggcagtgtgaggggtgtcttccttgatttcaaccgtgttgacacagagcctgtgcgctttgctgacttcatggtattttaaagtctccactttaaaaggccccgtgtaacctctgactaaccgagatgatttatcatggagattaggtctttctatgcaggctgagcagaagagtttggtctctttggggtcaattactaaccatgggaactgcccaaaccatgacctctgaatggaacggggcctgtatgtcctcttgattctcctaggtccatctccttcctcacaaatgctggaactgcagcaggaggcacgggcctccacgggagagcctggaggacgacctttcccccactttggcccatttgggtccttgatccagggtgcagccctccgctccagtttggagatcaagtctggcttggcagcggcaggtcccaaggatgccaacagctcgtagttcatccgcatcacgtctctgtacagctccttctgccgcttgtctagcatgccccactcctcccgggtgaaatacactgccacatcctcgaacaccaccggcagctcctcaaacaccacaggaacctcctccgacagcccctctgcagaagggtcctgaatgcaggattctactgcatcattatataaaatattaatgtctgaggagctgtggatgccatcagtgatttctttttgcctcaaatctgaaatgcagtctagatacattgcaggaattgctccatcccccccagggtcctctagttcagctcttgaacttggcaggagctcagccatgctatcaaatcctcccagaggccctggggggtagaatatggggcaatctgcagtgaagagcggctccgggctggccagaacatctccaggtgggtctctgatgctccggaaccgggctgcccagatggggtccctcgctgccaaggcattgacacagaacatgtgggccttgctcttcgcgtggtatttgagagtctccaccttgaatggtcctgtataaccttctattagtcttgaccgtttgtccctgatggaggggtattctcggcaagcagagcagaacagagccgtctgctcctcattcatgatcagccacggaaactgcacaaaccacgacttctggatggaccggggcttcagaagtttcctgtttcttccggcccagtctccctcgatgtgtccactgcctgtactgaggtgggaaaggtaggctttcttctgaggcgggagggactgtccactctccctggtgggaccttgcacctccatttctcccatgtagcccatctgtttttttcctgggtgatgctccagaaggctcctctggccctggacgctgccaagccatggctctggccctcgtccgaacttgcggaacagctcaggattggcaacagttggtcccagtggtgccaccagcttgttggaaccacagagctccttctgttgctggctcagcagcacccattcctcctggagtaagtacacagtgatgtcatcaaacgtcacaggagccttccccgactctctgggctccatggccccgctttcggaggcccgtgccgccccctccccccgcggcctggcctgaggatgcagccgccgcgaccgccccggggacccaggctcccggagggggagggcacccaggtagggagggagcgcggcccaagaacttcgctctctcacgtcggggggcggtagcgccggtggacccaggataagcgcgctgagctgagacttgcgtcgcaccgagcgaacagctttacggtcactgcccagccccaggcggcggggcgtgacgggaagtgtagtccgctctaggtgagcggctctcgaagctgctattggctcccggaacgcaggtccctggcaggagctgcactggcagctgtggatgaccggcagcaccacgggctctgtgtggccacccagacagcgcaggttcaggatccgcacagggctctccgggtctagacggtagctgcagcagtcacactggctctgcaggtatggctcctctggcatgacatgggtgctggatgggcagtacccactgcagtagctcacttctacctggtccaggtaacaggtccctttggtgaagtttcgaagctccgtgaggagctggcaggagggcgactgctcctccggagcctccctgcggcaagagggacagcagctccctggctccagcaccatctcctcgcccaggtggggacgcccaaggtgccagcactcgcagtggtcttcggggacgcaggggcctgcctggctgcggaagtgcccgggctggcacacgcagcccgaggctcgagctgaactgcagttactctgggtctttgtggcgttcatctccaggcacgtctgctcgcagagccccagctcccccggggccacctgctgccacgtttccccagggggcacctgacagtcaacgagggagcagctgaaggctccaccgtggcagacacagcgggtgcagttccgggtgagcacagtccctgggggcagctcctgggcctgctcttccagggtcagggtgaggccccagggcagagaatgctgccctccagggcagccacagccaggctggcagggctcctgcacacagatggcaccaggctgcagatgccagcagaggcacgggcatgaggtggcacaggcactaagcacctggccaggggggcactcagggcagggctgcaggttacactcctgccgttgctctgtgtcctgggcctggcatggtgccaccccaggacccccctcacaagtccgatgtcgctccatagtgcccccaccacagggggccgagcaactgctccaggctgaccaaggcccaaggactggacactcctggtgtgggcacaccagggactcgttgacacaggtgcagttttggcagtccagctgcaccgcctgggccggggccagctcccaagaggcattggcactggggaggccacagcggcaagaggagatcggcacacagcgcccatcctggaccagctggccagggggacagcggcagcctgggcagggccctccgttgcagctttctgtcttgagcccatggctcccggcagcctcctccacagagggcctctgcctctctccagcgtagcctgaaccccccactgcagggcacctggcaggggctccatggcccccacagactccactggcatgagtcagggcaggctccagggtcagggcagaggcgctgctggctgaggggtgcggtgcagaggtgaggggctccagtccagggcctccctgtcgcaggatccagacagagccggtggcggtgctgctctggaaggacagggtgtgggtgcccttcccagtgaccacccctgggcccagagacccttgacagccctggctggtgcagtgcagctccccacgccggcattcacactccttacagcccagctgcaggcggtccccaggggccagggtcatcccggctcctgctgctgaggtatgccagcagttacactcctctgggggaatgcagcccccagcctgctccagcagccccttggggcagtagcagcccggctggcagggtggcaggtcctggcagagctgatggctcaggtgtgtggcacagagcccagcacagggggagccgcaggcatggaactcaaagggaggcgtgcagctgtcctcagagcagttgctgataaggcaaggccggaagtggccatccagccgcgtgcagggggcgcctgccctggcccctcgggacgccgggccctggtgtcggtagcgctgctgcaccagcacccggcaagagcagcgcgtccagctgctccagctgctccacacacactcctctgggcagggccctgagtagcagccctgggtgtccaggtggaggaaggtgctgttgcaggtggggtcggccttggccatcaggcaggggcaggacccagagcgagaggccaggcccgggccgcagcaccgctggcactccccctgcagccagctgtcccccagggtgcgggagcgagtgccctgcaggcacaggggtgggcacgagggctgagggcagggctggctctgggactgctcctcccgacactctggggcccacgagcccgacgtggaggaccggaagcggctctgctgccctctgggcccgcatgagtggctgcagggactccaggccgaccagtggctccaggcacagtgggtgggaggcgggcagggctgagccgtgcaggagagctgcccagcttggcatgagcagttgttgcaggcatcctggtgctggctccccggggcccagctgtggccctgggcatcggtgcagtcacagtgcccaattggcacgcagccaccatcctgctccagggacccctttgggcagcggcagcccttctggcagacctggtcgtcctgacacacaattccctcctggaggtctgagcagcggcgggggcagcggttggcacaggtgaccacctccatgcctgctgggcagccggcctctgggcaggctcgcaggttgcagaagcggcgctcttggtaggcagtaaggatgttggggcaccagtgcccgccgggcccagggggacggtatgcccgcaggcggcgctgctggcccactccgcagctgcgggagcaaggttcccacggggcccaggaggtccaggaacagttcccagccccacagccagggccagggcacacgggcagctcactgagggtgggcatggtgagcacacactggcggctgcgggtacgggtgcccagccctccacaggagcgggagcacgggccccacgggctccagggaccgaaaccaccatcggcctcgaagcagtcgtccagggagcaagacagcttcccgtgtgcacacgagcagttgccacagcttgtacgaagtgtctggcctgagtccagctcatctccaggcccgaggggctgaccagggtcacctatggtggctcccagctcctgcagcagccaggctgtcagcacacaagggcactcctgcacacaggccaggcggtgctggaaggtgccctcggggcagtggcagccctcctcgcagccctcagagaagcagcccacctgctgcgtgacgtgggcgcaggagaaggggcatccctcgccgggctggcattcacggtacaggcggccagccgggcagcctgcctctctgcagacctgtgtgctgcatgtgcggctctggcgggcaggccctgggcagggaggacgagcacagcgccgggagcgcagctgctccccgcccccacacgaaacactgcagtcttcccaagggccccaagagctccacaccccagggtccgggcagtcaggcacctcctggcattgcagaatgcctgccacacaggtgcagttgtcacatggcccagtgaccacctctccgggttccaggctctcccaggagctaaacctagaccctgctgagcggctctggttctcagggatccccatggctccaggctggtactggcagcggcagtgggctgggggcacgcacagcccgtcctgggagagctggcccagggggcacccacaagtgggctggcagcccacagagcctggctggcacacactcccaggggacaggtcctggcaggagcgggggcagggctgcccacagggatgcagactctggccacccccgcagtctgggcagggcaggtctgtgcagttcagcctcccctccaggcaggtgcagtggttgcagccgtcaggccttgccagccgagcacccggatggtgccgctgcccggtcagcaggtccaggcagctgcagtgacccggctgcacgcagatggccccgttggaactcagtacctggcctggtgggcagtagcagccaggctggcagcgccacacgcagtgcactaggtcatcacaggagcgagggcacggagggccacaggggctatactcggccccttcaatggcagtgcagttggtcactgggcagggcagagcctggcagacctccccctgtgcccgtggcccctcgcagtaatcccccaggccctggggtgggggctggtcacaggcccgggtccggctccgcaggcctcccccacagctccggctacagtgggaccagggcccccatggaccccatcccccagctcctggcacagaaccggtgccgatggcaccgggcagggccacaggaggctgaacactggctccaaggggtccagggtgaccacgtgggctcaccctccgcacaaggccaggagctgcagttggcgatgagcccggagacacaggagcaacaccttgatcctgggcttccaggatctgtgagaccatcaggggccgctgctctagctccccagtgcatggcactcggtggcagcagccccaggaggctggacatggccgcaggctgcagaattcagcctccatggtggggccttggcactcagcacccccaaaggcagctgggggtgcagtgcctgcccggaagcggcgccgaatgcccacgttgcagcagttgttgcaggagtccaggcgagccattgctcctgatgcatagagctgcccgtgcagctggcaggggcactggctgcggggcaggcagctagcattgtgcaggaaaagaccaggggggcaggtgcagccgggggcgcagaagcccgtacactctatctgggcatacaggggggctgcagggctcctcctgggtggcatctcctgggcaggatgaatccccagggctggggcagagtcgggaacgactgcgccagccagggccccctcccggggcaaggcagctttgggagcaggaggaccaggaagtccagggcgtccagccgaacaccttccagagccacaggagcggtcgcagggagcccaggaggaccaggctgaccagccgcagggcagggggcagccccctggttggcacagcaactcccccttctcacacacgcattggctgcagttgcccaggaggaaggacacccctggccacttcagctcttcgcccaccaggcaggggcactcagagaggggcaggcagcgagtgtcatgcagaaggagccccgggggacagcggcatccttccacacaatgcccactgcagcttctgttggccttgggatccaggcaggagggtgggcatgggggcaccagccccttctggcacagatcggcactcacatacacacggcccagctcgcagtctgggcaggcctgcacaaagcaggactggcttcggaaccggtcacgcgggcagctgccccctggcagaggaggccgcagcagctcctggcgctggaaggtgaggcccaggccacagctgcggctgcagctgctccagacagaccagggggccagcacgcagtccacacagccatcctcgtccgagccatcctggcagtcaggccgcaggtcacagcgccgctcagcagacagacactccccgctgccacagctcagctggctcggggaacagagggcccttgaggcgcagtgcctctcgtcggagccgtcgaggcaatcctccctgccatcacacacctgcgcctgttccacgcagcccagcacctcacagggcgtctggccggggccacactgcacaggtgggaagggtcctggggcgacgctctggccagcaggggtcgctggagtcacagggtgtgggggcaccaccgtcacagctgccatacctggtggcagggtcctggcctccatctggggtatgggggtggtggtcaccatctgcacagattccccatggtgaggcaccccggaggctgggccaggactcacgggccttgtctctgtcggggacgtgggggattcctgcccagggggccagtgctcagtctctgccaggccctccctgggccagtgcagcagctgccccggctgggcagaggagagggccagggtcttggctgtggaatggaatctgccagtgccctcaggcagcaacacacagccctcctcatccgagccatcctcgcagtccagaacaccgtcacaagggccccctctcaggacacactcaccactggcacagcggagtccaacccctggctcgcagcccagcagctccacctgcagggggacatcgctgtggtggacatcgtggggccacaccctgacaaacctcgcctgcaccatgcggccgaaagtccatacggcagggtccaggtcatcccagtttctggggaaaagcaggtattcaacaagcatcgaatgcaggccatgcccctcggggacactggaaggcccttggggacaaagactatggaacccacaaaagggcatggtgggctgctggccccatcggccttgggcgggtgataccttgggcaggggcaagatgccaggcaggaggtcacgatagtcatgccagtgtagaccattgctgctgaactggagtgagaagctgctggcatatgcgttggaggagccagtctccggcactaggatgccagtgaggttccgaggctgaagcaggtccagctgcaggtaatggggccgagtgtgccacttggcataagcatcccctccagcgtgccatccctgagggctgggcccctgggtgggagcccccaggagggcagcctgggtggggtgttccagctgctgggacgatgcatgcagactcccctcagccagtccggccagccccaggggagaatagcaggggtctcctgacggaggcagaatgtaagtggccaaagggaatctgatctggggactgggagccggagctgcggcaggagtggccatgggctggaccgtctggttctctccaggtagggcacagtggcagcatgattctcccgtcccctccaccaagacccagccctgggggcagctgccgagcgggcagtagggtgagcagtgtgcggtgaggttgtgcagacactggcacaccctgcaggggcccccatgccagcgttccccgacacggtggacctggccctgatgctcacacccctcacagggctccgtctggcacctgcgtgccttgcggtggatgccacggcactggcgacctcggccggaggggcgggggttgttggagctccggaaggaccactggatgctctggcttccacaggggcccaggcacttggcccagggtgaccaggaggaccagccacagtccacagcgcagtccgggttgagtcggcagcgtcggggccgtccgtcttggcagatgcagagctggcagtcggccttgatgcgttgcccaggccagtagcgggcaccgtccaccaggcaggggcactgccggggccacacacaccacccctcgctgcccagcacctgcccttctgggcaccagcagcccgggctgccgcagggccaatcaggtgggcacgtgacctggccagagatgtcatcacaggtcagtgggcagggggcacagggctggaacatcagctccccagagcaagtggcattggggcagccgtcctgagggcaaggcttggtctggcgggtgctgtgcaggcctccgggcagtgcagcacaggtgcggcccccattctggggtgagtggcactgccgttgccgcgtcatggtgcccctgcacggctcagagcacacagaccagggggaccaggtgctccattcaccgtccactgggcaggctgccgtgaagcaggcctgagactggtgctcaggccctgggcagttctgtagcaccaggaggccgagtggggagcagcggcggctccggccctggccccagggcccacacgtccggctgcagggcccccatgggctccaggggccccaggccccacaaccctgctcttctggggaggggcccacctgccctggccttccacagtcaggctgcccatcacacaccagctggaagcctatgcaggtgccattggggcaggtgtattctgggcagggaagccctgtcctgttggggcctcccagggctggcagccccccgcagtccagctcgtcctcgccctggggacagtctgggatcccatcacagagctgctcaggggtcaggcacagccccggagccacaccacagggaaagaggccagggcacagaggcagctgggtggagcctgcgggcacttcaggacatcccgggggcctcctggctggtgtggggatacaggagtctctcgggaggctccatgatgcagtccttcagaacctccgctgcttccctggagggcaggatgggtggcttctgggtcctgggctcctccacatagagggctcccatctcctccttcctgagcctggcgcttgcaggggagcgggctggcacctgggcacaggtgtagacatggctgaaacgccggcctgaggaggtcaggtaccagtgctggatggcgggctgggggtcgtactccgtgacggccacgccgttcacagctgtcatcatgagcatgttgagcacctcgttggagagcttggtcctctcatcggtcctgattcggttcatggccttgaacccccgctcacagcaagaggtggagatgggcacacagaccaccacggccatgagcttgcttagcagggggaagcggcagtgctgggccagggcgtttttgcagagcatggagaacgggaggtgctgggcaatggttttcaggcccagccactcctccagcagagcttcctcactgtatcctgttgggagggagcactcgaaatacctggccaggttgagaatgtcatcattcccaaaactggcaagttcaatcccacttggccaggccatggtgtcaaacacctccatgttcttcagctgtgggggtcggtctgcgtcaaacctctgctggaggtactcaatccccgtcaggactgtcctctccctatccgcctggaaccgctgttccgctacctccagtttgtccaagcagatgccgtggagccgcccatccttgaagctggcgttgaattcttcctctttgggccctgcctggtgacggaggctctccagtgccacgtaggcgcggcccagcgtggcgttcacctctgtaatcagcacgatctccttctggcacacctcggacagaggcctgtagatgctcaggaagtccaacaggaagtggcagaacttgacaaagtggaagccgcgcatgagcttcagcatccctttggcccggtgcccaatctggcccccagcctctgccaccctctggaggtgcctggccagggcgggccagctcacgagcagcgcgtgcagcgtgcgcctcctgctggccacccagcggaccgcattcagatccttcaggcggatgatctcctgctccagaggcgccgcaccttcctgcagctcgttcagcctcttgtttgaggactgataaaacttgaagacggtgcggatgtgccggtcacacttcttcaccagatcgatgctcccgcaggcgtccaccacagccaggtgcagccggtgggccacgcagtggacaggcagcagctgcgggatgacctcctggaacttttccacaaggcctcctctgcagctcaacatggctgagccatccgtccccagccccaccacccagccaggcttccggaaggggatgtccagctcatccagggcagaaacgatggtctcgaagtacccatctgctgtctcactgtagagaggggccagagtgatgtaggactctttcacctccatctgcttgaagtagcggatgtaaatccccacgcaggcctgctcggaggcgtcggtggagctgtccagcagcacgctcacacagggcgagttccgcacgtcctccaggatctccctcttcagggtctctgagatgtacttgatgaactgagtgcacgccgtgcgattgcggtacttgcctaatatcacggtccccgtgctttggaggagctgcaggatcttctcaaagtcattcaggggccttgagtggtatgcaatggagtaggcggcattgaaaaagtgctccatgttggccatgaggtcgctggagatctctggaacgagggcagtgtgaggggtgtcttccttgatttcaaccgtgttgacacagagcctgtgcgctttgctgacttcatggtattttaaagtctccactttaaaaggccccgtgtaacctctgactaaccgagatgatttatcatggagattaggtctttctatgcaggctgagcagaagagtttggtctctttggggtcaattactaaccatgggaactgcccaaaccatgacctctgaatggaacggggcctgtatgtcctcttgattctcctaggtccatctccttcctcacaaatgctggaactgcagcaggaggcacgggcctccacgggagagcctggaggacgacctttcccccactttggcccatttgggtccttgatccagggtgcagccctccgctccagtttggagatcaagtctggcttggcagcggcaggtcccaaggatgccaacagctcgtagttcatccgcatcacgtctctgtacagctccttctgccgcttgtctagcatgccccactcctcccgggtgaaatacactgccacatcctcgaacaccaccggcagctcctcaaacaccacaggaacctcctccgacagcccctctgcagaagggtcctgaatgcaggattctactgcatcattatataaaatattaatgtctgaggagctgtggatgccatcagtgatttctttttgcctcaaatctgaaatgcagtctagatacattgcaggaattgctccatcccccccagggtcctctagttcagctcttgaacttggcaggagctcagccatgctatcaaatcctcccagaggccctggggggtagaatatggggcaatctgcagtgaagagcggctccgggctggccagaacatctccaggtgggtctctgatgctccggaaccgggctgcccagatggggtccctcgctgccaaggcattgacacagaacatgtgggccttgctcttcgcgtggtatttgagagtctccaccttgaatggtcctgtataaccttctattagtcttgaccgtttgtccctgatggaggggtattctcggcaagcagagcagaacagagccgtctgctcctcattcatgatcagccacggaaactgcacaaaccacgacttctggatggaccggggcttcagaagtttcctgtttcttccggcccagtctccctcgatgtgtccactgcctgtactgaggtgggaaaggtaggctttcttctgaggcgggagggactgtccactctccctggtgggaccttgcacctccatttctcccatgtagcccatctgtttttttcctgggtgatgctccagaaggctcctctggccctggacgctgccaagccatggctctggccctcgtccgaacttgcggaacagctcaggattggcaacagttggtcccagtggtgccaccagcttgttggaaccacagagctccttctgttgctggctcagcagcacccattcctcctggagtaagtacacagtgatgtcatcaaacgtcacaggagccttccccgactctctgggctccatggccccgctttcggaggcccgtgccgccccctccccccgcggcctggcctgaggatgcagccgccgcgaccgccccggggacccaggctcccggagggggagggcacccaggtagggagggagcgcggcccaagaacttcgctctctcacgtcggggggcggtagcgccggtggacccaggataagcgcgctgagctgagacttgcgtcgcaccgagcgaacagctttacggtcactgcccagccccaggcggcggggcgtgacgggaagtgtagtccgctctaggtgagcggctctcgaagctgctattggctcccggaacgcaggtccctggcaggagctgcactggcagctgtggatgaccggcagcaccacgggctctgtgtggccacccagacagcgcaggttcaggatccgcacagggctctccgggtctagacggtagctgcagcagtcacactggctctgcaggtatggctcctctggcatgacatgggtgctggatgggcagtacccactgcagtagctcacttctacctggtccaggtaacaggtccctttggtgaagtttcgaagctccgtgaggagctggcaggagggcgactgctcctccggagcctccctgcggcaagagggacagcagctccctggctccagcaccatctcctcgcccaggtggggacgcccaaggtgccagcactcgcagtggtcttcggggacgcaggggcctgcctggctgcggaagtgcccgggctggcacacgcagcccgaggctcgagctgaactgcagttactctgggtctttgtggcgttcatctccaggcacgtctgctcgcagagccccagctcccccggggccacctgctgccacgtttccccagggggcacctgacagtcaacgagggagcagctgaaggctccaccgtggcagacacagcgggtgcagttccgggtgagcacagtccctgggggcagctcctgggcctgctcttccagggtcagggtgaggccccagggcagagaatgctgccctccagggcagccacagccaggctggcagggctcctgcacacagatggcaccaggctgcagatgccagcagaggcacgggcatgaggtggcacaggcactaagcacctggccaggggggcactcagggcagggctgcaggttacactcctgccgttgctctgtgtcctgggcctggcatggtgccaccccaggacccccctcacaagtccgatgtcgctccatagtgcccccaccacagggggccgagcaactgctccaggctgaccaaggcccaaggactggacactcctggtgtgggcacaccagggactcgttgacacaggtgcagttttggcagtccagctgcaccgcctgggccggggccagctcccaagaggcattggcactggggaggccacagcggcaagaggagatcggcacacagcgcccatcctggaccagctggccagggggacagcggcagcctgggcagggccctccgttgcagctttctgtcttgagcccatggctcccggcagcctcctccacagagggcctctgcctctctccagcgtagcctgaaccccccactgcagggcacctggcaggggctccatggcccccacagactccactggcatgagtcagggcaggctccagggtcagggcagaggcgctgctggctgaggggtgcggtgcagaggtgaggggctccagtccagggcctccctgtcgcaggatccagacagagccggtggcggtgctgctctggaaggacagggtgtgggtgcccttcccagtgaccacccctgggcccagagacccttgacagccctggctggtgcagtgcagctccccacgccggcattcacactccttacagcccagctgcaggcggtccccaggggccagggtcatcccggctcctgctgctgaggtatgccagcagttacactcctctgggggaatgcagcccccagcctgctccagcagccccttggggcagtagcagcccggctggcagggtggcaggtcctggcagagctgatggctcaggtgtgtggcacagagcccagcacagggggagccgcaggcatggaactcaaagggaggcgtgcagctgtcctcagagcagttgctgataaggcaaggccggaagtggccatccagccgcgtgcagggggcgcctgccctggcccctcgggacgccgggccctggtgtcggtagcgctgctgcaccagcacccggcaagagcagcgcgtccagctgctccagctgctccacacacactcctctgggcagggccctgagtagcagccctgggtgtccaggtggaggaaggtgctgttgcaggtggggtcggccttggccatcaggcaggggcaggacccagagcgagaggccaggcccgggccgcagcaccgctggcactccccctgcagccagctgtcccccagggtgcgggagcgagtgccctgcaggcacaggggtgggcacgagggctgagggcagggctggctctgggactgctcctcccgacactctggggcccacgagcccgacgtggaggaccggaagcggctctgctgccctctgggcccgcatgagtggctgcagggactccaggccgaccagtggctccaggcacagtgggtgggaggcgggcagggctgagccgtgcaggagagctgcccagcttggcatgagcagttgttgcaggcatcctggtgctggctccccggggcccagctgtggccctgggcatcggtgcagtcacagtgcccaattggcacgcagccaccatcctgctccagggacccctttgggcagcggcagcccttctggcagacctggtcgtcctgacacacaattccctcctggaggtctgagcagcggcgggggcagcggttggcacaggtgaccacctccatgcctgctgggcagccggcctctgggcaggctcgcaggttgcagaagcggcgctcttggtaggcagtaaggatgttggggcaccagtgcccgccgggcccagggggacggtatgcccgcaggcggcgctgctggcccactccgcagctgcgggagcaaggttcccacggggcccaggaggtccaggaacagttcccagccccacagccagggccagggcacacgggcagctcactgagggtgggcatggtgagcacacactggcggctgcgggtacgggtgcccagccctccacaggagcgggagcacgggccccacgggctccagggaccgaaaccaccatcggcctcgaagcagtcgtccagggagcaagacagcttcccgtgtgcacacgagcagttgccacagcttgtacgaagtgtctggcctgagtccagctcatctccaggcccgaggggctgaccagggtcacctatggtggctcccagctcctgcagcagccaggctgtcagcacacaagggcactcctgcacacaggccaggcggtgctggaaggtgccctcggggcagtggcagccctcctcgcagccctcagagaagcagcccacctgctgcgtgacgtgggcgcaggagaaggggcatccctcgccgggctggcattcacggtacaggcggccagccgggcagcctgcctctctgcagacctgtgtgctgcatgtgcggctctggcgggcaggccctgggcagggaggacgagcacagcgccgggagcgcagctgctccccgcccccacacgaaacactgcagtcttcccaagggccccaagagctccacaccccagggtccgggcagtcaggcacctcctggcattgcagaatgcctgccacacaggtgcagttgtcacatggcccagtgaccacctctccgggttccaggctctcccaggagctaaacctagaccctgctgagcggctctggttctcagggatccccatggctccaggctggtactggcagcggcagtgggctgggggcacgcacagcccgtcctgggagagctggcccagggggcacccacaagtgggctggcagcccacagagcctggctggcacacactcccaggggacaggtcctggcaggagcgggggcagggctgcccacagggatgcagactctggccacccccgcagtctgggcagggcaggtctgtgcagttcagcctcccctccaggcaggtgcagtggttgcagccgtcaggccttgccagccgagcacccggatggtgccgctgcccggtcagcaggtccaggcagctgcagtgacccggctgcacgcagatggccccgttggaactcagtacctggcctggtgggcagtagcagccaggctggcagcgccacacgcagtgcactaggtcatcacaggagcgagggcacggagggccacaggggctatactcggccccttcaatggcagtgcagttggtcactgggcagggcagagcctggcagacctccccctgtgcccgtggcccctcgcagtaatcccccaggccctggggtgggggctggtcacaggcccgggtccggctccgcaggcctcccccacagctccggctacagtgggaccagggcccccatggaccccatcccccagctcctggcacagaaccggtgccgatggcaccgggcagggccacaggaggctgaacactggctccaaggggtccagggtgaccacgtgggctcaccctccgcacaaggccaggagctgcagttggcgatgagcccggagacacaggagcaacaccttgatcctgggcttccaggatctgtgagaccatcaggggccgctgctctagctccccagtgcatggcactcggtggcagcagccccaggaggctggacatggccgcaggctgcagaattcagcctccatggtggggccttggcactcagcacccccaaaggcagctgggggtgcagtgcctgcccggaagcggcgccgaatgcccacgttgcagcagttgttgcaggagtccaggcgagccattgctcctgatgcatagagctgcccgtgcagctggcaggggcactggctgcggggcaggcagctagcattgtgcaggaaaagaccaggggggcaggtgcagccgggggcgcagaagcccgtacactctatctgggcatacaggggggctgcagggctcctcctgggtggcatctcctgggcaggatgaatccccagggctggggcagagtcgggaacgactgcgccagccagggccccctcccggggcaaggcagctttgggagcaggaggaccaggaagtccagggcgtccagccgaacaccttccagagccacaggagcggtcgcagggagcccaggaggaccaggctgaccagccgcagggcagggggcagccccctggttggcacagcaactcccccttctcacacacgcattggctgcagttgcccaggaggaaggacacccctggccacttcagctcttcgcccaccaggcaggggcactcagagaggggcaggcagcgagtgtcatgcagaaggagccccgggggacagcggcatccttccacacaatgcccactgcagcttctgttggccttgggatccaggcaggagggtgggcatgggggcaccagccccttctggcacagatcggcactcacatacacacggcccagctcgcagtctgggcaggcctgcacaaagcaggactggcttcggaaccggtcacgcgggcagctgccccctggcagaggaggccgcagcagctcctggcgctggaaggtgaggcccaggccacagctgcggctgcagctgctccagacagaccagggggccagcacgcagtccacacagccatcctcgtccgagccatcctggcagtcaggccgcaggtcacagcgccgctcagcagacagacactccccgctgccacagctcagctggctcggggaacagagggcccttgaggcgcagtgcctctcgtcggagccgtcgaggcaatcctccctgccatcacacacctgcgcctgttccacgcagcccagcacctcacagggcgtctggccggggccacactgcacaggtgggaagggtcctggggcgacgctctggccagcaggggtcgctggagtcacagggtgtgggggcaccaccgtcacagctgccatacctggtggcagggtcctggcctccatctggggtatgggggtggtggtcaccatctgcacagattccccatggtgaggcaccccggaggctgggccaggactcacgggccttgtctctgtcggggacgtgggggattcctgcccagggggccagtgctcagtctctgccaggccctccctgggccagtgcagcagctgccccggctgggcagaggagagggccagggtcttggctgtggaatggaatctgccagtgccctcaggcagcaacacacagccctcctcatccgagccatcctcgcagtccagaacaccgtcacaagggccccctctcaggacacactcaccactggcacagcggagtccaacccctggctcgcagcccagcagctccacctgcagggggacatcgctgtggtggacatcgtggggccacaccctgacaaacctcgcctgcaccatgcggccgaaagtccatacggcagggtccaggtcatcccagtttctggggaaaagcaggtattcaacaagcatcgaatgcaggccatgcccctcggggacactggaaggcccttggggacaaagactatggaacccacaaaagggcatggtgggctgctggccccatcggccttgggcgggtgataccttgggcaggggcaagatgccaggcaggaggtcacgatagtcatgccagtgtagaccattgctgctgaactggagtgagaagctgctggcatatgcgttggaggagccagtctccggcactaggatgccagtgaggttccgaggctgaagcaggtccagctgcaggtaatggggccgagtgtgccacttggcataagcatcccctccagcgtgccatccctgagggctgggcccctgggtgggagcccccaggagggcagcctgggtggggtgttccagctgctgggacgatgcatgcagactcccctcagccagtccggccagccccaggggagaatagcaggggtctcctgacggaggcagaatgtaagtggccaaagggaatctgatctggggactgggagccggagctgcggcaggagtggccatgggctggaccgtctggttctctccaggtagggcacagtggcagcatgattctcccgtcccctccaccaagacccagccctgggggcagctgccgagcgggcagtagggtgagcagtgtgcggtgaggttgtgcagacactggcacaccctgcaggggcccccatgccagcgttccccgacacggtggacctggccctgatgctcacacccctcacagggctccgtctggcacctgcgtgccttgcggtggatgccacggcactggcgacctcggccggaggggcgggggttgttggagctccggaaggaccactggatgctctggcttccacaggggcccaggcacttggcccagggtgaccaggaggaccagccacagtccacagcgcagtccgggttgagtcggcagcgtcggggccgtccgtcttggcagatgcagagctggcagtcggccttgatgcgttgcccaggccagtagcgggcaccgtccaccaggcaggggcactgccggggccacacacaccacccctcgctgcccagcacctgcccttctgggcaccagcagcccgggctgccgcagggccaatcaggtgggcacgtgacctggccagagatgtcatcacaggtcagtgggcagggggcacagggctggaacatcagctccccagagcaagtggcattggggcagccgtcctgagggcaaggcttggtctggcgggtgctgtgcaggcctccgggcagtgcagcacaggtgcggcccccattctggggtgagtggcactgccgttgccgcgtcatggtgcccctgcacggctcagagcacacagaccagggggaccaggtgctccattcaccgtccactgggcaggctgccgtgaagcaggcctgagactggtgctcaggccctgggcagttctgtagcaccaggaggccgagtggggagcagcggcggctccggccctggccccagggcccacacgtccggctgcagggcccccatgggctccaggggccccaggccccacaaccctgctcttctggggaggggcccacctgccctggccttccacagtcaggctgcccatcacacaccagctggaagcctatgcaggtgccattggggcaggtgtattctgggcagggaagccctgtcctgttggggcctcccagggctggcagccccccgcagtccagctcgtcctcgccctggggacagtctgggatcccatcacagagctgctcaggggtcaggcacagccccggagccacaccacagggaaagaggccagggcacagaggcagctgggtggagcctgcgggcactgtgagatgtgtcctgctccgctcctgtcccttcctgccctctccctgtgcctcaggaggcgaaggtggggatggcgctcgggaagaggtgggcccgccggcttggccaggggggccgcgcatggccgggggcgcgggagcctcaacgcaggcgtcggggccctcgtccgagccgtcgggacactgccgcacgccgtcgcacagctgctcgggggacacgcagtgagggccgcgggcgcagggcgcgtggtgcggcgcgcagggccctccgcagccgcgctcgtcgctgccgtcggcgcagtcttcctcctggtcgcagcgccagccccgcggggtgcactcgccgctgccgcaccgaaactcgaaggggccgcagggtggcgcagggctggcgctggccaggggacttgacgcagtgtccagggagcctggggaggggccaggcaaggtgctggcaggaggtgtgggcagagaaggtagggggcagtgtcccggcccctcatcggctccatctgggcagtcccagactccgtcacacagctggatggcccccaggcaggtgccatcaacacaggacacctccccggggacgcaggtcacctgccccagacaggactcctcgtcggcggcatccagacagtcaggatgcccatcgcagagcagggccggcggcaggcagcgtccatcggcacaggccagcaagccctgggggcacggatagctcggctcatccgtgccatctccacagtcatcctggcggtcacagagcagggccagggtcatattgtccactcatatcctggagggtccatcagaggacagccgagggacagcaagggacccagagaatgttcctttttatcagggtggttcataagagcagccacacagagctgtggtgtcacctcatagcacatttgttcctcttggtcagatacacttttcttgtatgttgcaaaaggatctgcttgccccagctccttggcctggtgtgcatagccccctggggtgtggcagccccacttgctcagttccagtgtgttgggcctcaggtggtagatgcagctccacacgggaacacaaagtgccacaagtgattgagatgagcaggcccaggaatcatctgtggtgtcaattatggcctgggctctctcttccacatctttcaaagcatccttgtaagaggatggaaaggtaatagggacggtattctttagcatggccaaaaactctactactttcctcttaatgacttctgaatgagctcttggaccccacaggaattcgtaacgaggaggagaagagttgggcacctcccggtactctaggtaatgttcctgcacccaaactttagtgaggagctccctgggctccccaaaggcaaagtgctccctcccagcacgcacccctattccactcagcacatcccagatgacctcctcagaggcataggtgccctttatgaagatgatactcagaataagaatcaggaggcggttctgggacatgccctgctcatcactcagacacccctcagaggtgaggtctaatgtgtttacaaagacataggagtcatcagggtccacttctctcagggaaatgccaaaaagtatctctatgaactcacgggctttcctgaagatcacaggaaagtagcccgtgtacctgctgatgacattcgtcagcatctctgcctttgtgataggctgcttcacttgatatttgaggagaagaaaccgcgccaactcgtccaccttttcatccagtgtataagtgaacaagggctcgctctctatcaaggactcgctgtctgtcaaggaatcactctctagcaaggtgtctgaggaacttgtatattcatctactgggctgctggactcttcactgaatgggctcaatgaagtggaggaggagaaggagatcacaggactctggagaggactctcaggggaactcttggaaagactcgatgaagtggaggaggggaaggagctcacaggagaactctgggaaagactcgatgaagtggaggaggggaaggagctcacaggactctggagaggagactgggcaggcccctcaggaggactctgaggactctcatgggaactttggagaagactcgctaaagtgtaggagaagaaggagctgacaggtctctggagaggagactgagcaggcccctcaggaggactctgaggactctcagggaaactctggggaagactcaaagaagtggaggaggagcagatactcacaggactctggagagaagactggaagtcctccccctgaggaggaaactgaggaaagtggagaggagagagggagtcctcccactcaggaggactctgaggaaaatggagagaagacagggagtcctctccctcaagaggactctgaggaatttggagaggagacagggaatcctccccctcaggagcactctcaggactctggagaggagattgggagtgcatcccctcaggagggctctgaggactatggagaggagactggacaggcccctcaggaggactctgagaactctcagggaaactctggggaagactggatggagtggaggaggagcagatgctcacagggctctggagagaagactggaattcctccccctgactattgtggatcaagcctaggcctattctggtttgcctggggcagaaagtcatggccagctttgatgcctaggggtaaaggtctctgtacttggacctgagagggactgagaggcctggcctctggccatgtgtatttgggatggcagtctggcccacagaggaacagaagatactcacggaggagattccagggtgaactgggtccactgcggctggcactcccctgaagttcccatatttcacattccatagggtccctgccagtaatactttgtgacaccaaatagaaagagggtcctgttggtttcagacagctgcatcctatgagtcatagggaggctctgaccattcatccaccacaggtagcttgcgtccggagtctcaggattacaggttaagatcacagtctccatggcctccctggggtttaagttgctgctggagatggagggcttgggagtctccaggtataagttgaaggtgaaatatccagttactcctctagtcctatcacctcgcttttatgatgtgtaaggtgtaggatcctgcgtcctcccgggtgacattctggatcagcagggatgcattggaatatactgtttctcgtccactgtatgccggtccatatataattatttgaccgtctactacatatgatgtaatgtaatggtagaggtccctgatttgccctttgtaccagatgtagccagtaagattctggggcaaattgtggacaagtagaagaacatccttcccctcggacactttgggtggctgggcttcaatcatgacttgggcagtggtaggcaagttccagaagtttaaaagtaatgctgtgagcaggagccccttccatttgatgtgctctgtgcagggaggggctgagaggggccccatgatctctgctgcgtgcatgttctcctctgtggagatgagcctaggatccagaagcttccagagcacggctgtcagctgtgctgtccttcctccttctgcgctgagactcttcccggtggaaggagcacttctcaagctcat

SEQ ID NO: 21056 - DNA, 2209 bp, Homo sapiens
  SIMILAR (1012)..(1527): 471254mologous to Homo sapiens pregnancy-specific beta-1 glycoprotein precursor,accession number M34420,Smith-Waterman Score =310.
ctgtcatcctgtaaacgtgaacacttactttttggtgggtcttcctcttgtctaattatttttcttttcatcactgggtaattcttacaactggtctgagtactatggctgattttcgctgtctggcattgagaagccacacgccccttttgcttaggaggcctctctgctggaggatgacgatggcatggtttatctaaggccactgacaagtcatcaatataggacagcacagctgagagccatgctcaggaagtttctggatcctaggctcagctccacagaggagaacacgcaggcagcagagaccatggggcccctctcagcccctccctgcacacagcgcatcacctggaaggggctcctgctcacagcatcacttttaaacttctggaacccgcctaccactgcccaagtcacgattgaagccgagccaaccaaagtttccaaggggaaggacgttcttctacttgtccacaatttgccccagaatcttgctggctacatctggtacaaagggcaaatgaaggacctctaccattacattacatcatacgtagtagatggtcaaataattatatatgggcctgcatacagtggacgagaaacagtatattccaatgcatccctgctgatccagaatgtcacccgggaggacgcaggatcctacaccttacacatcgtaaagcgaggtgatgggactagaggagaaactggacatttcaccttcaccttatacctggagactcccaagccctccatctccagcagcaacttataccccagggaggacatggaggctgtgagcttaacctgtgatcctgagactccggacgcaagctacctgtggtggatgaatggtcagagcctccctatgactcacagcttgcagttgtccaaaaacaaaaggaccctctttctatttggtgttcacaaagtacactgcagggaccctatggaatgtgaaatacgggaacccagttgagttgccagccgcagttgacccagttcaccctggaatctcctcccgaagcttgcccaagccctacatcaccattcaacaactttaaaccccagggagaagaaggatgtgttagccttcaccctgtgacccttaagagtcggaactacacctacatttggtggctaaatggtcagagcctcccggtcagtcccagggtaaagcgaccccattgaaaacagggatccctcattcctaccccagtgtcacgagaaatgaaacaggacccctatcaatgtgaaatacgggacccgatatggtgggcatccgcagttacccagtcaccctgaatgtcctctatgggtccagacctccccagaatttaccctttcatttcacctatttaccatttcagggaggaaaaccttcggactttgtcctgcttttgcgggacttttaacccaccgggcagagtatttcttgggacaattaatgggggaagttttcaggttattcagggacaaaaggctctttattcccccaggattactacaaagcatagcggggctcctatgcttggctctgttccgtaacctccaggccactggcatgggaaagctcccaaattccatggacagttcaaagtctctggttcctttcagggaacagggacatcttcctggggccttaatccattataggcaggccgtggatgttcatttctggttattttcagggaaggactgggccaggacagtttgcttttcatttctttcctcaaaagtattttaccattcaggcttacagtcccaaaattgcctttttggttccaagggagattttatggaaaagactctggacaagggacttctttggaattacaagttccctgataaccttccaagatccatacccactggacctaagaacctttccaaaattttaaatggaacagggctggatacctccatggaaattcaaggacaaaggaaaaaaaccccaattttattgggacttaaatagtccaaaccatggtttttcataattttcctatttgaaaatgtgctgattctttgaatgttttattctccagatttatgcacttttttttcttcagcaattggtaaagtatacttttgtaaacaaaaattgaaacatttgcttttgctccctaagtgccccagaattgggaaactattcaggagtattcatatgtttatggtaataaagttatctgcacaagttcaa

SEQ ID NO: 21057 - DNA, 1608 bp, Homo sapiens
  SIMILAR (962)..(1201): 711254mologous to Homo sapiens protease,accession number AF156962,Smith-Waterman Score=291.
tggaggcatcacactgcctgacttcaaactatactacaaggatacagtaaccaaaacagcatggtactggtactgagaggtgacagcgtgctggcagtgctcacagccctcgctcactcttggcgcctcctctacctgggctcccactttggcggcacttgaggaaaccttcagcctgccgctgcactgtgggagcccctttctgggctggccaaggctggagccggctccctcagcttgcggagaggtgtggagggagaggcataggcaggaaccggggctgtgcgtggtgcttgtgggcctgcgcgagttccgggtaggcgtgggcttggtggaccccacacttggagcggccagccggccccaccagccctgggcagtgaggggcttagcacctgggccagcagctgctgtgctcaatttctcgccaggccttagctgccttcccacggggcagggcttgggacctgcagcccaccatgcctgagcctcccccaactccctgggctcctgtgcagcccgagcctccccagtgagcaccgccccctgctccacagcgcccagtcccatcaaccacccaagggctgaggagtgtgggtgcacagcatggtactggcaggcagctccacctgcagccctggtgtgggtcgctctttgcagtaaatcttgctgctgctcactctttgggtccacactgcctttatgagctgtaacactcaccgtgaaggtctgcagcttcactcttgaagccagcaagaccacgaacccactgggaggaaagaacaactccagatgtgccaccttaagagctgttccttaaaattcgagggctaaatactgggcacctgttggccagttaaaagcgactagcacggccgccagactaaagacacgggtgtcaggctttctgggaaagggctctctaacaacccccgactcttcgaagttgggactgttggtttgcctggggcaagcgccagctcatgtcatcaccctcactgagccccaggtatgtttcaccattgagggccatgaaattgacttcctcctgggcactggcatggccttctcagtgttaatctcatgtcctggatgactgtcctcaaggtccgttaccatccgaggaatcctgggatagcctgtaaccaggtacttctcccaccttctcagttgtaattgggagactttgctcttttcacacaatgcaaaaacacaagggggtggcactcttacactgccaaagccatcaaaatcccaccggccctgggcagtgaggggcttagcacctgggccagcagctgctgtgctcaatttctcgccaggccttagctgccttcccacggggcagggcttgggacctgcagcccaccatgcctgagcctcccccaactccctgggctcctgtgcagcccgagcctccccgacgagcgctgccccctgctccacggcacacagtcccatcaaccacccaagggctgaggagtgcgggctcacggcacgggaccggcagccagctccaccagcagccccggcgtggggtccacactgcctttatgagctgtaacactcactgcgaaggtctgcagcggacacaccacctttaagaac

SEQ ID NO: 21058 - DNA, 388 bp, Homo sapiens
  SIMILAR (1)..(117): 1001254mologous to Homo sapiens tripartite motif protein TRIM10 beta,accession number AF220123,Smith-Waterman Score=189.
atcctcttagcacaattggagagccaggatggggacatcttgaggcaacgggatgaatttgatttgctggttgctggggagatctgccggtttagtgctcttattgaagaactggagtgagaagaatgagaggccagcaagggagctcctgacggtgaggcctgaaccggaaccctgccccacctgtgctgtcctgagactcttgcatctttgtcttgcctaagccatgtctccctgactcacacatctctgtatcccagatgggaggtgggtcagaggaccagaaagtctcaattctagttcatgcttttccaagagttccctggtcactttttgctctctggtctccacctttccgtcccaccatttgtcaaatagggaagatatg

SEQ ID NO: 21059 - DNA, 2535 bp, Homo sapiens
  SIMILAR (468)..(851): 611254mologous to Sus scrofa putative ring finger protein B30,accession number AJ251829,Smith-Waterman Score=357.
  misc_feature (1)...(2535): n = a,t,c or g
atggcatctccactctgtgacccagactgccacttggccccaaaagaatatttcttctgacagaggacagctgacatatcaccactttccttctactgtgagtgtctctggatgggcagaaaggaatggccagcccctggttatggtcatctaaggtcacctctgaaatgctgtgagcccctcttccttcctctcctctgctatttcccatctctgctgttggcaggagaatagaaccctgggctgccagagatgcaagtgtgtgacgatatgggtgctggtgcatatttagtatgtgcctgtgtccagccatgtgcatgtgtggggtgtgtgagtgtgtgacccagcccttcccccgtgggccaagcagagagagtgggccttggagggaagccatagcagcaggaccagcatgggccttctggttgcctctgtgaccagcctgggcagatggaagttcaactgccccattttgttcagggtaccctgaaggaagccgggtcactatcgaactgcggcccaaaaacttctgccgggcctgccttaccccgctactgtgagatacccaggcccagaccctggaggagtccccctacttgccccactctgcaaagaacccttccgtccctgggagcttccggcccaactggcagctggctaacgtggtggagaacattgagcgcctccagctggtgtccacactgggtttgggagaggaggatgtctgccaagagcacggagagaagatctacttcttctgtgaggatgatgagatgcagttgtgcgtggtgtgccgggaggctggggagcacgctacccacaccatgcgcttcctggaggatgcagcgggctccctatagggaacaaatccataagtgtcttaaatgtctaagaaaagagagagaggagattcaagaaatccagtcaagagaaaataaaaggatgcaagtcctcctgactcaggtgtccaccaagagacaacaggtgatttctgagttcgcacacctgaggaagtttctagaggaacagcagagcatcctcttagcacaattggagagccaggatggggacatcttgaggcaacgggatgaatttgatttgctggttgctggggagatctgccggtttagtgctcttattgaagaactggaggagaagaatgagaggccagcaagggagctcctgacggacatcagaagcactctaataagatgtgaaaccagaaagtgccggaaaccggtggctgtgtcgccagagctgggccagaggattcgggactttccccagcaggccctcccgctgcagagggagatgaagatgtttctggaaaaactatgctttgagttggactatgagccagctcacatttctctagaccctcagactttcccaccccaagcttcctcttgttccgaggaccatccagcggagctcagttctcctgacaaatgggcagaacttcaccagacaacccccagtcgtttttgaccgggccacctgtgtttctnggcccacactgggcatcacaggggggagacacacgtgggtggtgagtatagacctggcccatgggggcagctgcaccgtgggcgtggtgagcgaggatgtgcagcggaagggggagcttcggctgcggccagaggagggggtgtgggctgtgaggctggcttggggcttcgtctcggctctgggctccttcccccacacggctgaccctgaaggagcagccccggcaggtgagggtgtctcttgactatgaggtgggctgggtgaccttcaccaacgctgtcacccgagagcccatctacaccttcactgcctccttcactaggaaggtcattcccttctttgggctctggggcccgagggtccaagtttctccctgagctccttgagaaggagcagttacctactctcctctaagtacaggactcatatcaacccaagtaccatgtggacttgatccctggctgaatcacctggatgacttggaatagaaatgactgctttagaagatgggatggggccgggtggtaagggatagaagagaggactctcaatctactgatcaagtcctttccccaatgcccagtggatggcccagggtaccctggggacttcaggctgcctgccagttcctgcttcaccaccaatccgtgctttggcacagaagtagctgcatagaaagagcactggatttgaagtcagaagacctgggttcttgaaccagcctgtcaaccagttgtatgactttaaacaaggcatctcacctcttttcatcttgttttcttccaataatgttagagttcattgtaatcacattctctaagaaccatttagtttgtgttaactatgaaccaagcagtgtggtggccactggtgacttgaaaatgtagagaaaaaaaaaaaacctgctctatatctgaaagagctcttggggaagacagagaaacataaagaggaaattacagcacagtgtggtgggtgttacgggaagtccaaccccagcattatgggagttcgtcgacgcggccg

SEQ ID NO: 21060 - DNA, 571 bp, Homo sapiens
  SIMILAR (313)..(396): 891254mologous to Homo sapiens macropain subunit zeta,accession number X61970,Smith-Waterman Score=131.
agtactgactccatgtactttgctgctgcttttgtgatccctgttgaagtgacttcaagaagtgacaatgatgccaggcatttggttaagtatgatgtggtgagttaaccttaaaatagaaaatttggtcaataagcatttttattttggagccagagagctattttagggacctgctgcctggaaaggatatccttgggacagcagatcccttagttcctaatgaatagctgcatcaccaacacagcttctcctgaccatggtagggccatcagcagggtaactcagcccagcttattaacccttctgttttctttccagctagccacagtgcagcctggccagaatttccacatgttcacaaaggaagaacttgaagaggttatcaaggacatttaaggaatcctgatcctcagaacttctctgggacaatttcagttctaataatgtccttaaattttatttccagctcctgttccttggaaaatctccattgtatgtgcattttttaaatgatgtctgtacataaaggcagttctgaaataaagaaaattttaaaaaaaaaaaaaaa

SEQ ID NO: 21061 - DNA, 1661 bp, Homo sapiens
  SIMILAR (637)..(684): 931254mologous to Arabidopsis thaliana 20S proteasome subunit PAE1,accession number AF043524,Smith-Waterman Score=80.
tcagagccccacagggtccccagcggggcactgcctagtggagctgtgagaaggccaacatcctccagaccccagaatggtaggtccaccgacagcttgcactgtgtgcccaggaaagtcgcagacactcaacgccagtccaggaaagcagccaggagcagggctgtaccctgcaaagccacaggggcagagctgcccaaggctgtgggagcctaccttttgcatcatcatgactgtagccgactcattaccgcccaaagtcctggagccctcgaccgggcatggagaacaccgtggaggaaccctaagagagggaatcctgcgaagagaagtcaggtggtggccttgccggaaacgggaccaaagtcctctagctccctggtcctcctcctcctccggaccaaccaagccctcgtgaggaagcgcgttggcccaatcacctaggcgggaactactaccagccaataggaagcaggcacaggagggcgggctaaagaggtcgcggtcgcacgcgcagttggtccttagtactgcggccgtgtgggtgagttggctgccggagagttggtgtttttgtggagtcgtgttggtcctcagaatccccgcagtagccgcttgcctcctcctaccctcgccatgtttcttacccggtctgagtacgacaggggcgtgaatactttttctcgccgaaggaagattatttcaagtggaatatgacattgaggctatcaagcttggttcccacagccaattggctcccagacatcgagagggtgtgtgccctagctgtgggagaagagaatttacctcccccacttgatgggagcccaagcaggcatttgaggaaaattgttaggagatttgatgcttcacatagggttgttgcccattgagtggggcttaatttgcttgatgcttaagacttttaattcgataaagtccagagttgggagacacagaacccctggggttcaccttacaatggaggacattgacagtgggagagttttgaacccaagctgtgtcccaatctgggcttttccagttttggagaagaagatgcagaatccagggtgcccatgtcctcgtccccttgggagtagccatttatttatttgggaggagttgtatgagaaaggaacccccagcctgtttccataggggaccccattctggggaccctttgtaccagtgtggatggctcggagccaatttggctctggcttccagaggggtgcccccagagctcccttgccaagaaagtttccccccacaagtcctatgacctttgaaagaagcccatcaagtccttcacctcatccatccctcaaacaagtaatgggagggagaaagctgaatgccaaccaaaccattgagcctaggcccacagtgccagccctggccgagaatttcccacattgttcacaaaggaagaaacttgaagaggttatccaaggacattttaaggaatcctggatcctcagaacttctctggggacaatttcagttctaaataatgtcccttaaattttatttccagctcctgttccttggaaaatctccattgtatgtgcattttttaaatgatgtctggtacataaaaggcaagttctgaaataaagaaaattttaaaataaaaaaaaaaaaaaagggcggccgct

SEQ ID NO: 21062 - DNA, 382 bp, Homo sapiens
  SIMILAR (187)..(312): 351254mologous to Homo sapiens Human secreted protein, SEQ ID NO: 6393,accession number G02312,Smith-Waterman Score=58.
ccatttcgtagacacagctatgctcgtgcactttagacgagtggagtccagccgcagggctgagagtaatggatccagagtttcaaactctgcaagaacatggctgtaggactctggtatcactggcacaaaagccatttagccagaaagctgaaacttgttgaatgatagatacagtattcctcaccgcgcactaagagcggaacgtgaacttcagtctcccctagcgttcctccccttccttgctgacgtcatccaggagagccgcagactggaaacaacgctagtaacggcacttcctcatcacgtgacgagtcacgcccccccgtgcgggtggtccctccccctcagaccgcggtcgcgattacgctctctacggcct

SEQ ID NO: 21063 - DNA, 346 bp, Homo sapiens
  SIMILAR (97)..(216): 391254mologous to Paramecium bursaria Chlorella virus 1 A536L,accession number U42580,Smith-Waterman Score=63.
tttttttttttcccccacaaaagtatgactaggacaggtaagaacacccaagattccacaaaacgttaaggaactggagggtaggggcacagtaacagagagcacgtgaaaatgaaactgatacaaggatcaagaaattcacctttagacgactggagtccagccgcagggctgagagtaatggatccagagattcaaactctgcaagaacatggctgtaggactctggtatcactggcacaaaagccatttagccagaaagctgaaacttgttgaatgatagatacagtattcctcacctgaataaaatccacaaaaatataatttaagaagcccaccattcatt

SEQ ID NO: 21064 - DNA, 1323 bp, Homo sapiens
  SIMILAR (472)..(720): 981254mologous to Homo sapiens Human G protein-coupled receptor hHI7T213 SEQ ID NO:1,accession number Y90761,Smith- Waterman Score=417.
atggtggtcagggttcttcctgatgtgaaatccagctccctcagatatgggggtggaactgcccagagaagaacagctgtatctacgactggtcctgaaagtggtccttgttccaagccccctctctgggcatattccaccaatacctcttcaagctctgctggcctgggctactccatccttcagaaatccccagatgagaagcaggcaccagaatgttcacacatgagcaagagcacgaggccagccccccaggagtcactaaatgggagcctcagtgatgggccttcccccatcaatgtggagaatgtggcacttctgttagctaaggccatgggccacgatcgggcttggtcactgctacaggaatgtggtctggcccttgagttgtcagagaagtttaccagaacctgcgatatcctgaggattgctgagaaaaggcagagggtcatcagactggggtttctgagcatggattcaaccatcccagtcttgggtacagaactgacaccaatcaacggacgtgaggagactccttgctacaagcagaccctgagcttcacggggctgacgtgcatcgtttcccttgtcgcgctgacaggaaacgcggttgtgctctggctcctgggctgccgcatgcgcaggaacgctgtctccatctacatcctcaacctggtcgcggccgacttcctcttccttagcggccacattatattgagctcctcgaaagaagggtctgcgccgcccccttctgcgcggtcatgccgagccagcacctgggcctggaactgggccgcagcccccagcttcacccaccacctccctaccatggacccctgcaaagtgaacgagcttcgggcctttgtgaaaatgtgtaagcaggatccgagcgttctgcacaccgaggaaatgcgcttcctgagagagtgggtggagagcatgggaggtctgacccagaccagtcacagtggttgtggccacaggggtgcttgtgtcactccacccccaactttaggtggcttagaacagggagacagactcaatttgtttgggagaagtaagagaagagaacaagagtctctgcttggtaatccagagaattatcctgaatattgtccaaaaccatcaaggcagtacctctacaagtctgcaagaaccacagctttactggtcttgggatgcctgctaaaacacatacagtttagatcaaaatactcaaatctgtccagatatctggaaaggcttcccaagaaagttgagtacaaaaaatcccagacagaacactacaataaatactttagctcttcagtgcccagacactga

SEQ ID NO: 21065 - DNA, 342 bp, Homo sapiens
  SIMILAR (1)..(141): 861254mologous to Homo sapiens alpha integrin interacting protein 63,accession number AJ131721,Smith-Waterman Score=207.
atggcaagttccaatcctgtgtatatggagatggaaaaaggagatctaccaacaaggttaaagttactagatgacgaggttccttttgatagtccgttgttggttgtttatgctacccgctgttttgcccaaactgccttagacataatggcagttgaaaatcagaagtttttggaggaaaaagaggtaactagtccacctccagaagaagacaggttccaggagcttaaagtagcaacagcagaagcaataggcagtgagcagacctgcaatgaaggggaacagctgttctcagaacgaccaactgcagaggacactctgttgagtgggaggttcctgtag

SEQ ID NO: 21066 - DNA, 4939 bp, Homo sapiens
  SIMILAR (1840)..(3693): 901254mologous to Homo sapiens alpha integrin interacting protein 63,accession number AJ131721,Smith-Waterman Score=2813.
tttcgatgaacgcgaggggagactgaagttcacgttttgctcttagtgcgcggtgagttccccggcgctgggccgggagacaagatccgatctactgagagctgcgaggtactgccctggatgtggtggagctgggctgggacctccgggctgctggtctgtgagcctggctttgaaaattggttactgggtctcctctcaagaaatctcaagatattaaagttactgctgttaaaaaggtgaggaatactgtatctatcattcaacaagtttcagctttctggctaaatggcttttgtgccagtgataccagagtcctacagccatgttcttgcagagtttgaatctctggatccattactctcagccctgcggctggactccagtcgtctaaagtgcacgagcatagctgtgtctcggaaatggttggctttgggcagttcaggaggaggactccatctcattcagaaagaagggtggaagcacaggctttttctttcacacagggaaggtgcaatttctcaagtcgcctgttgtttacatgatgatgattatgttgctgtagctaccagtcaaggtcttgtggttgtttgggaattaaatcaagagcgtcgtgggaaaccggaacaaatgtatgtgtcttcagaacacaaaggccgaagagtcacagctctctgctgggatacagctattcttagagtttttgtaggtgatcatgctgggaaggtttctgctatcaaactcaatacttctaaacaagcaaaggcagctgctgcttttgtgatgtttcctgttcagacaatcacaactgttgactcctgtgttgtacagttagattatttggatggaaggctacttatatcttcacttactcgatccttcttgtgtgacactgagagagaaaagttttggaaaattggaaacaaggaaagagatggagaatatggagcttgtttctttcctggaagatgttctgggggccagcaacctctgatatattgtgctcgcccaggctctaggatgtgggaagtgaactttgatggagaagttataagtacacatcagttcaagaaactcctctcgttgccacctctccctgtgattactctaagatcagaacctcagtatgatcatacagctggatcctcccagtctttgtctttccccaaactcttacatcttagtgagcattgtgtgctgacttggacagaaagaggaatttatattttcattgcctcagattgtctcggctcttgttttgagtgaagtcaaagatattcaggatgtggctgtctgtaggaatgaattgttctgtttgcacctaaatgggaaagtctcacatctctccctgatatctggggagcgctgtgtggaacgcctgctaagaagaggcctatggaacttggctgctcgtacatgctgtcttttccaaaattctgtcattgccagcagagcaagaaaaactttgactgcagataaattggagcatttgaaatcttagctggaccatggcacctacaatgatctaatttctcaaatggaagaattgatcttaaaatttgaacctttggattcagcttgtagcagtagaagaagctccatttcatcacatggaaaagtttcagcatcttggactctggtatttatcgtatcattagtagtagaagaggcagtcagtcagatgaagactcttgctcccttcacagccaaaccctctcagaagatgagagatttaaagaattcacctcacagcaggaagaggacctgccagatcagtgttgtggctcacacggaaatgaagacaatgtttctcatgctccagtgatgtttgagacagataagaatgaaacttttctcccgttcggcattccattaccatttcgttctccatctcctcttgtgtctcttcaggctgtcaaagaaagtgtttctagctttgtgccgtaaaaacctactgagaagattgggcacccccttcacacgaagcccctgatcctgaaagtgagacccagagctccaggggtgatgagcaatcatgtgaagaggatgtgagttcagatacctgccccaaaggaggaagacactgaggaggaaaaagaggtaactagtccacctccagaagaagacaggttcccaggagcttaaagtagcaacagcaggaagcaatgaccaagctacaggaccctctggttttatttgaatccgagtctctgagaatggttttacgaggaggggctttcacatttagaggaaacatttgccatgaaggacttttcaggtgtttcagatactgacaactcatccatgaaattgaaccaggatgtgctattagttaatgaatcaaaaaagggaatattagatgaagataatgaaaaagaaaaaagggactctttaggcaatgaagaatctgttgataaaacagcatgtgaatgtgtaaggagtccaagggagtctttggatgacctgtttcaaatatgttctccatgcgccattgcaagtggtcttcggaacgacctggctgaattgacaacattatgtttggagttgaatgtattgaattctaagatcaaaagcaccagtggacatgtggaccacactttgcaacagtactctcctgaaattctggcttgccagttcctgaagaagtacttttttctcctgaacttgaaaagagcgaaggagagtatcaagcttagttacagtaatagcccttctgtttgggatacttttattgaaggattgaaagaaatggcaagttccaatcctgtgtatatggagatggaaaaaggagatctaccaacaaggttaaagttactagatgacgaggttccttttgatagtccgttgttggttgtttatgctacccggttgtatgaaaagtttggggagtctgctcttcgatccttaatcaagttctttccatccattttgccatcggatatcatacaactttgtcatcatcatcctgctgagtttttggcctatttagacagtctggtgaaatcaaggcctgaagatcagcggtcatcttttcttgagtcccttctgcaaccagagtctttaaggttggattggctgcttttggcagtgtcccttgatgctccaccaagcaccagcacaatggatgatgaaggttatcccaggcctcattcacacttgctttcctggggttacagtcagctgatccttcatctaattaaacttcctgcagattttataaccaaagagaaaatgacagacatctgcaggtcttgtggtttctggcctggatatctaattctctgtttggagctggagagaagaagagaggccttcaccaatattgtgtatctgaatgatatgagcctgatggaaggggacaatggttggatcccagagaccgtggaggaatggaagcttctccttcatctcatacagagcaagagcacgaggccagccccccaggagtcactaaatgggagcctcagtgatgggccttcccccatcaatgtggagaatgtggcacttctgttagctaaggccatgggcccagatcgggcttggtcactgctacaggaatgtggtctggcccttgagttgtcagagaagtttaccagaacctgcgatatcctgaggattgctgagaaaaggcagagggccttgatacaaagcatgcttgaaaaatgcgatcggtttctctggtcccagcaggcctagtgggagaagattcagcaggatgtcatgacattttgagaaaaactaaatcatgctcctgaaccttctgaacgcatttgttattgaaggaaagacaccacccccaaatcctgccatcttattggggctacttttgtcagtgtctgtacccttggcatcggcatctgtgactctttatccatgacctcagtgtttcttaaccaaagttgtactcagcatttcttaaccaaagttgaattttgaaaagagtcagtccttgtttgctggaattagaatgttaatgtcctagtattattccgaactaccgggattaacggcttgttgctagtggattatgacagattcttttcttactgtggcttccatgttgggagcagaagcttttcatcctggtcacatgaagacagatggtattattgactggagttgaattatttttatatcttgtctggcacaatatggaaattacctgaaaataagatggtgtataatggaattaacacccaaaaataagtagaacatctgaagatttgaaatttggatatttaagtaaaatgggactgggtggcagtggctcagcgcctgttaatcccaaccctttgggaaggtaaagacgggaggatcacttgaggccaggagttcaagaccagcctgggcaacatagtgacgaatgcatctctacaaaaaataaaaaaaattagctaggccatagtacctgaggcccaggaggttccagggccgcaattgagatgtgttttgggccattgcacacccagtctggggtgacagagaaagaccctgtctcaaaaaccaaattaaataaaatatcttcatatataaattaagctaattaaaaatatttttccctgtatttatttaatattttctaatctgaacccatatacagctgactaattcattcttagaaatgtgttatctgtaatctttcctaaacagagtagcccacaagaatcatgcactttttaaaattatttctaagaagcccataacaaagcgtgtgtactaataaagactgcagcaagcacttgtgttatttaaattatgtaaatagattgtcatttgtcaggctcctgtacatttacatagcatgttatattaataataaatgtaaaatatgactaaagttttcattggaacccaatgtagacaggaggtttattatgagcattttgcagaaaggtgtggagtaagtaaagtgttggatgccctgaaaaaaaaaaaaaaa

SEQ ID NO: 21067 - DNA, 364 bp, Homo sapiens
  SIMILAR (26)..(106): 381254mologous to Mus musculus alpha-1 type 1 collagen,accession number U38544,Smith-Waterman Score=47.
ctgcggcccctgccggttacataactcgttgcgggctccgcgcggtcccacttcccggctcccttcgcctccaggatgcgctgagccctacaacacccccagcggccgccggctcccccacgaggtgtgaatgacagaggtggtgccatccagcgcgctcagcgaggtcagcctgcgcctcctctgccacgatgacatagacactgtgaagcacctgtgtggcgactggttccccatcgagtacccagactcatggtatcgtgatatcacatccaactagaagttcttttcccttgctgcaacctacagaggtgccattgtgggaatgatagtagctgaaattaagaacaggaccaaaatacat

SEQ ID NO: 21068 - DNA, 2554 bp, Homo sapiens
  SIMILAR (1275)..(1778): 691254mologous to Rattus norvegicus zinc finger protein HIT- 4,accession number AF277900,Smith-Waterman Score=685.
atgtctccagcacccacaggtgtgtctgccatcccccgccactgtcaggtgctgaaaactcagaatctgggggacacagaatggactgcgtttcagttaccagaaggctttcctgacaccctcatgatgcccacagggtgctccacttgcaccccaggacagaggagtgacaatggaggattctgtttttatgacactctggaactggccaaacaaattgccggtgctggcacccagagtggtgaaggcggagctgagaagcgcgatggcgatgtgctacgtcttgtttcacagttgtcaaaactcagtgtcagaagtggcgatgacaaggacgaagaagggatgaggaagaacagagacaagaacatgacccaagagaaggacagaacgctaaaccggggaccacaagatgtgctgccaagatgggaccccgacaaaccacaaaagctacagattccctttactccctgggaagtacccaatctggagaagaaagtcggagctgggggtgtgggttctgtagggccggtctgtaaagggccaggaacgtccgagccccggcggccgccccccgccacctcacctcgtgggggagccggcggccgctgggggtgttgtagggctcagcgcatcctggaggcgaagggagccgggaagtgggaccgcgcggagcccgcaacgagttatgtaaccggcaggggccgcagccgggacggaggcggcagcccgcggcacttccgcctcccgctccctgccggcagcgcagcccggaagcccattggccgccgcccccacgtggccccgccccctgaggcaggcgctgccgccatgttgggagcgggcaggctccgtgcgaagccaggcccaggatcccgtatgcggggcactgctttgtcacgaagtccctgtggcgtcttgaagaaggcattccccacccgccaaatggcgtccatgcccccgacgcccgaggcccaggtgagtcgagggaccaatactctttgaggatctggctgtgtatttttctcaagaggagtgcgtgactcctgcaccctgcccagaggtccctcagcaaagatggtacaaaagagtctttggaggatgcggctttgatgggagaggaaggcaagcctgagattaatcagcagttaagcctagagtctatggaacttgacgagcttgccttagaaaagtaccccattgctgcaccccttgtcccttacccagaaaaatcctctgaggatggagttggaaaccctgaagcgaaaatattaagtggaactcccacttacaagagaagggtcatcagccttttagttaccattgaaaaccacaccccattagtagaactctctgaatatttaggaaccaacacactttctgaaattcttgattctccctgggaaggagccaaaaatgtgtacaaatgtcctgagtgtgaccaaaacttcagcgatcattcatacctagttttgcatcagaaaattcattcaggagagaaaaaacataaatgtggtgactgtggaaagatcttcaatcatagagccaacctgaggacacacaggagaatccatactggtgagaaaccttataagtgtgccaagtgcagtgccagctttcgccagcactctcatctatcccgacacatgaatagccacgtaaaggagaagccctatacatgtagcatatgtggtagaggttttatgtggctcccaggattggcacagcatcagaaaagccacagtgctgaaaacacctacgaatctactaactgtgataaacattttaatgagaaaccaaatcttgctttgcctgaggaaacattcgtatcaggcccccagtaccagcacactaagtgcatgaagagcttcaggcagtccttatatcctgccctttccgagaagagccacgacgaggactctgaacgctgcagcggatgatggggacaatttcttctcattctcaaaattcaagcccttacagtgtcctgactgtgacatgacctttccttgtttctctgagcttatttcccatcagaacattcatacagaggaaaggccccattaagtgcaaaacatgcgaggaaagttttgctttggactcagaacttgcatgccaccagaagagccacatgctagcggaacctttttaaatgtaccgtgtgtgggaaaactttcaagtcgaatttgcatctcattactcataagcgaactcacattaaaaaacaccacgtaaagtaaatataacaaattgttattagtgattgggcttttcagtatctgtatggtgggaagcagttactgtatatgtcccaggcaatgtgctaagcactttacacacattcccatgtaatacttaattctcagcacaaccttgatttaggcagtatcatttccattttataagtagggatgcaaaatccgtgtcactaaactagtgaatgaacccacggatttgaactacagttactgtacaactgtgagccagaagaagatacacaacttttgtttaaattcaattttcattaaaatgaaggctcttgctaaagttattttaa

SEQ ID NO: 21069 - DNA, 497 bp, Homo sapiens
  SIMILAR (267)..(130): 951254mologous to synthetic construct human HMG-CoA reductase, fragment II,accession number A10464,Smith-Waterman Score =220.
  misc_feature (1)...(497): n = a,t,c or g
cccttggaaaaccngntcancccccaggcatcccctgacccggactggaaacggatataaaggttgcgtccagctacacttgtatgaagtttctgtagacgtgcaaatctgctagtgctggcaaatgccttctttatcactggcgaacccttcagatgtttcgagccaggctttcacttctgcagagtcacaagcacgtggaagacgcacaactgggccacgagtcatcccatctgcaaggactcggctgctggcacctccaccaagctacacagtatatgttagagaagcaagcacatgttacccaaaaatgctcatgcttgacccaaaaggtatcactaattgtccttaaaactcttctcattgccttacttatgatgtatttttaaactggcaaatatataaatgccaacttacacctattgctctgcagcctctattggtgctggccaccctcgtgccaagcttggcgtaagcatgctatagatgtgccccgt

SEQ ID NO: 21070 - DNA, 2469 bp, Homo sapiens
  SIMILAR (115)..(1362): 731254mologous to Xenopus laevis 3-hydroxy-3-methylglutaryl- coenzyme A reductase,accession number M29258,Smith-Waterman Score= 1504.
atgttgtcaagactttttcgaatgcatggcctctttgtggcctcccatccctgggaagtcatagtggggacagtgacactgaccatctgcatgatgtccatgaacatgtttactggtattgctggccttttcacaattttctcaagttttgtattcagtacagttgtcattcacttcttagacaaagaattgacaggcttgaatgaagctttgccctttttcctacttttgattgacctttccagagcaagcacattagcaaagtttgccctcagttccaactcacaggatgaagtaagggaaaatattgctcgtggaatggcaattttaggtcctacgtttaccctcgatgctcttgttgaatgtcttgtgattggagttggtaccatgtcaggggtacgtcagcttgaaattatgtgctgctttggctgcatgtcagttcttgccaactacttcgtgttcatgactttcttcccagcttgtgtgtccttggtattagagctttctcgggaaagccgcgagggtcgtccaatttggcagctcagccattttgcccgagttttagaagaagaagaaaataagccgaatcctgtaactcagagggtcaagatgattatgtctctaggcttggttcttgttcatgctcacagtcgctggatagctgatccttctcctcaaaacagtacagcagatacttctaaggtttcattaggactggatgaaaatgtgtccaagagaattgaaccaagtgtttccctctggcagttttatctctctaaaatgatcagcatggatattgaacaagttattaccctaagtttagctctccttctggctgtcaagtacatcttctttgaacaaacagagacagaatctacactctcattaaaaaaccctatcacatctcctgtagtgacacaaaagaaagtcccagacaattgttgtagacgtgaacctatgctggtcagaaataaccagaaatgtgattcagtagaggaagagacagggataaaccgagaaagaaaagttgaggttataaaacccttagtggctgaaacagataccccaaacagagctacatttgtggttggtaactcctccttactcgatacttcatcagtactggtgacacaggaacctgaaattgaacttcccagggaacctcggcctaatgaagaatgtctacagatacttgggaatgcagagaaaggtgcaaaattccttagtgatgctgagatcatccagttagtcaatgctaagcatatcccagcctacaagttggaaactctgatggaaactcatgagcgtggtgtatctattcgccgacagttactttccaagaagctttcagaaccttcttcttctccagtacctaccttacaggggttataaattactccctttggtgatggggagcttgttgtgagaatgttattggatatatgcccatccctgttggagtggcaggacccctttgcttagatgaaaaagaatttcaggttccaatggcaacaacagaaggttgtcttgtggccagcaccaatagaggctgcagagcaataggtcttggtggaggtgccagcagccgagtccttgcagatgggatgactcgtggcccagttgtgcgtcttccacgtgcttgtgactctgcagaagtgaaagcctggctcgaaacatctgaagggttcgcagtgataaaggaggcatttgacagcactagcagatttgcacgtctacagaaacttcatacaagtatagctggacgcaacctttatatccgtttccagtccaggtcaggggatgccatggggatgaacatgatttcaaagggtacagagaaagcactttcaaaacttcacgagtatttcccctgaaattgcagattctaagccgttaagtggtaactattgtactgacaagaaacctgctgctataaattggatagagggaagaggaaaatctgttgtttgtgaaactgtcattccagccaaggttgtcagagaagtattaaagactaccacagaggctatgattgaggtcaacattaacaagaatttagtgggctctgccatggctgggagcataggaggctacaacgcccatgcagcaaacattgtcaccgccatctacattgcctgtggacaggatgcagcacagaatgttggtagttcaaactgtattactttaatggaagcaagtggtcccacaaatgaagatttatatatcagctgcaccatgccatctatagagataggaacgatgctaggtgttcaaggagcatgcaaagataatcctggggaaaatgcccggcagcttgcccgaattgtgtgtgggaccgtaatggctggggaattgtcacttatggcagcattggcagcaggacatcttgtcaaaagtcacatgattcacaacaggtcgaagatcaatttacaagacctccaaggagcttgcaccaagaagacagcctga

SEQ ID NO: 21071 - DNA, 4897 bp, Homo sapiens
  SIMILAR (366)..(776): 941254mologous to Mesocricetus auratus HMG CoA reductase,accession number X00494,Smith-Waterman Score=685.
ctaggaccaataggcaggccctagtgctgggactcgaacggctattggttggccgagccgtggtgagagatggtgcggtgcctgttcttggccctgcagagagctgtgggcggttgttaaggcgaccgttcgtgacgtagcgccgtcaggccgagcagcccccaggcgattggctagacaatcgaacgatcctctcttattggtcgaaggctcgtccagctccgagcgtgcgtaaggtgagggctccttccgctccgcgactgcgttaactggagccaggctgagcgtcggcgccggggttcggtggcctctagtgagatctggaggatccaaggattctgtagctacaatgttgtcaagacttttttcgaatgcatggcctctttgtggcctcccatccctgggaagtcatactggggacagtgacactgaccatctgcatgatgtccatgaacatgtttactggtaacaataagatctgtggttggaattatgaatgtccaaagtttgaagaggatgttttgagcagtgacattataattctgacaataacacgatgcatagccatcctgtatatttacttccagttccagaatttacgtcaacttggatcaaaatatattttgggtattgctggccttttcacaattttctcaagttttgtattcagtacagttgtcattcacttcttagacaaagaattgacaggcttgaatgaagctttgccctttttcctacttttgattgacctttccaagagcaagcacattagcaaagtttgccctcagttccaactcacaggatgaagtaagggaaaatattgctcgtggaatggcaattttaggtcctacgtttaccctcgatgctcttgttgaatgtcttgtgattggagttggtaccatgtcaggggtacgtcagcttgaaattatgtgctgctttggctgcatgtcagttcttgccaactacttcgtgttcatgactttcttcccagcttgtgtgtccttggtattagagctttcttcgggaaagccgcgagggtcgtccaatttggcagctcaaccattttgcccgagttttagaagaagaagaaaataagccgaatcctgtaactcagagggtcaagatgattatgtctctaggcttggttcttgttcatgctcacagtcgctggatagctgatccttctcctcaaaacagtacagcagatacttctaaggtttcattaggactggatgaaaatgtgtccaagagaattgaaccaagtgtttccctctggcagttttatctctctaaaatgatcagcatggatattgaacaagttattaccctaagtttagctctccttctggctgtcaagtacatcttctttgaacaaacagagacagaatctacactctcattaaaaaaccctatcacatctcctgtagtgacacaaaagaaagtcccagacaattgttgtagacgtgaacctatgctggtcagaaataaccagaaatgtgattcagtagaggaagagacagggataaaccgagaaagaaaagttgaggttataaaacccttagtggctgaaacagataccccaaacagagctacatttgtggttggtaactcctccttactcgatacttcatcagtactggtgacacaggaacctgaaattgaacttcccagggaacctcggcctaatgaagaatgtctacagatacttgggaatgcagagaaaggtgcaaaattccttagtgatgctgagatcatccagttagtcaatgctaagcatatcccagcctacaagttggaaactctgatggaaactcatgagcgtggtgtatctattcgccgacagttactttccaagaagctttcagaaccttcttctctccagtacctaccttacagggattataattactccttggtgatgggagcttgttgtgagaatgttattggatatatgcccatccctgttggagtggcaggacccctttgcttagatgaaaaagaatttcaggttccaatggcaacaacagaaggttgtcttgtggccagcaccaatagaggctgcagagcaataggtcttggtggaggtgccagcagccgagtccttgcagatgggatgactcgtggcccagttgtgcgtcttccacgtgcttgtgactctgcagaagtgaaagcctggctcgaaacatctgaagggttcgcagtgataaaggaggcatttgacagcactagcagatttgcacgtctacagaaacttcatacaagtatagctggacgcaacctttatatccgtttccagtccaggtcaggggatgccatggggatgaacatgatttcaaagggtacagagaaagcactttcaaaacttcacgagtatttccctgaaatgcagattctagccgttagtggtaactattgtactgacaagaaacctgctgctataaattggatagagggaagaggaaaatctgttgtttgtgaagctgtcattccagccaaggttgtcagagaagtattaaagactaccacagaggctatgattgaggtcaacattaacaagaatttagtgggctctgccatggctgggagcataggaggctacaacgcccatgcagcaaacattgtcaccgccatctacattgcctgtggacaggatgcagcacagaatgttggtagttcaaactgtattatctttaatggaagcaagtggtcccacaaatgaagatttatatatcagctgcaccatgccatctatatagattggaacgggggggggtgggaccaacctactacctcagtaggccgtagctgcagatgctaggtgctcaaggatcatgcaaagataatcctggcgaaaatgcccggcagcttgcccgaattgtgtgcgggaccgccctggctggggaattgtcacttatgggcagcattggcagcaggacatcttgtcaaaagtcacatgatttcacaacaggtcgaagatcaattttacaagacctccaaggagcttgcaccaagaagacagcctgaatagcccgacagttctgaactggaacatgggcattgggttctaaaggactaacataaaatctgtgaattaaaaaagctcaatgcattgtcttgtggaggatgaatagatgtgatcactgagacagccacttggtttttggctctttcagagaggtctcaggttctttccatgcagactcctcagatcttgaacacagtttagtgcttttacatgctgtgctcttttgaaggggttttcaacaaggaatattgtatgttaaagcatcagaggtgggtaatctacagcttcacctctggaagggcaatataagctggggaaaaaaggtttgatgaaaatcttgaagttcatggtgatcaaggcaattgaccttctccctcactcctgccagttgaaaatggatttttaaaattgattactgtagctgatgaaactcctgattttgtaggtaatttattaagtctgggatgtacaacttcaagaagtaaggagctaagtttctaagttcattttttgtaaattaatacttcatttggtgctggtctattttgcattttggggggtaatcagcactattcttcagaaggggacctgttttcttcaagggaagaaatactcttattcccaaactacaggaataatgtgttaaacatgctaaatagttctatcagggaaaacaaatcactgtatttatctccgcaggcttatttgttcagagggggccttttgttttaaatattaaatgttttaaatataaatgtttgtctgggattgggctattaacatgtcttttcaggcattagggcttttaagaaccacaggggttttgtattctttacctaaagatatcagagctcttaagtgttgcttaggatgaggggtgactgtccaagtaccaagccaagcgctgggaccttagaaatcgattgtagaaacacagttttgaaagaaaaataccatgtctctaagccaactttaattgcttaaaagacatttttatttacgttgaaaaatctagttttttttgtaaaactgtattcaaatcctgtatatgttgtaaataaaacttatgcctagtttattggaagtgttccaagaaataaaaatcaactctgtgtacctgataaaaatactcctagccccgggcccagagaaagataatgttcctttaaaagttgtccccaggaaacccctggcttgctttgccgagccctaatgaaaggggaaagtccagctttccaggagcccagtgaaggagccacgtgaatggccctaggaactgtgcctaggttcctgtggccagggaggttggtgacttgaaacatttcacacagggctcttttgatgggacccacggaacgctctttagcttttcttcaggggggttcagcagagttattgaatcttaatttttttttaatgtacaagttttgtataaataataaagaactccttaattttgtattacatctaaatgcttcaagtgttgctccttggaaagcctgatgatgtcctcttgtagaagatggactctgaaaaacattccgaggaaacccatggccagccatggagagcccccttagtgattgtgtcctgccattgttattgtggaagatttacccttttctgttgtacagtaaagccttaaattgcttttgttgtgacttttttagcccagtgacttttttctgagcttttcatggaagtggcgagtgaaaaatatgttgagtgttcattttagtgactgtaattaatatcttgctggattaatgttttgtacaattactaaattgtatacattttgttatagaatacttttttctagtttcagtaaataatgaaaaggaagttaataccaaaaaaaaaaaaaaaaaa

SEQ ID NO: 21072 - DNA, 482 bp, Homo sapiens
  SIMILAR (221)..(448): 971254mologous to Homo sapiens putative ribosomal protein (AA 1-184),accession number X53777,Smith-Waterman Score=379.
  misc_feature (1)...(482): n = a,t,c or g
tgcaaatcaagaggttccaatcttcgtgttcactttaagaacactcgtgaaactgctcaggccatcaagggtatgcatatacgaanagccacgaagtatctgaaagatgtcactttacagaaacagtgtgtaccattccgacgttacaatggtggagttggcaggtgtgcgcaggccaagcaatggggctggacacaaggtcggtggcccaaaaagagtgctgaattctctggtcattgagcatatccaagtgaacaaagcacctaagatgcgccgccggacctacagagctcatggtcggattaacccatacatgagctctccctgccacattgagatgatccttacggaaaaggaacagattgttcctaaaccagaagaggaggttgcccagaagaaaaagatatcccagaagaaactgaagaaacaaaaacttatggcacgggagtaaattcagcattaaaataaatgtaattaaaagg

SEQ ID NO: 21073 - DNA, 879 bp, Homo sapiens
  SIMILAR (616)..(876): 961254mologous to Homo sapiens putative ribosomal protein (AA 1-184),accession number X53777,Smith-Waterman Score=423.
atggctgcatcaagcctagctgtacggaccttttccacagtacgggtctgggccctgtgcccctgggtaacctgtccaggcgcactggccttcctgctgctccctgcacactcagggcctcccagcgccatcagggcccttgtgcttgctgttccttctgcctggaatgcacttcctcctttatctcatcaaggttttgactcagatgttatcttcatgaaatcttacctgacaatcttgattaaactgaacattgggaacgtggccatcaacaagcagatggatgaacagactggggtgcacccttctgtggggatactgctcagccaggaaagggagcacctgcaccaatggctccacgagcagggctcggagctggccctctcctgcttcggagccgcgctgactggtgaggaaagtgggaaccgccataccgtgtctggattcggtgggatcgtgtgtgtccagcagcagtcgcgcagcgcctggcgtgagtgcaaattcaaggattcggtcaaaggagaaccaatagctgcaaattgtaaatcctgtgaaattgtctttgggttccgtcctgagaggccggttcgggaacgtgccctgtgtaaaagtttggcagagagtaacgctgaacttaagggtttagatgtagattctctggtcactgagcatatccaagtgaacaaagcacctaagatgcgccgccggacctacagagctcgtggtcggattaacccatacatgagctctccctgccacattgagatgatccttactgaaaaggaacagattgttcctaaaccagaagaggaggttgcccagaagaaaaagatatcccagaagaaactgaagaaacaaaaacttatggcacaggagtaa

SEQ ID NO: 21074 - DNA, 1728 bp, Homo sapiens; identical to SEQ ID NO: 7211
  SIMILAR (64)..(1269): 751254mologous to Homo sapiens myoferlin,accession number AF182316,Smith-Waterman Score=1546.

SEQ ID NO: 21075 - DNA, 952 bp, Homo sapiens
  SIMILAR (316)..(888): 411254mologous to Rattus norvegicus ribosomal protein L22,accession number X60212,Smith-Waterman Score=191.
ggcacgaggagcaagcctggagggtgcctggattggtgaggcccgtgtggctacttctgtggaagcagtgctgtagttactggaagataaaagggaaagcaagcccttggtgggggaaagtatggctgcgatgatggcatttcttaggacacctttggattaataatgaaccacactctcttctgaagcaagctgttcgaatcatctgatatttatactgaatgagttactgtaagtacgtattgacagaattacactgtactttcctctagggtgatctgtgaaaatggttcgctattcacttgaccccggaggaaccccacgaaaatcatgcaaaatcaaagaggttccaatcttcgtgttccctttaaggaccactcgtgaaaactgcctcaggcccatcaaagggtatgccatatacgaaaaagccccacgaagtatcctgaaagatgtccaccttaccagaaaccagtgtgtccccattcccgaccgttacaatgggtgacagttgggccaggtgtgccgcaggcacaagcaaatggggcctgggaccaccaagggtcgggtggccccaaaaaggagtgctgaaatttttgcctgcacatgccttaaaaaccgcagagatgtaatgctgaactctaagggtttagatgtagattctctggtcattgagcatatcccaagtgaacaaagcaccctaagatgccgccgccggacctacagagctcatggtcggattaacccatacatgagctctccctgccacgattgagatgactccttacggaaaaggaacagattgttcctaaaccagaagaggaggttgcccagaagaaaaagatatccccagaagaaactgaaagaaacaaaaacttattggcacgggagtaaatttcagcattaaaataaatgtaaataaaaggaaaaaaaaaaaaaaaaaaaaagtcgacgc

SEQ ID NO: 21076 - DNA, 1926 bp, Homo sapiens
  SIMILAR (133)..(456): 991254mologous to Homo sapiens bA288H12.1 (insulin-like growth factor 2 receptor),accession number AL353625,Smith-Waterman Score=572.
atgagcaccaccccctgctccacggagcccagtcccatcgaccacccaagggctgaggagtgcgggcgcatggcaactccacctgcagcccccgtgtgggatccactgggtgaagccagctgggctcctgagtctgacctggctggaaatgagtacgacctgactggcctaagcacagtcaggaaaccttggacggctgttgacacctctgtcgatgggagaaagaggactttctatttgagcgtttgcaatcctctcccttacattcctggatgccagggcagcgcagtggggtcttgcttagtgtcagaaggcaatagctggaatctgggtgtggtgcagatgagtccccaagccgcggcgaatggatctttgagcatcatgtatgtcaacggtgacaagtgtgggaaccagcgcttctccaccaggatcacgtttgagtgtgctcagatatcgaccgaatgttccgtgaggaatggaagctctattgttgacttgtctccccttattcatcgcactggtggttatgaggcttatgatgagagtgaggatgatgcctccgataccaaccctgatttctacatcaatatttgtcagccactaaatcccatgcacggagtgccctgtcctgccggagccgctgtgtgcaaagttcctattgatggtccccccataaccgaatgttccgtgaggaatggaagctctattgttgacttgtctccccttattcatcgcactggtggttatgaggcttatgatgagagtgaggatgatgcctccgataccaaccctgatttctacatcaatatttgtcagccactaaatcccatgcacggagtgccctgtcctgccggagccgctgtgtgcaaagttcctattgatggtccccccatacgtgtgtctcatgaccccagctatggctgttatcacacggtctcatatctaaggcatcgttcagaacgtctgctactctatacatttaaaatgacttgtagggacaggcccagtcctaccttccactctgacaacgggacaggcttccacagttctccagataaacacgtactcacaaccatcctgaagctgaaatgctggccctatatgagtgctgagagacacgacaacaatgtgaagctaccctgtaaactaaatatggtatcacagaaaagctggaaaaccaagggtccaagaactttctggaactacccagtgtctcaatggcaacaagaaaccagagaaggagggggcagtccacaggcagggaatgcacagatgtgcccaaaaacagaccagcaggctgaactgggcaacctaggcatctccccgtggaacaccaaacctggatccttcctgagactgagagaagaagtgggcggcccaagctcagtgccctttttctcaggtgagaaagaaggacccccgtgtgttggccgaatgggaatcaccattgcaatacaaatgatctgcctggtgaatgctgagctgaaccccacattcgtcagggcatgctcagccttctgggtggcagcccccttgagccctctcttggcagcagctgagcatttccaaagaagaaaaccccccaggagtgggaattatggagctgcagcccccaagagcatgggcacctgccttatgcctggccaaacagctgaagccactcacgactttgaatgtggatccagggcacaaagaagcagggagagaagagaatctattctagcggcactgatagcagcagcggtatggagcttccagaggatccccggcaacaatgtggttatcacaagctacatgacaaacagaggcttcttcgaggataaaaaggcaacatttgcgccaagcttcttaatgaacatcaaaggcaataaaacatccgttgtcaaaaacagcatcctggagcaaggacagctgacagtcaactaa

SEQ ID NO: 21077 - DNA, 280 bp, Homo sapiens
  SIMILAR (133)..(279): 971254mologous to Homo sapiens bA288H12.1 (insulin-like growth factor 2 receptor),accession number AL353625,Smith-Waterman Score=265.
atgagcaccaccccctgctccacggagcccagtcccatcgaccacccaagggctgaggagtgcgggcgcatggcaactccacctgcagcccccgtgtgggatccactgggtgaagccagctgggctcctgagtctgacctggctggaaatgagtacgacctgactggcctaagcacagtcaggaaaccttggacggctgttgacacctctgtcgatgggagaaagaggactttctatttgagcgtttgcaatcctctcccttacattcctggatgccagg

SEQ ID NO: 21078 - DNA, 424 bp, Homo sapiens
  SIMILAR (371)..(403): 451254mologous to Homo sapiens mannose 6-phosphate receptor,accession number J03528,Smith-Waterman Score=37.
ttcacagctgcttacagcgagaaggggttggtttacatgagcatctgtggggagaatgaaaactgccctcctggcgtgtgtgagtgctgtggtctctcgtgtgttgtctgactctcccgtcctctggggttgtcctcagtctctttgcatgctaatggcaaaaaggatgagcagagccaggaagctgagacgcttttgtctcctgcagcagtcaccccatgtgggggacacatggtcatgtgatggaatgaacattcaatgtaaaacaatggttaaagccggattggacacttgaagttataagtgttggctatgaaattgatggtcctgacttgcgaaagttctcatcaaaaaataggccatcgagtctgtgattgtgttttctccgcctttcccttgtggagcaggggcctgctttggacaa

SEQ ID NO: 21079 - DNA, 638 bp, Homo sapiens
  SIMILAR (199)..(501): 761254mologous to Homo sapiens bA288H12.1 (insulin-like growth factor 2 receptor),accession number AL353625,Smith-Waterman Score=407.
accgaatgttccgtgaggaatggaagctctattgttgacttgtctccccttattcatcgcactggtggttatgaggcttatgatgagagtgaggatgatgcctccgataccaaccctgatttctacatcaatatttgtcagccactaaatcccatgcacggagtgccctgtcctgccggagccgctgtgtgcaaagttcctattgatggtccccccataaccgaatgttccgtgaggaatggaagctctattgttgacttgtctccccttattcatcgcactggtggttatgaggcttatgatgagagtgaggatgatgcctccgataccaaccctgatttctacatcaatatttgtcagccactaaatcccatgcacggagtgccctgtcctgccggagccgctgtgtgcaaagttcctattgatggtccccccatacgtgtgtctcatgaccccagctatggctgttatcacacggtctcatatctaaggcatcgttcagaacgtctgctactctatacatttaaaatgacttgtagggacaggcccagtcctaccttccactctgacaacgggacaggcttccacagttctccagataaacacgtactcacaaccatcctgaagctgaaatgctg

SEQ ID NO: 21080 - DNA, 399 bp, Homo sapiens
  SIMILAR (333)..(365): 541254mologous to Homo sapiens bA288H12.1 (insulin-like growth factor 2 receptor),accession number AL353625,Smith-Waterman Score=37.
atgctacctgaagggcacaggctctggccacgtgaggtgctcgatactctgttgccttctgccatgactgtaagtttcctgaggcttctccagatgcagatgctgccattcttcctttacaacctgcggaactgtctcctgactcagaagctaacttatgaaaatggcttgttaaaaatgaacttcacggggggggacacttgccataaggtttatcagcgctccacagccatcttcttctactgtgaccgcggcacccagcgggtacaactactggcctgctccctatcccgggaggaagaaaagactgcctacacacggttagggttgaatgcctgctttgtggctctagaggatccccgttcttctggagcccgagccaacaaattctgtgactga

SEQ ID NO: 21081 - DNA, 972 bp, Homo sapiens
  SIMILAR (337)..(540): 861254mologous to Homo sapiens bA288H12.1 (insulin-like growth factor 2 receptor),accession number AL353625,Smith-Waterman Score=309.
atgcaggggatgctggggatcctagcatggggtggggtgcagggatggcctcccaatggaatgccgattcttgtgccagatatttatggcctttatgcagatgaactcttactgtgcgagacacaaaaaggctacaaggaggacagtctgagcagaaaccaggacatgactgaatcttcacaaaagtggactgggaaaggcagtgcagttgagcacctcgtggaaagcggtgaatggaccatgcaccctgcacggcctgttagcgcttgccgatgtcctagtgattgccacgtgccactgagtccaggtgcttgctggccgaagcttgagtgtctctctgaaggttcatcctatatttcagatggaaaagaatatttgttttatttgaatgtctgtggagaaactgaaatacagttctgtaataaaaaacaagctgcagtttgccaagtgaaaaagagcgatacctctcaagtcaaagcagcaggaagataccacaatcagaccctccgacccagcgagagctcatggtccctcctctttgtggtcttggttttcttcccaggagtccatagtcccttctctctggatgaggctctcactctgtgcccccagaactgtctgccccctgggactgtgtctgcccccctgaactgtgtctaccccttggctctcagtgcagcagtagcattggctgcgggttctgagttaatggaatgccaccgtcttgtaaattccctggaggtttccacggcagcgcaaggccagagctccaagacccagttctatgcctgtttgtgtcgtctgagcacccacctttggaaatacagtgaggagtcagggaggagacttgtctgctccttttaccaaccatcggaacttaacccagcgcttaacttgagcttccttgtgggcacacggcttcaagaaggggctgctctgttattcatccagagcggcttcaccatagtttaa

SEQ ID NO: 21082 - DNA, 465 bp, Homo sapiens
  SIMILAR (148)..(285): 911254mologous to Homo sapiens bA288H12.1 (insulin-like growth factor 2 receptor),accession number AL353625,Smith-Waterman Score=219.
atggctggctctgcaaacaaccagcaactgttgtcttctatcaagtggcttgggaagcacgagaaggttggctgggcccgggtcacaggtagcgctgccacttcccagccacataacttggttaattactcagggtttcgagagaagaggctgttcagagcctctggggacatgaggaccaatggggacaactacctgtatgagatccaactttcctccatcacaagctccagaaacccggcgtgctctggagccaacatatgccaggttcccagcatccagcacaatgcatggcacacagtcgcccaacaagttttgtcaaataagctctttgaccatggggatctttctagagtccacacgcagggcttcaaccctaacggttcacagtgtccatgccaaggtgtgtccggattggtgggtcttggtctcacgacctcaaggatgaagccgcggcacctcgcg

SEQ ID NO: 21083 - DNA, 840 bp, Homo sapiens
  SIMILAR (258)..(4): 781254mologous to Homo sapiens NAG13,accession number AF194537,Smith-Waterman Score=358.
tcatggtaccagctcctctttgtaccgctggtagaattcggctgtgaatccatctggtgctggcctttttttggttggtaagctactaaatactgcctgaatttcagaacttgttattggtctattcagggattcaactgctttctggtttattcttgggagggtgtatgtgtccaggaatttattcatgtcttctagaatttctagtttatttgagtagaggtatttatagtattctctgatggtagtttctatttcttggtaatggcaaagaccggcccggtggttgagtacagcggcagcctccttctggaatacgtgaatgggtcggcctgcaccaccagcgatgtcagacagaccacatataccacgaggatccatctcgtctgctccaggggcagcctggtaaggcactgctgctggctggtgaccttcactgctgcattttttgactgagcgttgccttatgtgtctcttaacagcagcagtcttcatggctgcgatttctgaagtgtaagcctcatcttttgctgcggagtttgaggctctggtgacatacactgtttcctggattttttttctgagtcgtacagacattatcttgcctcttagttcttgtgagttgaggatcgtggcagtggaacggggcttagagatagtttggtcctgtaggggccaagggaaagcttccctttcaccctttgaagtttccctgaaaatcagatgatcacaaggtcccacagtaggccatctgctggctgaagagcaagcagagccagtctgagttccaaaactgaagaacttggagtcagatgtttgaaggcaggaagcatccagcat

SEQ ID NO: 21084 - DNA, 843 bp, Homo sapiens
  SIMILAR (229)..(831): 991254mologous to Cloning vector pZC320 SopA,accession number U26464,Smith-Waterman Score=1049.
atggaaaatctgaagtgtgatgaagatgaggacattgggaggccacaagtcttcagtgaagtgcgtgggtgtgatgtgacatttgagtggaaaacaaaagttgtctgccctccaaagaagttggagtgcaaattcgtccagaaacacaaaacctacgacctgcggctgctctcctctctcaccgggtcctggtccctggtccacaacggagtctcaagacccatgcataaagccacttgctggccggggcttgacattattccttcctgtctggctctgcaccgtattgaaactgagttaatgggcaaatttgatgaaggtaaactgcccaccgatccacacctgatgctccgactggccattgaaactgttgctcatgactatgatgtcatagttattgacagcgcgcctaacctgggtatcggcacgattaatgtcgtatgtgctgctgatgtgctgattgttcccacgcctgctgagttgtttgactacacctccgcactgcagtttttcgatatgcttcgtgatctgctcaagaacgttgatcttaaagggttcgagcctgatgtacgtattttgcttaccaaatacagcaatagtaatggctctcagtccccgtggatggaggagcaaattcgggatgcctggggaagcatggttctaaaaaatgttgtacgtgaaacggatgaagttggtaaaggtcagatccggatgagaactgtttttgaacaggccattgatcaacgctcttcaactggtgcctggagaaatgctctttctatttgggaacctgtctgcaatgaaattttcgatcgtctgattaaaccacgcctgggagattag

SEQ ID NO: 21085 - DNA, 666 bp, Homo sapiens
  SIMILAR (1)..(417): 801254mologous to Homo sapiens bA288H12.1 (insulin-like growth factor 2 receptor),accession number AL353625,Smith-Waterman Score=569.
atggatatcggccgggtagcaggaccaccaatactcaatccaatagcaaatgagatttacttgaattttgaaagcagtactccttgcttagcggacaagcatttcaactacacctcgctcatcgcgtttcactgtaagagaggtgtgagcatgggaacgcctaagctgttaaggaccagcgagtgcgactttgtgttcgaatgggagactcctgtcgtctgtcctgatgaagtgaggatggatggctgtaccctgacagatgagcagctcctctacagcttcaacttgtccagcctttccacgagcacctttaagggccggggcagctctttccggcacgattataaagcaacctactgcttcatcacgagaaccacacagggtcctggtggaaccacagattccctgtgtattctgcctcagtgggtcccgaataggaatccaggtgatcctgaggatcagccaagtttgagaaacactaatgtaactacctctgtctcccttggcgtgagaccactttccaatgatcagcagtcatggatggtagaagacagctggcctggtgtgggggctgtggctgaaaccaagactgatagaggagatccttttgttgggagagtcaaaagccaggaaaatgcccacatcccccccgagtggacctcatga

SEQ ID NO: 21086 - DNA, 1173 bp, Homo sapiens
  SIMILAR (457)..(924): 941254mologous to Homo sapiens bA288H12.1 (insulin-like growth factor 2 receptor),accession number AL353625,Smith-Waterman Score=782.
tgctctgcctgctggcacagggtgacaaaacagacaccctggcttgttgcatgcccattggaatagtcactggccaccacgtcaactggtcagggctattattactaaatcgtcctgaagccctaagttccgggattctatggagggctctagcatggaggagagtgaagactgagatgagcccataggtgttcctctcctctctgcgccaccagcaggcaccaccaagataaaggcagaccaactgcacctgcagggagcagcccccaagatttgcccctgcctgcaagatggcagcttgggccaacactactgcccctttgtgtcgttttctaggtactatataaatctgtgccagaaaatatataaagggcccctgggctgctctgaaagggccagcatttgcagaaggaccacaactggtgacgtccaggttctggggactcgttcacacgcagaaagctgggtgtcataggtccaagagtggttgtcacgacttcaaagcgttatccgtgtggtggaaataagaccgcatcctccgtgatagaattgacttgtacaaagccggtgggcagacctgcattcaagaggtttgaaatcgacagctgcacttactacttcagctgggactccggggctgcctgcgcagtgaagcctcaggaggtgcagatggtgaatgggaccatcaccaaccctataaatggcaagagcttcagcctcggagatatttattttaagctgttcagagcctctggggacatgaggaccaatggggacaactacctgtatgagatccaactttcctccatcacaagctccagaaacccggcgtgctctggagccaacatatgccaggtgaagcccaacgatcagcacttcagtcggaaagttggaacctctgacaagaccaagtactaccttcaaggtaatccgtggcttcccacaaagttccacatttaacttcctccaaggaaggggattaaaattttcaactaactcccttcagttgaaatctcggaccacttttaaaacaaaaaccttggtctaattctttactttgttatgaatttcttgacagtggattgagcgatacgtgtcagaactaagcatttccctgtaggcaaattgtgtcttagttatcaagtaaatgtacaaaaaaactaaaaaaaaaaa

SEQ ID NO: 21087 - DNA, 9246 bp, Homo sapiens
  SIMILAR (150)..(5912): 751254mologous to Bos taurus cation-independent mannose 6- phosphate receptor protein,accession number J03527,Smith-Waterman Score=7908.
  misc_feature (1)...(9246): n = a,t,c or g
cgagcccagtcgagccgcgctcacctcgggctcccgctccgtctccacctccgcctttgccctggcggcgcgaccccgtcccgggcgcggcccccagcagtcgcgcgccgttagcctcgcgcccgccgcgcagctccgggcccggcgcgatgggggccgccgccggccggagcccccacctggggcccgcgcccgcccgccgcccgcagcgctctctgctcctgctgcagctgctgctgctcgtcgctgccccggggtccacgcaggcccaggccgccccgttccccgagctgtgcagttatacatgggaagctgttgataccaaaaataatgtactttataaaatcaacatctgtggaagtgtggatattgtccagtgcgggccatcaagtgctgtttgtatgcacgacttgaagacacgcacttatcattcagtgggtgactctgttttgagaagtgcaaccagatctctcctggaattcaacacaacagtgagctgtgaccagcaaggcacaaatcacagagtccagagcagcattgccttcctgtgtgggaaaaccctgggaactcctgaatttgtaactgcaacagaatgtgtgcactactttgagtggaggaccactgcagcctgcaagaaagacatatttaaagcaaataaggaggtgccatgctatgtgtttgatgaagagttgaggaagcatgatctcaatcctctgatcaagcttagtggtgcctacttggtggatgactccgatccggacacttctctattcatcaatgtttgtagagacatagacacactacgagacccaggttcacagctgcgggcctgtccccccggcactgccgcctgcctggtaagaggacaccaggcgtttgatgttggccagccccgggacggactgaaggtggtgcgcaaggacaggcttgtcctgagttacgtgagggaagaggcaggaaagctagacttttgtgatggtcacagccctgcggtgactattacatttgtttgcccgtcggagcggagagagggcaccattcccaaactcacagctaaatccaactgccgctatgaaattgagtggattactgagtatgcctgccacagagattacctggaaagtaaaacttgttctctgagcggcgagcagcaggatgtctccatagacctcacaccacttgcccagagcggaggttcatcctatatttcagatggaaaagaatatttgttttatttgaatgtctgtggagaaactgaaatacagttctgtaataaaaaacaagctgcagtttgccaagtgaaaaagagcgatacctctcaagtcaaagcagcaggaagataccacaatcagaccctccgatattcggatggagacctcaccttgatatattttggaggtgatgaatgcagctcagggtttcagcggatgagcgtcataaactttgagtgcaataaaaccgcaggtaacgatgggaaaggaactcctgtattcacaggggaggttgactgcacctacttcttcacatgggacacggaatacgcctgtgttaaggagaaggaagacctcctctgcggtgccaccgacgggaagaagcgctatgacctgtccgcgctggtccgccatgcagaaccagagcagaattgggaagctgtggatggcagtcagacggaaacaaagaagaagcattttttcattaatatttgtcacagagtgctgcaggaaggcaaggcacgagggtgtcccgaggacgcggcagtgtgtgcagtggataaaaatggaagtaaaaatctgggaaaatttatttcctctcccatgaaagagaaaggaaacattcaactctcttattcagatggtgatgattgtggtcatggcaagaaaattaaaactaatatcacacttgtatgcaagccaggtgatctggaaagtgcaccagtgttgagaacttctggggaaggcggttgcttttatgagtttgagtggcacacagctgcggcctgtgtgctgtctaagacagaaggggagaactgcacggtctttgactcccaggcagggttttcttttgacttatcacctctcacaaagaaaaatggtgcctataaagttgagacaaagaagtatgacttttatataaatgtgtgtggcccggtgtctgtgagcccctgtcagccagactcaggagcctgccaggtggcaaaaagtgatgagaagacttggaacttgggtctgagtaatgcgaagctttcatattatgatgggatgatccaactgaactacagaggcggcacgccctataacaatgaaagacacacaccgagagctacgctcatcacctttctctgtgatcgagacgcgggagtgggcttccctgaatatcaggaagaggataactccacctacaacttccggtggtacaccagcttatgcctgcccggaggagcccctggaatgcgtagtgaccgacccctccacgctggagcagtacgacctctccagtctggcaaaatctgaaggtggccttggaggaaactcggtatgccatggacaactcaggggaacatgtcacgtggaggaaatactacattaacgtgtgtcggcctctgaatccagtgccgggctgcaaccgatatgcatcggcttgccagatgaagtatgaaaaagatcagggctccttcactgaagtggttttccaatcaagtaaacttgggaaatggcaaaagaccggcccggtggtttgaggacagcggcagcttccttctggaatacgtgaatgggtcggcctgcaccaccagcgatggcagacagaccacatataccacgaggatccatctcgtctgctccaggggcaggctgaacagccaccccatcttttctctcaactgggagtgtgtggtcagtttcctgtggaacacagaggctgcctgtcccattcagacaacgacggatacagaccaggcttgctctataagggatcccaacagtggatttgtgtttaatcttaatccgctaaacagttcgcaaggatataacgtctctggcattgggaagatttttatgtttaatgtctgcggcacaatgcctgtctgtgggaccatcctgggaaaacctgcttctggctgtgaggcagaaacccaaactgaagagctcaagaattggaagccagcaaggccagtcggaattgagaaaagcctccagctgtccacagagggcttcatcactctgacctacaaagggcctctctctgccaaaggtaccgctgatgcttttatcgtccgctttgtttgcaatgatgatgtttactcagggcccctcaaattcctgcatcaagatatcgactctgggcaagggatccgaaacacttactttgagtttgaaaccgcgttggcctgtgttccttctccagtggactgccaagtcaccgacctggctggaaatgagtacgacctgactggcctaagcacagtcaggaaaccttggacggctgttgacacctctgtcgatgggagaaagaggactttctatttgagcgtttgcaatcctctcccttacattcctggatgccagggcagcgcagtggggtcttgcttagtgtcagaaggcaatagctggaatctgggtgtggtgcagatgagtccccaagccgcggcgaatggatctttgagcatcatgtatgtcaacggtgacaagtgtgggaaccagcgcttctccaccaggatcacgtttgagtgtgctcagatatcgggctcaccagcatttcagcttcaggatggttgtgagtacgtgtttatctggagaactgtggaagcctgtcccgttgtcagagtggaaggggacaactgtgaggtgaaagacccaaggcatggcaacttgtatgacctgaagcccctgggcctcaacgacaccatcgtgagcgctggcgaatacacttattacttccgggtctgtgggaagctttcctcagacgtctgccccacaagtgacaagtccaaggtggtctcctcatgtcaggaaaagcgggaaccgcagggatttcacaaagtggcaggtctcctgactcagaagctaacttatgaaaatggcttgttaaaaatgaacttcacggggggggacacttgccataaggtttatcagcgctccacagccatcttcttctactgtgaccgcggcacccagcggccagtatttctaaaggagacttcagattgttcctacttgtttgagtggcgaacgcagtatgcctgcccacctttcgatctgactgaatgttcattcaaagatggggctggcaactccttcgacctctcgtccctgtcaaggtacagtgacaactgggaagccatcactgggacgggggacccggagcactacctcatcaatgtctgcaagtctctggccccgcaggctggcactgagccgtgccctccagaagcagccgcgtgtctgctgggtggctccaagcccgtgaacctcggcagggtaagggacggacctcagtggagagatggcataattgtcctgaaatacgttgatggcgacttatgtccagatgggattcggaaaaagtcaaccaccatccgattcacctgcagcgagagccaagtgaactccaggcccatgttcatcagcgccgtggaggactgtgagtacacctttgcctggcccacagccacagcctgtcccatgaagagcaacgagcatgatgactgccaggtcaccaacccaagcacaggacacctgtttgatctgagctccttaagtggcagggcgggattcacagctgcttacagcgagaaggggttggtttacatgagcatctgtggggagaatgaaaactgccctcctggcgtgggggcctgctttggacagaccaggattagcgtgggcaaggccaacaagaggctgagatacgtggaccaggtcctgcagctggtgtacaaggatgggtccccttgtccctccaaatccggcctgagctataagagtgtgatcagtttcgtgtgcaggcctgaggccgggccaaccaataggcccatgctcatctccctggacaagcagacatgcactctcttcttctcctggcacacgccgctggcctgcgagcaagcgaccgaatgttccgtgaggaatggaagctctattgttgacttgtctccccttattcatcgcactggtggttatgaggcttatgatgagagtgaggatgatgcctccgataccaaccctgatttctacatcaatatttgtcagccactaaatcccatgcacgcagtgccctgtcctgccggagccgctgtgtgcaaagttcctattgatggtccccccatagatatcggccgggtagcaggaccaccaatactcaatccaatagcaaatgagatttacttgaattttgaaagcagtactccttgcttagcggacaagcatttcaactacacctcgctcatcgcgtttcactgtaagagaggtgtgagcatgggaacgcctaagctgttaaggaccagcgagtgcgactttgtgttcgaatgggagactcctgtcgtctgtcctgatgaagtgaggatggatggctgtaccctgacagatgagcagctcctctacagcttcaacttgtccagcctttccacgagcacctttaaggtgactcgcgactcgcgcacctacagcgttggggtgtgcacctttgcagtcgggccagaacaaggaggctgtaaggacggaggagtctgtctgctctcaggcaccaagggggcatcctttggacggctgcaatcaattgaaactggattacaggcaccagggtgaagcggtcgttttaaagttacgttgaatggtgatcgtttgccctccagaaaccgattgacggcgttcccctgtgtcttccctttcatatttcaatggggaaggagctacgagggagtgcatcatagagagcagggcgaagctgtggtgtagcacaactgcggactacgacagagaccacgagtggggcttctgcagacactcaaacagctaccggacatccagcatcatatttaagtgtgatgaagatgaggacattgggaggccacaagtcttcagtgaagcgcgtgggtgtgatgtgacatttgagaggaaaacaaaagttgtctgccctccacagaagttggagtgcaaattcgtccagaaacacaaaacctacgacctgcggctgctctcctctctcaccgggtcctgggtccctgggtccacaacggagtcttcgtacttatataaatctgtgccagaaaatatattaaagggcccctgggttgcttctgaaagggccagctttgcaggaagggaccacaactggtgacgtccaggtcctgggactcgtttcacacgcagaagctgggtgtcataggtgacaaagttgttgtcactgtactccaaaggttatccgtgtggtggaaataagaccgcatcctccgtgataagaattgacctgtacaaagacggtgggcagacctgcattcaagaggtttgatatcgacagctgcacttactacttcagctgggactcccgggctgcctgcgccgtgaagcctcaaggaggtgcaaattggtgaatgggaaccatcaccaaaccctattaatggctagaagttctaccttcggagatatttattttaagctgttcccaacctttggggacatgaggaccaggggggacaactacctgtatgagatccaactttcctccatcacaagctccagaaacccggcgtgctctggagccaacatatgccaggtgaagcccaacgatcagcacttcagtcggaaagttggaacctctgacaagaccaagtactacctttcaagacggcgatctcgatgtcgtgtttgcctcttcctctaagtgcggaaaggataagaccaagtctgtttcttccaccatttttttccacttgtgaccctctgggggaggacgggatccccgagtttcagtccgagactgccggcctgcccagtacctctttttttggaaccactcaaccctgtgtccctctgggggtggggcttttgacagcgagaatcccgggggacgacggggccagatgcacaaggggctgtcagaacggagccaggcagtcggcgcggtgctcagcctgctgctggtggcgctcacctgctgcctgctggccctggtgctctacaagaaaggagagagggaaacagtgataagttagctgaccacttgctgtaggagaagttccaacgtgtcctacaaatactcaaaggtgaataaggaagaagagacagatgagaatgaaacagagtggctgatggaagagatccagctgcctcctccacggcagggaaaggaagggcaggagaacggcgcatattaccaccaagtcagcgaaagccctcagctccctgcatggcgatgaccaggacagtgaggatgaggttctgaccatcccagaggtgaaagttcactcgggcaggggagctggggcagagagctcccacccagtgagaaacgcacagagcaatgcccttcaggagcgtgaggacgatagggtggggctggtcaggggttgagaaagcgaagaaaaaggaaagtccagctctgcccagccaaaagacaagtgagcttccaccaagctggtgtcccttcccatgacgcaaagcgacgaggaccctccttacacatcctgactccccgagtgccctgcaggggagccacggagccgcgaggacagcccaagcaccctcccaacccaaataagaccttcccactcgatgatgccttcctataattttgccctttaaacagaaacctttcaaaagggaagagtttttgtgaatgggggagagggtgaaggaggtcaggccccactccttcctgcattgtttacagtcattgggaataaggcatggctcaaatcggccacagggcggtgaccttgtgccccagggttttgcccccaagtgcctccatttaaaagcattaaggccggtacggcatcttcaaaacagagggctggcattcgaggaaacccttgctgctttagtcccgatagggtaatttgacccccgatatattttaggcattttaaattctcttccccccattttattgactttgaacaattactcaggttttgaggaaaaagggaaaaaaaaacagccaccgtttcttcctgccaagcaggggtgtgatgtaccagtttgtccatctttgagatggtggaggctgtcagtgtatggggcagcttccggcgggaatgnttgaactggtcattaaagatagtcccctgagttggagctcattactgtctccttttctctttttgtttctgtttcttaaagggcaacacacacgtgcgtgcgaagcacacacacacatacgtgcacaggggtccccgaagtgcctaggttttggaaaagtttgcctggttcctatggcctttaagtcaggaatggcctgcacctttttgcatgatatcttcaagcctgggcgtacagagcacatttgtcagtatttttgccggctggtgaattcaaacaacctgcccaaagattgatttgtgtgtttgtgtgtgtgtgtgtgtgtgtgtgtgtgtgtgtgagtggagttgaggtgtcagagaaaatgaattttttccagatttggggtataggtctcatctcttcaggttctcatgataccacctttactgtgcttatttttttaagaaaaaagtgttgatcaaccattcgacctattaagaaagccttaatttgcaccagtgtgtgacttacagaaaactgccatgaaaaattcattgggccaagagccctcggcccctagccattgcaacttggccttcatgctggagggaggctgggcgggttcagcgcggaggaggagggaggccaaggcgggcaatggcgtggaggaggacgtgaggccgggcggtcacagccatggaggaggagggaggcgcttgtggtgatccttattcatggcggcagcgccctttttcctgccatgtttagtgaatgactttttctcgcattgtagaattgtatatagactctggtgttctattgctgagaagcaaaccggcctgcagcatccctcagcctgtaccggtttggctggcttgtttgatttcaacatgagtgtattttttaaaattgatttttctcttcatttttttttcaatcaactttacctgtaatataaaggtattcaacaatttcaataaaagataaattattaaaaaaaaaaaaaaaa

SEQ ID NO: 21088 - DNA, 299 bp, Homo sapiens
  SIMILAR (2)..(64): 851254mologous to Homo sapiens prepro alpha-2-thiol proteinase inhibitor,accession number K02566,Smith-Waterman Score= 94.
  misc_feature (1)...(299): n = a,t,c or g
tgtcaactgtcaaccactgggaatgatctcactgatgaaaaggccncccaggtttttcacctttccgatcatcacgaataggggaaataaaagaagaaacaactagtcacctaaggtcctgcgagtacaagggtcgacccccaaaggcaggggcagagccagcatctgagagggaggtctcttgaccaatgggcagaatcttcactccaggcacatagcccctagaatttaaatagagaagaatgccattttatcactctgcctctgggtgaaataaagatcagtcttgatgttctaaa

SEQ ID NO: 21089 - DNA, 452 bp, Homo sapiens
  SIMILAR (179)..(280): 821254mologous to Homo sapiens prepro alpha-2-thiol proteinase inhibitor,accession number K02566,Smith-Waterman Score= 139.
gaatgcacagcaaccgtggggaagaggagcagtacgaaattctccgtggctacccagacctgccagattactccagccgagggccctgtggtgacagcccagtacgactgcctcggctgtgtgcatcctatatcaacgcagagcccaggtttttcacctttccgatcatcacgaataggggaaataaaaggagaaaaaacttagtctcttaaggtcctgcgagtacaagggtcgacccccaaaggcaggggcagagccagcatctgagagggaggtctcttgaccaatgggcagaatcttcactccaggcacatagccccaaccacctctgccagcaaccttgagaggaaggacaagaagaaagatgggatagaatttaaatagagaagaatgccattttatcactctgcctctgggtgaaataaagatcagtcttgatgttcaaactctaa

SEQ ID NO: 21090 - DNA, 1110 bp, Homo sapiens
  SIMILAR (10)..(363): 1001254mologous to Homo sapiens prepro alpha-2-thiol proteinase inhibitor,accession number K02566,Smith-Waterman Score= 615.
atggaggggctgctactaagtttaacccaggaatcacagtccgaggaaattgactgcaatgacaaggatttatttaaagctgtggatgctgctctgaagaaatataacagtcaaaaccaaagtaacaaccagtttgtattgtaccgcataactgaagccactaagacggttggctctgacacgttttattccttcaagtacgaaatcaaggagggggattgtcctgttcaaagtggcaaaacctggcaggactgtgagtacaaggatgctgcaaaagcagccactggagaatgcacggcaaccgtggggaagaggagcagtacgaaattctccgtggctacccagacctgccagattactccaggtggctggtttatcctctggcactgccctggtgggaaattaaccatttctgactatcccaactcttcccgtgtgctgcattgtacccagtgtgtgcaagggctcaacagaaggaccagaagacataagacctgccctccattgcaggcagcatcccagattgaggagcgcataggctttgagggcagacctggcctggaatctttcagagctccttgccttcttgcctctccttttccttgtctagaaaagggagccgagggccctgtggtgacagcccagtacgactgcctcggctgtgtgcatcctatatcaacgcagagcccagacctggagcccattctgagacacggcattcagtactttaacaacaacactcaacattcctccctcttcacgcttaatgaagtaaaacgggcccaaagacaggataccggtgaatgtacagataatgcatacatcgatattcagctacgaattgcttccttctcacagaactgtgacatttatccagggaaggattttgtacaaccacctaccaagatttgcgtgggctgccccagagatatacccaccaacagcccagagctggaggagacactgactcacaccatcacaaagcttaatgcagagaataacgcaactttctatttcaagattgacaatgtgaaaaaagcaagagtacaggtgtgtaaactatactacaaaagcagtaacactatagtctatgtgcaaattgctgactaa

SEQ ID NO: 21091 - DNA, 918 bp, Homo sapiens
  SIMILAR (79)..(915): 971254mologous to Homo sapiens kininogen,accession number M11437,Smith-Waterman Score=1508.
gtggtggctggcaagaaatattttattgacttcgtggccagggaaaccacatgttccaaggaaagtaatgaagagttgaccgaaagctgtgagaccaaaaaacttggcatctcactgatgaaaaggcctccaggtttttcacctttccgatcatcacgaataggggaaataaaagaagaaacaactgtaagtccaccccacacttccatggcacctgcacaagatgaagagcgggattcaggaaaagaacaagggcatactcgtagacatgactggggccatgaaaaacaaagaaaacataatcttggccatggccataaacatgaacgtgaccaagggcatgggcaccaaagaggacatggccttggccatggacacgaacaacagcatggtcttggtcatggacataagttcaaacttgatgatgatcttgaacaccaagggggccatgtccttgaccatggacataagcataagcatggtcatggccacggaaaacataaaaataaaggcaaaaagaatggaaagcacaatggttggaaaacagagcatttggcaagctcttctgaagacagtactacaccttctgcacagacacaagagaagacagaagggccaacacccatcccttccctagccaagccaggtgtaacagttaccttttctgactttcaggactctgatctcattgcaactatgatgcctcctatatcaccagctcccacacagagtgatgacgattggatccctgatatccagatagacccaaatggcctttcatttaacccaatatcagattttccagacacgacctccccaaaatgtcctggacgcccctggaagtcagttagtgaaattaatccaaccacacaaatgaaagaatcttattatttcgatctcactgatggcctttcttaa

SEQ ID NO: 21092 - DNA, 1935 bp, Homo sapiens
  SIMILAR (1)..(1932): 1001254mologous to Homo sapiens kininogen,accession number M11437,Smith-Waterman Score=3502.
atgaaactaattaccatccttttcctctgctccaggctgctactaagtttaacccaggaatcacagtccgaggaaattgactgcaatgacaaggatttatttaaagctgtggatgctgctctgaagaaatataacagtcaaaaccaaagtaacaaccagtttgtattgtaccgcataactgaagccactaagacggttggctctgacacgttttattccttcaagtacgaaatcaaggagggggattgtcctgttcaaagtggcaaaacctggcaggactgtgagtacaaggatgctgcaaaagcagccactggagaatgcacggcaaccgtggggaagaggagcagtacgaaattctccgtggctacccagacctgccagattactccagccgagggccctgtggtgacagcccagtacgactgcctcggctgtgtgcatcctatatccacgcagagcccagacctggagcccattctgagacacggcattcagtactttaacaacaacactcaacattcctccctcttcatgcttaatgaagtaaaacgggcccaaagacaggtggtggctggattgaactttcgaattacctactcaattgtgcaaacgaattgttccaaagagaattttctgttcttaactccagactgcaagtccctttggaatggtgataccggtgaatgtacagataatgcatacatcgatattcagctacgaattgcttccttctcacagaactgtgacatttatccagggaaggattttgtacaaccacctaccaagatttgcgtgggctgccccagagatatacccaccaacagcccagagctggaggagacactgactcacaccatcacaaagcttaatgcagagaataacgcaactttctatttcaagattgacaatgtgaaaaaagcaagagtacaggtggtggctggcaagaaatattttattgacttcgtggccagggaaaccacatgttccaaggaaagtaatgaagagttgaccgaaagctgtgagaccaaaaaacttggccaaagcctagattgcaacgctgaagtttatgtggtaccctgggagaaaaaaatttaccctactgtcaactgtcaaccactgggaatgatctcactgatgaaaaggcctccaggtttttcacctttccgatcatcacgaataggggaaataaaagaagaaacaactgtaagtccaccccacacttccatggcacctgcacaagatgaagagcgggattcaggaaaagaacaagggcatactcgtagacatgactggggccatgaaaaacaaagaaaacataatcttggccatggccataaacatgaacgtgaccaagggcatgggcaccaaagaggacatggccttggccatggacacgaacaacagcatggtcttggtcatggacataagttcaaacttgatgatgatcttgaacaccaagggggccatgtccttgaccatggacataagcataagcatggtcatggccacggaaaacataaaaataaaggcaaaaagaatggaaagcacaatggttggaaaacagagcatttggcaagctcttctgaagacagtactacaccttctgcacagacacaagagaagacagaagggccaacacccatcccttccctagccaagccaggtgtaacagttaccttttctgactttcaggactctgatctcattgcaactatgatgcctcctatatcaccagctcccatacagagtgatgacgattggatccctgatatccagatagacccaaatggcctttcatttaacccaatatcagattttccagacacgacctccccaaaatgtcctggacgcccctggaagtcagttagtgaaattaatccaaccacacaaatgaaagaatcttattatttcgatctcactgatggcctttcttaa

SEQ ID NO: 21093 - DNA, 748 bp, Homo sapiens
  SIMILAR (65)..(373): 851254mologous to Homo sapiens prepro alpha-2-thiol proteinase inhibitor,accession number K02566,Smith-Waterman Score= 469.
gaagggggtcccgatccagaccccaagagaggattcttggatctcgcacaagaaagatttcagggataccggtgaatgtacagataatgcatacatcgatattcagctacgaattgcttccttctcacagaactgtgacatttatccagggaaggattttgtacaaccacctaccaagatttgcgtgggctgccccagagatatacccaccaacagcccagagctggaggagacactgactcacaccatcacaaagcttaatgcagagaataacgcaactttctatttcaagattgacaatgtgaaaaaagcaagagtacagggtctttcaaaagccgaggttttcctgtgcgctcggaggagccatagctgccagctgggctggcggcgggtgcccccagcccttgtgggcggcgggcagagctggcctgggggccgggtcccgtggggggtcgcgcagacagtgtgtccggagcgcccccggcgggagcgcaggctgcggggcgagagggaagaggaggcggcggataaggtgatggcgagaagatggaggaagagcagacgaaggaagagaaaggagatggaagagagaatgtcaccagaggagaccgaaggaacaaattttgactttgcaggagaagctgtgggccaggcagaaagaaaaggaccagctttttctgcagctgaagaaagtttccatgaggaagaaaaacggaggcgaaaggagcagagcgacctgaccttctga

SEQ ID NO: 21094 - DNA, 2160 bp, Homo sapiens
  SIMILAR (1339)..(2157): 981254mologous to Homo sapiens kininogen,accession number M11437,Smith-Waterman Score=1513.
atgggcttcccattaagaccttcacctgcgcatttatcctctgggaggcagcagttccctgcaaaggaggaaaggctgctactaagtttaacccaggaatcacagtccgaggaaattgactgcaatgacaaggatttatttaaagctgtggatgctgctctgaagaaatataacagtcaaaaccaaagtaacaaccagtttgtattgtaccgcataactgaagccactaagacggttggctctgacacgttttattccttcaagtacgaaatcaaggagggggattgtcctgttcaaagtggcaaaacctggcaggactgtgagtacaaggatgctgcaaaagcagccactggagaatgcacggcaaccgtggggaagaggagcagtacgaaattctccgtggctacccagacctgccagattactccaggtggctggtttatcctctggcactgccctggtgggaaattaaccatttctgactatcccaactcttcccgtgtgctgcattgtacccagtgtgtgcaagggctcaacagaaggaccagaagacataagacctgccctccattgcaggcagcatcccagattgaggagcgcataggctttgagggcagacctggcctggaatctttcagagctccttgccttcttgcctctccttttccttgtctagaaaagggagccgagggccctgtggtgacagcccagtacgactgcctcggctgtgtgcatcctatatcaacgcagagcccagacctggagcccattctgagacacggcattcagtactttaacaacaacactcaacattcctccctcttcatgcttaatgaagtaaaacgggcccaaagacaggctgctccagcagggagtttagctccatggacacctttgaaggctatgaaggtgcagaagacatggaaaagctcgcggggccttttccagttggatgacagtcacgaaacctgttcctccaaatccgctttcctggagaggagagaaagcacccagggagaaaaagaagaacgcgatgaggaagcaacggcgaccggcagcaccaagaaggagcgtgctggggcgtccacgccggctgactcctgcgggggcgacggctggtttccaggcgagggcgcggcgcccgaggacctccaccccggagagctgccctccctgcggtcgccccggctccccggctccagagcgcccgcattcccgagagaggcgatggtgatgatggtgttagaaggtggggacatagggaggcgatcgggtcatgagggcagagccttcatgaatgggattattatccttataaaggaggagagacttccttgccccttccactgtatctcactgatgaaaaggcctccaggtttttcacctttccgatcatcacgaataggggaaataaaagaagaaacaactgtaagtccaccccacacttccatggcacctgcacaagatgaagagcgggattcaggaaaagaacaagggcatactcgtagacatgactggggccatgaaaaacaaagaaaacataatcttggccatggccataaacatgaacgtgaccaagggcatgggcaccaaagaggacatggccttggccatggacacgaacaacagcatggtcttggtcatggacataagttcaaacttgatgatgatcttgaacaccaagggggccatgtccttgaccatggacataagcataagcatggtcatggccacggaaaacataaaaataaaggcaaaaagaatggaaagcacaatggttggaaaacagagcatttggcaagctcttctgaagacagtactacaccttctgcacagacacaagagaagacagaagggccaacacccatcccttccctagccaagccaggtgtaacagttaccttttctgactttcaggactctgatctcattgcaactatgatgcctcctatatcaccagctcccatacagagtgatgacgattggatccctgatatccagatagacccaaatggcctttcatttaacccaatatcagattttccagacacgacctccccaaaatgtcctggacgcccctggaagtcagttagtgaaattaatccaaccacacaaatgaaagaatcttattatttcgatctcactgatggcctttcttaa

SEQ ID NO: 21095 - DNA, 497 bp, Homo sapiens
  SIMILAR (426)..(367): 681254mologous to Homo sapiens Human signal peptide containing protein HSPP-48 SEQ ID NO:48,accession number Y87271,Smith-Waterman Score=71.
aaacaagatatggctttaaatagctacaatcatctttggatgtatatgtcactgctgcttcaagttattggatgcatttgaacctctgagtttgtctttcattttaaatattgtctgttcttttaaataaacaaccacagatgtcaggaaaaagtcttaccttgtcaactggttgcccccactttttaaaaatgattgaatgataacatcatattaactgcgttttactatacttacagagtcacctaaggtccgtgcgagtaccagggtgcgacccccaaaggcaggggcagagccagcatctgagacgggaggtctcgttgaccaactgggcagaatcttcgactccgaggcacatagccccaaccacctctgccagcaaccttgagatggaaggacaagaagaaagatgggatagaatttaaattagagatgaatgccattttatcactctggcctctgggtgaaataaagatcgagtcttgatgttctaactc

SEQ ID NO: 21096 - DNA, 1658 bp, Homo sapiens
  SIMILAR (550)..(1485): 541254mologous to Homo sapiens prepro alpha-2-thiol proteinase inhibitor,accession number K02566,Smith-Waterman Score= 724.
ggcacgaggcaactaacgtttggcagcatgattccaaccagtgtcctgagtgctgagggggagaggaggacagaagagacattaggctggagattgtcaaattcagtatcccagttggctcttgattcttggtgaaaccatccctcagctcctagagggagattgttagatcatgaaactaattaccatccttttcctctgctccaggctgctactaagtttaacccaggaatcacagtccgaggaaattgactgcaatgacaaggatttatttaaagctgtggatgctgctctgaagaaatataacagtcaaaaccaaagtaacaaccagtttgtattgtaccgcataactgaagccactaagacggttggctctgacacgttttattccttcaagtacgaaatcaaggagggggattgtcctgttcaaagtggcaaaacctggcaggactgtgagtacaaggatgctgcaaaagcagccactggagaatgcacagcaaccgtggggaagaggagcagtacggaaattctccgtggctacccagacactgccagattactccagccgagggccctgttgtggacagcccagttacggacttgcctcggcttgtgtggcatcctattattcaacggcagagcccagacctggagcccattctgagacacggcattcagtactttaacaacaacactcaacattcctccctcttcacgcttaatgaagtaaaacgggcccaaagacaggtggtggctggattgaactttcgaattacctactcaattgtgcaaacgaattgttccaaagagaattttctgttcttaactccagactgcaagtccctttggaatggtgataccggtgaatgtacagataatgcatacatcgatattcagctacgaattgcttccttctcacagaactgggacatgttatccagggaaggatgttgtgcaaccacctaccaagatttgcgtgggctgccccagagatatacccaccaacagcccagagctggaggagacactgactcacaccatcacaaagcttaatgcagagaataacgcaatttcctatttcaagattgacaatgtgaaaaaagcaagagtacgggtggtggctggcaagaaatattttattgacttcgtggccaggggaaaccacatgttccaagggaaagtaatgaagagttgaccgaaagctgtgagaccaaaaaacttgggccaaaggctaggtttgcaacgctgaaagtttatgtggtaccctggggagaaaaaaatttaccctacttgttcaactgttcaaccactggggaatggatcttcacttgatggaaaaggcctcccagggttttttcacctttccgatcaatcacgaataggggaaataaaagaagaaacaaactagtcacctaaggtcctgcgagtacaagggtcgacccccaaagggcaggggcagagccagcatctgagagggaggtctcttgaccaatgggcagaatcttcactccaggcacatagccccaaccacctctgccagcaaccttgagaggaaggacaagaagaaagatgggatagaatttaaatagagaagaatgccattttatcactctgcctctgggtgaaataaagatcagtcttgatgttctaactctaaa

SEQ ID NO: 21097 - DNA, 287 bp, Homo sapiens
  SIMILAR (15)..(248): 491254mologous to Homo sapiens HDCMC04P,accession number AF067804,Smith-Waterman Score=161.
  misc_feature (1)...(287): n = a,t,c or g
gaattctctgcactaggggaatgagcagggggaaggttattagacttcatcggcggaagcaggacaacatatcaggtggggatagcagtncaacagaaagctgggatgaggagctttctccttccactgtgttgtatacagcaacacagcacacacctacaagcatcaccttaactnttagaaganccaaacccaagaagcggaaaaagagtccagaaaagggtcgtgcagcaccaaagacgnagaaaatcaagaattctccctctgaagcacagatttagatgaga

SEQ ID NO: 21098 - DNA, 441 bp, Homo sapiens
  SIMILAR (440)..(363): 651254mologous to Homo sapiens PRO1438,accession number AF116661,Smith-Waterman Score=75.
caaggaatttgtgggcaaacctactattttagacactattaataagactgaattggcctgtaataacacagttattggttcccaaatgcaggtaagcaccaaagggttgaggactctctaagtagctgaaattttaagaacccaggaagagggtaatggattggaattactgttccttccaaatgtacaaggccatggaataacagattagccaggtgttgatcatatgtaaccaaaagtaggttatattaactggaaacttcctggatacatatttttaaactacctttattaataaaaaaatagatgaattgaggctgtgtgcagtgcagtggctcactcctataatacaacactttgcaagaagccaaggtggaaggattgcttgaggccagcagttcaagaccagcctgtacaacatagtgagaccctctctttaca

SEQ ID NO: 21099 - DNA, 604 bp, Homo sapiens
  SIMILAR (10)..(390): 951254mologous to Homo sapiens unnamed protein product,accession number AK025478,Smith-Waterman Score=613.
ggcacgaggcatttggaggcggtaagcccatcagattccagaggcacttttttatctcactgcagacctcaagagaatatcagcagtagggggatgggtcccacatcagtagaacgactccgagaaggagggagcatccccaaggtcctccgaagcagcgtgagggtggcccaaaagggagagccctctcccacatgggagagtaacatcacagagaaagactcacaccctgcagatggagaaggcccagagacattaagctcagcactctctaaaggagcaacagtttacagcccttccagatacagctaccagctcctgcagtgtgatagtcctcggacagaatcacaaagcctccttcagcagagttcctcccccttcagaggacattcctacacagtctccaggatacagttatcgaactactgcactgagacctggaaaccccccctctcacggttcttcagaatcatccctctcttccacgtcctattccagccccgcccaccctgtgtccacagactcgttggccccatttacggggacaccagggtattttagcagccagccacattctggaaacagcactggcagcaatcttccg

SEQ ID NO: 21100 - DNA, 5265 bp, Homo sapiens
  SIMILAR (3545)..(4048): 831254mologous to Homo sapiens KIAA1757 protein,accession number AB051544,Smith-Waterman Score=711.
gcggccgccgcccgcctgcgctcatagactcacgcagccccagtcccgccagtccgccaacacagtagtgccggcccccctctttccctggccctgccccccctccccgcctttggctcgctccgcctttctgccccccacccccacctcacgggtacgggccattcccggccaggaaacgccgtggcgccgcgttgggcctaactcgagtcctgccgtctcccgggagtgccgtgcgccgcagcccgggcccaggccccggcagcgcctgtgacaaggtcttcagaactactagcagataatttggggggacttcatattcagaagtctatataaaggattcctcatgtccataacatgttggatgaggctctgcagctcacccccactctcagagtggtcagtctccattaattggaccccgtgatttccaatctctgctgtgttggacgtcatgagcattgcaatccctctgggagtcaccacatcagatacatcctactcagatatggctgctggatcagaaaaggaagtggaagccccctacctttcaagacgaagtggcactacaccaggatgtgaaagtccagcgaaagagacccaaggggcctagggggcagcacacccccagaagccaagtctattccaggcagtaccacggattatggtctgggctggaaaaatcctggtgttttgaatatgttcaggtccagttcagactcttgatcccacagccacttcttgagtgagggtatcctgtcttggtagtgaatggaagagggcctggtccctggggcagtgcagaaggcactttgatcatctcactcactgcaaatgtcatgtgaggtttcatggaagtattaagagatccaattaagaagaatagttctgagtctaaaccagcccagagtggcttctctaggggaaactccccgctcagctgccctgaatctgtggaggctagtccagcagttaatgagaagagcgtgtattccactcataattatgggaccactcagaggcatgggtgtcgaggactgccttatgctgatcataattacggagcccctcctcctccgacacctcctgcttctccccctgtccagacgatcatccctcgttctgacctgaatggcctgccgtcgcctgtagaggaacgctgtggagacagcccgaactctgaaggagaaactgtacctacctggtgtccttgtggtctttctcaggatggcttccttctcaactgtgacaagtgcaggggaatgagcagggggaaggttattagacttcatcggcggaagcaggacaacatatcaggtggggatagcagtgcaacagaaagctgggatgaggagctttctccttccactgtgttgtatacagcaacacagcacacacctacaagcatcaccttaactgttagaagaaccaaacccaagaagcggaaaaagagtccagaaaagggtcgtgcagcaccaaagacgaagaaaatcaaggcatttcgagagggatcccggaagtccttgcggatgaagaattctccctctgaagcacagaatttagatgagaatacaactgagggctgggaaaatcggataagactatggactgaccagtatgaagaagctttcactaatcagtacagtgcagatgtacagaacgcgcttgaacaacacctacattctagcaaggaatttgtgggcaaacctactattttagacactattaataagactgaattggcctgtaataacacagttattggttcccaaatgcagttacagctgggaagagtcactcgtgttcaaaagcaccggaagatcctgagggctgcaagagatttggctttggacactcttataatagagtatcgtgggaaagtcatgttacgacagcaatttgaggtcaatgggcatttcttcaaaaaaaccataccccctttgtgctcttcttacttcaaaatctcaatggtgtagagatgtgtgtggatgcccgtactttcggtaatgatgctcggttcatcagaagatcatgtacaccaaatgcagaggtgcgacacatgattgcagatgggatgattcacctgtgcatctatgctgtgtctgccatcaccaaggatgctgaggtcaccatagcatttgattatgagtatagtaactgtaattataaagtggactgtgcctgtcacaagggaaaccggaattgtcctatacaaaaaaggaattcttaatgctacagaactgccactcctaccacctcctccaagcctacccaccattggagcagagactagacgtagaaaagcacgacggaaagagctagagatggagcagcagaatgaggcttcagaggagaataatgaccagcaatcacaagaagttccagaaaaagtaactgtatccagtgatcatgaggaagtagacaatccagaagaaaaaccagaagaagagaaagaagaggttatagatgaccaggagaacctagctcatagcaggaggaccagggaagatagaaaggtagaagccatcatgcatgcttttgaaaacttagagaaaagaaagaagcggcgggatcagcccttggaacagagcaactctgatgtagagattactacaaccacctcagagactcctgttggtgaagagacaaaaactgaagcccctgaatctgaagttagcaactctgtttcaaatgttaccatcccaagcaccccacagagtgttggtgtgaatacccggaggtcttcccaagcaggggatattgctgcagaaaaactagtccccaagccacctccagcaaagccttctaggccccggccgaagagtcgaatttctcggtacaggaccagttcagcccaaagactaaagcgtcagaagcaggccaatgcacagcaggcagaattgtcacaagctgccttggaagagggaggaagtaacagtttagtaactcctactgaagctggaagtctagacagttcaggagaaaacaggccattaacagggtctgacccaactgtggtgtcaattactggatcccatgtcaaccgtgctgcatctaaataccccaaaaccaaaaagtatctagttacagaatggttgaatgacaaagcagagaagcaagagtgccctgttgagtgccctttacgtatcacaacggatccaactgtactggcaacgaccctaaacatgttaccaggtcttatccattccccggttaatttgcaccacccccaaacactacattcgctttggctcaccctttatccctgagagacgtcgaaggccccttctgcctgatggcacattcagctcctgtaagaagcgctggataaaacaagccttagaagaagggatgactcaaacatcatctgtaccccaagagactagaactcagcacctataccaaagcaatgagaatagtagctcttctagtatctgcaaagacaatgcagacttgttgagcccattaaagaaatggaagtctcgctatctgatggagcagaatgtcaccaagttacttcggcctctgtctccagtcacaccaccccctcccaaattcaggctcaaagagtccccagctggccacacctggctcatctcacccaggaggaagaggagtgtcgaaatggatacaggcctcatgttttcaccagtcaacatctcttactactgctagtcgctgcaacactcctctacagtttgagctttgtcaccgaaaagacctggatttggcaaaagtaggataccttgactccaacactaacagctgtgctgatagaccttccctactcaactcaggtcattctgacctggctcctcatccctccctcggacccacttctgagactggtttcccaagcagaagtggagatggacatcagaccctcgtgagaaactcagaccaggcatttcggacagagttcaacttgatgtatgcctactcccctttgaatgctatgcctcgagcagatggactgtatcgaggatctcctctagtgggggatagtttatgcctttacatttggatgggggatattgttcccctgcagaaggattttccagcagatatgaacatggcttaatgaaagacctctctcgtggatccttgtcacctggcggtgaaagggcctgtgaaggagtcccatctgccccccagaacccaccacagaggaaaaaagtatccctgctggagtaccgaaaacggaaacaagaagctaaggaaaattctgctggtgggggaggtgactctgcacagagcaaaagcaagtctgcaggagctgggcaaggcagcagtaactccgtttccgacactggtgcccatggtgtgcagggatcctcagcccgaactccatcttcccctcacacaaaattcttcccatctcattcctctatgtcccatttggaggcggtaagcccatcagattccagaggcacttcttcatctcactgcagacctcaagagaatatcagcagtaggtggatgggttcccacatcagtagaacgactccgagaaggagggagcatccccaaggtcctccgaagcagcgtgagggtggcccaaaagggagagccctctcccacatgggagagtaacatcacagagaaagactcagaccctgcagatggagaaggcccagagacattaagctcagcactctcttaaaggagcaacagttttacagccctttccagatacagctaccagactcgttggccccatttacggggacaccagggtattttagcagccagccacattctggaaacagcactggcagcaatcttccaaggaggagctgcccttctagtgctgctagccctaccctgcagggaccctcagactcgccaacctcagattcagtttctcagtccagcacaggaactctgagttccacctcctttcctcagaaattctaggtcgtcattgccatcagacttacggactaatcagtctgcccagtgctgggcagtcagctgtctaccaggcctccagggtatctgcggtttccaattcacagcactacccacaccgtgggagtgggggtgtgcaccagtaccgactccagccactgcaagggtcaggagtcaagactcagacgggactttcctagggcttctggatttgggcaaacagaactgaatgagcccatagctgcttccttccagctgcctctggaacctaggccgagcatattgctgaggaaacgggggtacaaggtgccagaggattgggtctggtggacaagaaacaagacttgtggtcac

SEQ ID NO: 21101 - DNA, 409 bp, Homo sapiens
  SIMILAR (5)..(139): 391254mologous to Chilo iridescent virus putative small basic protein,accession number AF003534,Smith-Waterman Score=67.
ctgccggcctccttcgccccgtcccgtccgcgcagcgcgtcccgcccgcccgcaggccagcttctctcgggagcccccacccaggcgcatggctccatgaagcaagaggaggaggcagagcgcgagaggtcccgtccgccccagccgcgtctgggccaggataaaagcaaaaccatattcctgctgctgtcagttatgatgcactgagaaaacttcagagacctaaactttttccagagaagagaagctttactggtgttccagccctaagcaaccatctttcctgtgaaaaattccctctcgtactttagttctgtggatccaaaatttatagcattcttctaccaccacaggggctcatatgacattaacagacaagacacttttcagaaagacaggcaacgtgttg

SEQ ID NO: 21102 - DNA, 488 bp, Homo sapiens
  SIMILAR (94)..(198): 651254mologous to Homo sapiens Human secreted protein, SEQ ID NO: 7870,accession number G03789,Smith-Waterman Score=104.
taaggctcatatgacattaacagacaagacacttttcagaaagacaggcaacgtgttggaccttccggagcttctcagaagacagagggttttcttttgaggctgttgtacagtggcctgattatagctcactgtagcctcgaaattctgggccgaaatgatccgcctgcctcagcctccaaagtagctgagactacagactctggaagtctctctttggcgaacacctagcccccaactcccagggcacttcccagacagccaatgccacatcacaggcagcccctgctctgcccttggggtctgtgcctggcagaagggcggcagaccctcggcccctcttggcctgggccccagctcctccgggccctggaaccagcagaaacacccaccctgcgcctgatggactggacatgcttgttcccattggtgatggtgtgttgggagggaactgttttagaaaccaatgtaaatctgtgtctacatca

SEQ ID NO: 21103 - DNA, 830 bp, Homo sapiens
  SIMILAR (215)..(334): 671254mologous to Homo sapiens PRO0117,accession number AF090895,Smith-Waterman Score=123.
ggaagtcttaggactcataaaaaatgaaccaactttttgaaatgttagtcttcaaaaattggacaatctttctgagccattctattattaggactattcgttagctgactttagagcctttaatgtttcgttattatttcaaacaatagagaactttactcccccccaaattttgagacagggtctggctctgtcatgcaggaggctgtctgtagtgcagcggcacagtctcagctcactgcaacctccgcctcttgggctcaagtgatccttccacctcagcctcctgagtagctgggactgtaggtgcaggccaccacatctggctaattttaaacaatagagaacttccaaaacaaaagttctttattaattcttcaagaaatctgttttttacttagtcgattaatgtccatctcatgttgcctcaatagcccatgtatgaatcactcttcttgcagattttgttcagttttgttgtatgtagacccatctttctttgagttggtttctttgattgagttgatttgtctgtattaaaacccaaacaatacctaagccaaaaaagcaatgtaggcacctgtgaactcacacacttggttgcaattgcttcagtaaaaaggacagtttacactcaaattgaagcaaccattatgtttccacaaacaacattccttattatcccacctcaccttttcattcttcctatgctgtctaatctgattctgtacaagagataaggcaggtactgctaaatgataacttagatgcaggggccatcatgaaaatattcatcccatatcttacattaagcaaactactagcaactg

SEQ ID NO: 21104 - DNA, 2081 bp, Homo sapiens
  SIMILAR (1620)..(1718): 691254mologous to Homo sapiens Human secreted protein, SEQ ID NO: 5327,accession number G01246,Smith-Waterman Score=126.
gttacactccaaaatttttttttttttcttttgtgagcatggggctgtattttaatacaagaaagacattgctctagaacatggctcagcctttgcttcagggcctgagcacgtttattttagccataagggtaagggagcaggtcagaaatgacttttagtgtaatcctatctgtaattaaaaatacaaatgctgtcataagatcaaatgttatcaaaaatcagtatttaaaattaaatttacccccaaatttcatttcaaaaaaaatttgtaatgttctttttcagtgaagccctttgcactgctagagctgaagaatgtgatccaatcggcttgttgaataatccccgcaccagtaggtattcccgcttgaagcccaactctagcctggggggctccgagagccgaaagacacagatggggcccctgccgccccctccgaagagtccggatggggcgcgccccgtccccgggtgcatcaaagaggctggcccggccaggggccgaagccggctggcaccgaaccccggcgcacttcgccgcggggggggctgggccgttagtcggctcgaatttaaggcttggtatccaaagctgcggccggtcaaggcgaggcgaggcgaggcgaggcgacgtgagcgaggggtgctttagggagaacaaccgctggcagcttcaatgctgggtggctaacgctcgacggtgcccggcagcaacccggccgacaaaccccgacgcggatcccgagctgcgtcgcggacaatgctgcgggcccgtcccggactacgactcccgacgggctctgcgaccgctccggggcggcccagcgtgcactgcgccggccagttttgacagccgggcgccctactcggctagctctgctcccagcgagggacgctggccttctcgcggctttcccccgatatctctctttattcccagctgcctgaaactcggtcccacgaatggcaggcagcgtccaaaattcaaccccgtaaagccagcaccagccaataaagcgcacggatggaggccacgtgacagcagtgggccggccctccggctgagccctgatctctatggtttccgcggctcgctagaaggagtgtggtccactggaggactccctacattcttcctccattacctcactgcctccggtggctgctgggataccggaggactcgggtcccggctcgactcagtcctccagccgcccggggaatacctctagttcttcccggccgccgccgccgccgccgccgccgccgccccgccgcttcctcctccgcctgccggcctcgcttcgccgcgccccgtccgcgcacgtcgtccggcccgcccgcaggccagcttctctcgggagcctccacccaggcgcatggctccatgaagcaagaggaggaggcagagcgcgagagatcccgtccgccccagccgcgtctgggccaggagaaaagcaaaaccatattcctgctgctgtcagttttgatgcactgagaaaacttcagagacctaagctttttccagaagaagagaagctttactggtgttccagccctaaggctcatataacattaacagacaagacacttttcagaaagacagatggagtctctctgtcacccagactggaatgcagtggcatgatcttggttcactgaaacctctgcctttctggttcaagcaattctcatgtttcagcctcccaggcaacgtgttggaccttccggagcttctcagaagacagagggttttcttttgaggctgttgtacagtggcctgattatagctcactgtagcctcgaaattctgggccgaaatgatccgcctgcctcagcctccgaaagtagctgagactacaggtattgtttgggttttaatacagacaaatcaactcaatcaaagaaaccaactcaaagaaagatgggtctacatacaacaaaactgaacaaaatctgcaagaagagtgattcattacatggggctatttgagggcaacatgagatggacattaatcgactaagtaaaaaacagatttcttgaaaaattaactcaagaacttttgttttggaaaaaa

SEQ ID NO: 21105 - DNA, 234 bp, Homo sapiens
  SIMILAR (234)..(94): 1001254mologous to Homo sapiens succinate semialdehyde dehydrogenase,accession number L34820,Smith-Waterman Score=250.
gcacattcggtgtcttctgtgctgagctggcagatgccggggaggggtgctgtagtctccttttaaatttttttaaagaaccaaagaatcctacaagcccccgtaacacacatacttgagttccagatactcatcaatgccatacttggacccctctcgcccaaggccggactgcttcactccaccaaaagggcactccacagaggaaattaatccttcgttgacgccaaccat

SEQ ID NO: 21106 - DNA, 400 bp, Homo sapiens
  SIMILAR (3)..(374): 861254mologous to Homo sapiens NAD+ dependent succinic semialdehyde dehydrogenase,accession number Y11192,Smith-Waterman Score=504.
  misc_feature (1)...(400): n = a,t,c or g
aagcccgccgtgtttacggagacattatccacaccccggcaaaggacaggcgggccctggtcctcaagcagcccataggcgtggctgcagtcatcaccccgtggaatttccccagtgccatgatcacccggaaggtgggggccgccctggcagccggctgtactgtcgtggtgaagcctgccgaagacacgcccttctccgccctggccctggctgaggtaaannnnnnnnnnnnnnnnnnnnnnnnnnnnnnnttgcttgcaagccaggctgggattccttcaggtgtatacaatgttattccctgttctcgaaagaatgccaaggaagtaagggaggcaatttgtactgatcctctggggccaaaattttctttactggntaacaactacaagaaaaa

SEQ ID NO: 21107 - DNA, 607 bp, Homo sapiens
  SIMILAR (317)..(607): 1001254mologous to Homo sapiens dJ73M23.1.1 (Phosphatidylinositol-glycan-specific Phospholipase D 1 precursor) Glycoprotein Phospholipase D, Glycosyl-Phosphatidylinositol specific Ph,accession number AL031230,Smith-Waterman Score=534.
cggccgcccacgaagctgtcggtgcgcagcagcgccgcagagaggcccgccaggcgcccagcgtagcagcggagctgggccgggccgggcgcaggcccggaggcagggaccaggccgccggcgcgggggcggaggcggcagcctggaaacgtcgacccgaggcgccgggccccacagctccgcagccaaatgcaggtcgccatggcccgggcaacgacggcgacaggaaacaggttgtggcctggcctgctgatcatgttgggttctgtctgccatagaggttcaccgtgtggcctttcaacacacgtagaaatagctgttactagaacaccaggatgcgtatcaggctggaatcgtgtttcctgattgtttttaccctagcatctgcaagggaggaaaattccatgatgtgtccgagagcactcactggactccgtttcttaatgcaagcgttcattatatccgagagaactatccccttccctgggagaaggacacagagaaactggtagctttcttgtttggaattacttctcacatggcggcagatgtcagctggcatagtctgggccttgaacaaggattccttaggaccatgggagctatt

SEQ ID NO: 21108 - DNA, 626 bp, Homo sapiens
  SIMILAR (304)..(41): 771254mologous to Homo sapiens succinate semialdehyde dehydrogenase,accession number L34820,Smith-Waterman Score=321.
agtctccttttaaatttttttaaagaaccaaagaatcctacaagcccccgtaacacacatacttgagttccagatactcatcaatgccatacttggacccctctcgcccaaggccggactgcttcactccaccaaaagggcactccacagaggaaattaatccttcgttgacgccaaccataaatctggcatgagctggagaaaaatgattatgactggtattgaacaaggacaaacacctacctgctaacccaacatcagctgcgttagcgattgctatagcctcctcctctgtatcgaacctgccaaagttaagataggtcataaaaaatgtaagggggagaggaaaggaaaccagttttgttttcttctgatttgtttcccaaataatcacaaggagtaaatcagagttttgcaaagagatccaagagcagattgcagaagaaagcagcaccacagggtttcctatgttctcttctattcttcctcccatctccccgctggctggaggatcttacttgataactggtgccagaggcccgaaagtctcttcatgagtgcacagcatgtcctgggtgacattgcacagcagggtaggctcaaagaaattttttccaagttggtgt

SEQ ID NO: 21109 - DNA, 1764 bp, Homo sapiens
  SIMILAR (644)..(285): 991254mologous to Homo sapiens NAD+ dependent succinic semialdehyde dehydrogenase,accession number Y11192,Smith-Waterman Score=628.
aagcagctcgcttgtattaggcgctcacgttctgcctcccctactgggcagtgcataacttgatgaggcttgagggcaggggtcgtgtccctagtgcccggctcaaagtggaagctccaaacttatttgtcggtcgtctcccttgttgctctgactttccactttgtataccctggggaactgagcacaggagggaggcgacgcggctggtgtcactttggggtaaagccccctctgctccccgccgtgtccccggccagctctggccccctgcatccgggctctctcaccttggcggagacctccctccagcggcagaaagcctcgtaggcagcgcgcacggcggcgcgggcctctcgcaccccgcagtcggctaccatgcccagagcggcgccgctggccgggtcttgcacggggaaggtggcggcggccgggagccagcggccgcccacgaagctgtcggtgcgcagcagcgccgcagagaggcccgccaggcgcccagcgtagcagcggagctgggccgggccgggcgcaggcccggaggcagggaccaggccgccggcgcgggggcggaggcggcagcctggaaacgtcgacccgaggcgccgggccccacagctccgcagccaaatgcaggtcgccatggcccgggcaacgacggcgacaggaaacaggcaagcgggcgcgcgcgcacgggaacgcaggggtcgcggggaagcaagaggagcgaggaggcgccggggacgcgcggggaaagcgtgggagctggcggaaggttgcagagccacagagcagcgccctctctccgcgtctttctcgctgcaccgccgcgccgccctctgcaccttgccctaagcgccgcgcggcttctctcctggcgcgaccttctcccgggggagggttgggttcggggatggagaaggctcgccagtagatgcacctgcggactgctgtcaccttttcacttttcgggtgctcatttgtcactaactgctcctgagcccccaatcgctgctagagacccactctctccccttagcatcccccaaattcggcatccccggaatttgtgcgcggtccatagatgcgctggtgcctgccctaaatgccaaggccgtgatcacgcttcttcagttgtagctcctgagcacgtagtattgattgggaggcctatactccccaggctgttgactcctgccccttaatctctgtattttcttgctctgcagctgttactagaacaccaaatagatgcatgctatgtttgtcactaatccaccaaatgtcaatatttttctcatctgttgttactattttcagcttcagaatcaaaacaactcttactttattctgcatttttcaggtatgtgccagtcaaagatctactgggaatttatgagaaactgtatatttgcttcatttctctgttacaaactggattataaagataccaggaatagtaccatattcattttattttttctttctctctgccatagttatatcccacttactctacaaagtccccgtttttggtggaacaattccaagagtattttcttggaggactggatgatcggtaaaattcatgcttgtgaagaagtagataaatggctaactcatttgactgtttcctcagtgactcagttttacagggggttgttttctcagtcgtaaccagtttattcctctttctcttcaacagctcaaaaatgcagaaaaatgattttcacagaaatttgactacatccctaactgaaagtg

SEQ ID NO: 21110 - DNA, 702 bp, Homo sapiens
  SIMILAR (214)..(360): 971254mologous to Homo sapiens succinate semialdehyde dehydrogenase,accession number L34820,Smith-Waterman Score=238.
atgagggggacaggcagttgttcattcccatcggcgaactggattttggggatgaggaagactcgagtacatgtgtctgtccagttggcaggtcatgctgatgcaagaggtgggctcctaaagccttgggcagctctgcctctgtggctttgcaaggtacagcccttttccccattgctttcattagctggtgttaagtgtcttcagcttttccagatcctgttgcaccacgcagcaaactctgtgaaaagggtctctatggagctgggcggccttgctccatttatagtatttgacagtgccaacgtggaccaggctgtagcaggggccatggcatctaaatttaggaacactggacagcttttggactcttggacttacgccagtggtttgccaggggctcttgggcctcgggccatgggccatagactgaaggctgccctgttggcttccctacttttgaggttttgggactcggactggcttccttactctgcagcttgcagacggtctactgtgggacttcaccttgtgatcctgagaccacagaccatggggtggtccttaactgtctatggaggatgtatagtgaggattttcatgtcctctgcttcaccttttgctatcgggggccaaaaagttcaccctgggatcatgttgacgctgccatttgtttgtacatgtgactcagatggggcatga

SEQ ID NO: 21111 - DNA, 6835 bp, Homo sapiens
  SIMILAR (3412)..(4800): 931254mologous to Homo sapiens Glycosyl-phosphatidylinositol- specific phospholipase-D,accession number R75110,Smith-Waterman Score=2279.
  misc_feature (1)...(6835): n = a,t,c or g
gctgcaggcaccgcgccggaattcccgggcgcgccggggcactgtcactaggagatgaatttcagctcttccttctccttgggaccttgggaatgtggctagtacactccaggccagatgctaggcagctccctgtgtgcccagggtcttgccagacctttagttactcaaccatagcttcccagtggctcaatgagggatgttaaatcctaggtggggttcaggagtaattgcatccagcactactttcattcacattttccttccacaacccagaataaccacaagatgtaagtggagtctacacagacagagatggggaaaggaaggtgcttcgtctccacctacttggccgcctaattggatttgcatctgtttaagattacggagtctttctttcaaagtgagaggcaacgccggtcatagcggcttttgttttttgtgcgttatttgaatgatgagctgtaaaaactctcattagataaaaggtgcctgacattcaagggctcatgcctcttctacaaagtgggttggcaattacagaaattctttccctttttggttgactgtggtgaaagtacttttgctcttttggaggtgagggagcagcaccacaccaggacagaaagaacaggctcaggtgacagccacttactcaggctcaggtcggtgggcaagtgggcactggcctcctcccatcttggcaaagccactgacagtaggcaaggaagggctgggcggtgctgctcgtaacaatggctcttgtatgtccttagaattttcatttttttgtgaagtgcttttactttctctctggctcacagtatcgcaaggagctaagtaaggcctgtatggaatctccactgtatccatgggatgggaggtgctgaacacacgcccaaggcaacaaggccactcagggaaggagccaggccatgccactgcgtgccttccatcctaccaagctgcttctgctattctttgctttacacttcagctcatttactcaaggaaatgaaatgaagtgggcaaacagggacagaaatgaaaataggaattctttaagtgggtaaatttggggacaattaaagggcattcaatttaaaatatgggttcaggattaggggagaggtgctccttcgtgcctcacagaagcacggacaattctgtgctatttattgtctttgaaagagggttcactcaaacctctgccgcaacacctccagatgcacattcggtgtccttcctgtgcctnaacctggcaaaaagcccggggaaggggtgctgtgcccccctcaacctgccctgcccaatcaacaatccaagggtcctcccttcaaaggtgcctctgggccccatgttctgtagcgaacatgggggaatggttgtgccaatgccccaggcagtgatcaagcctttgtgacggcccatggggctgggcctgccttgtgctgtgcctgctctgaggcagctggggctgtggtggggatccagggcctcattctgtaaacccagtgctggttctctgggagtctgcagccacaggcacgtggcacatattggtccctagttacattaagggcaggggtaggatttgcatctgtttaagattacaaggactggatgagttctgaaaaattcataattctgaaaacctattagtttatttaaaataatggatggcatgtacctatatatgtagataagtctccttttaaatttttttaaagaaccaaagaatcctacaagcccccgtaacacacatacttgagttccagatactcatcaatgcccatacttgggaccccctcctccgcccaaggccggactgccttcaactcccacccaaaagggcactcccacagaggaaattaaatcccttcgttgacgcccaaccatgccccacttcccagcctgctctgcccactctcccagatctgggctgggtcttgagagtaaaaataacctgctaacccaacatcagctgcgttagcgatatgttataacctcctcctctcgtattgaacttgataactggtgccagaggcccgaaagtctcttcatgagtgcacagcatgtcctgggtgacattgcacagcagggtaggctcaaagaaattttttccaagttggtgtcgttttccacctgtcacaacggtggcacctttagaaacgggcatcattcacctgtttctccaccttttctaccgctttttcattaattaatgggccctgagtagttccttcctcaaatccattacctacgcgcaggttcttcttcatggcctcggcgaatgcttttacaaaggcatcatggatgcccctttgcaccaagaattggtttgagcaaacacaagtctgtccagtgttcctaaatttagatgccatggcccctgctacagcctggtccacgttggcactgtcaaatactataaatggagcaaggccgcccagctccatagagacccttttcacagagtttgctgcgtggtgcaacaggatctttcctgtagttgttgaaccagtaaaggaaattttggacaccagaggatcagtacaaattgcctcccctacttccttggcattctttcgagaacagggaataacattgtatacacctgaaggaatcccagcctggcttgcaagctcagcccagggccaaggcccgaaaagggcgtgtcttcggcaggcttcacccacgacagtacagcccggctgccagggcgggcccccccacctttccgggtgatcatgggcactggggaaattcccccgggggtatgactgcagccacgcctatgggctgcttgaggaccagggcctcgcctgtcctttgccggggtgtggataatgtctccgtaaacacggcgggcttcctcagagaaccactctaggaaaaaggcggaatagagaatttctccatgtgcctccttcagtggctttccactttcagctgtgattattctggcaaggtcatccttattttgtatcattaaattgtaccacttccgaagtaatgaactcctctccttggcggagacctccctccagcggcagaaagcctcgtaggcagcgcgcacggcggcgcgggcctctcgcaccccgcagtcggctaccatgcccagagcggcgccgctggcaggagtcttgcacggggaaggtggcggcggccgggagccagcggccgcccacgaagctgtcggtgcgcagcagcgccgcagagaggcccgccaggcgcccagcgtagcagcggagctgggccgggccgggcgcaggcccggaggcagggaccaggccgccggcgcgggggcggaggcggcagcctggaaacgtcgacccgaggcgccgggccccacagctccgcagccaaatgcaggtcgccatggcccgggcaacgacggcgacaggaaacaggttgtggcctggcctgctgatgatcgtgatggcttctctctgccatagaggttcatcgtgtggcctttcaacgcacatagaaatcggacacagagctctggagtttcttcatcttcacaatgggcatgttaactacaaagagctgttactagaacaccaggatgcatatcaggctggaaccgtgtttcctgattgtttttaccctagcctctgcaaaggaggaaaattccatgatgtgtctgagagcactcactggactccgtttcttaacgcaagcgttcattatatccgagagaactatccccttccctgggagaaggacacagagaaactggtagctttcttgtttggaattacttctcatatggtagcagatgtcagctggcatagtctgggcattgaacaaggattccttaggaccatgggagctattgattttcacggctcctattctgaggctcattcagctggtgattttggaggagatgtgttgagccagtttgaatttaattttaattaccttgcacgacgctggtatgtgccagtcaaagatctgctgggaatttatgagaaactctatggtcgagaagtcatcactgaaaatgtaattgttgattgttcacatatccagttcttagaaatgtatggtgagatgctagctgtttccaagttatatccctcttactctacaaagtccccgtttttggtggaacaattccaagagtattttcttggaggactggatgatatggcgttttggtccactaatatttaccatctaacgagcttcatgttggagaatgggaccagtgactgcagcctacctgagaaccctctgttcattgcatgtggtggccagcaaaaccacacccagggctcgaaaatgcagaaaaatgattttcacagaaatttgacttcatccctaactgaaaacattgacaggaatataaactataccgaaagaggagtgttcttcagtgtaaattcctggaccccggattccatgtcctttatctacaaggctttggaaaggaacgtaaggacaatgttcataggtggctctcagttgtcacaaaagcacgtctccatgccccttaggcatcattacttcttgtcatttccttatgcgaggcttggctggggcaatgacctcagctgaccttcaaccaggatggggcacggtgaccttcgtgggtggggcgcaccagggcttacagccgccccggcccacattccacattcggggcgcgtgtacctcatctacggcaatgacctgggcctgccacctgttgacctggacctggacaaggaggcccacaggatccttgaaggcttccagccctcaggtcggtttggctcggccttggctgtgttggactttaacgttggacggcgttgcctgacctggccgtgggagctccctcggtgggctccgagcagctcacctacaaaggtgccgtgtatgtctactttggttccaaacaaggaggaatgtcttcttcccctaacatcaccatttcttgccaggacatctactgtaacttgggctggactctcttggctgcagatgtgaatggagacagtgaacccgatctggtcatcggctccccttttgcaccaggtggagggaagcagaagggaattgtggctgcgttttattctggccccagcctgagcgacaaagaaaaactgaacgtggaggcagccaactggacggtgagaggcgaggaagacttctcctggtttggatattcccttcacggtgtcactgtggacaacagaaccttgctgttggttgggagcccgacctggaagaatgccagcaggctgggccatttgttacacatccgagatgagaaaaagagccttgggagggtgtatggctacttcccaccaaacggccaaagctggtttaccatttctggagacaaggcaatggggaaactgggtacttccctttccagtggccacgtactgatgaatgggactctgaaacaagtgctgctggttggagcccctacgtacgatgacgtgtctaaggtggcattcctgaccgtgaccctacaccaaggcggagccactcgcatgtacgcactcatatctgacgcgcagcctctgctgctcagcaccttcagcggagaccgccgcttctcccgatttggtggcgttctgcacttgagtgacctggatgatgatggcttagatgaaatcatcatggcagcccccctgaggatagcagatgtaacctctggactgattgggggagaagacggccgagtatatgtatataataggcaaatgagaccacccttggtgacatgactggcagatgcaaatcatggataactccatgtcccagaagaaaaggcccaatatgtattgatttctccctgaaagccagctcaaggtttggggagctcccctcatcacccgtgaggtcccaagggcaaagaacccaagtcgttcattggttgctgggaagggagttctttgggagcccgactctccggggcacttcacgtctatagccttggctcagattgaagatttcactgcatttccccactctgcccacctctctcatgctgaatcacatccatggtgagcattttgatggacaaagtggcacatccagtggagcggtggtagatcctgatagacatggggctcctgggagtagagagacacactaacagccacaccctctggaaatctgatacagtaaatatatgactgcaccagaaatatgtgaaatatcagacacactctgctcattcatgtctccttccacagtttatttcctcgcttcctttgcatctaaacctttcttctttccgaactttttgcctatagtcagacctgctgtaccacctatttcctcttcctcttgaatgtttttccagtggctggaaaggtccctctgtggttatctgttagaacagtcccctgtacaccaattccctcccctaaaaacatcccttttttaaaaaaagaattggttccagcccataaagaaagaacaagatccatgccctttgcagggacatgggatgggagctggaggcccattatcccttcataaactattgcaggaacagaaaacccaaacactcccatattcctcacttgtaagtgggagctagatgagaacacgtggacacatagagggaaacaacacacactggggcctatgagagggcggaaggtgggaggagggagagatcaggaaaaataactaatggatacttagggtgatgaaataatctgtgtaacaaacccccatgacacacctttatgtatgtaacaaaccagcacttcctgcgcatgtacccctgaacttaaaagttaaaaaaaagttgaacttaaaaataacaggattggcccatgccaatcaaagtataatagaaagcatagtatacaga

SEQ ID NO: 21112 - DNA, 403 bp, Homo sapiens
  SIMILAR (189)..(401): 1001254mologous to Homo sapiens FGFR1 oncogene partner (FOP),accession number Y18046,Smith-Waterman Score=363.
agtggtggccgaggaggacacggagctgcgggacctgctggtgcagacgctggagaacagcggggtcctgaaccgcatcaaggctgaactccgagcaggtgtgtttttagcactagaggagcaagaaaaagtagagaacaaaactcctttagttaatgagagcctgaaaaagtttttaaataccaaagacgctgcaaggtctcgaaggtcgagagaatttagcccgagatttaggtataattgaagcagaaggtactgtgggtggacccttattattagaagtgatcaggcgctgtcaacagaaagaaaaagggccaaccactggggaaggtgcacttgatctatctgatgtacattctccaccaaagtcaccagagggaaaaacaagtgcacagacaacacc

SEQ ID NO: 21113 - DNA, 1700 bp, Homo sapiens
  SIMILAR (756)..(1379): 901254mologous to Homo sapiens FGFR1 oncogene partner (FOP),accession number Y18046,Smith-Waterman Score=927.
cacccctactgccccagtgccaggccttttctagcagctctcatgggttcatccctgctgcgggcattgctccaccaaggggcagtgctctccctgccgggatggcctccactgtagagacctatgtcaccaaggccaggccctctcagggggctccatccaacgaccattctgcctcagggctgtcctgccacactgtgaagaaggtgccttgcttctcctttgccttctgccatgagtgtaagtttcatgaggcctccccagccatgctgaactacaggaacacagagacgcatttggaagccagtgtggacatcctgtggtctgcgcgtacacatgtgacaggcgcgtccttcaccgtggccaaatcagcctctcaactgctggagcccggcctcggacacttctcggcttacgccgccatacagtggcgcaccccgaaaccccggaaccgacagctcggctggccttgcgcacccacactctccaaggcagggctcgcgcggcttcggcggttgtcttggagaagcaagatggcggcgacggcggccgcagtggtggccgaggaggacacggagctgcgggacctgctggtgcagacgctggagaacagcggggtcctgaaccgcatcaagaacaaaactcctttagttaatgagagcctgaaaaagtttttaaataccaaagacgatgctatgttgcatgtggtggttgaggttgtacacagcaagactccagatggagccatccgcatgaaggccaatgatgaggccaatcagagtgatacaagtgtctccttgtcagaacccaagagcaaaagcagccttcacttactgtcccatgaaacaaaaattggatcttttctaagcaacagaactttagatggcaaagacaaagctggcctttgtccagatgaagatgatatggaaggagattctttctttgatgatcccattcctaagccagagaaaacttacggtttgaggaaggaacctaggaagcaagcaggaagtctggcctcgctctcggatgcaccccccttaaaaagtggactcagctccctggcgggagccccttctttaaaagactctgagagtaaaaggggaaatacagttttgaaagatctgaaattgatcagtgataaaattggatcacttggattaggaactggagaagatgatgactatgttgatgattttaatagtaccagccatcgctcagagaaaagtgagataagtattggtgaagagatagaagaagacctttctgtggaaatagatgacatcaataccagtgataaggtgtgcacacatttggaactcacagacaggaacacagagacgcatttggaagccagtgtggacatcctgtggtctgtgcatacacatgtgacagtgccagacgatgaggaagaagacgaagcagtgccagaaaacaaattgacattagacaatctggcagaagggttccacttattcaatatggcttttgacttctcttataacatggacttttctatgaaacaggcactgaatctaaagcaaatggtggaagaagaattggtgctaaatggaaacatgtttagagaaatggaaaagcaaaaaagtcagacaaattatgatgtatctccatcagattacacttattgtgcctccctctcctgcctcctcttccacctcttctacttctgccacccctga

SEQ ID NO: 21114 - DNA, 2419 bp, Homo sapiens
  SIMILAR (819)..(1808): 861254mologous to Homo sapiens FGFR1 oncogene partner (FOP),accession number Y18046,Smith-Waterman Score=1397.
atgctcctcgacttaaaatggggttacatcccaataaacccatcgtttcccagtcacgcgttgtaaacgacggccagtgcaagctgcatgctgcagtcgactctagagatccccccgatggaaccaagaggcgcgtcagctccggcgggacggggcttccaggacccgggaggggtccaggactccccgccggcgcctggctgtcggcggagggccgcggggcaggagggagtggagactgcggccccagttcgggcagcgcggagcccacccaacgccctcctcggccctcggctcttcctggggccatcccgcccctgcacctcggcctggcacctttccggttagcctcggaggccgtggccgagcaggccccgcccccagcgccgaccctaagtttcggcgctcagtggtccggcgctccccaaggctcggtgtccagcgtcaaccccgagggggcagggccagcgcgctgcgcgtcggggcggggctttggctgcgtcggccgcgtagcccgcgcgcggagcgtaccctgctgcggccgttggccgttagcgcggcttcggcggttgtcttggagaagcaagatggcggcgacggcggccgcagttggtggcccaggaggacacggagctgcgggacctgctggtgcagacgctggagaacagcggggtccttaaccgcaatcaaggctgaactccgagcagctgtgtttttagcactagaggagcaagaaaaagtagagaacaaaactcctttagttaatgagagcctgaaaaagtttttaaataccaaagacggtcgtttagtggctagtcttgttgcagaatttcttcagttttttaaccttgactttactttggctggtttttcaacctgaaactagcacatattttaacttcttttctagctgcaaggtctcgaaggtcgagagaatttagcccgagatttaggtataattgaagcagaaggtactgtgggtggacccttattaattagaagtgatcaggcgctgtcaacagaaagaaaaagggccaaccactggggaaggtgcacttgatctatctgatgtacattctccaccaaagtcaccagagggaaaaacaagtgcacagacaacaccaagtaagataccaaggtataaaggacaaggtaagaagaagacaagcgggcagaaggctggtgacaagaaggccaatgatgaggccaatcagagtgatacaagtgtctccttgtcagaacccaagagcaaaagcagccttcacttactgtcccatgaaacaaaaattggatcttttctaagcaacagaactttagatggcaaagacaaagctggcctttgtccagatgaagatgatatggaaggagattctttctttgatgatcccattcctaagccagagaaaacttacggtttgaggaaggaacctaggaagcaagcaggaagtctggcctcgctctcggatgcaccccccttaaaaagtggactcagctccctggcgggagccccttctttaaaagactctgagagtaaaaggggaaatacagttttgaaagatctgaaattgatcagtgataaaattggatcacttggattaggaactggagaagatgatgactatgttgatgattttaatagtaccagccatcgctcagagaaaagtgagataagtattggtgaagagatagaagaagacctttctgtggaaatagatgacatcaataccagtgataagcttgatgacctcacacaagatctgactgtatcccagctcagtgatgttgcggattatctggaagatgttgcatagacacgaagaaggaagtattctaattaacaaggacagaggactgaccggttccatttttttttttttccagacaatcactcagctggaatgtctgctctctattggtgccttgcatttcaaaaacacctgcagatattttttaaaagtaattttcattttactaaaacaaaatacttcctatttgagcccaatgtgtggaagatttaatattcttaatttaactgtacatttctttatggaaattgattatctacactcagtttcattacagggaaggaacccatgaaaacatcagtgttaagagcatgatgaaaggtgtcaataaagccgtaggatcgcgcaaccctttgtgtgtgtggctgctggtacgtgtgatctttgaaaaccttggctttagccctctggaatcagagcttacccaccatagtatattttgatattaggtggttctacacatagttggcaaaatgacttggtaaatttgtaatgctgaagtatattagtataagttaaatttgatgtgtcaactttattttgtatttccttccatttggaaggtttgttagaccattaaggttatattaaagtactcttgtgtgtgctaaaaa

SEQ ID NO: 21115 - DNA, 651 bp, Homo sapiens
  SIMILAR (464)..(649): 881254mologous to multiple sclerosis associated retrovirus protease,accession number AF009666,Smith-Waterman Score=269.
ctattgatacttgtgattacattgtgaagttctcatgttgtgtttttcagctctatcaagtcgtttatgttcctctaacattttatgatggttcttaacttctttgcactgggatagaacatactctgttagctcatcaaagttcattattacccacattttgaagcctgtttctgccagttcatccagctcagcctcagcccagttctggctccttgctggagaggtgttgtcatcatctggaggtgtcaccagtggaggctgcacagcagcaaagatggctgcctgctccttcctctgggagctcaatcccagagaggcaccagcctgatgccagcaggaatgctccagtataaggtgtctggcaaccctgttttcattcttctcagtgggagcctccaactgcagctgattgtagaccaatatattttcaagattgaatccacaaactaaaaatgtcttctgtgccagacaactgtcctcctgatctgtcactatctgaggggtcctaggacaggcagtcactagatacttctcccaggcactaagttgtgactggggaactttactcttttcacgtgcttttctaattatgcctgaaagccccactcctttgttagggagagacatcctagcaaaagcaggggccat

SEQ ID NO: 21116 - DNA, 888 bp, Homo sapiens; identical to SEQ ID NO: 14027
  SIMILAR (539)..(604): 811254mologous to Homo sapiens putative p150,accession number U93574,Smith-Waterman Score=86.

SEQ ID NO: 21117 - DNA, 1428 bp, Homo sapiens; identical to SEQ ID NO: 16274
  SIMILAR (688)..(530): 411254mologous to Homo sapiens putative transposase Ac- like,accession number Y16947,Smith-Waterman Score=95.

SEQ ID NO: 21118 - DNA, 906 bp, Homo sapiens
  SIMILAR (765)..(571): 1001254mologous to Homo sapiens ASB-3 protein,accession number AF156778,Smith-Waterman Score=339.
tcagctgcaggtcttggagtaagtgtcaaagacagaaagataaggtgtaattctagaagctagaaaagtactgtgggttcctaaaaacaatggtgtcgtttcttctaaagtagttgcattaggatctgccccagcttctaaaagaatctgtacgattttccaatgtccttgacttgcagcgagatgcaaagcacagaaaccttcaaaggtcttcatcttaatgtagttttcagatgaatcaatgtgggcaggcatcatgtaatccttcaaggactctcctgtcctggacaactgtcctccagatctgtcactatctgaggggatcctaggacaggcagtcactatatacttctcccagccactaagttgtgactggcgaactttactcttttcacatgtctttctaattatgcctgaaagccccactcctttgttagggagagacatccttttgtatgtgtgtataggacgttttcctatcttcagggcagactgccgaacttgaggagcatccatgaattttggtgtccgtggacattttgggaccaattcccttgaatttactttacctgcattaattaacatttgcaaacattctacagagttgtgataagctgcttcatgaattggcatccatcccctgttatcagcaacatcgacacttcggccctttttgagcagtttccttaagactttaacattgccttccctggcagcaagtccaactgtagagcacgtgtccgcgtaagcctctgtaaaatccatttgtttgaccagtatgactgacgaagaagggcccacaatacagaaagtgactgccatgccacagtctctgctggtgcctaaagcaggaagtttctctgtttggcagattggaattccttggaaggttcccactaaaaacat

SEQ ID NO: 21119 - DNA, 1434 bp, Homo sapiens
  SIMILAR (1031)..(1240): 921254mologous to multiple sclerosis associated retrovirus protease,accession number AF009666,Smith-Waterman Score=329.
ctaacgagtgtggccagcccattccgtcggcacccataataactgctgggtgcgttgcaggggagacatctcatgcagatagggggatcctctagagtcgacctgcagacatcgacgatcataaagcagttgtgtccagtcagtgatgaatgtgagacctcggaaattaaggtgagtcttcttattgatgttactagaaggcgggaggggctgtgggaagctgatctcttgcacagatctacaggggcggagaggtgagctaaagtccagagcttgctcagagagggcagtgggtgttggagggggactggggttctcacgccccagggaccaggcatccccctctccatgaatgctgtggccatgcaaattaggctctcgtttgcaaaagggaaagattttttcaaaacatttgagatgatgtgtgctgggggagttctgtatatctattctttcgatgaaggaaataaaagcaaaatcctccttgcgtccactcctgtaaaggcaaagaaggttgctgtgaggctcaagcttgcccatgcatgcaaagtagtcagcaccagcatctcgacgctctacgtaatctaatgggtcagcatgtccaaaggtgtatccaggtctgccgagagcaatgactttggtttgaggacagtcaatattgagcggttctttaggacagccattgatcttccagccaaagtggaacccattactttcctggctatgctctttagcacaggagggaatgttggagaaagtggcattggttgtgttgaccagtttgaagctacctggtaagttgtctgctttcatcatttcccaggcaatcgaagtgtggggaaagtgttgtgactctttgataagccttgtggcactgcctagtggagctgtgagaaaagcagcaccatcctctggaccccagaatggtagatccactaacagcttgcaccgtgcaccctcacagagccccgggtatgcttgaccattgagggccaggaggttaactgtttcctggacactcgtgcggccttctgtcttactctcctgtcccagacaactgtcctccagatctgtcgctatccgaggggtcctaggacaggcagtcacttgatacttctcccagccactaagttgtgactggggaactttacgcttttcacatgcctttctaattatgcccaaaagccccactcctttgttagggagagacatcctagcaaaagcaggggccattatacacgagaagagaaaggctttcatgagaaagagagaaattaagaagcaggcaagatcatccaaagtccataccagtgctgcttctagctgtgctcggacagcccctctcggtgagagctttgctgagcaccttattaaaattgcagacttcaccccaccctcatcctcctctccctgcactactttattcttctccat

SEQ ID NO: 21120 - DNA, 1542 bp, Homo sapiens
  SIMILAR (207)..(7): 681254mologous to Homo sapiens NAG13,accession number AF194537,Smith-Waterman Score=223.
ttattcattcagtatgatgttcgctgtgagtttgccatagatcgctcttattgttttgcggtatgttcctttgatgcctagtttgttgagggtttttatcatgaagggatattggattttactgaaagctttttctacatctattgacatgatcatatggtttttgttctcaattatctttacatcttgaatgtggtgaaataactttttcatgtgcttctggatttggtttgctagtattttgttgatgatttttgcttcaatggggatattgacccgtaattttgttgttgttgttgttgttgttatttctttggcagattttggtatcgagtgatactggcttcccatcgtttttgatcccaaaagtgtttgctcattattattttttacctcccaaatatttagcttaaaatcccacttctgatgttttccagctgaagttctgttgggaggaaactttttctctaccaaatgagtacttaggtcaaagtgattgagggcctggatggcctctttatcgatcttcagggttacgtgtcttccggccagggtagctgtctttcggtcggctctctttctgcttctgatatattgctggcgcacgccgctgacgtaagtagccttgcgccttcgtactgggcctggccccaggcttggtcggtaggaaaaggtagcggccagagggagccttggggtgacactgagtggcagatagagccagactgggtaatttctcagacatggctggaaaggtgaggacaagtgagaatagggtggaaaagttgcaagagaggtttgtaaccgacatggaaagagttgtggagtctttggaggtgaggaagattttgagagtgaggaagaacaaagcacctttccttgacataccatggtccttgcttttgaaggttttgggctcagaagtcctgcttttcttccttggctcggatgaagagatggtagttgccagggtgtccatttcagggcaccgtcactcttcagtggcaaggccgatgagatcctaataggaggttttggccagcttcggaagggatgggggcggtccttgtggggtccgctgacagtccaacctccggtggggtcctccgcaaagggggcatggcctggtgggcttacctgggtttgggcattgtctggaccagtagccttcattgccacacttgaaacaggcgcaggtggaggtggattgtaggaggcttccctgttgagctgcagcctgcgggctggtggaggtaagcatttgagactacctgtgttttgcctttcattttcctcatcacgattgttaaagactttgaaggctaaattaagaaggtctccatgtggggtttgagggccgtcatcaagcttctgaagtttgcgtggaatattgggggtggactctgtgtaacaagatcctagatcaagaaacataacattgccagcacttgggaaaactgcctcgtaccccctttcaggaactccttctttagggttaaccagtttttctgtagccagtatgcgagtatcaacttgtggcat

SEQ ID NO: 21121 - DNA, 2744 bp, Homo sapiens
  SIMILAR (1685)..(1744): 901254mologous to multiple sclerosis associated retrovirus protease,accession number AF009666,Smith-Waterman Score=91.
atggagcctgcaaagggcactgtggaaatccctgaatttacagctggcccagtaccaaggtgcaaggccacatatatcagcagggtacaccagcaaaatagcagaagcaggaagagagctggccagaagatagctaccctggttggaagacacatactcctgaagatcgagaaagaggccatccagtccacccccaatattccacgcaaacttcagaagcttgatgacggccctcaaaccccacatggagaccttcttaatttagccttcaaagtctttaacaatcgtgatgaggaaaatgaaaggcaaaacacaggtagtctcaaatgcttacctccaccaggcccgcagggctgcagctcaacagggaagcctcctagcaatccacctccacctggcgcctgtttcaagtgtggcaatgaaggctactggtccagacaatgcccaaacccagtacagtcacactcgtctacctggaaaaaacggggtttcctagctgcaaaaaacactcctgtcataaatggctctctcatcaacaaactccttcaagctatcaggctcctgcagaaagttgccatcattcattgcaggggccaccaaaccccagacaatcacatatcggctggaaatgcgctaacagatcagaagaaaagcaggacttctgagcccaaaaccttcaaaagcaaggaccatgccatgtctgagaaattacccagtctggctctatctgccactcagtgtcaccccaaggctccctctggccgctaccttttcctaccgaccaagcctggggccagaaattacctcccctccttaatccagacacagtctttcattcgtgaagcagcaaatgaggctatacctctccctgttgacacctccttgtcctctcaacataactgtcttgcaggcacagacgcgtttccagacaatacagatgatgctcctactacaaggacaatgtggataccaacccgtctctcaagaatacccaaaaaattaaggcccagtacgaaggcgcaaggctactacgtcagcggcgtgcgccagcaagatatcagaagcaggaagagagccgaccgaaagacagctaccctggccggaagacacgtaaccctgaagatcgagaaagaggccatccaggccctcaatcactttgacctaagtactcatttggtagagaaaaagtttcctcccaacagaacttcagctggaaaacatcagaagtgggattttaagctaaatatttgggaggtaaaaaataataatgagcaaacacttttgggatcaaaaacgatgggaagccagtatcactcgataccaaaatctgccaaagaaataacaacaacaacaacaacaacaaaattacgggtcaatatccccattgaagcaaaaatcatcaacaaaatactagcaaaccaaatccagaagcacatgaaaaagttatttcaccacattcaagcaagcacgacttcggaggctctggaacagggaaagtctggacaaattgaatgcctaatagggcttgcttccagtgcgatctacaaggacactttaaaaaagattgttctaatagaaataagccacccccctcgtccatgccccttatgtcaagggaatcactggaaggcccactgccccaggggacgaaggtcctctgagtcagaagccactaaccagatgatccagcagcaggactgagggtgcccggggcaagcgccagccgatgccgtcaccctcacagagccccgggtatgcttgaccattgagggccaggaggttaactgtctcctggacacaggtgcggccttctcagtcttactctcctgtcccggacaactgtcctccagatctgtcactatctgaggggtcctaggacagccagtcactagatacttcccccagccactaagttgtgactggggaactttactcttttcaaatgcttttctaattatgcctgaaagccccactcccttgttagggagaggcattctagcaaaagcaggggccataatacaccatgctgttttggttactgcagccttgtagtacagtttgaaggtagcatgatgcctccagctttgttgtttttgcttacgagtgtcttggctatatgggctcttttttggttccataagaaatttaaagtagtttttcctaattctgcctgtatcactgccaccatggccgcttttttcatgagcccactgaatcttatcttcctccaccaagtgaatgtagagaacttccagtgaggccataggtgcaggctctaggggcctgccaagggctccaaatggcttccctatctgctgcagacacttccaacaccactggattgcaggatcatatggccctggcaaagaagttgcaaggcagcctggatctgtggcagaacctccttttgttctgagtctcagacaaaactggctgtttttccgatcattcactagatgggctctacgtctttcaagtccttgaatgggggcactgatctctgcaatccctttaggaatgtgctctggcttttgttttattgtatccctaggtagacgtaattctacttggcctttgccaccggaatagcccacactccacaggtcagggcaccaatgtggggattctgtcagctgttgagtatatttatgccaatgatgcttttggggttcacgagggaccccattgacatttaggggttcaatggcactgaggttcatcagggccttcccacacgggcccat

SEQ ID NO: 21122 - DNA, 1694 bp, Homo sapiens
  SIMILAR (83)..(1009): 571254mologous to Homo sapiens spermidine synthase,accession number M34338,Smith-Waterman Score=774.
  misc_feature (1)...(1694): n = a,t,c or g
gggcggagctggtcccgttgtgctgcggcgccgcgcggcctgcagtcccgggcccgcgccccgcgccgcccgcccgcccgccatggagcccggccccgacggccccgccgcctccggccccgccgccatccgcgagggctggttccgcgagacctgcagcctgtggcccggccaggccctgtcgctgcaggtggagcagctgctccaccaccggcgctcgcgctaccaggacatcctcgtcttccgcagtaagacctatggcaacgtgctggtgttggacggtgtcatccagtgcacggagagagacgagttctcctaccaggagatgatcgccaacctgcctctctgcagccaccccaacccgcgaaaggtgctgatcatcgggggcggagaaggagggtgtcctgccgggaggtggtgaagcacccctccgtggagtccgtggtccagtgtgagatcgacgaggatgtcatccaagtctccaagaagttcctgccagggcatggccattggctactctagcttcgaagctgacacctacatgtggggtgacggtttttgagtttcatggaaacagaaacaagaatgcattcgacgtgattcatcattgactcttcagaccccatgggccccgcctgaaagtctcttcaaggagtcctattaccagctcatgaagacagccccttaagggaagatggtgtcctcttgctgccagggccgagtgccagtggctgcaccctggacctcatcaaggaagatgcggcagttctgcccagtccctgttccccgttggttggcctatgcctactgcaccatccccancttacccccagcgggcagatcggattcatgctgtgcagcaagaacccgagcacgaactttccaggagccggtgcaagccgttgacaacagcagcaaggtggcgaagatgcagctgaaagtacttacaactccgaacgtgcaaccgctgcggcctttgtgctgcccgaagtttgcccggcaaggccttgaatgaatgtgagctgagcccagggggccaaccacttgatgcaacccaaggaccttcggaccttggaagcttgcggggtgcctcgggcccctccagcccccgggccggacctcctgctggctctcgcccaccaaccaagtgttacaagccccagaatgctgcccggcgctgccctgctgggcggactgtctgtgtgtctgtctctctggcgttccacctccaagcctataccagctgtgtacagccgccatctctctgccttctgttgcccctcactcaccaaacacgtgtatttatagcaaagattggagtcctgtgtctcctgaccttggctgggcccaggcagggccacattcaccattgggtgcctctggggtgagggtctgcagaggccttgctggctgacccccaagtgtctgctgcagggctgaggctgcaggcgggccatcgtggatagcctggggcacagagggtcaccgcagtcgtcacgtgggacccagagctgtcctgggaagctgacttagctgtccttttaccaagcccttcacaaggccactggtgacagccccccagggcagtggggtgggtgagatcagggtggggctgcccgggagcattctcagaaaaattggggacactcacaggtgtaagtcaggtcccatccaggtactccagggcaaataca

SEQ ID NO: 21123 - DNA, 418 bp, Homo sapiens
  SIMILAR (374)..(418): 931254mologous to Homo sapiens PM-Scl autoantigen,accession number L01457,Smith-Waterman Score=71.
aattttcgtacgaaaagcttttgaattggcaggaattcgcagtagacttggagcaccactcttacaggagcttcctgggactgacctgcctgaagcaaatttctactcggacggaagactttatcattgacaccctggagcttcgaagagacatgtacattctcaatgagagcctcacagacccagccatcgttaagccctctggccgaggagatgcttagctacgcccgggatgacacccattacctgctatatatctatgacaaaatgaagctgcaaatgagggagcgcggcaacaggcagaccgtgcaactgcatgtggtgtggcaacggagcagggacatctgcctcaagaaattcatcaaacctattcttcacggatgagtcctaccttgaactatataggaagctgaagaag

SEQ ID NO: 21124 - DNA, 1707 bp, Homo sapiens
  SIMILAR (604)..(1692): 951254mologous to Homo sapiens putative p150,accession number U93569,Smith-Waterman Score=1763.
ggtattttactggatgaagcctcaggtgtaaacaagaatcaacagcctgtcctccctgccggcttgcaggtccccaaaacggtagtgtccagctggaaccgtaaggcagcagaatatggcaaaaaagcaaaatctgaaactttccggctgcttcatgcaaaaaatatcatccgacctcagctcaagtttcgagagaagattgacaattccaacacaccatttcttcctaaaatcttcatcaaacccaatgctcagaaacctctccctcaagctctctctaaggaaaggcgggaacgcccacaggatcgtcctgaggacttggacgtcccccctgcactggctgatttcatccatcagcagagaacccagcaggttgagcaagacatgtttgcacatccttatcaatatgaactaaatcactttaccccagcagatgcagtgcttcaaaagccacaaccccagcaccactcttacaggagcttcctgggactgacctgcctgatgcaaatttctactcggacggaagacttcatcattgacaccctcgagcttcgaagtgacatgtacattctcaatgagagcctcacagacccagccatcgttaagaagaatcaaatagacgcaataaaaaatgataaaggggatatcaccactgatcccacagaaatacaaactaccatcagagattactacaaacacctctacgcaaataaactagaaaatctagaagaaatggataaattcctcgacacatacactcttccaagactaaaccagaaagaaattgaatctctgaatagaccaataacaggagctgaaattgtggcaataatcaatagcttaccaaccaaaaagagtctaggaccagatggattcacagccgaattctaccagaggtacaaggaggaactggtaccattccttctgaaactattccaatcaatagaaaaagagggaatcctccctaactcattttatgaggccagcatcatcctgataccaaagccgggcagagacacaaccaaaaaagagaattttagaccaatatccttgatgaacattgatgcaaaaatcctcaataaaatactggcaaaccgaatccagcagcacatcaaaaagcttatccaccatgatcaagtgggcttcatccctgggatgcaaggctggttcaacatacgcaaatcaataaatgtaatgcagcgtataaacagaaccaaagacaaaaaccacgtgattatctcaatagatgcagaaaaggcctttgacaaaattcaacaacgcttcatgctaaaaactctcaataaattaggtattgatgggacgtatctcaaaataataagagctatctatgacaaacccacagccaatatcatactgaatgggcaaaaactggaagcattccctttgaaaactggcacaagacagggaggccctctctcaccactcctattcaacatagtgttggaagttctggccagggcaatcaggcaggagaaggaaataaagggtattcaattaggcaaagaggaagtcaaattgtccctgtttgcagatgacatgattgtatatctagaaaaccccattgtctcagcccaaaatctccttaagctgataagcaacttcagcaaagtctcaggatacaaaatcaatattcaaaaatcacaagcattcttatacaccaataacagagagccaaatcatgagtga

SEQ ID NO: 21125 - DNA, 3106 bp, Homo sapiens
  SIMILAR (1)..(645): 1001254mologous to Homo sapiens PM/Scl 100kD nucleolar protein,accession number X66113,Smith-Waterman Score=1142.
atgtttgatactcatcaggcagcacgccttcttaacctgggcaggcactcactcgatcatctcctgaaactctactgcaacgtggactcaaacaagcaatatcagctggctgattggagaatacgccctctgcccgaggagatgctcagctacgcccgggatgacacccattacctgctatatatctatgacaaaatgaggctggagatgtgggagcgcggcaacgggcagccggtgcagctgcaggtggtgtggcaacggagcagggacatctgcctcaagaaattcatcaaacctatcttcacggatgagtcctaccttgaactctataggaagcagaagaagcaccttaacacacagcagttgacagcctttcagctgctgtttgcctggagggataaaacagctcgcagggaagatgaaagttacggatatgtactgccaaaccacatgatgctgaaaatagctgaagaactgcctaaggaacctcagggcatcatagcttgctgcaacccagtaccgccccttgtgcggcagcagatcaacgaaatgcaccttttaatccagcaggcccgagagatgcccctgctcaagtctgaagttgcagccggagtgaagaagagcggaccgctgcccagtgctgaggagggaaaacgtcaagtcacagccagtgcaagtacacctctgacagaggcctgtgctgacagctggcagaaagctactgccggcttgcacgttttacatgccagcctgctggggtcttttaatgcctatattgaagaatgctctctttggacctcacgactggtcccatgccccttcggatggctatccaatcatcccaaccagtggatctgtgccagttcagaagcaggcgagcctcttccctgatgaaaaagaagataacttgctgggtaccacatgcctgattgccacagctgtcatcacgttatttaatgaacctagtgctgaagacagtaaaaagggtccattgacagttgcacagaaaaaagcccagaacatcatggagtcctttgaaaatccatttaggatggcagcgaagttcgatccatcaaccaaaatctatgaaatcagcaaccgctggaagctggcccaggtacaagtacaaaaagactctaaagaagctgtcaagaagaaggcagctgagcaaacagctgcccgggaacaggcaaaggaggcgtgcaaagctgcagcagaacaggccatctccgtccgacagcaggtcgtgctagaaaatgctgcaaagaagagagagcgagcaacaagcgacccaaggaccacagaacagaaacaagagaagaaacgactcaaaatttccaagaagccaaaggacccagagccaccagaaaaagagtttacgccttacgactacagccagtcagacttcaaggcttttgctggaaacagcaaatccaaagtttcttctcagtttgatccaaataaacagaccccgtctggcaagaaatgcattgcagccaaaaaaattaaacagtcggtgggaaacaaaagcatgtcctttccaactggaaagtcagacaggtatgtggtggacggcggtgtggcccagggagcccaacacccatccaacctgatgctggaccgtctgagtgggaagatcctgcacattgactttggggactgctttgaggttgctatgacccgagagaagtttccagagaagattccatttagactaacaagaatgttgaccaatgctatggaggttacaggcctggatggcaactacagaatcacatgccacacagtgatggaggtgctgcgagagcacaaggacagtgtcatggccgtgctggaagcctttgtctatgaccccttgctgaactggaggctgatggacacaaataccaaaggcaacaagcgatcccgaacgaggacggattcctactctgctggccagtcagtcgaaattttggacggtgtggaacttggagagccagcccataagaaaacggggaccacagtgccagaatctattcattctttcattggagacggtttggtgaaaccagaggccctaaataagaaagctatccagattattaacagggttcgagataagctcactggtcgggacttctctcatgatgacactttggatgttccaacgcaagttgagctgctcatcaaacaagcgacatcccatgaaaacctctgccagtgctatattggctggctgctgaccctcctgggccttctgtgtggctcggtggccacccccttgggcccgaagtggcctgaacctgtgttcgggcgcctggcatcccccggctttccaggggagtatgccaatgaccaggagcggcgctggaccctgactgcaccccccggctaccgcctgcgcctctacttcacccacttcgacctggagctctcccacctctgcgagtacgacttcgtcaagctgagctcgggggccaaggtgctggccacgctgtgcgggcaggagagcacagacacggagcgggcccctggcaaggacactttctactcgctgggctccagcctggacattaccttccgctccgactactccaacgagaagccgttcacggggttcgaggccttctatgcagccgaggacattgacgagtgccaggtggccccgggagaggcgcccacctgcgaccaccactgccacaaccacctgggcggtttctactgctcctgccgcgcaggctacgtcctgcaccgtaacaagcgcacctgctcagccctgtgctccggccaggtcttcacccagaggtctggggagctcagcagccctgaatacccacggccgtatcccaaactctccagttgcacttacagcatcagcctggaggaggggttcagtgtcattctggactttgtggagtccttcgatgtggagacacaccctgaaaccctgtgtccctacgactttctcaagattcaaacagacagagaagaacatggcccattctgtgggaagacattgccccacaggattgaaacaaaaagcaacacggtgaccatcacctttgtcacagatgaatcaggagaccacacaggctggaagatccactacacgagcacagacccttaa

SEQ ID NO: 21126 - DNA, 2870 bp, Homo sapiens
  SIMILAR (38)..(1561): 471254mologous to Homo sapiens PM/Scl 100kD nucleolar protein,accession number X66113,Smith-Waterman Score=858.
  misc_feature (1)...(2870): n = a,t,c or g
acaagctctcgcgagacgagccgtgcaggctgaaaaaatggcgccacccagtacccgggagcccagggtcctgtcggcgaccagcgcaaccaaatccgacggagagatggtgctgccaggcttcccggacgccgacagctttgtgaagtttgctcttgggtccgtggtggcagtcaccaaggcatctgggggcctaccacagtttggcgatgagtatgatttttacccgaagttttcctgggcttccaagcattttgcgaaacacagggagacaggtttgctttcagtgcatgagcagagtaatgcaagtacccatgggttgttcgcagcaaccattaaggatcgaagtaaagttgactgagctggaagacaagttttgatttactaagttgatgccaatgaatgtaattctggagagagtgggtattttactggatgaagcctcaggtgtaaacaagaatcaacagcctgtcctccctgccggcttgcaggtccccaaaacggtagtgttccagctggaaccgtaaggcagcagaatatggcaaaaaagcaaaatctgaaactttccggctgcttcatgcaaaaaatatcatccgacctcagctcaagtttcgagagaagattgacaattccaacacaccatttcttcctaaaatctttcattcaaacccaatggttcaggaaacctctccctcaagctctctctaaggaaaggcgggaacgcccacaggatcgtcctgaggatttgggacgtcccccctggcactgggtggattttcattccatcaggcaggggaacccaggcaggtttgaggcaagacatgttttgtacatccttatcaatatgaactaaaatcacttttaccccaagcagatgcaagtgctttcaaaagccacaaaccccagttatacagacctatagaagaggacaacatgccactttcatattcctccctggagtgaactcgtggaactcaacgaaaagctcttgaattgtcaggaatttgcagttgacttggagcaccactcttacaggagcttcctgggactgacctgcctgatgcaaatttctactcggacggaagacttcatcattgacaccctcgagcttcgaagtgacatgtacattctcaatgagagcctcacatgacccagccatctttttggtctttcatggtgctgattcagacatagaagggcgtacagaaagactttgggttggatgtagtaaacatgtttgatactcatcaggcagcacgccttcttaacctgggcaggcactcactcgatcatctcctgaaactctactgcaacggtggactcaaacaagcaatatcagctggctgattggagaatacgccctctgccccgaggagatgcctccactacgccccgggatgaacaccccattaccctgcctatatatcctatgacaaaatgaaggnctggagatgtgggagcgcggcaacgggcagccggtgcagctgcaggtggtgtggcaacggagcagggacatctgccctcaagaaattccatcaaacctatcttcacggatgagtccctaccttgaactctataggaagcagaagaagcaccttaacacacagcagttgacagcctttcagctgctgtttgcctgggagggataaaacagctcgcagggaagatgaaagttacggatatgtactgccaaaccacatgatgctgaaaatagctgaaggaacttgccttaagggaaccttcaggggcatcataggtttgctggcaacccagttaccgccccttgttgcggcagcagattcaacgaaatgcacctttttaatccagcaggccccgagagattgccccctgctcaagtctgaagtttgcagccggagttgaagaagagcggaccgctgcccagtgcttgagagattggagaatgttctctttggaccgcacgactcctcccatgcccctacggatggctatccaatcatcccaaccagtggatctgtgccagttcagaagcaggcgagcctcttccctgatgaaaaagaagataacttgctgggtaccacatgcctgattgccacagctgtcatcacgttatttaatgaacctagtgctgaagacagtaaaaagggtccattgacagttgcacagaaaaaagcccagaacatcatgggagtcctttgaaaaatccatttaggatggttcctgccctcactggggacaccgtgctccgcgtctctcaggcagcgaagttcgatccatcaaccaaaatctatgaaatcagcaaccgttgggaagctggcccaggtacaagtacaaaaagactctaaaagaagctgtcaagaagaaggcagctgagcaaacagctgcccgggaacaggcaaaggaggcgtgcaaagctgcagcagaacaggccatctccgtccgacagcaggtcgtgctagaaaatgctgcaaagaagagagagcgagcaacaagcgacccaaggaccacagaacagaaacaagagaagaaacgactcaaaatttccaagaagccaaaggacccagagccaccagaaaaagagtttacgccttacgactacagccagtcagacttcaaggcttttgctggaaacagcaaatccaaagtttcttctcagtttgatccaaataaacagaccccgtctggcaagaaatgcattgcagccaaaaaaattaaacagtcggtgggaaacaaaagcatgtcctttccaactggaaagtcagacagaggcttcaggtacaactggccacagagatagtcctggaagacacgtggcgcctgtggaccggaagcaccaaatgctggtgctgcttttgtacatacatatttttaaaccattaaaattcttcctg

SEQ ID NO: 21127 - DNA, 2787 bp, Homo sapiens
  SIMILAR (39)..(2501): 781254mologous to Mus musculus P100 polymyositis-scleroderma overlap syndrome associated autoantigen homolog,accession number AF092084,Smith-Waterman Score=3314.
gacaagctctcgcgagacgagccgtgcaggctgaaaaaatggcgccacccagtacccgggagcccagggtcctgtcggcgaccagcgcaaccaaatccgacggagagatggtgctgccaggcttcccggacgccgacagctttgtgaagtttgctcttgggtccgtggtggcagtcaccaaggcatctgggggcctaccacagtttggcgatgagtatgatttttaccgaagttttcctggcttccaagcattttgcgaaacacagggagacaggttgcttcagtgcatgagcagagtaatgcagtaccatgggtgtcgcagcaacattaaggatcgaagtaaagtgactgagctggaagacaagtttgatttactagttgatgccaatgatgtaattctggagagagtgggtattttactggatgaagcctcaggtgtaaacaagaatcaacagcctgtcctccctgccggcttgcaggtccccaaaacggtagtgtccagctggaaccgtaaggcagcagaatatggcaaaaaagcaaaatctgaaactttccggctgcttcatgcaaaaaatatcatccgacctcagctcaagtttcgagagaagattgacaattccaacacaccatttcttcctaaaatcttcatcaaacccaatgctcagaaacctctccctcaagctctctctaaggaaaggcgggaacgcccacaggatcgtcctgaggacttggacgtcccccctgcactggctgatttcatccatcagcagagaacccagcaggttgagcaagacatgtttgcacatccttatcaatatgaactaaatcactttaccccagcagatgcagtgcttcaaaagccacaaccccagttatacagacctatagaagagacaccatgccatttcatatcctccctggatgaactcgtggaactcaacgaaaagctcttgaattgtcaggaatttgcagttgacttggagcaccactcttacaggagcttcctgggactgacctgcctgatgcaaatttctactcggacggaagacttcatcattgacaccctcgagcttcgaagtgacatgtacattctcaatgagagcctcacagacccagccatcgttaaggtctttcatggtgctgattcagacatagaatggctacagaaagactttgggttgtatgtagtaaacatgtttgatactcatcaggcagcacgccttcttaacctgggcaggcactcactcgatcatctcctgaaactctactgcaacgtggactcaaacaagcaatatcagctggctgattggagaatacgccctctgcccgaggagatgctcagctacgcccgggatgacacccattacctgctatatatctatgacaaaatgaggctggagatgtgggagcgcggcaacgggcagcccgtgcagctgcaggtggtgtggcaacggagcagggacatctgcctcaagaaattcatcaaacctatcttcacggatgagtcctaccttgaactctataggaagcagaagaagcaccttaacacacagcagttgacagcctttcagctgctgtttgcctggagggataaaacagctcgcagggaagatgaaagttacggatatgtactgccaaaccacatgatgctgaaaatagctgaagaactgcctaaggaacctcagggcatcatagcttgctgcaacccagtaccgccccttgtgcggcagcagatcaacgaaatgcaccttttaatccagcaggcccgagagatgcccctgctcaagtctgaagttgcagccggagtgaagaagagcggaccgctgcccagtgctgagagattggagaatgttctctttggacctcacgactgctcccatgcccctccggatggctatccaatcatcccaaccagtggatctgtgccagttcagaagcaggcgagcctcttccctgatgaaaaagaagataacttgctgggtaccacatgcctgattgccacagctgtcatcacgttatttaatgaacctagtgctgaagacagtaaaaagggtccattgacagttgcacagaaaaaagcccagaacatcatggagtcctttgaaaatccatttaggatgatcagcaacccgttggaagctggccccaggtacaagtacaaaaagactctaaagaagctttttcaagaagaaaggcacttgggcaaacagcttgccggggaaccggccaaaggaggccctgcaaagctgcagcagaacaggcccatctccgtcccgacagcaggttcgctgctagaaaatgctgccaaagaagagagagcgaggcaacaagccgacccaaggaccacagaacagaaaccaaggaggaggaaccgactcaaaaattttccaaagaagcccaaaggaccccagggccccacccagaaaagagggtttacgcccttacgacctacagcccagtcaagacttcaaaggcttttgcctggaaacagcaaatcccaaagtttcttcctcagtttgatccaaattaaaccagacccccgtctgggcaagaaatgcattgccagccacaaaaaattataacacgtcggtggggagaacaaaaagcgatgtcctttccaactggaaagtcagacagaggcttcaggtacaactggccacagagatagtcctggaagacacgtggcgcctgtggaccgggaacgaccgaaatgctggggctgcttttggacaaacatattttttaacccattaaaattcttcctgaagaaaaaaaaaaaaaaaaaaa

SEQ ID NO: 21128 - DNA, 402 bp, Homo sapiens
  SIMILAR (217)..(23): 411254mologous to Drosophila melanogaster vitelline membrane protein precursor,accession number M20936,Smith-Waterman Score=83.
gatgtaacaaacaaacaaaacctgaggaggctcaacccaccggcaaatggcctgccggtgacgcgtgcgcatgctgagcgggacgtgccggggctgacacgcgaggccccgccacggcccgcgtctacgctgcgaggtgggccttcggtgcgcgccgggctacgccggcgccagcgcgcgcccaacttgcgaatgcggggacaccaggtactgcccccaagacccgaaccagacatgaagccgacctgtcccgattatagcgcatcgttactgcctgactggctaacctgtaccttcacaaaaagtggtcatcacgtacccgggtttacctcaactttggtcggtgtgctggctttcaatgaccaacacaacaaagaaaaaataattgtttctgagacttag

SEQ ID NO: 21129 - DNA, 1956 bp, Homo sapiens
  SIMILAR (1356)..(1493): 521254mologous to Escherichia coli hycE,accession number X17506,Smith-Waterman Score=98.
atgactgggcgctaccacgaggttgtattgccagggcggggtgctggctatggccgttttggcgtacggggccgaacgaaggacaatagccggtacaaccggccatgccctggaacggcacccaggaacgcccgccggcaccaaggaggcgaaccgggaaagcgagccgaacaaagactgcccttaacagccttgagaaggccggatagcgaaaacaatggtgggcaagagaaagtacgtaagaagaggtgcccggctacagtgttgaggcgcatgaccgctgatatgcacgggtccacagcgggcgatcatccatacgaagaagcatacccgtttccatttgtatcagatcatccatacgaggatgcgtacccgttgtccattgtatcagatcatccatacgaagaagcatacccgttgaccatttgtatcaatcatccatacgaagaagcatacccgttgtccatttgtatcagatcatcatacgaagaagcccccgattatagcgcatcgttactgcctgactggctacctgtaccttcatcaaaagtggtcatcacgtacccggggtttacctcaatttgtggatactatacgacttctagcaaggcttgcttttcggtgtttgcttggtgtttcgttacatccgatgttccgggccgtttcagtgacgaggacgaagatgatagtgagatgtggtcactcaccgccttgatgggtgtcatgggaggatggaagacgtctgccagatcagaagtatcgatactgtgttccacgtcgtcaaaggtgattcacagcagctatccatacgcagaccgagcttttcaagtttggtcacttgatgcccggtttgctcatatcaacaaaccattcggtgtagacaggttttccggagaagccccgtcgcgcgccatcaccacgatgtacggggtgaaggtgttgaaccgcccggcaactggtacagcacataggttggtgcccccagacgtcccagtccatccacacggcggcgagagtaacaaaccccgcgtccagaccaccgtctcttcagggatcagcagactgtcgatacccatatccgccagtgctttgcaaaacgttccggacaagacacacgacatcagcaacatcaccgacaccgtttatcactgtccgctgagccagagctcccgctggtactggcgctttgtgcctgtgcgttcgccacctttatcgaatgggcaaactgccgttcgacctggcggaagccgagcaggagctgcaggaggcccgctctctgaatacagcggcagcggctttggcgtcatgaaatggaccaaagatcagctgactgtcaccgtaaaggtgaactacctccggaagtggtggagtttctttactacaacagggtggctggctgtcggtctgtttggtaacgacgaacgcaaactgaatggtcattacgccgtttactcgtgctgtcgatggagaagggcactaagtgttggattacgacagcatggattatcgtcagcgtccgcaccgaccaacgatgctgaaacctacgagttcatcaacgaactgggcgcaagaaaaacaaccgtcgtgccgattggtccgctgcacgtcacttctgagaaccgggccacttacgtctgttcgtcgatggcgaaaacattatcgaagccaataacgaatgaatacaccgtacacagtgctgaaagcagcaaccggccacgtccaaaacagcatggtagtaagttccgcatgaacgaagacaccaacgcaccgctagcgcggacccgaagaacgggcaagccaaaggaacgtaatcggtataggttgtgttgctcaaccgaaccacacactcaccgaataaccaccgcgacgtacacacaaggaataagcacacaacagagcagcgcaacacaccggaccaacaccacgcactggctactgactacagccatcgtatag

SEQ ID NO: 21130 - DNA, 4351 bp, Homo sapiens
  SIMILAR (153)..(1220): 921254mologous to Homo sapiens ubiquitin hydrolyzing enzyme I,accession number AF022789,Smith-Waterman Score=1723.
gggctcggggtccgcccgcgggctgccggtgcgagcgggcggcccggctcccctcctcccccgcccgccgccgccgctgtgattgggtggaagatggcgctggccggatggaaatcctaatgacagtctccaaattcgcctccatctgtaccatgggcgccaatgcttcggcattagagaaagagattggtccagaacagtttccggtcaatgagcactattttggattagtcaattttgggaatacctgctactgcaattcagttcttcaagcactttatttttgtcgtccatttcgggaaaaagttcttgcgtataagagtcaacctaggaaaaaggagagccttcttacatgcttagcagatctcttccatagcatagccactcagaagaaaaaggttggagtaataccccctaagaagttcatcacaagattacggaaagaaaatgagctttttgacaactacatgcaacaagatgcccatgaattcttaaattacctactaaatacaattgctgatattttacaagaagagagaaagcaggaaaaacaaaatggtcgtttacctaatggtaatattgataatgaaaataataacagcacaccagacccaacgtgggttcatgagatttttcagggaacattaactaatgaaaccagatgtcttacttgtgaaactataagcagcaaagatgaagattttttagacctttctgttgacgtggaacaaaatacatcaattactcactgcttaaggggtttcagcaacacagaaactctgtgcagtgaatacaagtattactgtgaagagtgtcgcagcaaacaggaagcacacaaacggatgaaagttaaaaaactgcgccatgattctagctctacacctgaagagatttaaatatatggatcaacttcatccgatatacaaaactctcttacccgggtagtttttcctttagaacttcgtctgtttaacacttcaggtgatgccaccaatccagacagaatgtacgaccttgttgctgttgtggttcactgtggaagtggtcccaatcgaggccattatattgcaatagttaagagtcatgatttttggttgttgtttgatgacgacattgtagaaaaaatagatgcacaagctattgaagaattctacgggttgacatcagatatctcaaagaactctgagtctggttacatccttttctatcagtctcgggactgagagggaaccgtgatgaagagacactttctgcctcatttcttctctggttattttggaaaggatcaagcactgatttttcaagaaaagagaaatgcaggaagctcagggggcagtagcacactttgcacacgataaagcaaagacgatggattgacaagcccttccgatcatggtagttgatttatttgctcaggtatcatgctgtctgtacagttccatacaacaaggaggtgaaatcagagataccagctcctcttttaaaacagccttccagtcattggcacgcattttctctttattaattgcaccaataatgctttgaattccttgggggtgcagtagaaagaatcggaatctgtgccgtattgataaggagatgatgttgaacacactgcataaatttgcctggttcagtatgtatagaaggcatattcagtggtcttttcaagagtaaaccagaaatacttttgggcccaacacttgcagttgccttcctgatgtaaaaactaacatgctagataatccagtgtcgggaagacaaagatgttttgcttctctgaagaagcttataataatatacagtatatgtatatgtagggagcaattggtcaaaagtggctttttgtttccccaagggaaagactggctttgtaattataattttttccttatttattttacttaaaactggtagagtctaagtattatatgaagtgcccatgattctgtcagtaaatttgaacatatttttattagttaatgtcagtttaagttgtccttttgtttgtttctatttttaaggtgaattttaatttctatctgaaatcagttaagataccttgagaaaaactgcagtgagaggagataaatatcctttttcaggaggaactgatatctctggctaaatatttgtccttttattatggtttctaaatcagttattttcttcagctttaatttcataaaattaaaaaactattttaaaaattcctgtagttgttggaataattaaaaattctggtgcagtggtggtataccaatctttagaattcttaagtattctaatgtttcaagttgagatcatgcttgggaaaatcatgtcatagcatttatgttattttcagatgccattttttaccctggaaagaagtcataatgttcatcataaccctagcagcctggatagtgagctaaacaaacccttcaaagattaaattttaatcaagtagaccgggaatacaaaagacaagtccttccttcccttccccccacctttacaaatcttactggaagggtgttcagaaattaaaatctgtgtttgctaagacttcattctgttgggggttttaagaagtaatatatgtaacataaaatatatgtaaacgattgcagtttttttggacgtttttccatgcatcagtaagttgtctgacagtagccaaatgtaacttgcagaaaattattgaaaattatattcagaataatagcaatcaggccttggatgttctttattaaactcttttcaggcagtaaatttaaaaaaaattgtcattttctaaagtccttttgctaaaactgttgactatggaaaacaacaaaaaggaattttttagtctgctgctattattaacatttattatctgtatcttttggctcaggaaatgacttcacctattttttccataagcagacctttaacagagtcacttaattgggctgcttaaacggatgttctgggagaaaattataatatttagtatttgtacaaaatatcaaaaagtattttgacaagtttctttttaagatagttcctaaagccttaccctggctagaggtgttttgtacaaattatatataagccagcctgatctaccaacatgccacagagaatcacaatcaacagtgtggggaaagtcagggcagtggaagtggatgcactctttttattttgaaggcttaaaccaaattgtcttggaattaaagctgtatttctgcagctttcggtacagagaaaaagaggaaagtgaagctgtgtcagttttaacattagctatatcaacatgtttaagaaagatagatgaagtcatttgcataaaggtacagcattgaaatactatgttgtgtttgtttttacatttttgcattaaaaaaaaacatgccgtaaaagccaagttaaatttcatattaaagcaagttctagtgtatgtgttgagttcctggtaatcacatacttgttcacatctacaccgtacttcatagtatgatttgtcaggggagggattgtggggtgacagttttacatttactttttcttcttaatgcagctggatctaagtaaaatgttttgaagtttatcagaaactaaatgtacttttaaaacgtatagggtcagggttgggggaaaaatacaggtatagtaagtaagaaaagtgacccatgaagaaagcatcgtgaggttgtatgttggttgactgtgattaaaatgcggggctggtgtaagttgtaagtggtggctgattgccgtgtaactatgtacatgattgttgggatggctgtcccatattttgtatattggaataaaaatttctataaattattgtaactaaaagtaaatattctaaattaagtcccacttcttaagtcacatggcttctgtcttggaaattttacctttaaaagattatttaagacaggaaccaggaggcttgggaacagggaaagagggaaatgttgtattatgtgggtcttggggcctctaaccatcagtatagggttttttctttccttgatggcagtagaaagacctcattttcataacataactactcttgatactttctttaaaaacactttttattaaagattctatcatgaggtatttggctgggagctgggaggctaaagcgctcatgtcctggctcttcagtgaatttaactgtgtgaccttgggcaagtcacttaacctctctgtgcttcagtctccctgtcttgtaaaatgggagtaatacctacctcacagggttgttgtggggattaattagagataatgtctgtaaagcatttaaggttcttgaagaaggcactatataaatacaaaataatatctattaaagttggtttatttgtga

SEQ ID NO: 21131 - DNA, 582 bp, Homo sapiens
  SIMILAR (335)..(403): 471254mologous to Homo sapiens unknown,accession number AF083121,Smith-Waterman Score=66.
gttgacggaggacccttaaatgccgtggtacccactgacgctaaattggcctgccgccggggacttgaaactagaccgagcattgtgggctgtaaagacgataatacaacaatgcaaacggcgcagccgggggagggtattgacttcataataaatagcccaatgttagatggtgccccagttcgctatcggaatcaggatgaccatgagctacaaattacacacgggaacaagattctatgtggaattgtgtggaaaaagatagcccaagtcgaacagatgagaaagttcagtcgtcttgaaaagcaaagaacccatgtcctcagctgttcggatcttcaggctgttcgccggtttcgaggagtggtgtcagagggcagttttgaaatgggagaaaaggtttataaaaggaaagacatgttccagctcagcctgctgacagagcagcacggtgactcaacgctcggtagtggcagcagctacacacagatgccagccgaaaacggctcgctggtgcacaccttggtaacagctgctcctccattttttgctgagaaaccacacagcatcacagcaggatag

SEQ ID NO: 21132 - DNA, 1293 bp, Homo sapiens
  SIMILAR (1015)..(920): 651254mologous to Homo sapiens PRO2379,accession number AF116699,Smith-Waterman Score=98.
atgggggcctcacgcagccagaagcccggaccttcgcgcgactatagctacacagcggggtgtgacgtagaccagcgcaggcgcggcgcccagaaactgagtcgtagcgacacaaagcggattgtgatgagttacgggaagaaagcattaaagaatgacaaattcgaaataagggcgttttcatcaagtctggaggttcgctatcggaatcaggatgaccatgagctacaaatacacacgggaacaagattctatgtggaattgtgtggatttgctgtaacccggcttcgcgacccaccgatgttacgccatgccgcaatggcgttgctaccttggagaccccccgattatagcgcatcgttactgcctgactggctacctgtaccttcatcaaaagtggtcatcacgtacccggggtttacctcaatttgggctttcagcaacacagaaacccatgcagtgagtacaagtattactgtgaagagtgtcgcagcaaacaggaacacacaaacggaggaaagtttaaaaactgcccatgattctagctccacactgaagagatttaaatataaggatcaacttcatcgatttacaaaactctttaccagggcatctttacggggccccagggatgagcggctgaaacgcgtgtctcggcaactcttttctctggttgtggtcacatctcgtgtcttcgacgttctcttaagaattctacaccgcctagggcaatatgtgtcaagtgaatactacgtggctttaatgtgcagtgaaggacacgggccaggagctgaagatgtgactgaattgctccagtctcatgaaaaaactgaatggatgaggagttgcttcttctggatgaccaaaagtggtgtcttcgatggaatctacttgtggaatgcatttaaccaagaaggtgaagatctctacaaggaaaactgcaaaacactgatgaaagaagttgaagatgcacaaataaatggaaaaacatcctatgctcatggatcggaagaatattgtaaaatgtccatattgcccagaatccttcttcagaagatctcaagagatgattgttttaaaattgtacttaaattctgcgttgaccatcagaagacaaagaaatgttgtatgatcaccctaaaatcttctgtagtacagttagcatttacaatcaagatttctgtttctgaaatgtgtgctagagaggactttgttgttgttattagcttccaacactcagaagtaccctctagacaacttgcaagatgtacttttaaagagggatacacatag

SEQ ID NO: 21133 - DNA, 425 bp, Homo sapiens
  SIMILAR (3)..(80): 1001254mologous to Homo sapiens sphingosine kinase type 2 isoform,accession number AF245447,Smith-Waterman Score=149.
aggtggagtatgggccgctacaggcacagatgcaccctggcatcggtacactgctcactgggcctcctggctgcccgggcgggattgcgctcgctttcatgggaccagacgtgatgctggaaggtgggcgtcgtcacggttaaagagaaatgggctcgtccgagggtagtgcctgatcaatgagggcggggcctggcgtctgatctggggccgcccttacggggcagggctcagtcctgacgcttgccacctgctcctacccggccaggatggctcgagggcggagtctattttacgcgtcgcccaatgacaggacctggaatgtactggctggggtaggcctcagtgagtcggccggtcagggcccgcagcctcgccccatccactccggtgcctccatttagctggccaatcagcccaggagg

SEQ ID NO: 21134 - DNA, 1578 bp, Homo sapiens
  SIMILAR (108)..(173): 471254mologous to Homo sapiens sphingosine kinase type 2 isoform,accession number AF245447,Smith-Waterman Score=43.
atggacgtcttcactgacccagacctgcttttggacttggtggatgctgccacgcgccgctgggtacctgtctacctgctcctggaccgccagcagctgcctgccttcctggaactggcccagcagctgggggtgaacccctggaacacggagaacgtggatgtccgtgtcgtgcggggctgcagcttccagagccgctggcgacggcaggtgagcggcaccgtgcgggagaagtttgtgctgctggacggcgagagggtcatctcaggatcctacagatttgagccagccctgggcctcgacctgttgctcaactgctcactgttgctgtgccggggtggtggccacccactggacctgctctccgtgacgctggcctcgggctcccgctgtttctccttcctgtctgtggcctggggcttcgtgtcagatgtggatatccagagcgagcgcttcagggccttgggcagtgcccgcttcacactgggcacggtgctgggcctcgccacactgcacacctaccgcggacgcctctcctacctccccgccactgtggaacctgcctcgcccacccctgcccatagcctgcctcgtgccaagtcggagctgaccctaaccccagacccagccccgcccatggcccactcacccctgcatcgttctgtgtctgacctgcctcttcccctgccccagcctgccctggcctctcctggctcgccagaacccctgcccatcctgtccctcaacggtgggggcccagagctggctggggactggggtggggctggggatgctccgctgtccccggacccactgctgtcttcacctcctggctctcccaaggcagctctacactcacccgtctccgaaggggcccccgtaattcccccatcctctgggctcccacttcccacccctgatgcccgggtaggggcctccacctgcggcccgcccgaccacctgctgcctccgctgggcaccccgctgcccccagactgggtgacgctggagggggactttgtgctcatgttggccatctcgcccagccacctaggcgctgacctggtggcagctccgcatgcgcgcttcgacgacggcctggtgcacctgtgctgggtgcgtagcggcatctcgcgggctgcgctgctgcgccttttcttggccatggagcgtggtagccacttcagcctgggctgtccgcagctgggctacgccgcggcccgtgccttccgcctagagccgctcacaccacgcggcgtgctcacagtggacggggagcaggtggagtatgggccgctacaggcacagatgcaccctggcatcggtacactgctcactgggcctcctggctgcccggggcgggagccctgaaactaaacaagcttggtacccgccgggggcggggcctacattccaatggggcggagcctgagctagggggtgtggcctggctgctagagttgtggtggcaggggccctggccccgtctcaggattgcgctcgctttcatgggaccagacgtgatgctggaaggtgggcgtcgtcacggttaaagagaaatgggctcgtcccgagggt

SEQ ID NO: 21135 - DNA, 2422 bp, Homo sapiens
  SIMILAR (1574)..(2419): 721254mologous to Homo sapiens sphingosine kinase type 2 isoform,accession number AF245447,Smith-Waterman Score=990.
atggaggaagtagcagaagcaccgcagccaatagaccccaaaccgctggcaacacaaccccagtccatcatcatcactaccatcaccaccatcatcaccatcaccaccaccaccatcaccatcaccaccactaccatcaccaccaccatcaccatcatcaccactaccatcaccatcaccaccaccatcaccaccaccaccatcaccatcatcaccactaccatcaccatcaccaccaccatcaccatcaccaccatcatcaccatcatcaccaccaccatcaccatcaccaccatcatcaccaccaccatcaccaccacagtcatcaccattatcaccaccaccatcaccaccatcatcaccattaccaccatcacaccatcatcatcatcatcaccatcatcacaggctgatgagtgttggggagaggctgagcccctcatgagcagacaggcccatgtgtggctgagatacaggactggctgcagggaggagaggccagaccaggagctgaccgggagctggggccacgggcctaggagcaccctggtcagggctaaggccatggccccgcccccaccgccactggctgccagcaccccgctcctccatggcgagtttggctcctacccagcccgaggcccacgctttgccctcacccttacatcgcaggccctgcacatacagcggctgcgccccaaacctgaagccaggccccggggtggcctggtcccgttggccgaggtctcaggctgctgcaccctgcgaagccgcagcccctcagactcagcggcctacttctgcatctacacctaccctcggggccggcgcggggcccggcgcaaagccactcgcaccttccgggcagatggggccgccacctacgaagagaaccgtgccgaggcccagcgctgggccactgccctcacctgtctgctccgaggactgccactgcccggggatggggagatcacccctgacctgctacctcggccgccccggttgcttctattggtcaatccctttgggggtcggggcctggcctggcagtggtgtaagaaccacgtgcttcccatgatctctgaagctgggctgtccttcaacctcatccagacagaacgacagaaccacgcccgggagctggtccaggggctgagcctgagtgagtgggatggcatcgtcacggtctcgggagacgggctgctccatgaggtgctgaacgggctcctagatcgccctgactgggaggaagctgtgaagatgcctgtgggcatcctcccctgcggctcgggcaacgcgctggccggagcagtgaaccagcacgggggatttgagccagccctgggcctcgacctgttgctcaactgctcactgttgctgtgccggggtggtggccacccactggacctgctctccgtgacgctggcctcgggctcccgctgtttctccttcctgtctgtggcctggggcttcgtgtcagatgtggatatccagagcgagcgcttcagggccttgggcagtgcccgcttcacactgggcacggtgctgggcctcgccacactgcacacctaccgcggacgcctctcctacctccccgccactgtggaacctgcctcgcccacccctgcccatagcctgcctcgtgccaagtcggagctgaccctaaccccagacccagccccgcccatggcccactcacccctgcatcgttctgtgtctgacctgcctcttcccctgccccagcctgccctggcctctcctggctcgccagaacccctgcccatcctgtccctcaacggtgggggcccagagctggctggggactggggtggggctggggatgctccgctgtccccggactccactgcaggcttcacctcctggctctcccaaggcagctctacactcacccgtctccgaaggggcccccgtaattcccccatcctctgggctcccacttcccacccctgatgcccgggtaggggcctccacctgcggcccgcccgaccacctgctgcctccgctgggcaccccgctgcccccagactgggtgacgctggagggggactttgtgctcatgttggccatctcgcccagccacctaagcgctgacctggtggcagctccgcatgcgcgcttcgacgacggcctggtgcacctgtgctgcgtgcgtagcggcatctcgcgggctgcgctgctgcgccttttcttggccatggagcgcggtagccacttcagcctgggctgtccgcagctgggctacgccgcggcccgtgccttccgcctagagccgctcacaccacgcggcgtgctcacagtggacggggagcaggtggagtatgggccgctacaggcacagatgcacactggcatcggtacactgctcactgggcctcctggctgcccggggcgggagccctga

SEQ ID NO: 21136 - DNA, 1543 bp, Homo sapiens
  SIMILAR (725)..(904): 321254mologous to Lycopersicon esculentum extensin (class II),accession number X55686,Smith-Waterman Score=58.
  misc_feature (1)...(1543): n = a,t,c or g
atggactccacaaagaggcttctgggctggggactgtgtgtgctttgctccccggttcatctgcaggcacatacccgcagccagtcagtggcccccaaggaactccccaccatccctctgaaagccagctgcaccggcgtcatcctgccctcaaatctgaggctgcatttagaacctgaagcagcagaaatgagcgtcccgctgtcctgcatcatcctacagggtcaggacgaaggggacaaagggatgggctgccactatgtcaaaaagaaggtacaacaagttcgctacctggcaatttcagaagccaccttgagggcaatgcacccctcctccaagttcaagaatgccactgggcgccccctacctggaaggacagttctttctaccagtaaattccacgtgcctggagagccgcagaacttcagggatgagtcagccaattaccgctgggcccctccccaccacgagagtgtgtttatctatctcaggcagagtgtagcttttcagtctggcaaatggaaaccagctcaacgtactaaagcatatttgtgtggctatgaaactcctagaggaagcagagccacgaagatgaatggagatctacaaataaaactgtggggcaccccagtgcccgactgtatgagcccccctggtgggcacacacctggacgcctcctggtggaagcaaggcgccttctgatccacactgagccatcagctgtccccaccagctggtcagccgcacttcgcatccccagaaccaacctccaagaccccggacccctggcctggaaatgtcttttcctccttcccattgccccagtctctcccagagctcagacacactctataccttcccatgggaacaaaaaagcccccaggatcatccatgattttctacacataggctcagtatccaggtacaaattcttccgcaaccatttgcagactgctgagttacaaatcggggcaagtttatccaaacacaggccaagctcctccacagcagcgccgtgggagatgaatgtggctgagaccttgccatctaagagtttgcggtctggcaagtgtccacagagacccaagctagactataacaacacacagaaaagaaacattgttaacgaattacaaaagggaaagggacgacttcaagttcacggaggaaagcnagaacatcgaggaaaactgttaagaaagaatggcctgatttcaacccacaccctagaagaggaggtagattttgacgtgccagaaatagaaatgtcccagatctggaaacagtgtgagcaaaagaataagaaaacaggatatatccccgaggagaagtaactcctgtttcactggctcaaaggatttgaacaaggagtcctgtcagacaagattgaaaaacaaggtctggaccagtagggctagccatagccaccgaaagtttaaaacacaggtggcgtatcagagctaagctttcagaaaatcaagcttcttagcactgaggacatatccatattacacgtccttaaccaatttaaataggcagtct

SEQ ID NO: 21137 - DNA, 478 bp, Homo sapiens
  SIMILAR (207)..(323): 1001254mologous to Homo sapiens TFAR19,accession number AF014955,Smith-Waterman Score=194.
  misc_feature (1)...(478): n = a,t,c or g
acccgccgcctgcttcccagccttgacgcccgagcccatgccggacngaggagcttgaggcgctgaggagaccagaggctggccgagctgcaggccaaacacggggatcctggtgatgctggcccaacaggaagcaaagcacagggaagcagaaatgagaaacagtatcttagcccaagttctggatcagtcggcccgggccaggtgtatcagaacaaggtttaatagaaatccttaaaaaagtaagccaacaaacagaaaagacaacaacagtgaaattcaacagaagaaaagtaatggactctgatgaagatgacgattattgaactacaagtgctcacagactagaacttaacggaacaagtctaggacagaagttaagatctgattatttactttgtttattgtctatatgccttttaaaaaaataaacttgttatgcaaaataaaacatttgggtaagttgttttagtatcat

SEQ ID NO: 21138 - DNA, 400 bp, Homo sapiens
  SIMILAR (270)..(395): 331254mologous to Macaca mulatta small proline-rich protein,accession number M83999,Smith-Waterman Score=66.
ggaaaggatgtctttattcaagggaacaggattaaattaggagctggttttgcctgtcttctctcagtgcccattctctttgaagaaactttctacaatgaaaaagaagagagtttcagcatcctgtgtatagcccatcctttggaaaagagagagaggtcagaagagcctttggcaccctcagatcccttttccctgaaaaccattgaagatgtgagagagttcttgggaagacactccgagcgatttgacaggaacatcgcctctttccatcgaacattccgagaatgcgagagaaagagcctccgtcaccacatagtcagtagccgtgctgtcctctgcctggcgtgccctgtctcggttcagtgcagggtgctgggagccctcaatttcctctgga

SEQ ID NO: 21139 - DNA, 1002 bp, Homo sapiens
  SIMILAR (786)..(902): 891254mologous to Homo sapiens TFAR19,accession number AF014955,Smith-Waterman Score=170.
ttttttttttttttttttatcgtgcataacaagtttatttttttaaaaggcatatagacaataaacaaagtaaataatcagatcttaacttctgtcctagacttgttccgttaagttctagtctgtgagcacttgtagttcaataatcgtcatcttcatcagagtccattacttttcttctgttgaactgggaggaaaattaaatgagtgtcagaacatttctaataaagcataactcagattttccgagaaaagatttctaccaattttaggcaagacatttgtgtctttaaaggcaacttaggcgtgaactaaaagggtgggaatgggagtcaaggggcctataaaaattaggaaccctcccccaacaggattcagcctttctccccaaactttcacgggtttgacaaaaggggaaatgtctctgggctgaaaaatatgtgtggtagatgtatactcaacattaatccttaaaagtatccatcttttcatttgccacaagcatctggggacacttactttcactgttgttgtcttttctgtttgttggcttacttttttaaggatttctattaaaccttgttctgatacctaggagaaccagaaaagataagaaaaacagtacttttttaaacaaagaatttacctctgcagatggaatcactttgtactctttttgaggtgtggggaaagagctcaggaagagtacaaagtgattccatctgcaaaggtaaattctttgtttaaaaaagaactgattttcttatcttttctggctctcctaggtatcagaacaaggtttaatagaaatccttaaaaaatgatgccaactaacagaaaagacatcaacagtgaaattcaacagaagaaaagtaatggactctgatgaagatgacgattattgaactacaagtgctcacagactaaaacttaccggaacaagtctaggacacaagttaagatctgactatttacttgcgacatgtgctatatgcctttaaa

SEQ ID NO: 21140 - DNA, 1500 bp, Homo sapiens
  SIMILAR (990)..(1235): 451254mologous to Homo sapiens TFAR19,accession number AF014955,Smith-Waterman Score=100.
  misc_feature (1)...(1500): n = a,t,c or g
atgctgctaggctcccagactaggcccccggagcctacttaccccattaaatcagacaactcaataaaagaaccaagttcaatctcctttgaaatttttgtttttcctgtaggcaaaggggccagtctcctggtgcacctgggaaacctggaggactttcaactctgcactaaagccccagggacgcagacctgcccagcctgctttgaggacgccacagaagagcctttggcaccctcagatcccttttccctgaaaaccattgaagatgtgagagagttcttgggaagacactccgagcgatttgacaggaacatcgcctctttccatcgaacattccgagaatgcgagagaaagagcctccgtcaccacatagactcagcgaatgctctctacaccaaatgcctccagcagcttctgagggactctcacctgaaaatgctcgccaagcaggaggcccagatgaacctgatgaagcaggcagtggagatatcgttccatcatgaaatttacaacctgatctttaaatacgtggggaccatggaggcaagtgaggatgcggcctttaacaaaatcacaagaagccttcaagatcttcagcagaaagatattggtgtgaaaccggagttcagctttaacatacctcgtgccaaaagagagctggctcagctgaacaaatgcacctccccacagcagaagcttgtctgcttgcgaaaagtggtgcagctcattacacagtctccaagccagagagctcgaccgcctgaaatcggggaatcgggcctctgccggcgccctggcagcggcgcggggcgtggctccgggctggattggtggcgcctgggccccgcgagcgcctgcgcagtggtcaaagccgcgctcgcgccgcaggggctgcgagagtgaccgcggctgctccagcgctcgactccgagcccatggcggaccgaggagcttgaggcgctgaggagaccagaggctggccgacgctgcaggccaaaacacgggggatcctggtgatgcggccccaacaggaagccaaagcaccagggcaagcagaaatgagaaacagtatcttagcccaagttcctggatccagtccggccccggnccccaggttaagtaaccttagccaccttgtaaagccctgaaaaaacctaaagccagtagacgaattacccttatacaagattggcaagatattggacaacctaagtgatgangggtatcaggaaccaaggttttaattagaaatcccttaaaaaagttaaggcccaaacaaacagaaaagacaacaacagtgaaattcaaccagaagaaaaagtaatggactcttgatggaaggtgacggattatttgaactacaagtgctcacagacttagaactttaaccggaaccaagtctaggacagaagttaagatctgattatttactttgtttattgtctatattgcctttttaaaaaaataaacttgttatgcaaaataaaaaaaaaaaaa

SEQ ID NO: 21141 - DNA, 828 bp, Homo sapiens
  SIMILAR (22)..(615): 941254mologous to Cloning vector pZC320 SopB,accession number U26464,Smith-Waterman Score=916.
atgaagggaaccctcccgtggtccttgatcaccccgggtaatgaacggggacaggaactgcttactggggacgcgctggatggtatcatcccttctgttctactgactggtcaacagacaccggcgttcggtcgaagagtatctggtgtcatagaaattgccgatgggagtcgccgtcgtagagctgctgcacttaccgaaagtgattatcgtgttctggttggcgagctggatgatgagcagatggctgcattatccagattgggtaacgattatcgcccaacaagtgcttatgaacgtggtcagcgttatgcaagccgattgcagaatgaatttgctggaaatatttctgcgctggctgatgcggaaaatatttcacgtaagattattacccgctgtatcaacaccgccaaattgcctaaatcagttgttgctcttttttctcaccccggtgaactatctgcccggtcaggtgatgcacttcaaaaagcctttacagataaagaggaattacttaagcagcaggcatctaaccttcatgagcagaaaaaagctggggtgatatttgaagctgaagaagttatcactcttttaacttctgtgcttaaaacagcaggggatcctttagacccctacaggcgccactattttccgcgcccgctactaccgcgtaaccgcgaaacaccggttcgcttaaaacgcggaaaacgggttaatcgtggggacctgctagaagtgcccgaagatgaatccccagcagcaacgcatggccgctatagggaccgacaaggaaatgagcgacctacggacttcagggggatcctctag

SEQ ID NO: 21142 - DNA, 5227 bp, Homo sapiens
  SIMILAR (535)..(1326): 821254mologous to Homo sapiens helix-loop-helix protein,accession number M80627,Smith-Waterman Score=1081.
  misc_feature (1)...(5227): n = a,t,c or g
atgaagtaccacaagaatttttctaaaatgacacccaagtttttcttggcagaagttataattcctggcaaacagttcactgcagctctaattatgatgacagctttaatggagaagataatcatattaaatggttcttattcacttccatgtgatgaattagtgattaccataaaatgtgttaagcagctaaaattttacgactggacatctccctcagttccaggaatatgggcccgaccttatattcaagaaatcaatgaagctatagaaaggacagttctggagacagatcctgaagaatgggacctgctagaagtggccgaagatgaatccccagcaacaacgcatggccgctatagggaccgacaaggagctgagcgacctactggacttcagtgcgatgttttccccacctgttaatagtgggaaaactagaccaactacactgggaagcagtcaattcagtggatcaggtattgatgaaagagggaggtacaacatcttggggaacaagtggtcaaccaagtcctttcctatgattcatctagaggttttacagacagccctcattacagtgatcacttgaatgacagtcgattaggagcccatgaaggcttgtccccaacacctttcatgaactcaaatctgatgggaaaaacatcagagagaggctcattttccctgtacagcagagatactggattaccaggctgtcaatctagtctcctgagacaagatctggggcttgggagcccagcacagctatcttcttcaggaaaacctgggacagcatactattcattctctgctacaagttccaggaggagaccactccatgactctgcagcgcttgatcccttgcaagcaaaaaaagtcagaaaggtgcctcctggtttgccttcttctgtatatgcaccatccccaaattcagatgatttcaaccgtgaatctcctagttatccatctcctaagccaccaaccagtatgttcgctagcactttctttatgcaagatgggacccacaattcttctgacctttggagttcatcaaatgggatgagccagcctggttttggtggaattctggggacctccacttcccacatgtctcaaatccagtagttatggcaaccttcattcacatgaccgcttgagttatcctccacactcagtttcaccaaccagacataaacacgagtcttccaccaatgtccagctttcatcgcggcagtaccagcagttcaccttacgttgctgcctcacacacctcctcccatcaatggatcagacagcattttaggaaccaaagggaatgctgctggatagctcacagacaggtgatgcacttggaaaggctttggcatctatttattctcctgaccataccagcagtagttttccgtcaaatccatcaacaccagttggatcaccttcacctctcacaggtaccagtcagtggccaagacctggagggcaagcaccttcatccccaagctatgaaaactcactccactccctgcagtctcgaatggaggatcgtttagacagactggatgatgcaatccatgtgctgcggaaccatgctgtgggaccttccaccagtttgcctgctggtcacagtgatatacatagtttattgggaccatcccataatgcaccaattggaagcctcaattcaaactatggaggatcaagccttgttgcaagcagtcgatcagcttcaatggttggaactcatcgggcaggactctgtcagtctcaatgggcaatcattcagtcctgtctagtacagtcactacttcaagcacagacctgaaccataaaacacaagaaaattattagaggtggccttgcaaaagtcagtctggaactggttgttccacaggaaatcaagactggaaaacaaagaaaaggatgaaaaccttcatgaacctccttcatcagatgacatgaagtcagatgatttaatcctcccaaaaagatatcaaggtttcatctagaggcagaacaagcagtactaatgaagatgaggatttgaaccctgaacagaagatagaaagggagaaggagaggcggatggctaacaatgccagagaacgcttacgcgtgcgggatattaatgaagcattcaaagagcttggccgaatgtgtcagcttcacttgaagagtgaaaaaccccaaacaaaactccttattcttcatcaagccgtggcagtcatccttgagtctagaacagcaagtcagagagaggaaccttaaccccaaagcagcctgccttaagagaagggaagaagaaaaagtttctgccgtatcggcagagccgccaaccacactgccaggaacccatcctgggcttagtgaaactaccaaccctatgggtcatatgtaaacatcagccagttccagagttatcagtaggctagatagaaggtgacctctcctcataaggacttggacaactcagattatctgaagccaccaaacctgacaggagggagaagaaaaaacaaaacacttgaaccaagaaactcaaatgtaatcctacgatcgtagcagcatggtcaacacttccatcagaagtgaagataggaagctcatcagatagaacatcagcccatgagatgtttgcaacaaatcttttgttgcaagcagtgtgtcgcttctgcacaatcagagactgtctcgatctctccactcaccgtgggaagttgccttgtgcctaaactggaattgacaaatgcattgttaactacaaattttattttattgttatggaaactgtaaggtctacatataaagggaaaaagttggggtgtaaggctgatctacactcatctgatgccagcatacattaaagcggttcacgtgcatagaacaaagcagttgacaaccattggcccttagcattcccggcaatacctattaagtgtcttaaaaaggaagggaaaagtcttttgttgccctctcctatcctcttgccatatgaatagcgttttccatgaaataggaaaatattacttggtatagcatttctcttgctctcattttttgatttatttttattttctctttgtgggtgttatatttgatctctaaatctgaacagtttatggtcacagtccagcctcctccgtgcagccctgtgtgctttgcacagtttaccttacagtggtaagcatagagccatgtgtgatcgtatcagacctagcagtttcaaagggaacattttgttctctaggttttcccccaaataaacattgctttatttctaataataaccgagacttttcaagcttctagatctcataggaaagcttgtaatagcaaaattgtaaattacaagggaagaatctactttttagaaatcgctttgttttccaagcagtaagtactacatacagtacttgtaaagtgttagctgtaagtaagcacaaaatacatttaaaatacaaagacggttttttccaggctgtggtttatgggtgaacataacaaaacccagtagtcaccaaggcaaggtagtgtgataaatgaacacaccactctgaggctaattacctaatggaatacaagagcaatggtcacccgtatttccttatcctagcctttatttctctgtcatttggatggctggtcaatggggaagaattgagtgggtgatttaatcaactgcaaaccatctgcccctgtcccaaaatgatgagccagattaggcattaaaccagtactttgtcagtccatcttaatactgttcattaagggcactctctgtctctaatccttagggagttgtttttaaaaggacataatcactttggaacttccatgaaacctgtcttccaccacaacaaccctggggagaggaaaaacatgctaaaggaggtatcttggcttaataattccttatagcccaatatcaacagtggcaatcagcacacagaggaaaggacccaaatcactatgtagctaaaaagattcctgttaatttgaaagaacaaaaacaagacagaacttctggtactctaatcagggtgattcctaacaagtcagtcctttgtggaacttagtgggactttttggttactttaatttgcatatattctccagttacatcggactctatctgtggccttgttcttcatttcagtgttaatcagctaaacagaagttgttgcttatgatgtgtgagtgaacatatgccactgcctggccttttttttcttcagagcttgttgtctttttcgctatattagactttgcagtatgcccagaagctttccttcataaaatagaaagaaaaaaacatttggcttatttttcactgtagctagtcttttatacaataatcttgtaagaaaatttcttgaattctaaatattactctttctaggatttttgaaatccaaaaagttttcaggtaaaaagtttcttaactttattttattatattagggtagtaaaakkatgtaggggttatttncccccataacccggttccattaatatccagaaatttaccaatagccattttaaagaccccatagtaggattcctagccatacccgtgtagtaccctatggagtattgtaagagcctaattgttggagatgaattgccttcctcatccttgttctcccagtttcccattgttggtttattgccagatttgtatcctgtgtcaaattcaaggtattattgataaaccttttcaaccagcagcaagaagttcaaatttttttctgtcactgtaacagaaaacacaatatgtatataacatttatgtagcaataaatgtgtccatctttttttttaacacagtaaaatagtgagttttttacatttctctttctcaaataataatgtattttgttttattttctccatctcattcgtcccagaaacactcacactgcttttcctaactgcattaccgacattatctgggaaacccttcaggacagaatcaggcttgtggagctaagttggcaatctggtctagagcttctctagcttgtgcttttctcctcttgccctcactactgacggcggccttttaaccttttcctaaagattgaccaaacagcaactagtagttatagaaaatctactcatttgtagatacagagaaaaatgaagaagatggaaaaagactcaaaagaggctttttaagttattcttcaaagcacttttcacatttccccataccctttctcacaaaaaaaaa

SEQ ID NO: 21143 - DNA, 392 bp, Homo sapiens
  SIMILAR (133)..(387): 441254mologous to Homo sapiens p40,accession number U93571,Smith-Waterman Score=189.
ccagaatgcctcttctccctccaaaggatcacaactcctcaccagcaagggaacaaaactggatggagaatgagtttgatgaattaacagaagtaggcttcagaaggtggctaataacaaactcctctggaggaagctaaaagggcagttctaatacaatgcaaggaagctaagaactttgaaaaaaggttggaggaattgctaactagaacaaccagttcagggaagaacataaatgacctgatggagctgaaaaacacagcacgagaacttcatgaagcatacacaagtatcaatagccaaatcaatcaagcagaagaaggtatatcagagattgaagatcaccttaatgaaataaagcatgaagacaagattaaaaaaaaaaaaaaaaa

SEQ ID NO: 21144 - DNA, 1233 bp, Homo sapiens
  SIMILAR (271)..(218): 551254mologous to Homo sapiens PRO1094,accession number AF116623,Smith-Waterman Score=57.
atgaggaaaacccagtgcaaaaatgcggaaagttccaaaaaccagaatgcctcttttcctccaaaggatcacaactccttgacagcaagggaacaaaactggatagagaatgagtttggtgaattgacagaagtaggcttcagaagactaaaccaggaagaagttgaattcctgaatagaccaataacaggctctgaaattgaggcaataattaatagcctagcaaccaagaaaaggaccagagggattcatagccgaattctactagaggtcattacttctttttatgtggagcgtggaggaaatgctatgtccttcatgggaaaaggtgttacaaagagcacaattctttgcttgcttcacttatcccatgagatgatggcccaggctgggagcttggagtggatgtcactttggttcttgcctttgggtagtcatagtgaagaacatattcctactcaacaaggattggcttggttgattccattatgggttgatcgggacccagaggtgagattcacttcactgggattaggatcagcactgaccacccttgaaacgggctgtgtggccttagcaaacagttgtcagaacatttccggtgggctctggggaactgtggtgaacattcttctggaccagtcagaatgtagtatggtgcgccgggagagtcagcaccatgtggatgttgccaaggtttatcacttacaccctccagagtggtggcccaagctgtacctgggcccacttgaccacagcagggagctaaggagctctgtgctggaatgcatggagcagagacttgaggtgactctaggcaccacaccctacttctcagtaccaatttccaagttcattcaggctgttacaacaaaatgccttagactgggtgccagcagattcagtgtctgtcttgctgggctgtctgcagcccccgaacaaaagatacatcccccacccccaacacagcagttccaacagctcccccatgactcagttggtttcttacaattctctctccatcctaaaggaaattttgggagcgggatcagcagtcctgacagaagcggggatgccagtcattactcttacccatcactctggcaaatccgaggaacatcacgggtcaagaagcagacctggggctctggcaacctcaagaaatggggaatacacaaggtgcagccccaaagactgatgatgcaaaatgacacggatgaagagtccatttaa

SEQ ID NO: 21145 - DNA, 990 bp, Homo sapiens
  SIMILAR (3)..(29): 1001254mologous to Cloning vector pZC320 SopA,accession number U26464,Smith-Waterman Score=44.
atgtgtttggtacgcgattgcgacgtgctagaagacgtatttccaccggtgatcggggttgctgcccataaaggtggcgtttacaaaacctcagtttctgttcatcttgctcaagatctggctctgaaggggctacgtgttttgctcgtggaaggtaacgacccccagggaacagcctcaatgtatcacggatgggtaccagatcttcatattcatgcagaagacactctcctgcctttctatcttggggaaaaggacgatgtcacttatgcaataaagcccacttgctggccggggcttgacattattccttcctgtctggctctgcaccgtattgaaactgagttaatgggcaaatttgatgaaggtaaactgcccaccgatccacacctgatgctccgactggccattgaaactgttgctcatgactatgatgtcatagttattgacagcgcgcctaacctgggtatcggcacgattaatgtcgtatgtgctgctgatgtgctgattgttcccacgcctgctgagttgtttgactacacctccgcactgcagtttttcgatatgcttcgtgatctgctcaagaacgttgatcttaaagggttcgagcctgatgttctgtgtgtcaggaattcagatggggcatgctgctgctccacagtgtctggggcctcagctgggcaaactgaaatgactgagggagatgtgaatggccaggaactggaatcctctggagccatctttacttacatgtctggtgcctggatggtgatgactttgaaagctgggctcagctgggactgccgctgggagccgcgggtcggacgagccgccgcctccttctctgcgtccatgtatgaggggaagaagacgaagaacatgttcctgacccgggctctggagaagatattggccgacaaggaagtgaagaaggcgcatcactcccagctgcgcaaagcttgcgaggtggcgttaggtttaccgacttaa

SEQ ID NO: 21146 - DNA, 466 bp, Homo sapiens
  SIMILAR (222)..(332): 1001254mologous to Bos taurus guanine nucleotide-exchange protein,accession number AF023451,Smith-Waterman Score=190.
gcggtgcctctgagagccgccgccacctcgtcactcagttcccggcagacagccgcccgggccggcgtccctcaccgccaccagggcacggaggacgagtaaaaggtggcggccgggacgcgacccccgggcacggagaaaacgggtccccgacgggcgcggccctcgaccccgtttgagcccgcgggtcggaaagagccgccgcctccttctctgcgtccatgtatgaggggaagaagacgaagaacatgttcctgacccgggctctggagaagatattggccgacaaggaagtgaagaaggcgcatcactcacagctgcgcaaagcttgcaggggtggcgttagagggaaataaagcggaaactgaaaaacagagtcctcctcatggtgaagcaaaagctgggataagcacccttccaccagtgaaatcaaagacaaattttattgaagcagacaagtacttct

SEQ ID NO: 21147 - DNA, 1227 bp, Homo sapiens
  SIMILAR (79)..(225): 1001254mologous to Bos taurus guanine nucleotide-exchange protein,accession number AF023451,Smith-Waterman Score=260.
atgactgagggagatgtgaatggccaggaactggaatcctctggagccatctttacttacatgtctggtgcctggatgaaacttattgcttatgggcacttgactggcaatgctccagatagtacaacaccaggcaaaaaattaattgatagaattattgaaacaatatgtggctgctttcagggccctcagacagatgaaggagttcagctgcagataataaaggtaggaggtattgtttggattttccctgctgcgggcttcattacactagatctcttccatctgaactataaatcacaattcaagcttgagagcagctgccactgtccagacatgtggctgagcccgggtcaggaacatgttcttcgtcttcttcccctcatacatggacgcagagaaggaggcggcggctcgtccgacccgcggctcccagcggctggaggggaggaggaggagaggaaggaagagaagagagaaaggagagggggtggagtgcacggaactgctgtccaggactctgctctccgactacctcagggaggattctgttttgggaaaagtaagccaaaacctattgataagggttcaaaaatgtttcacttttttctctctctgtcggataaatcggtcaactctagatttcaggtcccttctgaattgactcagttaagcgcaggggcacaagctgagcttgtaaaagcccacagatgttgggggctggagaaggggcaggagagcatcacactcagccccagcctcctcaacctcttggggccctgtgatggggaggagacggcagcaccaccacctcttccaccaatccccacagtattaactccacttccactctgtccgacatcacccccctcaacccttctgctccgcctcttcaatctggaccagcagcagcccctactgccagaacgacaccacagccacccagcatggcagagcaagcttgcacagggaaggtatgctaggaaatggctgcacactgtcccactagggaattccatcctctgccaactaaggaattccatggaaaagattcacgtcagtggacagatccagatggtgcctgatcctttaggtggtatgctgaaagaaggcattgttgtcataggagaggacagctccatgcgtgttattgcccctgaaaaccttccagtaggacaagatgtggaggtggaagacagtgacattgatgatcctgacccagtgtag

SEQ ID NO: 21148 - DNA, 7285 bp, Homo sapiens
  SIMILAR (654)..(2684): 961254mologous to Homo sapiens brefeldin A-inhibited guanine nucleotide-exchange protein 1,accession number AF084520,Smith- Waterman Score=3322.
gcggtgcctctgagagccgccgccacctcgtccctcagttcccggcagacagccgcccgggccggcgtccctcaccgccaccagggccggagtgacgagtgagaggggcggccgggacgcgacccccgggccaggagaagcggaggcccgacggcggcggccctccgaggtacggcttcttgggggcggcgaggacctcgacgcccttcgccgacaccgcggctggtcccgctcgcccgccccttcctgatcctgccgctgccctccacgcctccaatcccccacctccaccccctctcctttctctcttctcttccttcctctcctcctcctcccctccagccgctgggagccgcgggtcggacgagccgccgcctccttctctgcgtccatgtatgaggggaagaagacgaagaacatgttcctgacccgggctctggagaagatattggccgacaaggaagtgaagaaggcgcatcactcccagctgcgcaaaagcttgggagggtggcgttagaggaaataaaagcggaaactgaaaaacagagtcctcctcatgggagaagcaaaagctggatcaagcacccttccaccagtgaaatcaaagacaaattttattgaagcagacaagtacttcttgccttttgagttgggcatgccagtccaaatgtccttcgcatagtttagtacatctctagattgcttacagaaactttattgcttatggggcactttgacttggcaatgctccagatagtacaacaccaggcaaaaaattaattgatagaattattgaaacaatatgtggctgctttcagggccctcagacagatgaaggagttcagctgcagataataaaggctttacttactgcagtaacatcacaacacatagaaattcatgaagggactgtactgcaagctgtgagaacatgttacaatatctacttagcaagcaaaaatctcatcaatcagacaacagccaaagctactctcactcagatgctaaatgttatctttgcacgcatggaaaaccaagcattacaggaagcaaaacaaatggaaaaagaaaggcatcggcagcatcatcatctgttaccgtctccagtaagccatcacgagcctgaatcacctcaacttagatatttgccacctcagactgttgatcatatatcccaagaacacgaaggggaccttgacctccatacaaatgatgtagataaaagtcttcaggatgacacagagcctgaaaatggatctgatatttccagtgcagaaaatgaacagactgaagctgatcaggcaactgcagctgaaacattatctaaaaatgaagtgttatatgacggagaaaaccatgattgtgaggaaaagccacaagacattgtacagaacattgtagaagaaatggtgaacattgttgttggagatatgggagaagggactactataaatgcaagtgcagatggcaacattggaactatagaggatggtagtgacagtgaaaatattcaagcaaatggaattccaggaacaccaatttctgttgcatatacaccatccttacctgatgatagattgtcagtctcttccaatgatactcaggaatctggaaattcttcaggaccttcacctggtgctaagttttcccacattttacaaaaggatgcctttctagtattcaggtcattgtgtaaactgtcaatgaaaccactgtcagatggaccaccagatccaaagtctcatgaactacgatccaagattctttcattgcagttacttctatccattctgcagaatgcaggacctattttcaggacaaatgagatgtttattaatgctattaagcagtatctttgtgttgcactctcaaaaaatggagtctcatctgttccagaggtttttgagctttctctttctatatttcttactttgttgtcaaatttcaagacacatctgaagatgcaaattgaggtgttctttaaagaaattttcttatacattttggaaacttctaccagctcatttgatcacaaatggatggttattcagacactgacgaggatttgtgcagatgctcagagtgtagtggatatttatgtaaactatgactgtgacttaaatgcagccaatatatttgaaagactagtaaatgatctatcaaaaattgctcaaggaaggggcagtcaagaacttggtatgagtaatgttcaggaattgagcctgaggaaaaaaggtttagaatgcttagtgtcgatttcgaagtgtatggttgaatggagtaaggatcagtatgtgaatcccaactcccagacaactcttggtcaggaaaaaccctcagagcaagagatgagtgaaatcaaacaccctgagacaataaacagatacggaagtttaaattccctggagtcaacatcatcatcaggaataggcagctacagtacacagatgtctggcactgataatccagaacaatttgaggtcctaaagcaacaaaaagaaataatagaacaagggatagatttatttaataagaaaccaaagagaggaatacagtacctccaagaacaagggatgcttggcaccacacctgaagatattgcccaattcttacatcaagaggaaagattagactctactcaagtgggtgaggttcccggggggataatggataaatttaaccaaagaagtcatgtatgcatatgtggaccaacatgacttttcaggaaaagacttcgtttcagcccttcgtatgtttctagaaggatttcgtcttccaggggaagctcagaaaatcgatcgattaatggaaaaatttgctgcaagatacctagaatgcaaccaaggacaaactctctttgctagtgcggatacagcttatgttttggcttattcaattatcatgttgaccacagaccttcacagtccacaggtgaaaaataaaatgacaaaggaacaatacattaagatgaatagaggtatcaatgacagtaaagaccttcctgaagagtatctatcagccatctataatgaaatagctgggaaaaagatatcaatgaaagaaacaaaagaactaacaatccctacaaaatcaagtaaacagaatgtagccagtgaaaaacaaagaagacttctgtataacttagaaatggagcagatggccaagacagctaaagcactcatggaggccgtgagccatgttcaggcaccctttacaagtgcaacacatttggagcatgtgaggcccatgtttaagttggcttggacgccttttctggctgcattcagtgtgggtctacaagattgtgatgatactgaagtagcctctctttgcctggaaggtataagatgtgcaatcagaattgcatgcattttcagcattcagctggagagagatgcatatgtccaggcactagcaagatttaccttactcacagtgagttccggtattactgaaatgaaacagaagaacattgacacaataaaaacacttatcacagtggctcatacagatggaaattatttaggaaattcatggcatgagattctgaagtgcatcagtcagttgaagctggcacagcttataggaactggagtgaaacctcgatacatttctggaacagtgcgaggcagagaaggatctcttactggaacaaaagatcaggctcctgatgaatttgtgggtttagggctagttggaggaaatgtggactggaaacagatagcaagtattcaggaatccattggagaaaccagttctcagagtgttgttgttgctgtagatagaatattcacaggatctacaaggctagatggaaatgccattgtggattttgtccgttggctctgtgctgtgtctatggatgaattactttccacgacacacccaagaatgtttagtctacaaaaaatagtagaaatatcatattacaacatgggaagaataagattacagtggtctcgaatttgggaagttattggagatcattttaataaggttgggtgtaatcctaatgaagatgtagctatttttgcagtagactccttgaggcagttgtcaatgaagttcttagagaaaggggagcttgctaacttcagattccagaaggatttcttaagaccttttgaacatataatgaaacggaacaggtctccaacaattcgagatatggttgtacggtgtatagcacagatggttaattctcaagctgctaacattcgatctggatggaagaacattttctctgtatttcatctagctgcatctgatcaagatgaaagcatagtggaacttgcattccaaacaaccgggcacattgtcacccttgtatttgaaaaacactttccagcgaccattgattctttccaggatgcagtgaagtgtttgtctgaatttgcgtgcaatgcagctttcccagacacaagtatggaagcaattcgacttattcgccattgtgcaaaatatgtgtctgatagacctcaggctttcaaggaatacacaagcgatgatatgaacgtagcacctgaagacagggtgtgggtgagaggatgggttcccaattctctttgagttatcctgtatcatcaatagatgcaaattagatgtaagaaccaggggtttaacagtaatgtttgaaataatgaaaacatatggccacacttatgagaaacactggtggcaggatttatttagaattgttttcagaatctttgacaatatgaaattgccagaacaacagacagagaaagctgaatggatgacaacaacttgcaatcatgcactttatgcaatctgtgatgtattcactcagtatttagaagtactcagtgatgtacttttggatgacatttttgctcagctctactggtgtgtgcagcaagacaatgagcagttagcgcgatctggtacaaactgtttagagaatgttgttattctgaatggtgaaaaatttaccctagaaatctgggataaaacttgcaactgcacactggatatcttcaaaaccacaatcccacatgcgctgttgacctggcgacccaattctggagaaactgcccccccacctccatctcctgtaagtgaaaagccattggataccatatcacaagaaggccggagatatatcatggatctatttcacccaaggctgtgggataacagaacccaaggcccccctgggttctgcggctggttgttaatggagaaaatccgccaaaattaaatctacagcaaaatttccagaacaaaaattgtttgctgccctgttgattaaatgtgttgtgcagctggaactcatccagactatcgacaacattgtcttcttcccagccacaagtaagaaagaagatgcagaaaacttagctgcagcacagagagatgcggtggactttgatgttcgcgttgatactcaagaccaaggaatgtaccgctttttaacatcacaacaactttttaagctactggactgcttattagagtcacatagatttgcaaaagcgtttaattccaacaacgaacagaggacctgcccttgtggaaagcaggattcaaaggcaaatccaagccccaaccttcttgaagcaggaagaccagcaagcctggcctgtgggctgccgcatttctccttccggatgtacatggatgagagccgcgttagtgcctgggaggaggtccagcagaggcttttgaatgtctgcagtgaagcactaagttacttcctcactctaacatcagaaagtcatcgagaagcctggactaacttactgcttttgtttctaactaaagttctaaagataagtgataataggtttaaagctcatgcatcattctactaccctctcttatgtgaaattatgcaatttgacttgattcctgaacttcgtgctgttcttaggaagattttttctgcgaatcggagtagtttttcagatatcacaaccacctgaacaggaacttgggaataaacaaggcaatgatgggggaacttaatattttttgttgggccatttacatccctctgctctttaaaaggaccgctggagctgaggttttcccacctgaaaaaatgatttctcctgggattgcaagtgtctgagttactggtaaagatgcttagaagtcttactcaaacttgcaacactccagtccccttttagtgctggtggattttgtgtgttatattggcctcatgttgagcagaaagcctgtttaaacaggtgtcagctccatggctcacgggtccttccctgtcttccacggcaggaaaagccccacgtttttggcaggtgtggaagtgaaacttacccaaagaactatagatgtaaagattgaacttctacaagaagtacaactcagggagagctgtattttgaaggataaaatgtttatatttggcgagtgactgagagaagaagaaatttattgttcatggtaaaagatatttaggcaactatggtattcttaattctgaaagatttttggcacacttcagggctatctggagattactgggtaatcattcccgtggaaaaatgtacagagatggcaggtctgtaattataaaaatcttaaaacattatatagttcttcctgcactgttttctttattttcttattcatttgctaaatacccataatattttgtcaaatgcactaaacatttgggtggaactttcttttttattttatagggatttttagttttgccctttttggtaggtggtgattttgaggctgtaacatgcccagaagctgttgtggccgacacttcaacaatagggaaaaaaaggtagaaaatatccctactgacagtaactacctgtcacatatttctcttaggacttttaaagatgagccattaaaatagaatgatcctttatggaccaaaacttgaaatcactgccaaaatgaatccagattgcctgtccattttcttttccttttgggtggtggggccttgatgtagattttacctctatgtaccagaatttaaccgttgaatatattaaaataacaaatctggccatggtttgcggaggttagatttactggaaatgtattcatactgtgaattgtgctctgatggttaaaagacaagattgtcaagcattccgtattaacagtgggatgtaggaaaattttttcagatgggacaaaatgtatatgggtacagatgtaaagttttctatggtaaaaaattctgtaccaactttctgtacaatattgattcccatctggcatattctaatcaggttataggtcaataaagtttttgaattatttcaaa

SEQ ID NO: 21149 - DNA, 315 bp, Homo sapiens
  SIMILAR (53)..(157): 361254mologous to Mus musculus Fd fragment,accession number X73013,Smith-Waterman Score=57.
tcgtcttttgtttcaatgtgcaaagtcttttatttaaaattttagaagttaagacttacgaccacctcagtatatgccattcctaatagaaggaggtatgacggtttcaaactcgtgcagagctgcattttcatttacaagtctctgtaggcactttagaagtgaagcttggcttcaaaatacaaacactgggggctttggctcaaccttttaatataaaaaaattcactgaaatcctgtgactgaaagtcccctcgagtgcactctgtggtgcacatgcgcccgcccacacaaactctggcattgaaacaaaag

SEQ ID NO: 21150 - DNA, 617 bp, Homo sapiens
  SIMILAR (203)..(415): 441254mologous to Homo sapiens Human normal ovarian tissue derived protein 3,accession number Y59726,Smith-Waterman Score=119.
gagcgtgagaaccctccccaactaatcctgggtcgccgcctcggagaagggccgcggggccgagcgcgggaagtggcgtacagtcggtttttggcaggcgagagccagagcgtgagaaccctcccacggcgaggccaagccctgagactggactagcaaggtcgtgagtctctctgtcagctctccgcagcgaaggggcgcggggggcggggaccgtgcccgaccgtgccagctcccgccccggaagcggaagtgcaagcactgcggggtcctgtccagtgtgagcccgacccgagctccagtagatccgcccgctggtcatcgcgccctttcccctgccggtgtcctggctcgccgtccccgccatgctgtctctagactttttggacgatgtgcggcggatgaacaagcggcagaaagaaagaggagaggagaagagaaaagaaaaagaaaaagaaaaagcggaagaaagtggaatgaacagacttgctgagtctggttatctttatctttctccagtgctgaatgcttcctgccctcggacacctcagcttttggactcctggacttacgtcagtggtttgccaggggctcttgtgctttctgccacagactga

SEQ ID NO: 21151 - DNA, 1197 bp, Homo sapiens
  SIMILAR (933)..(574): 401254mologous to Canis familiaris microsomal signal peptidase complex,accession number J05466,Smith-Waterman Score=137.
aggagtttttttttttttttttttttcaatgtgcaaagtcttttatttaaaattttagaagttaagacttacgaccacctcagtaatatgccatttccctaaataggaggaggtatgacgggtttcaaactcggtgcagagctgcattttcatttacaagtctctgtaggcactttaggaagtgaaggcttgggcttcaaaattacaaaccactgggggggctttggctcaacccttttaatataaaaaaattcactggatgtacaaaaaatttgaaaagtgtgaacaatgacaattatggaaatcctgtgacttgaaagtccccctcgaagtgcactctgtggtgcaacatgcgccccgccccacacaaactcctgggcatgggaaacataaactaaatgcaaacccagtgctaccccagaagcacccaacacgtgtggttcctcccattcccaccaatccacagaccgagtatctactcccaaacatcccagtaacggaaaactatgggcatcttccccaggaacagcaagggagggcttctttactcacgatggaccagcacggaataaaccccagcaaaaagagaactgcatacttaaatttaggatagtcattcatggagggatcgtcaacaattcccaatataagggaccaattcccctgggctctccccccacaacatcttttttcctcctagcccaatgttgtcccttgtttaaaagaggcctcgggtcatcaacccggatgattattctccctttgggtcaaaaaacttggatatgccccatttttgcttatcatgaatccttcaagactcggtgaactataggaatctctcttgcttctatcctaaaaacaacaatttctccccactccgtatgggatcttcaacctcgattttgttagaaagagaagatctccctctatgaaatgcaggttccaatgctgccactgagcaccactacaatcggactttcacttccagttattaccattaaccccttccagatcattagtgccgatgagacaatcattccaaaatttaggacttgataatagagctgccgcttgttcatccgccgcacatcgtccaaaaagtctagagacagcatggcggggacggcgagcaggacaccggcaggggaaagggcgcgatgaccagcgggcggaactactggagctcgggtcgggcga

SEQ ID NO: 21152 - DNA, 949 bp, Homo sapiens
  SIMILAR (520)..(263): 341254mologous to Brassica napus cell wall-plasma membrane linker protein,accession number X94976,Smith-Waterman Score=106.
tcattccaacttcagttcaaggtccagagttatttctggcccgtcatagtcactcaataaatattcgtagaagatcttccctgaaggggtcagttgatctcttgcaagtgaattgaagattgtcttggcagaaccatgacccaaggctttgacgcctggagttttttctacggtgtatattctttttgcttgagcgtaagatctatctgattgtacagttttcttgtctcctcgccagttcgtccgtttgtctcggttatatcggctgcgtcgagtgctgagtggccagtggttgcgaaggctcgtggacgctcgggctgtctgttggccgttgagtggggcaggaggtggagggtgtgttgtggggcttttggagccgtgcgcgtggcgacgggggggctcgtgggaggcctggacggtgcggtcgcgtgtgcggtggagggcggtgagtgtgagctcgggtgcctcagggtgccgcgtgactgtcgtcaggggttgtgttggcaggcgccgagggggggctggtgcagaccaggaggttctggtagttgacgtggacatgaggatgttcgtggagtgctgcatctcccggaaggcagtgctcaggcaccactgggcctgggcacagggcttccggatgctgttatcttccctcctcacccaccctgggctggtgtgcagaaggcagcaggtgctactggccccaggccagcccgaactcgaaacaacacacacggatgtgggtcacaaggctagttccacaagtgtagatgaccgtgtccacctcgccatcgaagcacaccgtgcactcgccattcttgatcgtgccggctccggtggggagaacacgggggacaccggggggctcagcggggagctgggggccgtcactcgcctcgctgcgacaaacgtgctctcctttctcacaaacaaccacaaacattctcat

SEQ ID NO: 21153 - DNA, 213 bp, Homo sapiens
  SIMILAR (12)..(212): 981254mologous to Mus musculus homologue to a human gene expressed in the nervous system; bp 510-533: putative transmembrane domain of X11 protein,accession number L34676,Smith-Waterman Score =336.
cccacgcgtccgtggaccacgccttgcgtaccatctcctacatcgccgacattgggaacattgtagtgctgatggccagacgccgcatgccccggtcagcctctcaggactgcatcgagaccacgcccggggcccaggaaggcaagaagcagtataagatgatctgccatgtgttcgagtcggaggatgcccagctcatcgcccagtctatcg

SEQ ID NO: 21154 - DNA, 3813 bp, Homo sapiens
  SIMILAR (1433)..(2038): 911254mologous to Homo sapiens XllL,accession number AB014719,Smith-Waterman Score=910.
cgctattcgggaagctattcagcttcccgggctcattagcagtcgcggtgtgcggctcggcgcgggctcacaaagagctcggcctcgcggactgagccggcggcagcggggcggggacggcggcgtacccgggcagcccagcgccctggccagtctcctgaatatttacgcgttgctgaatctcctgtggacaaaccaccaataggccaggactgtcctgtggacagacggggtgagcctcttcttgtgtctggagattctgaaaagatttgatcaccaggagatttttcgggacattaccaaaccactcattttagtggctgcctccgggtgatgatggctgtgtgaacgactgccatggcccaccggaagcttgagagcgtggggagcggcatgttggaccatagggtgagaccaggtcctgtccctcacagccaggagcccgagagcgaggacatggagctgcccttggagggctatgtgcccgagggcctggagctggctgccctgcggccagagagccccgcgccagaggaacaggagtgccacaaccacagccccgatggggactccagctctgactacgtgaacaacacctctgaggaggaggactatgacgagggcctccctgaggaggaggagggcatcacctactacatccgctactgccctgaggacgacagctacctagagggcatggactgcaacggggaggagtacctggcccacagtgcacaccctgtggacactgatgagtgccaggaggccgtggaggagtggacggactcggcgggcccgcacccccacggccacgaggctgaaggcagccaggactacccagaccgccaactgcccattccggaggatgagccctccgtccttgaggcccatgaccaggaagaagatggtcactactgtgccagcaaagagggctaccaggactactacccagaggaggccaacgggaacaccggcgcctccccctaccgcctgaggcgtggggatggggacctggaggaccaggaggaggacattgaccagatcgtggcagagatcaagatgagtctgagcatgaccagcatcaccagcgccagtgaggccagccccgagcatgggcctgagccagggcctgaggactctgtagaggcctgcccacccatcaaggccagctgcagccccagcaggcacgaggcgaggcccaagtcgctgaacctccttcccgaggccaagcaccccggagacccccagagaggcttcaagcccaagaccaggaccccagaagagaggctgaagtggccccacgagcaggtttgcaatggtctggagcagccaaggaagcagcagcgctctgatctcaatggacctgttgacaataacaacattccaaaaacaaaaaaggtggcatcatttccaagtttggtggctgttccagggccctgcgaaccaaaaaacctcatcgacgggatcatctttgctgccaattacctggggtccactccagctgctatcagaacggaacccttccaaaaacatcagaatgatgcaagcgcaggaggccgtcagccgggtcaagaggatgcaaaaggctgctaagatcaagaaaaaagcgaattctgagggggatgcccagacgctgacggaagtggacctcttcatttccacccagaggatcaaggttttaaatgcagacacgcaggaaaccatgatggaccacgccttgcgtaccatctcctacatcgccgacattgggaacattgtagtgctgatggccagacgccgcatgccccggtcagcctctcaggactgcatcgagaccacgcccggggcccaggaaggcaagaagcagtataagatgatctgccatgtgttcgagtcggaggatgcccagctcatcgcccagtctatcggccaggccttcagcgtggcctaccaggagttcctgcgagccaatggcatcaaccccgaagacttgagccagaaggaatacagcgacatcatcaacacccaggagatgtacaacgacgacctcatccactttctcaaactcggagaactgcaaggagctgcagctggagaagcacaagggcgagatcctgggcgtggtggtggtggagtcgggctggggctccatcctgcccacggtgatcctggccaacatgatgaatggcggcccggctgcccgctcggggtaagctgagcatcggggaccagatcatgtccatcaatggcaccagcctggtggggctgcccctcgccacctgccaaggcatcatcaagggcctgaagtaaccagatcacaggtgaagcttcaacattgttcagctgtcccccggttcaccacggttcctttattcaaagcggccagacctcaagtaccagctgggcttcagcgtgcagaatggaattatctgcagcctcatgagagggggcattgctgagcgagggggcgtccgtgtgggccaccgcatcatcgagatcaacgggcagagcgtggtggccacagcccacgagaagatagtccaagctctgtccaactcggtcggagagatccacatgaagaccatgcccgccgccatgttcaggctcctcacgggtcaggagaccccgctgtacatctaggccaccccagcctgggccacgcagccaggacaccgggcagggccgcccgggcccagaggagctgggagccgggccgcagacttgaccccgacgccacagcccagccacggacgctggctccccaaagggtgtgccctcaccacccacttgatttttttcattttgccaaaaaggggtatgtctttatcaaaggagagtcacagaacaaatgtttgtttgtaaagcgttccaagtattttgccacgttctggactgtcttctccctgcacaagccagggtgtgtctcggtagctgtgcgtggtgtggagtgtgtgtctttcctccctgaagctgtgcggagcgaactggcgcctccgagggacgcggctcccggggcagggcagccgtcacccctgcctcccgcccccttggctgggacgtctggggtcctgtggggcccccacaatggtcccaaacagctgcctctgccactgactgcagggacacgggcagcctggctcccaggacacgacttgtaatgaaagtttggggacatgtgattgattgattgattgattgtaaataaaggatgatggccacaacatgaaaactccatatttatttagatgctattattactgtttggacttttattttggcaggcttttttccagactctagggttttccaatgtgactaatgaccacacctgcctctcccgtcgtctcttctgggcaccctcccacccggctgcatacccggccagggctcccacagagacaaggagggcacaggtgtctgccccctctttaaaatcgatctacacacatccacgcacatgcgaccccgagggaaacgaaacccactctaaaaaaacgcgaccttggccgcacctaaagcagcccagccgtgagtgcagaccccttggccagcgtggcgcagtggccctgagcagtagtggcatgtgtgtagatcaagtcggatactagtccagctcggttcattagttagcgatccatgtaatctgacgtcatcttgtctcgaagtctctttttttggcccaggccttgaagaatacactgtgacttaagaagccttaccacgcagtaactaaagctttaggatgactgtattcgaggagtgccgtgtgttgcatgcagctacccgtaggaagacttcgcgcatatcactaataaacctgaagtcgtgatgacc

SEQ ID NO: 21155 - DNA, 771 bp, Homo sapiens
  SIMILAR (200)..(745): 341254mologous to Human herpesvirus 4 BCRF2 3072 repeat, reading frame 1,accession number V01555,Smith-Waterman Score=88.
gtaaccgaagaagcagtagacgactccaaacaaacagcacatgatgcagacgagggccggcagtgcctggtacctgcgctccaggggctgttcacaaggtgcaccccagaaggcatcatctggctcagggggcagcagctggaaccgcagtgttgccacagtccccggcatagtgctgggctggaggcgacctgagcttctgagtgaaagaggctgtgcagaggcccgaggggccggggttgcggggcgccagaggctccaactgactggggtccagggaaagtccgtcgtgcgaggaagggggctgctgggccggagagaatggtgtcggcgcggtggcggcgccgctccacgtccaacaccggctggcactccagtcccgcggcgtccgggaactcgggctgggcctgaggaaggggaaggcgcaggagccggggctcgggccgccccagaaccgcggccccatgccctgagcccgcccgcggcctttggtgctgatggacagctccggcctctgctcctgacgtcactcagggcgcaccatccaggcaggggcgggctgcttctgacgtcacctgggacgcaccaaccacgccgcgggaggcaggggactccgcccccggcgtctccctctcccgcactgaggagggggcacttccgggggtccttcccctttaacctcccccttctcctccctctccggtagcgagagcccgagaccccaccccgggggcggggcccttgcagtgacacgtcggacagctgcggccg

SEQ ID NO: 21156 - DNA, 2659 bp, Homo sapiens
  SIMILAR (2544)..(2600): 471254mologous to Nicotiana alata, style, Peptide, 151 aa NaPRP3=putative proline-rich protein,accession number S48582,Smith- Waterman Score=47.
gcccttttttttttttttttatgagttggaaacaactttattgatacctgagaaaaagtgcaggaaaaatattcctcctgaccaggtggcctgtcccctgaggccagatcattctctcgcctctcccttaagccctgggtcatttgggacctcactggccagcacccagaggctgaagacatccacagccagagcctgggaagccagacccagagaccaggagagggaatgtctacagcgtggctcctgaggttcagggccaaggtcaagcgtggggaccctcatcggtcaagggccaacgccttcttggatcactgtccccggagtccgatggaaaacagctcctcccatggttccccggatccaggcaagcagggctgtcagctgctccctgaaacaccacacggagtgccccaaaagctctcccagccgggacaccctcatcgtagaagagcagccgcaagttcttcaggggctgagcggtagagcagcacggagctcaggctgctgagtggctgctgctccctgacacgcacagcagggcccggccccgagggaggcaccttctcagaggcttcgccagatgctgctggaggagagggctctgccggggaccctgcagcatcctcatctaacaggaacagggtggacggagtcagcaacagggatacgaggcaggtggaagggccttcaaccaggaacgcccgaaggtagaagaactggcgagcctccaaggatgagtctttttccagcaatggccagagccggtgctggggggtgacctcctcctctgtggcactgacacagttcctccaggcagggggcagagactgcaagacatcaaggagctcctctaggaaggcccggcaatgcctggcatctcggggcagcagcacatcagcggcccgccccagctgcccactctagccgcaggctctggcctgccaggcccagctctatgccactcagatcctgcaggggaacagccagggtcagctgcagccagctagctggaggctcacgcatctccccagtcaccttcaacaggtacagcctgcggtcagacacaaccacaaggcacatgaactccccagtgtggcctgccaatgccactggcaccttgaggcagcactggaactcctcctgggcatcgctgaacacctcaacatccaggaagagccggagtcggtggtcccacagagcggaggcccacagcgcctcaaggggggggactgaaggctcccaactaccatggtcacgggtgctcggtgcctgaggtgggctgttcttggccctgtcaaggtggtcaccatggccaggagggtggcagacagggctggcaaacggagaaggagccagagactgctctccctgtttccgctccctgttgggggttccccgagacacagcgaggagaaccacgtggtcactaccacagttaggacacacagcaggagattctgtcttttggaacagaggcctccagccttcctcactgtctaaatcccatcctgggctcctctggcttgaactcatggccacagcgtagacactggaatctacccagcaggaggtccctggcctccccaagctgttcccgagccacattggtgactggggtcaacacggcaagcagctcctggacagctgcgtgggcatcaggctccagcaccaaatagcgacgcaactgccggtcagggcagatgtaggagaagcgcagactgaggatggggctccagggagcagatctgagcccttccacttccttctggtcctgctcctcttcttcctcctctcctgcctcctcttctccctgttccaccatctccccctcctccttctcctccttcccctccttctcctcttcctcctcctgtggccgccctgacctcctctgacattttctgtggtgactcctgggggcctctggtgtcctcctcataggaaaagcctcaatccaaccagtaaaggtgtcaatgaatactaataaatatttaaaccttttacatgggggcatcttagtataatctctttgccaatcttcaccagggtacattcccttatgctgaacaggccttactgccacgtcaagggttacccaaggctcctctggagatatatgtagttgtccgacagggctgtggcagaaggtccccggtcccgtcactcttgagctggtcgaagaagcagtagacgactccaaacaaacagcacatgatgcagacgagggccgcagtgcctggtacctgcgctccaggggctgttcacaaggtgcaccccagaaggcatcatctggctcagggggcagcagctggaaccgcagtgttgccacagtccccggcatagtgctgggaatagaaggagtcaccctcccagttaacctgggctggaggcgacctgagcttctgagtgaaagaggctgtgcagaggccgagggccggggttgcggggcgcagaggtccaactgactggggtccagggaaagtccgtcgtgcgaggaagggggctgctgggccggagagaatggtgtcgcgcggtgggccgctccacgtccaacaccggctggcactccagtcccgcggcgtccgggaactcggctgggctgaggaaggggaaggcgcaggagccgggctcggccgccccagaaccgcggccccat

SEQ ID NO: 21157 - DNA, 501 bp, Homo sapiens
  SIMILAR (2)..(46): 861254mologous to Homo sapiens KIAA0356 protein,accession number AB002354,Smith-Waterman Score=64.
cacagcaaatgctgaggactcagaccagtctctgcaagagctgctcccggcagatcggcttctcctttgtacgacccaagctctgtgccttctctggcctctattactgtgacatctgccaccaagacgatgcctcagtgattccggccaggatcatccacaactgggacctcaccaagcgcccgatctgcaggcaggccctgaagtttctgacgcagatccgggcccagcccctcatcaacctgcagatggtgaacgcgtctctgtacgagcatgtggagcggatgcacctcattgggaggagccgggagcagctgaagctcctgggggattacctgggcctgtgccggagtggcgccctgaaggagctcagcaagaggctcaaccaccggaattatctcttggagtctccgcataggttccgtgttgctgacctccggcagatcgcagatgaggtatatgaaggattcctcaaggccctgattgaatttgcctcccagc

SEQ ID NO: 21158 - DNA, 2649 bp, Homo sapiens
  SIMILAR (196)..(1695): 931254mologous to Homo sapiens KIAA0356 protein,accession number AB002354,Smith-Waterman Score=2410.
atgaggaccattcaggaggaagcaggctggcagcaggaattcatcctggacatgtcagctgagatcctagtggacatgtatggcacaggtggatatatgaatgtggatttcaagaacaaggtccaggctggcgataaaaattgggagctaaagcctgagagcagtgaaatacaggatgcaagagcagcagtggacggactgtccaacccattccagggtctcatgaagctgggcaccgtggagcggcagggggcaatgggcatctggaaggagctcttctgcgagctctccccactggagttccgcctctacctgagcaacgaggagcacacctgtgtggagaactgctccctgcttcgctgtgagtctgtggggccagcccacagtgacgggcgctttgagctggtcttctctggcaagaagctggccctgcgcgcctcctcccaggacgaagctgaggactggctggaccgggtgcgggaggccctgcagaaggtccggcctcagcaggaggatgagtgggtgaacgtgcagtactcagaccagcctgaggaaccccccgaggcgccccagggctgcctctctccctcagacctgctctcggagcccgcggccctccagggcacacagtctgactggtcgtccgcccaggttccagagctagatgccatcaaggagtccctgctgtacttgtacatggacaggacctggatgccctatatattttctctgcccttggaggctctgaaatgtttccgcatcaggaacaatgagaagatgctgagtgacagccacggcgtggagaccatccgggacatcctgccagacaccagccttgggggcccatccttcttcaaaatcatcacggccaaggctgtcctgaagctgcaggccggaaacgccgaggaagccgccctgtggagggatctggtccgcaaagtcctggcatcctacttggagacagccgaggaggcggtgaccctgggcgggagcctggatgaaaactgtcaggaggtgctgaaatttgccacccgggagaatggcttcctgctgcagtacctggtggccatccccatggagaaaggccttgactcccaaggctgcttctgcgcaggctgctcccggcagatcggcttctcctttgtacgacccaagctctgtgccttctctggcctctattactgtgacatctgccaccaagacgatgcctcagtgattccggccaggatcatccacaactgggacctcaccaagcgcccgatctgcaggcaggccctgaagtttctgacgcagatccgggcccagcccctcatcaacctgcagatggtgaacgcgtctctgtacgagcatgtggagcggatgcacctcattgggaggagccgggagcagctgaagctcctgggggattacctgggcctgtgccggagtggcgccctgaaggagctcagcaagagggctggcccagagagcgcctctctgaagactgcctcctccatcctggctgcagtgctcccagagccgggcctcctcagggccaggatcgcagatgaggtatatgaaggattcctcaaggccctgattgaatttgcctcccagcatgtctaccactgcgacctgtgcacccagcgcagcttcatctgccagatctgccagcaccacgacatcatcttcccctctgagtttgacaccacagtcagcccagccccagtccgggaggaagttctgccgggcgctctccgccggtgcctcactggttatagtgctatacaggaaacctggcagcgccggagccgcgcggtcgaggagggagcgcgggacgccgagcccacgcgcgcctgccgggacaagtggagacgaggccggcgagcggacgccccgaggtgcccgggcaggcagtgggccgccgagcgggagttgaggttggcgaaggagctgtggccgggtccccttcttatccagcccgagacactgcgctccggtgggcgtccctgcgctgggaatccctctcggagtttttccaggcccggccgggttgctccgggaaaggccctgttgggggaggaaaatgccgcggccgcaatggcggcggatgtggagggggacgtgtacgtactggtggagcaccccttcgagtacaccggcaaggacgggcgccgccacagagcactgagcattggtggcacgtgcggcgcaagcccggcggccgccccttctacctgcccgcgcagtacgtgcgcgagctgcctgcgctgggcaaccctgccgctgacgcgccgccaggtccccccatcgggacccgcagcccctgagccgctcgcctacgactaccggttcgtgagcgcggctgtggcagcggcccccaacggccccccagcggagccccgaggcggggccagctccctgtgcggccctgcgcagcgcggcgccgcgagccagcgcagcagcctggcgcccggcctgcccgcctgcctgtacctgcggcccacggcgcccgtgcggcccgcgcagtccctggacgacctgacgcgcgccgtcgtctcgcctcccgccggcaacctcggaagcagcggcagcttcaaggcctgcagcgtagcgggctcctgggtgtgcctgctgcccctgtcgcgcagcgactcagagaacgtctaa

SEQ ID NO: 21159 - DNA, 411 bp, Homo sapiens
  SIMILAR (130)..(411): 321254mologous to Homo sapiens Amino acid sequence of a human secreted peptide,accession number Y10943,Smith-Waterman Score=111.
gcgcgcagcgacttttagaacgtcttttaggtcatccaggacttgcacgtcccgccgcgggaggagagcgcagagcaggtggacgacccaccggagcccgtgtacgcgaacatagagaggcagccccgggccacttcaccgggcgccgctgcagccccccttcccagcccggtgtgggagacgcacacggacgcgggcaccgggcgcccctactactacaacccagacacgggagttaccacctgggagtcgccctttgaggctgccgagggtgccgccagcccagccacctcccctgcctcggtggacagccacgtgagccttgagaccgagtggggccagtactgggatgaggagagccgcagggtgttcttctacaacccgctgacgggcgagacggcctgtgaggac

SEQ ID NO: 21160 - DNA, 490 bp, Homo sapiens
  SIMILAR (287)..(367): 481254mologous to Mus musculus FBP 11,accession number U40747,Smith-Waterman Score=73.
agaccaccgccggctcccgggtgtcgcaacttcttgtttccttgttgccctgtgccagcactggggtagtgcccctgacgtctacccccaaaaccttcccagggctctgtcccggcagttcagaggggccaggatggtggacataatcgccaaagtgaccaggaggcagagtcgagccttgccggcacaggtggacgacccaccggagcccgtgtacgcgaacatagagaggcagccccgggccacttcaccgggcgccgctgcagccccccttcccagcccggtgtgggagacgcacacggacgcgggcaccgggcgcccctactactacaacccagacacgggagttaccacctgggagtcgccctttgagggtgccgagggtgccgccagaccagccaccttccctgcctcggtggacagccacgtgagccttgagaccgagtggggccagtactgggatgaggagagccgcagggtgttcttctac

SEQ ID NO: 21161 - DNA, 668 bp, Homo sapiens
  SIMILAR (406)..(663): 441254mologous to Homo sapiens uncharacterized bone marrow protein BM046,accession number AF217522,Smith-Waterman Score=169.
gactaccccgagtcgctgaccagttaccccgaggaggactattctcccgtgggctctttcggtgagcccggccctacctctcccttgaccacaccccccggctggtcttgtcatgtcagccaggacaagcagatgctctacaccaaccacttcactcaggagcagtgggtgaggctggaggacccccacgggaagccatacttctacaatccagaggactcctctgttcgatgggagctgccccaggtccctgtccctgcccctcgaagcatccataaatccagccaggatggtgacaccccagcccaggccagccctccagaggagaaggtcccagcagagctggatgaggttgggagctgggaggaagtctctcctgccacagctgctgtgaggaccaagaccttggacaaggcaggggtgctccatcgcaccaagacggcagacaagggaaagcggctccggaagaagcactggagtgcctcctggactgtgctggagggtggcgtcctgacattcttcaaggactcaaagacctcggctgcaggcggcctgaggcagccttccaagttttccacccctgagtacacagtggagctgaggggggccactctctcctgggcccccaaagacaaatccagtaagaagaatgtgctggagctacggat

SEQ ID NO: 21162 - DNA, 1803 bp, Homo sapiens
  SIMILAR (871)..(1125): 951254mologous to Homo sapiens Human secreted protein clone cd205_2 2nd protein sequence SEQ ID NO:240,accession number Y94980,Smith-Waterman Score=432.
atggcggaaacagcggttatcaatcacaagaaacgtaaaaatagcccgcgaatcgtccagtcaaacgacctcactgaggcggcatatagtctctcccgggatcaaaaacgtatgctgtatctgttcgttgaccagatcagaaaatctgatggcaccctacaggaacatgacggtatctgcgagatccatgttgctaaatatgctgaaatattcggattgacctctgcggaagccacccatagtgatgggcgctttgagctggtcttctctggcaagaagctggccctgcgcgcctcctcccaggacgaagctgaggactggctggaccgggtgcgggaggccctgcagaaggtccggcctcagcaggaggatgagtgggtgaacgtgcagtacccagaccagcctgaggaaccccccgaggcgccccagggctgcctctctccctcagacctgctctcggagcccgcggccctccagggcacacagtttgactggtcgtccgcccaggttccagagccagatgccatcaaggagtccctgctgtacttgtacatggacaggacctggatgccctatatattttctctgtccttggaggctctgaaatgtttccgcatcaagaacaatgagaagatgctgagtgacagccacggcgtggagaccatccgggacatcctgccagacaccagccttgggggcccatccttcttcaaaatcatcacggccaaagctgtcctgaagctgcaggccggaaacgccgaggaagccgccctgtggagggatctggtccgcaaagtcctggcatcctacttggagacagccgaggaggcggtgaccctgggcgggagcctggatgaaaactgtcaggaggaaaagaataatacaaaacacacaactgcaagaaatgcctttgaagaaaatgattttatggaaaacactaacatgccagaaggaaccatctctgaaaacacaaactacaatcatcctcctgaggcagattccgctgggactgcattcaacttaaggccaactgttaaacaaactgagacaaaatgggaatacaacaacgtgggcactgacctgtcccccgagcccaaaagcttcaattacccattgctctcgtccccaggtgatcagtttgaaattcagctaacccagcagctacagtcccttatccccaacaacaatgtgagaaagctcattgctcatgttatccggaccttgaagatggactgctctgggacccatgtgcaagtgacctgtgccaagctcatctccaggacaggccacctgatgaagcttctcagtgggcagcaagaagtaaaggcatccaagatagaatgggatacggaccaatggaagattgagaactacattaatgagagcacagaagcccagagtgaacagaaagagaagtcgcttgaggcagcctctggaactcaagatggtgtccacgtgcaggagccgcgtccccaggcgcccagccccctggacttacagcagcctgtagagagcacctcaagccagcagccttctagtactgtcagcgagacagccagagaagtgggccaagggaatggcctgcagaaagcccaggctcatgacggagctggtctgaagctggtagtttcctcacccaccagtccgcagcaggtgtgcaagctctggtggtcagctggactccatactcccccaccagtcaccagcctggggaccgtggggctgcaaggacctcagcagcggtttcccaagtttcctgacttcttccatcctctggaaatcagctgtggtaaagtagcctga

SEQ ID NO: 21163 - DNA, 912 bp, Homo sapiens
  SIMILAR (153)..(902): 291254mologous to Homo sapiens Human N-methyl-D-aspartate receptor subunit encoded by clone NMDA24,accession number W87504,Smith-Waterman Score=147.
ggctggcccagagagcgcctctctgaagactgcctcctccatcctggctgcagtgctcccagagccgggcctcctcagggccaggatcgcagatgaggtatatgaaggattcctcaaggccctgattgaatttgcctcccagcatgtctaccactgcgacctgtgcacccagcgcagcttcatctgccagatctgccagcaccacgacatcatcttcccctctgagtttgacaccacagtcagcccagccccagtccgggaggaagttctgccgggcgctctccgccggtgcctcactggttatagtgctatacaggaaacctggcagcgccggagccgcgcggtcgaggagggagcgcgggacgccgagcccacgcgcgcctgccgggacaagtggagacgaggccggcgagcggacgccccgaggtgcccgggcaggcagtgggccgccgagcgggagttgaggttggcgaaggagctgtggccgggtccccttcttatccagcccgagacactgcgctccggtgggcgtccctgcgctgggaatccctctcggagtttttccaggcccggccgggttgctccgggaaaggccctgctcctgttccgcgcagcctctccggcctcgcccctggaaaccccgcccagggcgatggtaggggcctaacctgcagccaccgccggctccgcccacccagcccatgggctccctgaggcccgcccagccgacgaaaacgccgcggctgcgatggcggcggacgtggtgggggacgtgtacgtgctggtggagcaccccttcgagtacaccggcaaggacgggcgccgcgtggccatccggccgaatgagcgctaccggctgctgcggcgcagcaccgagcactggtggcacgtgcggcgtgagcccggcggccg

SEQ ID NO: 21164 - DNA, 806 bp, Homo sapiens
  SIMILAR (382)..(672): 311254mologous to Hordeum vulgare pZE40,accession number X68600,Smith-Waterman Score=93.
acaggtaagaaatctttaatgaatctcaagcagcatttataaaaaatgcagtaggacagagaatatcagtgtgcattgtgtgacgtatgggtaagcactgtttcgagaatctcctgttccgggatggaaaggcacagcgtgcgtgcatgggttacacagtatgtcacagccatatcgtgggttctggtcaaaagtgctggccagcgtggccacaggtcaacctccagcccagccggcaccagcaggtgtgctgctctctccccaggtgtgccaagtgcaagaccgtcttccaccagagctgccaggctgtgggtgaagaagggctgcccccgctgtgctcgctgacgcaagtaccagcaacagaacgttttcgcctgatgcccctctgctgatcccactctgaaggccgggggtgagtgtggctcagccatcccagctgggtttcctatcagcccaggatactcaccgtgtcacagctgtgtccccttgtcaggaagacctcagatgtgaccagagcactggcctcctacagaaagcccaggaagtccccatgatgtcccctggccctccccccacccctctgctgcaggaggcgtggccaccaccagatgctccctgtctggggcaggcagggccgtttactcaccaggccctggctcaccagcgtcccggcgcctccgttagggctggccaaacactgtggaaaggggacttggggaacattttcaattccacattcctgattaaaaggtctggttttttaaggtgggtttttcccattcatatttcaaaaaaaaaaaaaaaaa

SEQ ID NO: 21165 - DNA, 1169 bp, Homo sapiens
  SIMILAR (142)..(195): 1001254mologous to Homo sapiens KIAA0356 protein,accession number AB002354,Smith-Waterman Score=88.
tttcgtgcttcctgttgtcagtggccgagagaccgcatcgtcggctcggaggctgaggggctgccgcagccgggagcccccctcgcctcgctcctcgctccgcttggtgtcatgtgattctctgagggagcagctgcgtgagtggagatgctttcagtggtggagaatggactggacccccaggctgccatcccgacacatcatctcagagttggagcacctgacgtttgtcaacatggatgtgggccgctgccgggcatggctgcggctggccctgaacaatggcctgatggagtgctacctgaagctgctgctgcagggagcaggcccgcttgcgtgagtactaccagcccaccgccctgctccgggatgctgaggagggcgagttcctccttagcttcctgcagggcctcatgtccttgtccttcgaactctcctacaagtctgccatcttaaatgagtggacgctcaccccactggccctgtctgggctttgcccgctttctgagctggaccctctctctacctctggtgcagaactacagcggaaggaatctctggattccatttcccattcttcaggctctgaagacatcgaagtccatcactcgggccataagatacggaggaaccagaagccgactgcctcctccctcagcctggacacggccagttcatcccagctgtcctgcagcctaaactctgatagctgcttactccaagagaatggctccaagagtccagaccattgcgaggagcccatgtcctatgactcagacctgggcacagcaaatgctgaggactcagaccagtctctgcaagaggtattgttggaattcagcaaagcccaggcagcctctggaactcaagatggtgtccacgtgcaggagccgcatccccaggcgcccagccccctggacttacagcagcctgtagagagcacctcaggccagcagccttctagtactgtcagcgagacagccagagaagtgggccaagggaatggcctgcagaaggcccaggctcatgacggagctggtctgaagctggtagtttcctcacccaccagtccgaatattagctctatgatacagagcaccaggcctgttcacttctgtattgtcagcaccaagcactgtacctgggagaaagtaggcatggatgaatag

SEQ ID NO: 21166 - DNA, 813 bp, Homo sapiens
  SIMILAR (277)..(366): 731254mologous to Homo sapiens KIAA0356 protein,accession number AB002354,Smith-Waterman Score=118.
tttcgtgtggccgagagaccgcatcgtcggctcggaggctgaggggctgccgcagccgggagcccccctcgcctcgctcctcgctccgcttggtgtcatgtgattctggtgagggagcagctgcgtgagtggagatgctttcagtggtggagaatggactggacccccaggctgccatcccgggcatcaagaagaagctggtgggatccgtgaaagccttgcaaaagcagtacgtgtccctggacatggtgggcactagtgaagacggagatgccacacaccatgtgcagcgccctggaggccgtatttattcatggcctgcacaccaagcacatcgaagctgcagccgggaggaaaaaggaagaaaagtgcccaccagaagcctctgccccagcctgtcttctggcccctcctgaaagctgtcacccccaaacacatcatctcagagttggagcacctgacgtttgtcaacatggatgtgggccgctgccgggcatggctgcggctggccctgaacaatggcctgatggagtgctacctgaagctgctgctgcaggagcaagcccgcttgcaactacagcggaaggaatctctggattccatttcccattcttcaggctctgaagacatcgaagtccatcactcgggccataagatacggaggaaccagaagccgactgcctcctccctcagcctggacacggccagttcatcccagctgtcctgcagcttaaactgtgatagctgcttactccaagagaatggctccaagagtccagaccatgtattgcggccgctcagaggatcaagctt

SEQ ID NO: 21167 - DNA, 1271 bp, Homo sapiens
  SIMILAR (488)..(802): 331254mologous to Leishmania major L8453.1,accession number AC008054,Smith-Waterman Score=96.
  misc_feature (1)...(1271): n = a,t,c or g
agcgtggtgtcgaccttagagcgggcaatcacccctcgttttaaagccaaggcttccctcgcagtcgatttggaccaagactacccacaatctccccaccgcaggactgaagcaagggtcaaatcttagaatcaaccccacagaacgaagggctgtcctaattccagcactgagtgtaagaatggaagccttacatgtgattttatgcaagttcccattttagagatgggaaaactgaggcccgaaggcgaacggcgagtgcaggatcgggactcgaacccaagtctgtccccgagtgcggggctattccaggctcggtggtcttgacctccgcggccctccttcttgttgcccgcaggaaaacgccgcggctgcgatggcggcggacgtggtgggggacgtgtacgtgctggtggagcaccccttcgagtacaccggcaaggacgggcgccgccacagagcactgagcattggtggcacgtgcggcgcaagcccggcggccgccccttctacctgcccgcgcagtacgtgcgcgagctgcctgcgctgggcaaccctgccgctgacgcgccgccaggtccccccatcgggacccgcagcccctgagccgctcgcctacgactaccggttcgtgagcgcggctgtggcagcggcccccaacggccccccagcggagccccgaggcggggccagctccctgtgcggccctgcgcagcgcggcgccgcgagccagcgcagcagcctggcgcccggcctgcccgcctgcctgtacctgcggcccacggcgcccgtgcggcccgcgcagtccctggacgacctgacgcgcgccgtcgtctcgcctcccgccggcaacctcggaagcagcggcagcttcaaggcctgcagcgtagcgggctcctgggtgtgcctgctgcccctgtcgcgcagcgactcagagaacgtctaagaggccatccaggaggtacgcggcccgccgcggtaggagatcgtgaagcaggtacgaccccgggcgcggaggcggggaggctcgctgaggacagcgcccgcagggagcctgggctcgaggagaaccactccgctcagcgtcgggcatgacggctcactctgtcggaagacttcggatgagcttcctcttcccagcccgcgaaacatgcagggccccattcctcatctggcattttccagctccaagctcccttgaagcccgaaggattgtcgtatcaaattgtggcaaatttgcgcttgactgaaaaanaaaaaaaactcgtgca

SEQ ID NO: 21168 - DNA, 5892 bp, Homo sapiens
tctaaacagcacagtggactatggcttgaatacctgcatttcgactctagagatcccctccctgaacccgggatcagcgcctccctctggcccagggctggacatcgacgggctgtaccgcatcagtggaaacctggccaccatccagaagctacgctataaggtggaccacgatgagcgccttgacctggatgacgggcgctgggaggacgtccacgttatcaccggagccctgaagctcttctttcgggagctgcccgagcccctcttccccttctcgcacttccgccagttcattgcggccatcagtgagcacctggggcaagtggggcggatggggtgtgccgagtgcaagaccgtcttccaccagagctgccaggctgtggtgaagaagggctgcccccgctgtgcccgccggcgcaagacagtagatggtaggcccggagaagagaagagaaactgggagagggaggcccagaggagggccacagcacgtgacctggtgctgccctgccgcccagccccagtccgggaggaagttctgcccggcgctctccgccggtgcctccctggttatattgttgaacaggaaacccggcagcgcgggagccgcacagtcgaggagggagcgcgggacgccgagcccacgcgcgcctgccggggcaagtggaggcgaagccggcgagcggacgccccgagggtcggggaaggaaccgaggtccggtccccttcttatccagcccgagacatcgagctccggtgggcgtccctgcgctgggaatcccgctcggagtttttccaggcccggccgggctgctccgggaaaggccctgcccatgggctccctgaggcccgcccagccgacgaaaacgccgcggctgcgatggcggcggacgtggtgggggacgtgtacgtgctggtggagcaccccttcgagtacaccggcaaggacgggcgccgcgtggccatccggccgaatgagcgctaccggctgctgcggcgcagcaccgagcactggtggcacgtgcggcgtgagcccggcggccgccccttctacctgcctgcgcagtacgtgcgcgagctgcccgcgctgggcaaccctgccgccgccgcgccgccaggtccccacccgagccccgcggcccctgagccgctcgcctacgactaccggtttgtgagcgcggcggcgaccgcgggccccgacggcgcccccgaggagtccggaggccgagccagctccctgtgcggccctgcgcaacgcggcgccgcgacccagcgcagcagcctggcgcccggcctgccagcctgcctgtacctgcggcccgcggcgcccgtgcggcccgcgcagtccctgaacgacctggcctgcgccgccgtctcgcctcccgccggcctcctaggaagcagcggcagcttcaaggcctgcagcgtggcgggctcctgggtgtgcccgcggcctctggcgcgcagcgactcagagaacgtctacgaggtcatccaggacttgcacgtcccgccgcgggaggagagcgcagagcagagagctgttgggggcatgttggaggagctgccctcccagaatcttgttggcaagagggaaatccaggagtgcttcctggaggaggaaggtgttggcagagttgaatttgaaaggtttctacagttcccgctcatgaaaccctctggaccgggcagtagcaggtcgcagttggcagcagaggggaaacagggcgtgtttaagtggccttattcccagaatcctggctccagagctgtgtctgaaagggagaggaactactttgtaacacttcgggggtggggggagctggaagggcaagtctgtttccagtttggggctggagccccctgggagacccccatcatgggggcccagcttcctactggggaagagaagcaggtgagatgccagggctctgtcccggcagttcagaggggccaggatggtggacataatcgccaaagtgaccaggaggcagagtcgagccttgccggcacagagccatggcccacagcctgccaagtagaaattcctgctccaaagagcctgttccttatcagctcatccacccctggtggagcctttcaactcctgccccagtgcgttcagctgggaggatgggaggtggacgacccaccggagcccgtgtacgcgaacatagagaggcagccccgggccacttcaccgggcgccgctgcagccccccttcccagcccggtgtgggagacgcacacggacgcgggcaccgggcgcccctactactacaacccagacacgggagttaccacctgggagtcgccctttgaggctgccgagggtgccgccagcccagccacctcccctgcctcggtggacagccacgtgagccttgagaccgagtggggccagtactgggatgaggagagccgcagggtgttcttctacaacccgctgacgggcgagacggcctgggaggacgaggccgagaacgagcccgaggaggagttggagatgcagccgggcctgagccctggcagcccaggggacccgcggccccccactcccgagacggactaccccgagtcgctgaccagttaccccgaggaggactattctcccgtgggctctttcggtgagcccggccctacctctcccttgaccacaccccccggctggtcttgtcatgtcagccaggacaagcagatgctctacaccaaccacttcactcaggagcagtgggtgaggctggaggacccccacgggaagccatacttctacaatccagaggactcctctgttcgatgggagctgccccaggtccctgtccctgcccctcgaagcatccataaatccagccaggatggtgacaccccagcccaggccagccctccagaggagaagaccaagaccttggacaaggcaggggtgctccatcgcaccaagacggcagacaagggaaagcggctccggaagaagcactggagtgcctcctggactgtgctggagggtggcgtcctgacattcttcaaggactcaaagacctcggctgcaggcggcctgaggcagccttccaagttttccacccctgagtacacagtggagctgaggggggccactctctcctgggcccccaaagacaaatccagtaggaagaatgtgctggagctacggagccgagatggctctgagtacctgatccagcacgactcggaggccatcatcagcacctggcataaggccattgctcagggcatccaggagctggctatgggaatccagtccgcagagctgcccccagaggagagcgagagcagcagagtggacttcgggtcgagcgagcgcttgggaagctggcaggagaaagaggaggacgcgcgaccgaatgcagccgcgcccgccctgggccccgtgggcctggagagcgacttgagcaaggtccggcacaagctccgcaagttcctccagaggcggcccacactgcagtcgctgcgggagaagggctacatcaaagaccaggtgttcggctgcgcgctggccgcgctgtgtgagcgcgagaggagccgggtgccacgcttcgtgcagcagtgcatccgcgccgtcgaggcccgcggggctggacatcgacgggctgtaccgcatcagtggaaacctggccaccatccagaagctacgctataaggtggaccacgatgagcgccttgacctggatgacgggcgctgggaggacgtccacgttatccaccggagccctgaagctcttctttcgggagctgcccgagcccctcttccccttctcgcacttccgccagttcattgcggccatcaagttgcaggaccaggcccggcgcagccgctgtgtgcgtgacttggtgcgctcgctgcccgctcccaaccacgacactctgcggatgctcttccagcacctctgccgggtgatcgagcacggcgagcagaaccgcatgtcggtgcagagcgtggccattgtgttcgggcccacgctgctgcggcccgaggtggaagagaccagcatgcccatgaccatggtgttccagaaccaggtggtggagctcatcctgcagcagctggctgtgggccagtttcatctgctttcctgttgggggtcccgggcctctgctgtccttgacccactggtgttctgtgcaaggcttcttcccattcaccaagtgcacaccttgcatctgccgctcggcatgcaccagttccacacaccatcccattttacagacaaggacgctgaggcctgcagcagcagtgtgacttgctcaaggtccaagccctcctcccccaagcagaggctcacgggcacatatgtggacatcgtagtccatgtgtgccaactgcccataccccctgcagccagctgccgcttggctaccccactgctcccaatcctggtgtcctctgacaacctgacatctgctctgggacggtcctcagcccaagactggatttgtgattttccccaaaccttgtactcctccagggttttacctgtcccaggcaaagggtccatcatcccccgagtcagcaaccaaggattctcccaagagaagtctccccagaccctggagcgtgtgctagcccctctttgctcccacgctctatacctggctcttgcctccctgcaagatgcctttccagatgccccaccgccccccactcagtgccttacccagcatgctgtgggctgcgtggatcccgcacttgtgcagggcgcagagtgggcgcttactgagctctggcacctgctaagtgctgaggagccaggaagaggtgctctgtccccagtatcccaggggccttggcattcagccgcctctgactcctgtctgcttggtggaacattcctgagcagcagggaggagaccagcttgttggaagcggagacgtctaaggagtttccaaataggaaaaccagcggctgcaggcctcaggacgtggccgggcgagccgcagcctcatcccgcgagcgggcgttcctgagctgcctgcaccgtgagtcacccggacggccgcgggcagcgcgcaggaatgcggcctcgccaatcggcggggagcggctaatgtcctacttggacctgcaggatggaggctcctggaagtcaggtgccatgatctcttgcctttgtgctcccacagcaccaagcacagggccagccgcacagaaagtttccacgagggtttgtagaaccgtctgtgggaggagtgaacacgctggctgtcctggccctccccaccccaaccaggagcccatctcgggcctgggactctccaccttctccccagacctgacctggcagtggacagcccagactggagcttcctgcctgccacactggctctccagtcagcagaggccagaaagtggtgatttcctgtattgcaggatcagatggcagaatcgcaagagctccgcatccccagggactcatctgaaagacaatgtgaagcaaagacaatgtgaggcgtggggagacttccaggaaatatttgtggaatccatcattttattacattacaatattaatccatacaataatgggttcaacaaatatttcctgggttcctctcgtgggctggctgagctgggcatagcatggaaaatgaggctaaatgcctcacctatgatcacagggataggaaatgaccgatatcaggcctgtgcccacaccacagccacctccctcctcacactgctgctgtggacagtgctgtctcagaacctggtgaatataggtttccctctgaaagaggctataggaatgtatcgtttgcacatgctgaagtacatctggaaaaatacacaaggaactggtaagaatgattgcttcgtctactgccataccaccctgaacacgcccgatctcatctga

SEQ ID NO: 21169 - DNA, 5430 bp, Homo sapiens
  SIMILAR (3067)..(3426): 951254mologous to Homo sapiens KIAA0356 protein,accession number AB002354,Smith-Waterman Score=620.
  misc_feature (1)...(5430): n = a,t,c or g
tttcgtgccgagagaccgcatcgtcggctcggaggctgaggggctgccgcggccgggagcgcccctcgcctcgctcctcgctccgcttggtgtcatgtgattctctgagggagcagctgcgtgagtggagatgctttcagtggtggagaatggactggacccccatagctgccatcccggtcatcaagaataatctggtgggatccgtgaaagccttgcagaagcagtacgtgtccctggacatggtggtcactagtgaagacggagatgccaacaccatgtgcagcgccctggaggccgtatttatgcatggcctgcacaccaagcacatccgagctgaggccggaggaaaaaggaagaacagcgcccaccaaaagcctctgccccagcctgtcttctggcccctcctgaaagctgtctcccccaagtgagatttagctggagaggttttgctttgcggaggagcagcagactatgggacacttggcttttcctccccagctgttcaggaagccaacagaggtgccctgtgttctagcatagagagaggacacatcatctcagagttggagcacctgacgtttgtcaacacggatgtgggccgctgccgggcatggctgcggctggccctgaacgatggcctgatggagtgctacctgaagctgctgctgcaggagcaggcccgcttgcatgagtactaccagcccaccgccctgctccgggatgctgaggagggcgagttcctccttagcttcctgcagggcctcacgtccttgtccttcgaactctcctacaagtctgccatcttaaatgagtggacgctcaccccattggccctgtctgggctttgcccgctttctgagctggaccctctctctacctctggtgcagaactacagcggaaggaatctctggattccatttcccattcttcaggctctgaagacatcgaagtccatcactcgggccataagatacggaggaaccagaagctgactgcctcctccctcagcctggacacggccagttcatcccagctgtcctgcagcctaaactctgatagctgcttactccaagagaatggctccaagagtccagaccattgcgaggagcccatgtcctgtgactcagacctgggcacagcaaatgctgaggactcagaccggtctctgcaagaggtattgttggaattcagcaaagcccaggtaaactctgtgccaaccaacggactgagccaagaaacagagatccccacaccacaggcctcgctctccctccatggcctcaacaccagcacatacctgcactgtgaggcacctgcagagccccttcctgcccaggcagcctctggaactcaagatggtgtccacgtgcaggagccgcgtccccaggcgcccagccccctggacttacagcagcctgtagagagcacctcaggccagcagccttctagtactgtcagcgagacagccagagaagtgggccaagggaatggcctgcagaaggcccaggctcatgacggagctggtctgaagctggtagtttcctcacccaccagtccgaaaaacaagagctggatctcagaggatgacttctaccggccttcccgggagcaacccctggagagtgcttcagaccacccaatagcttcttacagggggactccagggtcaaggcctggtctccacaggcatttttctcaagaaccaagaaaaaactgctccctgggggcgttagaccaagcgtgtgtaccttccccaggaagaaggcaagcccaggcagccccatcccaggggcataagagcttccgggtggtacaccggagacagatgggactgtccaacccattccggggtctcatgaagctgggcaccgtggagcggcggggggcaatgggcatctggaaggagctcttctgcgagctctccccgctggagttccgcctctacctgagcaacgaggagcacacctgtgtggagaactgctcgctgcttcgctgtgagtctgtggggccagcccatagtgatgggcgctttgagctggtcttctctggcaagttttctgttcttgcgcgcctcctcccaggacgaagctgaggactggctggaccgggtgcgggaggccctgcagaaggtccggcctcagcaggaggatgagtgggtgaacgtgcagtacccagaccagcctgaggaaccccccgaggcgccccagggctgcctctctccctcagacctgctctcggagcccgcggccctccagggcacacagtttgactggtcgtccgcccaggttccagagccagatgccatcaaggagtccctgctgtacttgtacatggacaggacctggatgccctaatatattttctctgtccttggaggctctgaaatgattccgcatctacgaacaatgacaagatgctgagtgacagccacggcgtggagaccatccgtgacatcctgccagacaccagccttgtgggcccatacttcttcaaaattatcacgaacaaggctgtcctgaagctgcaggccggaaacgccgaggaagccgccctgtggagggatctggtccgcaaagtcctggcatcctacttggagacagccgaggaggcggtgaccctgggcgggagcctggatgaaaactgtcaggaggtgctgaaatttgccacccgggagaatggcttcctgctgcagtacctggtggctatccccatggagaaaggccttgactcccaaagctgcttctgcgcaggctgctcccggcagatcggcttctcctttgtacgacccaagctctgtgccttctctggcctctattactgtgacatctgccaccaagacgatgcctcagtgattccggccaggatcatgcacaactgggacctcaccaagcgcccgatctgcaggcaggccctgaagtttctgacgcagatccgggcccagcccctcatcaacctgcagatggtgaacgcgtctctgtacgagcatgtggagcggatgcacctcattgggaggagccgggagcagctgaagctcctgggggattacctgggcctgtgccggaagtggcgccctgaaggagctcagcaagaggctcaaccaccggaattatctcttggagtctccgcataggttccgtgttgctgacctccggcagatcgcagatgaggtatatgaaggattcctcaaggccctgattgaatttgcctcccagcatgtctaccactgcgacctgtgcacccagcgcagcttcatctgccagatctgccagcaccacgacatcatcttcccctctgagtttgacaccacagtcaggtgtgccaagtgcaagaccgtcttccaccagagctgccaggctgtggtgaagaagggctgcccccgctgtgcccgccggcgcaagtaccaggaacagaacattttcgccttaatccccaatctgttgaccccgctctgaaagccggggttgagtgtggctcagccatcccggctgggtttcctaatcagcccaggatactcaccgtgtcacagctgtgtcccccttgtcagggaagaccctcaagatgtggccagagcaccggcctcccagaggaaagcccaggaagtccccgtggtgtcccctggccctccccccacccctctgctgcaggaggcgtggccaccaccagatgctccctgtctggggcaggcagggccgtttactcaccaggccctggctcaccagcgtcccggcgcctccgttagggctgccccaancactgtggaaaggggacttggggagcattttcaattccacattcctgattaaaaggtctagttttttaaggtgggtttttcccattcatatttcaacagaaagtatttttttattcttgaccctacgtgagtcacccatgaaatccagacattctcacccccagcggatgcacaggagccactcaggcctggcttagaggtagcgggtggctggtgggcaggccactgctgggacagggtctatgggcccacccagtgcctttccttggccctcacttgccagtgccaaaccgcccctgcagcagggcagggccagtcctgggcgaaccccacttcctctctgtgtcctctttactccccaccccagtgcgtctcgccttgctgaagcccaccgctttctcagcgtcagagcccctaagctcttctctagcctgggggccttggcatttttagggagaagggagaaatgacttggaaaccagcattgtcagcactttgagccctcctcggtttatggagggtcgccgtcttgcccacccccgatccccgtgcgctcctcacccctctacagacaggggcgctgctgcagatgctccaggcccaccttggtggggtgcccgggggtcacactctctgcctgactgacccctgccagggcacagataggcaggaccccagagagggcaggcagccacgccctgcactgtggagaagtgacctggtcctaagctgtgcagggcgtcggggggaactgccctgtggatgcagccaccacctcacaaagccatgaattcccaaagcatcactgaacttgcccagccgggacacttgagacttgaagaagtttcccggagcaggactgcctttgaaggggcctgggggctggggtggaagtctggaattgttttcaaagtgatggtcagacccttcacgctttcggggaaatgtgggtttgctggtctctctgtcgccttcccccacctctcctggacctagcaggccctcagtcctagctgtcttacctgcgctcagcttggagtctgaggcctcaggtggagatccacctgtcactgtcagagatgagcccacccccacccctccctgggggtgatcagctgctgagtcacccacccagctttggagctggatgccctgtgcagcagaacagatgctacggtggcaggcaaggtggaggcttggcacagcttctcccggacatgtgacacacctgtgcccagacgccaatgcctcctaagccaggagctgggtttatgcacccgccatggccccacattaacgctcccacccanaaagccccagccctagtcagagcccctcattgccccccatccctgagtgggcaggagccctggcccggggagggcttgggcctgtgaggattctcccccgaaggtgcccttcggaggcagcaggtttgaggccctggggggcccgttccccagaagctgccagtgctttcagatgcattgactcttcccacctcccctccctcagaaaggtagtgcccacactatttttaaaatgttattttatgcaatacactgttcctagtgaggcagggctctggccctgaggagtctttgcaatgtattgaaggaattgctgccgtgtgagttttgaatgattttgcagtaaagacctgatctttctcaaa

SEQ ID NO: 21170 - DNA, 3029 bp, Homo sapiens
  SIMILAR (511)..(2067): 951254mologous to Homo sapiens toll-like receptor 9,accession number AB045180,Smith-Waterman Score=2544.
cggcaaatgtccacaggcctttccgtggtcctccaacagcatccgccacgtccatgattctgactgtgcccacctgcccagcctgcggcatctcaacctcaagtggaactgcccgccggttggcctcagccccatgcacttcccctgccacatgaccatcgagcccagcaccttcttggctgtgcccaccctggaagagctaaacctgagctacaacaacatcatgactgtgcctgcgctgcccaaatccctcatatccctgtccgtcagccataccaacatcctgatcctcccctctgccagcctcgccggcctgcatgccctgcgcttcctattcatggacggcaactgttattacaagaacccctgcaggcaggcactggaggtggccccgggtgccctccttggcctgggcaacctcacccacctgtcactcaagtacaacaacctcactgtggtgccccgcaacctgccttccagcctggagtatctgctgttgtcctgaggggccgcatcgtcaaactggcgcctgaggacctggccaatctgaccgccctgcgtgtgctcgatgtgggcggaaattgccgccgctgcgaccacgctcccaacccctgcatggagtgccctcgtcacttcccccagctacatcccgataccttcagccacctgagccgtcttgaaggcctggtgttgaaggacagttctctctcctggctgaatgccagttggttccgtgggctgggaaacctccgagtgctggacctgagtgagaacttcctctacaaatgcatcactaaaaccaaggccttccagggcctaacacagctgcgcaagcttaacctgtccttcaattaccaaaagagggtgtcctttgcccaccttgtctctgggccccctttccttcgggagccctgtcgcccctgaaagaagctggacatgcaccggattttctttccgctcaactcatgagaccacgcttccggccactgggcccgcctgcccatgctccagactctgcgtctgcagatgaacttcatcaaccaggcccagctcggcattttcagggccttccctggcctgcgctacgtggacctgtcggacaaccgcatcagcggagcttcggagctgacagccaccatgggggaggcagatggaggggagaaggtctggctgcagcctggggaccttgctccggccccagtggacactcccagctctgaagacttcaggcccaactgcagcaccctcaacttcaccttggatctgtcacggaacaacctggtgaccgtgcagccggagatgtttgcccagctctcgcacctgcagtgcctgcgcctgagccacaactgcatctcgcaggcagtcaatggctcccagttcctgccgctgaccggtctgcaggtgctaaacctgtcccacaataagctggacctctaccacgagcactcattcacggagctaccacgactggaggccctggacctcagctacaacagccagccctttggcatgcagggcgtgggccacaacttcagcttcgtggctcacctgcgcaccctgcgccacctcagcctggcccacaacaacatccacagccaagtgtcccagcagctctgcagtacgtcgctgcgggccctggacttcagcggcaatgcactgggccatatgtgggccgagggagacctctatctgcacttcttccaaggcctgagcggtttgatctggctggacttgtcccagaaccgcctgcacaccctcctgccccaaaccctgcgcaacctccccaagagcctacaggtgctgcgtctccgtgacaattacctggccttctttaagtggtggagcctccacttcctgcccaaactggaagtcctcgacctggcaggaaaccagctgaaggccctgaccaatggcagcctgcctgctggcacccggctccggaggctggatgtcagctgcaacagcatcagcttcgtggcccccggcttcttttccaaggccaaggagctgcgagagctcaaccttagcgccaacgccctcaagacagtggaccactcctggtttgggtcccctggcgagctgccctgcaaatactagatgtaagcgccaaccctctgcactgcgcctgtggggcggcctttatggacttcctgctggaggtgcaggctgccgtgcccggtctgcccagccgggtgaagtgtggcagtccgggccagctccagggcctcagcatctttgcacaggacctgcgcctctgcctggatgaggccctctcctgggactgtttcgccctctcgctgctggctgtggctctgggcctgggtgtgcccatgctgcatcacctctgtggctgggacctctggtactgcttccacctgtgcctggcctggcttccctggcgggggcggcaaagtgggcgagatgaggatgccctgccctacgatgccttcgtggtcttcgacaaaacgcagagcgcagtggcagactgggtgtacaacgagcttcgggggcagctggaggagtgccgtgggcgctgggcactccgcctgtgcctggaggaacgcgactggctgcctggcaaaaccctctttgagaacctgtgggcctcggtctatggcagccgcaagacgctgtttgtgctggcccacacggaccgggtcagtggtctcttgcgaccgagctatcctgctggcccagcagcgcctgctggaggaccgcaaggacgtcgtggtgctggtgatcctgagccctgacggccgccgctcccgctatgtgcggctgcgccagcgcctctgccgccagagtgtcctcctctggccccaccagcccagtggtcagcgcagcttctgggcccagctgggcatggccctgaccagggacaaccaccacttctataaccggaacttctgccagggaacccacggccgaatagccgtgagccggaatcctgcacggtgccacctccacacacacctaacatatgcctgcctgatctgaccaacacatgctcgccaccctcaccacacacc

SEQ ID NO: 21171 - DNA, 386 bp, Homo sapiens
  SIMILAR (81)..(170): 461254mologous to Homo sapiens Human secreted protein, SEQ ID NO: 6876,accession number G02795,Smith-Waterman Score=70.
cccgtccggactcccccgatcccagctttctctcctttgaaaacactaagaataatgtcactgcatcagtttttactagagccaaactgtggccgaccgcagctgtgccgtggcacgatggcgaggaagccagccccaaggaaacactgaaaacacatatcacgccaatgccgtgtggttttgtttgaatataaaattggtgaaagtgttggtttttttaaggcagtaatttttttgtttgtttttttgcgatttcattccattcttgaccaaagcttctctttaagtagtttattatggaaaattgtcacactaacttaaaagacagggtgagggagatatgtaaattgtccactagaaaattaaataaaagaactgaaagtgga

SEQ ID NO: 21172 - DNA, 647 bp, Homo sapiens
  SIMILAR (1)..(315): 991254mologous to Homo sapiens Sop2p-like protein,accession number Y08999,Smith-Waterman Score=572.
atgtcactgcatcagtttttactagagccaatcacctgtcatgcctggaacagggatcgtactcagattgccctcagtcccaataatcacgaagtgcacatctataagaagaacgggagccagtgggtgaaagctcatgaactcaaggagcacaacggacacatcacaggtattgactgggctcccaagagcgaccgcattgtcacttgtggggcagaccgcaatgcctatgtctggagtcagaaagatggtgtttggaagccaaccctggtgatcctgagaattaatcgcgcagctacttttgtgaagctgagtgagcctccgccatccagcatgacaaactgtggccgaccgcagctgtgccgtggcacgatggccgagaaagccagccccaaggaaacactgaaaacacatatcacgccaatgccgtgtggttttgtttgaatataaaattggtgaaagtgttggtttttttaaggcagtaatttttttgtttgtttttttgcgatttcattccattcttgaccaaagcttctctttaagtagtttattatggaaaattgtcacactaacttaaaagacagggtgagggagatacgcaaattgtccactagaaaattaaataaaagaactgaatgtgaaaaaaa

SEQ ID NO: 21173 - DNA, 1062 bp, Homo sapiens
  SIMILAR (13)..(591): 921254mologous to Rattus norvegicus suppressor of profilin/p41 of actin-related complex 2/3,accession number AF315378,Smith-Waterman Score=956.
ggcggacttcctcatgagctcaaggagcacaacggacacatcacaggtattgactgggctcccaagagcgattgtattgacacttgtggggcacaccgcaatgcctatgactggagtcacaaagaaggaggttggaagccaaccctggtgattctgataattaatcgcgcagctacttttgtgaagtggtcccccctacagaacaaatttgctgagggaagtggagcacgactcatttctggttgttactttgagactgaaaatgactggtgggtgagcaagcgcattaaaaagccgattcgctccacagtcctcagcttggattggcattccaacaacgttttgctgtcagcaggatcatgtgacttcaaatgcagagtgttttctgcctacattaaagaagtggatgaaaagccagccagcacgccctggggcagcaagatgccttttgggcagctgatgtcagagtttggtggcagtggcactggtggctgggtccacggggtaagcttctctgccagtgggagccgcctggcctgggtcagccacgacagcaccgtgtctgttgctgatgcctcaaaaagtgtgcaaagcccctgtgagaatgggtcctttgtgatcatctgtgtctgtaaagaagctaatagtctgttgcatcttgggataacacatgttcttgtgttcagggtctcgactctgaagacagagttcctgccgctcctaagtgtgtcatttgtctcagagaacagcgtcgtggctgctggccatgactgctgcccaatgctctttaactacgatgaccgcggctgcctgaccttcgtctccaagttagatattccaaaacagagcatccaacgcaacatgtctgccatggaacgcttccgcaacatggacaagagagccacaactgaggaccgcaacacggccttggagacgctgcaccagaatagcatcactcaagtctctatttatgaggtggacaagcaagattgtcgcaaattttgcactactggcatcgatggagccatgacaatttgggatttcaaggtattttctacctaa

SEQ ID NO: 21174 - DNA, 1951 bp, Homo sapiens
  SIMILAR (508)..(1545): 511254mologous to Rattus norvegicus suppressor of profilin/p41 of actin-related complex 2/3,accession number AF315378,Smith-Waterman Score=634.
  misc_feature (1)...(1951): n = a,t,c or g
atgccgcttcgccagcacttgccaggcgttccgtggggcagcatctcctctgaagggccgccgacagtaccacgccaatggaacggcgtaccctcctccactgcagcctgcctaaccccggactgcgcgcccgagctgtgcgcatgcgcggaccgtccgcgcggtcgcaacgcgcaggcgccgtgtccacttccgggatctgtcagccgctccctctgggctttccgtcctccgcccgcgcccgacggagcctgttcgcgtcgactgcccagagtccgcgaatcctccggtccgagcccgtccggactcccccgatcccaggatgttcgagctcctagccgcctccgatgcccgaattaacggccccttctgcgcccccagggtcctacttgcacctctgctgggggcatttgtcaccgtctctaaaattgtgtcaaagattgccctcagtcccaaataatcacggaggtcacatctattaagaaggaacgggagccagtggggtgaaagttcatggaactcaaggagcacaacggacagcatcacaggtattgactngggctcccaagagcgaccgcatttgtcacttttgggggcagaccgcaattgcctaatggtctggagttcagaaaagatggtgtttggaagccaaaccctggttgattcctgaggaatttaattgggggaggtaactttttgtgaaagtgggtcccccctagaagaacaaaatttggctgtgggggaagtggagcacgactcatttctgtttgttactttgagtctgaaaatgactggtgggtgagcaagcacattaaaaagccgattcgctccacagtcctcagcttggattggcatcccaacaacgttttgctggcagcaggatcatgtgacttcaaatgcagagtgttttctgcctacattaaagaagtggatgaaaagccagccagcacgccctggggcagcaagatgccttttgggcagcatgatgtcagagtttggtgggcagtggcactggttggctgggtccacggggtaagcttctcctgccagtggggagccgcctgggctggggttcagccacggacagcacccgtgtctgttgcttgatgcctccaaaaagttgtgcaggtctcgactctgaagacaagagttccttgccgctccctaagtggtgtcatttgtctcaagagaaccagcgtcggggctgcctgcccatgactgcttgcccaatgctctttaactacggatgaccgcgggctgccctgacctttcgtcttccaaagttagatattcccaaaacagagcatccaacgcaacatgtctgcccatgggaacgctttcggcaacatgggacaagagagccacaactgaggacccgcaacacggcccttggagacgctgcacccagaatagcatcactcaagttctctatttattgaggtgggacaagcaagatttgtcgcaaattttgcacttactggcatcggatggagagccatggacaatttgggatttccaagaccctcggagtcttccatcccagggcctccggataatgtgaaaaaaaaaaaaaacccccccgcccatcccagcatgaacaaacctgtggcccgacccgcagcctgtgcccgtggccacgaatggcgaggaagcccagcccccaaggaaacacttgaaaaacacataatcacgcccaatgcccgtgtgggttttgtttgaatataaaattggtgaaagtgttggttttttttaaggccagtaatttttttgtttgttttttttgcgatttcattccattcttgaccaaaagcttctctttaagtagtttattatggaaaattgtcacactaacttgaaaagacagggtgagggagatatgtaaattgtnccactagaaaattaaataaaagaactgaatgtggtaaaaaaaaaaaaaaaaagggcggccgct

SEQ ID NO: 21175 - DNA, 2226 bp, Homo sapiens
  SIMILAR (1570)..(1827): 271254mologous to Hepatitis C virus core protein,accession number AB030169,Smith-Waterman Score=90.
atgaagcactatacaagggtacagtctagcatatcaccaccagcggaaaggcaggaaacccatgcctgggccagccctgctgtaacatctcttgagtcagcagcatgtcatgaactgcaggaagcagacctcagtgagagtttatcatatcccagaattgtctcctcaagttcattacagcagtatgtcgcacaaggtggctcatttccttgtttcggtatgccatggaactttatcagtggaggtgctgaaagtaccaatgctgtcatctcatttgccaatgctactacagcagtacctatggcagttctgtcacgaagagaatccagtctggcaaataaccctggtgtggtgaattactctgctctaccagaaaatgaaaatgtgggcccagaaatgccagaaagaccagcaaacagcagtaaaaacagcactgagacagcgaattatccaactttaatgggaaattacaatggccaaaatactgcctctttatctgtcttcatccctccctattttgctgagaaaattatacttactgaaatgccaggaacaacagaaaccaacgtggaaaataactctcagacagtgtattacccagctttatcgggaaatacgagtgccccatatccagcctcttcatatcttcccatcacttctaattttgtacttgaaagagttgcagaaatgccagaaacagcaggaactaacgtaaaaaacaatactcagacagtgaattacccaccttcatcaggaaggggccgtagccaaggtaacgcctctttatcgctctccattcctcccaagtttggcattgaaagacatctaggttgtttcctggttttggctattagaagtaaagctgctatgaacactcatataccatataggctttgtgtgaacacaagctttcatttctctgagatactgcccaagagtgctgttgctgggtcctatggtaatgcactgcaaaatgttttacatattgaaatgttgttcaaaacagaatctggcccacaaatgagttatgggacaatgagttactcaactgaaatgaaaaataactgtgaccaagatgatgcttcagcatctgcctgcctcactcccgattttgcactgttacctctgaatattttggtaaaagtagacaccaacacggaaaacagcgtcaacacaatgaatcgctcaactttattggacagtgacagtggccaggattcttcctcatcatctgtctgtatccctcccaagtatggctatcttggtgatccaaaaagaaatgtcagagtacttaaaatccatttgctggccgtacaaaatatggccaaacctaagcaagcagcctgctacttggttcgtattttgttctccaaggaaatcctgattagcagctcagtggatatccatttgaaagacagccaatccctcgacccgaacaaaatggctgcattgagagaatatctggcaacaacttttcccacctgtgatttgcatgaacatggaaaagactggcaggactgtatttctggtatcaattctatgatctactgtttatgttctgaaggcaagagtactccaaaaactgttcgcaaaaataaaaaacgtaccaaccgtgttgcatcggcatctgcagatagaaatgaccaaaggggcagagatggtggtgaaggctgttcttggatgtttcagccaatgaataactccaaaatgagagaaaagaggaacttgcagccaaacagtaatgctatccctgaaggaatgcgagaaccttccactgataatccagaggaacctggtgaagcatggagctattttggaagaccatggagaaatatacggatgccatgttcagtactgactttggcaaaaactaagtcttgcgcaagcctgtcggctagataccttattcagaaactcttcacaaaagatgtcctggtccaaagtaacgtctatggcaatctgaagcatggcctgtgtgcccttgaccccaataagattagtgctctccgagagttcctccaagaaaactacccaatttgtgatctctcggaaaatggaagagactggaagtcgtgtgtgacctccatcaacagcggtatccgtagccttagacatgacgtcagaagggctgaagccaggtctcagtcgcttccagcagtgacccctccagagctggagcaggagtcaaagccaggagatcccgacgccactgacccaagcacctga

SEQ ID NO: 21176 - DNA, 357 bp, Homo sapiens
  SIMILAR (22)..(297): 881254mologous to Homo sapiens proteasome subunit HsC10- II,accession number D26598,Smith-Waterman Score=420.
caggccaagatgttaaccacggactcccagagaatctttcccatggttgaccggctgtacatcggctgccccatggtgactgatgactttgtggtcagtggcacttgcgccgaacaaatgtacggaatgtgtgagtccctctgggagcccaacatggatccggatcacctgtttgaaaccatctcccaagccatgctgaatgctgtggaccgggatgcagtgtcaggcatgggagtcattgtccacatcatcgagaaggacaaaatcaccaccaggacactgaaggcccgaatggactaaccctgttcccagagcccacttttttttctttttttgaaataaaatagcctgtctttc

SEQ ID NO: 21177 - DNA, 192 bp, Homo sapiens
  SIMILAR (1)..(132): 1001254mologous to Homo sapiens proteasome subunit HsC10- II,accession number D26598,Smith-Waterman Score=223.
gacgtccagacagttgcccagcgcctcaagttccggctgaacctgtatgagttgaaggaaggtcggcagatcaaaccttataccctcatgagcatggtggccaacctcttgtatgagaaacggtttggccctgttcccagagcccacttttttttctttttttgaaataaaatagcctgtctttcaaaaaaa

SEQ ID NO: 21178 - DNA, 212 bp, Homo sapiens
  SIMILAR (11)..(103): 1001254mologous to Rattus sp. proteasome subunit RC10- II,accession number D21800,Smith-Waterman Score=160.
  misc_feature (1)...(212): n = a,t,c or g
atggccatgnaaggggaagaactgtgtggccatcgctgcagacaggcgcttcgggatccaggcccagatggtgaccacggacttccagaagatctttcccatggtgcccagcgcctcaagttccggctgaacctgtatgagttgaaggaaggtcggcagatcaaaccttataccctcatgagcatggtggccaacctcttgtatgagaaacg

SEQ ID NO: 21179 - DNA, 624 bp, Homo sapiens
  SIMILAR (112)..(411): 881254mologous to Homo sapiens Human secreted protein, SEQ ID NO: 5952,accession number G01871,Smith-Waterman Score=424.
acgtccgaaatacggtgaatatatattctactataatcatctattaaattcggccgctcgaacccagattactggattgctctgccatcgaggaacctagaccccgcaataatgtctattatgtcctataacggaggggccgtcatggccatgaaggggaagaactgtgtggccatcgctgcagacaggcgcttcgggatccaggcccagatggtaaccagggatttctagaaattctttcccatggggtgacccgcttgtacaccgggtatggccgggttcgcaattgacgtccagacagttgcccagcgcctcaagttccggctgaacctgtatgagttgaaggaaggtcggcagatcaaaccttataccctcatgagcatggtggccaacctcttgtatgagaaacggatccggatcacctgtttgaaaccatctcccaagccatgctgaatgctgtggaccgggatgcagtgtcaggcatgggagtcattgtccacatcatcgagaaggacaaaatcaccaccaggacactgaaggcccgaatggactaaccctgttcccagagcccacttttttttctttttttgaaataaaatagcctgtctttcaaaaaaaaaaaaa

SEQ ID NO: 21180 - DNA, 825 bp, Homo sapiens
  SIMILAR (149)..(454): 521254mologous to Homo sapiens proteasome subunit HsC10- II,accession number D26598,Smith-Waterman Score=168.
aaggctagacccggtttactggaattgctctggcgatcgaggggtcctagtacaccgcaatcatgtctattatgtcctataacggaggggccgtcatggcaatggaaggggaagaactgtgtggccatcgctgcagacaggcgcttcgggatccagggcccggttgttgaccacgaacttccagaagatctttcccatgggtgaccggctgtacatcggtctgggcggggcttcgccacttgacgtccagaccagtttgcccagcgcctcaagttccgggctgaacctgttatgagttgaagggaaggtcggcagattcaaaccttatacccttcattgagccatgggtggccaaccctctttgttatgagaaaaggtttttggcccccttacctacactgaggccagttcatttgccggggttgggacccgaaagaccctttaaagccctttcaatttgcttctctaagaccctcattcgggttggccccatgggtgacttgaatgacttttgtgggtcaagtggcaaccttgcgccgaacaaaatgtacgggaatgtgtgagtccctctggggaggcccaacatgggatccggatcacctgttttgaaaaccattttcccaaggccatggttgaatgctgtgggaccgggatggcagtgttcaggcatggggagttcattgttccacatcatcgagaaggacaaaaatcccccccaggacactgaaggcccgaatggactaaccctgttcccagagcccactttttttttctttttttgaaattaaaatagcctgtctttcactcctaaaaaaaaaaaaaaaa

SEQ ID NO: 21181 - DNA, 412 bp, Homo sapiens
  SIMILAR (3)..(410): 831254mologous to Homo sapiens Human breast tumour-associated protein 46,accession number Y48501,Smith-Waterman Score=618.
  misc_feature (1)...(412): n = a,t,c or g
ccctcgcccgcctgggcagggcccggcgccgtccgtggatgagccacagaacctcttccaccttccgagcggagagaagtttccatnnnnnnnnnnnnnnnnnnnnnnnnnnnnnnnnctcctcggcctcccgtgctctcccggcccaggacccgcccatggagaaggccctgagcatgttttccgatgactttggcagcttcatgcggccccactcggagcccctggccttcccagcccgccccggtggggcaggcaacatcaagaccctaggagacgcctatgagtttgcggtggacgtgagagacttctcacctgaagacatcattgtcaccacctccaacaaccacatcgaggtgcgggctgagaagtgccagctgccggaggacgtggacccgacgtcggtgacctc

SEQ ID NO: 21182 - DNA, 395 bp, Homo sapiens
  SIMILAR (394)..(200): 371254mologous to Human endogenous retrovirus K pol protein,accession number Y17833,Smith-Waterman Score=101.
  misc_feature (1)...(395): n = a,t,c or g
ggtnnnnnnnnnnnnnnnnnnnnnnnnnnnnnnnnnnnnnnnnnnnnnnnntgtcccccttctttttcttttttttcagtgcaataaaagcaaaggcggctttgtcacagtgagctacttcttgcaggagtcaggatctgcatctgcagatgtgactggttgtcctgctttcctcaggttttcttctgccatctatgacagcttcttgatctgtccccaggtgggtggctgtgtttgacaggtgttgctcatgacagttggggtcctcctcagcatcagtctcgacatgactgcaactggtgggtcctcaggatcctcccggaatctcttctttggcatctggctcatgataaggtttcaggtgtcttgatggtatccaaattggctgcttgttt

SEQ ID NO: 21183 - DNA, 461 bp, Homo sapiens; identical to SEQ ID NO: 5300
  SIMILAR (74)..(298): 601254mologous to Human endogenous retrovirus K pol protein,accession number Y17832,Smith-Waterman Score=234.
  misc_feature (1)...(461): n = a,t,c or g

SEQ ID NO: 21184 - DNA, 717 bp, Homo sapiens
  SIMILAR (717)..(526): 841254mologous to Homo sapiens reverse transcriptase,accession number AF015998,Smith-Waterman Score=292.
tcaatatgcccaataagtataattgttctctgtgtcagcccttgttgaaggaatactcatggcagtggtgataactgctattatagctaccattaaattactcgtgactgcttgtcccgctttcctcaagttttttccgccatctgtgacagcttcttgatctgtccccaggtgggtggctgtgttcaacaggtgttgctgaaagtgtctagcactagatattgcattagcaactaggcgatcagccatttgattcccttcagtcaaaggtcctggaagaggtgtatgagccctaatgtgagtgatgtaaaaagggtgcattctactcctaactgctgtttgtaattgggtaaataaagtcatcagttgttcatctgtatgaaatcgtaactgagcattttcaattaactcaattacagctacaagctctgctttttgagctgaagtataggacatctggaaaactttattttttgatccagaataagaagctttaccattattagacccatctgtaaaacaatgaaaacgcttagcaggctgcaggttatttaccacaggaattgtaaatgcaaaccattcacagtcttgctcagctaaagggatagtaaataaaccgtcttttaaatctatgactattaaaggccaattttttggaattatagcagaaggcaatcctggctgtaatgctcccatagattctataactgaattcat

SEQ ID NO: 21185 - DNA, 424 bp, Homo sapiens
  SIMILAR (31)..(390): 861254mologous to Homo sapiens Human breast tumour-associated protein 46,accession number Y48501,Smith-Waterman Score=530.
  misc_feature (1)...(424): n = a,t,c or g
caacaccctctctgtcagccctcgccgcctgggttggcctggcgtccgccgtggatgagccacagaacctcttccaccttccgagcggagagaagtttccatnnnnnnnnnnnnnnnnnnnnnnnnnnnnnnnnctcctcggcctcccgtgctctcccggcccaggacccgcccatggagaaggccctgagcatgttttccgatgactttggcagcttcatgcggccccactcggagcccctggccttcccagcccgccccggtggggcaggcaacatcaagaccctatgagacgcctatgagtttgcggtggacgtgagagacttctcacctgaagacatcattgtcaccacctccaacaaccacatcgaggggcgggctgagaagctgcggctgacggcactgtcatgaacaccttcgctcg

SEQ ID NO: 21186 - DNA, 317 bp, Homo sapiens
  SIMILAR (317)..(72): 521254mologous to Human endogenous retrovirus K pol protein,accession number Y10391,Smith-Waterman Score=234.
ccttcagaattatatgggatatcagtaatgtgtttaatattccgtatagagaaaaatttagctagagcttgagaattaggttccaatcctcgaggattaactcctcctgtaaaagatgaggaatgtaccatttggcaagttgggcatcgctggataatagctttagcttctttccaggtactgctgtatctgcgtttgagaccagaggtattaacacgggttaaattgtgaaagtgtccagcattagatattgcagtagcaactaggcgatcagccatttgattccctgcagtcaaaggtcctggaagaggtgtatg

SEQ ID NO: 21187 - DNA, 1413 bp, Homo sapiens; identical to SEQ ID NO: 7287
  SIMILAR (256)..(789): 591254mologous to Homo sapiens Gag-Pro-Pol protein,accession number AF164614,Smith-Waterman Score=570.

SEQ ID NO: 21188 - DNA, 1470 bp, Homo sapiens
  SIMILAR (768)..(499): 531254mologous to Homo sapiens Gag-Pro-Pol protein,accession number AF164614,Smith-Waterman Score=277.
ttactcatagtgagtggttgtcctgctttcctcaggttttcttccgccatctgtgacagcttcttgatccgtccctaggtgggtggctgtgttcgatgggtgttgctcatgacagttggggttgtcaatctcaacatggctgcaactgggggatccttgggatactcccagagcctcttccttggcatctggcttatgataaggtttcagaagtcttgatggtatccaaatcgactcttgattttggcttctaactgctgtttgcaattgggtaaataaagtcataagttgttcatctgtatgaaatcgtaactgagcattttcaattaactgtgtgaaatgaaccacgtatgaagaatcagaaatcacattaataggcatattaaaagcagtcaatacctcaattacagctacaagctccgctttttgagctgaagtatagggcatctgaaaaaccttacttttccagccagaataagatgctttaccattactagacctatcagggacatgccccatttcatgcatcatatgtcgactttgagggctatataattgttctgcaattagaacttgtgctccccattgttgtaataaatctctcccacataaatttataggtacagaagttataattggttgaatagtcgcaggttgtccatcgggtcctttacaatgcaaaatataactactttgatatacttcaggggctttaccaacttcaactatgttaaattgagtgggttgaattggccacatggacggccagtgcatggggattgctttaagagtattcaggtgtcctccagctagttccacgttctccaaccgctgctccggtgacccttcgacctggatctgagcccccaagatggacgccacttgccgagaccagcttttttccagcacaattctctttgcatgaaaatttttttcaaagagaactaattgcaaagaattgaactttatggctgtgcttaactgggctttcttacgttgtttatcattgtaccccttggtggctaccaagcaatcctgcagtgtaaagcgcttcacatcttcctggactaattctttaaactggaagctataataccacctcttagcctctggcctctcaccactatcccacagatacctcttgggtattgctcttctgccttttctctggtagaatttggctgtgaatctgtctggtcctggactttttttggttggtaggctatgatttattgcttcaatttcagaacctgttattggtctattcagggattcaacatcatcctggtttagtcttgggagggtgtatgtgtccaggaatttatccatttcttctagattttctagtttatttgtgtagaggtgcttatagtattctctgatggtagtttgtgtttctgtgggattggtggtgatatcccctttatcaatttttattgcatctgtttgattcttctctcttttcttcat

SEQ ID NO: 21189 - DNA, 780 bp, Homo sapiens
  SIMILAR (365)..(312): 551254mologous to Homo sapiens Gag-Pro-Pol protein,accession number AF164613,Smith-Waterman Score=53.
tcaccaaatcagttgttctgcttctgtctttacagctggtttctgtagatgctgttcagctgctgataacatctggcctttgggcaggctcaaaaaatttaaagttaataatgctagattcagttgcatctgtggggttccatattctctgtctccctcagtctgcttttgcaactgctgttttagggagagattcattctttccactatggcttgtccttgagaattgtatgggataccagtaatgcgtttaatattccacatagagaaaaatgtagctagagcttggctagtataacctggggcattattgttgtagtagaagctggaatgcccatcaccgcaaaacattctaactgctgtttgcagttgagaaaataaagtcatcagttgttcatctgtatgaagtcgtaactgagcattttcagttaactgtgtggaatgaaccacgtatgtagaatcagaaatcatactaacaggcatatcaaaagcagtcaatacctcaattaccgctaccagctccactttttgagctgcagtatagggcgtctggaaaactttaccttttaatccaaaataagaagctttaccgttactagacccatctgtgaaaacattctcagcaccttcaattggtttaaatttagttattttagggagaatccaattagttaatttcaaaaactgaaacagctttgttttaggaaaattattgacattttcctgaagtgattttttcccaagctctaatgcacactcctctaagctgttctgtggcat

SEQ ID NO: 21190 - DNA, 577 bp, Homo sapiens
  SIMILAR (401)..(577): 441254mologous to Homo sapiens Human breast tumour-associated protein 46,accession number Y48501,Smith-Waterman Score=112.
cccacgcgtccggaggcctgcgcccacaccctctcctgtttattcttcgcccgcctgggcagggcccggcgccggccgtggatgagccacagaacctcttgcaccttccgagcggagagaagtttccattcctcttcttgttcctgctcctcttccacctcctcctcggcctcccgtgccctcccggaccaggacccgcccatggagaaggccctgagcatgttttccgatgactttggcagcttcatgcggccccactcggagcccctggccttcccagcagcccatcccacagcccgccccggtggggcaggcaacatcaagaccctaggagacgcctatgagtttgcggtggacgtgagagacttctcacctgaagacatcattgtcaccacctccaacaaccacatcgaggtgcgggctgagaagctggcggctgacggcactgtcatgaacaccttcgctcacaagtgccagctgccggaggacgttgaccccaccgcggtggacttcggctctgcggaaggacggaagcctcactatccgggcacggcgtgacccgcatacagaacacgtc

SEQ ID NO: 21191 - DNA, 2139 bp, Homo sapiens
  SIMILAR (520)..(200): 541254mologous to Homo sapiens Gag-Pro-Pol protein,accession number AF164614,Smith-Waterman Score=314.
aagttactcattgtgactggttgtcttgctttcctcaggttttcttccaccatctgtgacagcttcttgatctgtctccaggtgggtggctgtgtttgacaggtgttgctcgtgacagttggggtcttcctcagcgtcagtctggacatggctgcaaccgggggtgggggtggggtccacagtttcctcccggaatctcttcctcagcatctggctcatgataaggtttcaggtgtcttgatggtatccaaatcggctgttgagtcagtcctggagaaacacaagcataacctttaccccaagttattattttacctatttcctaactttttgttattggatctctccaccaaactagttgttctgcttctgtctttgcagctggtttctgtagatgctgttcagctactgataggatctggcctttaggcaggctcaaaaaatttaaagttaacaatgctagattcagttgcatatggggtgtccccgtagtccttgttttccccccttttttttgctttttgcaactgctgtttcaggggagagattcattctttccactatggcttgtccttgagaattataagggataccagtaatgtgtttaatattccgtatagagaaaaatgtagctagagcttggctagtatagcctggggcgttatctgttttaatagaagctagaatgccaattaccacaaaacactgcaaaaggtgacgtttaacgtaggcagaagactctcctgattggcatgtagcccagacaaagtgagaaaaggtgtccacacatgcatgtacataagctagtctcccaaacgagggaacatgtgtgacatccatttcccaaagagaattaggttccagtcctctaggattaactcctcctgtaaaagatgaggaatgtaccacttggcaagttgggcatcgctggataatagctttagcttctttccaggtaatgctgtatctgtgtttgagaccagaggcattaacatgggttaaactgtgaaagtgtctagcattagatactgcagtagcaactaggcgatcagccatttgattcccttcagtcaaagatcctggaagatgtgtatgagcccttatgtgagtgatgtaaaatcggtgcattctacttctaactgctgtttgcaattgggtaaataaagtcatcagtttttcttctgtatgaaatcgtaactgagcattttcaattaactgtgtggaatgaaccacgtatgaagaatcagaaatcacattaataggcatatcaaaagcagtcaataattcaattacagctacaagctccactttttgagcagaagtatagggtgtctggaaaactttacgttttgatccaaaataagatgctttaccattactagacccatctgtaaaaacattctcagcaccttcaattggtttaaatttagttattttggggagaatgcaattagttaatttcagaaactgaaacagcttcattttaggaaaatgattatcgagaatacccacaaagtcagctaaatgggtttgccaagtaagactatttataaaagcttgctgtatttgtgccttcatgagagggacaataatttttccaggatcatatccatgtaatttaacaatccgagttctcccaattcctatcatagtagtgatttgatctaaataaggagttagagtccatgaatcagtatgtggaagaaaaaaccactctactaagtcctgttcttggacaataacaccagtaggtgaatgctgagttgaaaaaattagcaaatctggaatcttctctggatctattctatttatttgagctttatggacttgcttttcaatcagctgtaactctgcctcagcctcctttgttaattgccaatggctagtgagactaggatctcctccagtgtcctccagaaaagaaagatctggagggtcaggccactccttttcttcaaaataattaagaggtgcagaagggtagggatgaacctctttctcctttgctgcgttagctttagctggcaaacaaacctgctctgtcacctcttctgttacttcgttatactttgcttcctcctcattattagtgtgaaaaggttccaaggtggaatgaaccagaacccacacttgtcccat

SEQ ID NO: 21192 - DNA, 1680 bp, Homo sapiens
  SIMILAR (1198)..(1338): 971254mologous to Homo sapiens heat shock protein,accession number AJ243191,Smith-Waterman Score=243.
atgggtccagtaatggtaaagcttcttattctagatcaaaaggccaaaatcaacagcccatttggataccatcaagacacctgaaaccttatcatgagccagatgccaaggaagagattccgggaggatcccgaggaccccctggttgcagccatgccgagactgatgctgaggaggaccccaactgtcacaagcaacactcgtcaaacacagccacccacctggggacagatcaagaagctgtcacagatggcagaagaaaacctgaggaaagcgggacaaccagtcacaacgaacgcttgatggtggtgatgatggtggtcgtggtgatggtggtggtggtggtgatggtggtgatggtgacggtgacggtggtgacggtggtggtggtgacggtggtgacggtggtggtgacggtggcggtgacggtggtgatggtggtgacggtggtggtgacggtggtggtgacggtggtgacggtggtggtggtgacagtggtggtggtggtggtggtgggcaacatctgtcaaatgcagggcatcggggccaagtgctcagtggaggtctgttttcgtcctccttctggaaacctggaactgcacgccttcttccaagggacacagctctcagctgtggctctggcattcagtgcctgccctgcggaaactggccaagcggtgaagtacgtgggcctgcggggccttcccctgatagccagtgtccaggcgctgagtcagccctgtgtgtggaggcactgggcccctgggagccaagtggcccatggccccaacaacctcttacttctcttccatctaaagcctgggacccagggcctctcaatgaaaagtgggtccccaaagcgggacttcctaagagcactgctgaggtttctggcaagtgatccgggccctgaggggaggggaggtgcacagggaggggacgtctgctccagggcgccaccgaaggcgctgtggctgccggtcggcctggaacaggtgctgcacagcctgcagccatgtgtggccaccaagacagatgtggccacagggacagatgtggccatgaaaacaggcaacatcaagaccctaggagacgcctatgagtttgcggtggacgtgagagacttctcacctgaagacatcattgtcaccacctccaacaaccacatcgaggtgcgggctgagaagctggcggcctgacggcactgtcatgaacaccttcgctcacaagtgccagctgccggaggacgtggacccgacgtcggtgacctcggctctgcgggaggacggcagcctcactatccgggcatggcgtcacccgcatacagaacacgtccagtagtaccttccggacggagatcaaaatctgagtgcctctcccttccctttccctgtccccccgccccacgcctgccagcaaagcctcgctaaccccattacaacagctccagggacatctcagcccaggttctagcccccacggcaccccagaccccagggtgggaccatcctcccaaactaggggccctccactcttattccaggggcaggccaggggactccctggcttgaacaacatggatggcccagattttcaggatttgggcctccgttcactttaattccaggagttacagggggtttggggttcaggggaagggaagatttttaaaggaaccca

SEQ ID NO: 21193 - DNA, 631 bp, Homo sapiens
  SIMILAR (58)..(237): 741254mologous to Homo sapiens Human breast tumour-associated protein 46,accession number Y48501,Smith-Waterman Score=222.
  misc_feature (1)...(631): n = a,t,c or g
agaaaaaattgacgcccgtggttcgatcgcgtgtggagcgcgacccacgcgtgcgcagaggcctgcgcccacaccctgtcctgtccagccttcgcccgcctgggcagggcccggcgccgtccgtggatgagccacagaacctcttccaccttccgagcggagagaagattccattcctctttctcttactcctcctcttcacacctcctcctcggcctcccgtgctctcccggcccaggacccgtccatggagaaggccctgagcatgttttccgatgactttggcagctatatgcggccccactcggagcccctggccttcccagcccgccccggtggggcaggcaacatcaagaccctatgagacgcctatgagtttgtggtggacgtgagagacttctcacctgaagacatcattgtcaccacctccaacaaccacatcgaggtgcggcctgagaagttggcggctgacggcactgtcatgaacaccttcgctcaacagtgccagctgccggaggacgtggacccgacgtcggtgacctcggctctgcgggaggacggcagcctcactatccgggcacggggtcacccgcatacagaacacgtncagcagacctttcggacggagata

SEQ ID NO: 21194 - DNA, 450 bp, Homo sapiens
  SIMILAR (265)..(450): 961254mologous to Homo sapiens SKAP55,accession number Y11215,Smith-Waterman Score=308.
tttcgtccgcggctgaggtacaggagcctcgcggagcacccgggtcgccttccattccgtccgcctcccgaccagggcccgcgccccgtcccgcctctctcccgcccagccaaatgcaggccgccgccctccctgaggagatccgttggctcctggaagatgctgaagagtttctggcagaaggtttgcggaatgagaacctcagcgctgttgcaagggatcacagagaccatattctacggggctttcagcaaatcaaagccagggggagacattggacaggacagctctgatgataatcacagcgggactcttggcctgtccctcacatacgatgcaccctttttgtcagattatcaggatgagggaatggaagacatcgtaaaaggagctcaagaacttgataacgtaatcaagcaaggatacttggagaagaaaagctaagatcat

SEQ ID NO: 21195 - DNA, 399 bp, Homo sapiens
  SIMILAR (150)..(398): 971254mologous to Homo sapiens SKAP55,accession number Y11215,Smith-Waterman Score=436.
attggacaggacagctctgatgataatcacagcgggactcttggcctgtccctcacatccgatgcaccctttttgtcagattatcaggatgagggtgagtccatcagatttcagatcattgggagaaattaaggacttggtgttgagtttactgtgataagggaatggaagacatcgtaaaaggagctcaagaacttgataacgtaatcaagcaaggatacttggagaagaaaagcaaagatcatagtttctttggatcggagtggcagaagcgatggtgtgttgtcagcagaggtctcttctactactatgctaatgagaagagcaagcagcccaaagggaccttcctcattaagggctacagtgtacggatggccccccacctgcgaagagattcca

SEQ ID NO: 21196 - DNA, 1570 bp, Homo sapiens
  SIMILAR (81)..(1148): 911254mologous to Homo sapiens SKAP55,accession number Y11215,Smith-Waterman Score=1684.
  misc_feature (1)...(1570): n = a,t,c or g
gtcgccttccagcccgtccgcctcccgaccagggcccgcgccccgtcccgcctctctcccgcccagccaaatgcaggctcgccgttctccctgaggagatccgttggctcctggaagatgctgaagagtttctggcagaaggtttgcggaatgagaacctcagcgctgttgcaagggatcacagagaccatattctacggggctttcagcaaatcaaagccaggtactattgggattttcagccccaagggggagacattggacaggacagctctgatgataatcacagcgggactcttggcctgtccctcacatccgatgcaccctttttgtcagattatcacgatgagggaatggaagacatcgtataaggagctcaagaacttgataacgtaatcaagcaaggatacttggagaagaaaagcaaagatcatagtttctttggatcggagtggcagaagcgatggtgtgttgtcagcagaggtctcttctactactatgctaatgagaagagcaagcagcccaaagggaccttcctcattaagggctacggtgtacggatggccccccacctgcgaagagattccaagaaagaatcctgctttgaactgacctcccaggataggcgcagctatgagtttacagctactagtccagcagaagccagagactgggtggatcaaataagtttcttgttaaaggatctgagctccttaaccattccatatgaagaggatgaggaggaagaagaaaaagaagagacatatgatgatattgatggttttgactccccaagttgtggttcccagtgcagacccactatcttgcctgggagtgtggggataaaagagcctacagaggagaaagaagaagaagatatttatgaagtcttgccagatgaagagcatgatctagaagaggatgagagtggcactcgacgaaaaggagtagactatgccagttactaccagggccctatgggattgcttatggtgaccagccagatgacttgtccctcccaacggggtgacctcatcctatttctgagcaaggagtataacatgtatggctggtgggtgggagaactgaacagcctcgttggggattgttccaaaggagtatcttcaccacttgcctttgaagtggaaggaaagatggaaacccagggaaatatatttcttcccttttnttcctgcctttattgaggaaactgattcatcaaaaaggtccccactcccctacttctggccacccccacccaacgcccttggactccctctctttgctgaagagaccccaagtctcttgacaccctcagagtgactgtaagctacccagtaagacaagtgggaagaggcacgttcatcaaacctgttactaaaccagcctagtcatagctcatccccatctctaaatgtgtccacacaaccacatctgccttttccacaagcttttcacaaagaaggtgagagagaaggaaaccttgggaggaggacattactggttgttctggctggtttgaaaagcacaaataaacttgggatgtggttccttgccaaaaaaaaaaaaa

SEQ ID NO: 21197 - DNA, 479 bp, Homo sapiens
  SIMILAR (297)..(359): 421254mologous to Homo sapiens glycoprotein Ib alpha,accession number L39103,Smith-Waterman Score=36.
  misc_feature (1)...(479): n = a,t,c or g
aggaagtgcgggntnnnnnnccatgagacatgagtacgtgcggnggaactcgcaccacgtaaggggccggcctcgctgcgctgattcgtcgagcccatccggcgacagaggacagccagaagcccagccagccccagactccagtgcaccagagcacgcacaggagcctgggcgcgctgctgtgaaacgtcctgacctgtgatcacacatgacaagacgcccctaagtcacctgcttcattagacggtttccaggttttctcccaggtgacgctgttagcgcctcagctggcggtgacagccggcccagcgtggcgccaccacacaccgcagagctgtccaggcacagctccgtccccagcgctcatggtgttgaaactgtctgtcatgcaccacggtgtctgtgtccacacagtaataaacggtttactgtccgcnnnnnnnnnnnnnnnnnnngcggccgttcaagtttagagggcc

SEQ ID NO: 21198 - DNA, 2182 bp, Homo sapiens
  SIMILAR (743)..(1189): 731254mologous to Homo sapiens Human cytoskeleton associated protein 6 (CYSKP-6),accession number Y91951,Smith-Waterman Score= 503.
ctgaattcctgggtcgacgagttcgtctctggttcagcttccttttcctgtttggttttaagtaggctatattaatcattttgctgtcttcagagggtctgtggtcctctgatcaacataggctggtgggagtacaggactcgcctcctcagggttccctgggctgttacttttcagccatggccacaagtgaacagagtgtctgtcaagcccgggcttccgtgatggtctacgatgacaccagtaagaaatgggtaccaatcaaacctggccatgcagggattcagccggatcaacatctaccacaacactgtcagcaacaccttcagagtcgttggagtcaagttgcaggatcagcagcgttgtgatcaattattcaatcgtgaaagggctgaagtacaatcaggccacgccaaccttccaccagtggcgagatgcccgccaggtctacgggtttaaactttgcaagtaaagaagaggcaaccacgttctccaatgcaatgctgtttgccctgaacatcatgaattcccaagaaggaggcccctccagccagcgtcaggtgcagaatggcccctctcctgatgagatggacatccagagaagacaagtgatggagcagcaccagcagcagcgtcaggaatttctagaaagaagaacctcggccacagggcccatcctcccaccaggacatccttcatctgcagccagcgcccccgtctcatgtagtgggcctccaccgccccctccacccccagtcccacctccacccactggggcttaccccacctcccccacccccacttgccagccggaggagcccaggggtccagccacgacgagagcttccatgttcaggactggccgcttgccattagctgggggccaagcttgagaagagttccaaacgggccagaagacgcatctggaggctccagtcccagtgggacctcaaagtccgatgccaaccgggcaagcagcgggggtggcggaggaggcctcatggaggaaatgaacaaactgctggccaagaggagaaaagcagcctcccagtcagacaagccagccgagaagaaggaagatgaaagccaaatggaagatcctagtacctccccctctccggggacccgagcagccagccagccacctaactcctcaaagggctggccggaagccctgggagcggagcaactcgcgtggttatttttgtgtcctcgattctgtccagaaccccgctctgtggccaaagagccccgaaagctaagagcccccttcagtcagcagcctcactctaggatgaagcctgctgggagcggtgagtgacatggcccctggatgccttcgacttggacccgaatgaagcaggagatcctagaggaggtggtgagagagctccacaaaggtgaaaggaaggagatcatcgaccgccatcaggcaggaagcttgaagtgggatcaagcaccaccgtaaggggcccggccgcggctgcgcttgattccgtcgaagcccatcccggcgacagaaggacagccagaagccccagccaagccccaagactcccagtgcaccaagaagcacgcacaaggaagcctgggcgcgctgcttgcttgttgaaacgttccttgaaccttgttgattcacaccattgacaagtgaaggaaacccaagttgcaacttcctgggttttttttaaaattttgccttgacaccggaacacccaggtcttgctcgtctttatttgtgttttatatttgcttatttaaggtacatttcgtttgggtttctaagagacgcccctaagtcacctgcttcaattaagacggtttcccaggtttttttcccaggtggacgctgttaagggcctcagctgggcggtgacagccggcccaagcgtggcgccaccacactaccgcagagctggtccaggcacagctccgtccccagcgctcatgggtgttgaaactgtctgtcatgcaacacggtgtcttgtgtccacacaagtaataaaacggtttactgtccgcaccctcgggctcaggccctcgcattggtccatcacgctccgggctggggatgccccttttcagagaagggcccgggaccacggtgaccaggagtcgtaggagcaagatggcggtcttcgacaggaagctgggctcagaacattcccaagccccgggaagg

SEQ ID NO: 21199 - DNA, 1581 bp, Homo sapiens
  SIMILAR (1581)..(718): 951254mologous to Homo sapiens retinoblastoma binding protein,accession number X74262,Smith-Waterman Score=1484.
tcagtggcggtcggcggcctcacctatcagtgtgtgaaagacggcagcgatggcccctgccaccaccatacacaggacggctttggtcctgtctctcttgctgttcacaaacaccaggcccacatttttgaagtcactcatgggacccgtgaagaacttcatgagggagtacgccagcccgtagctggccagcatctcgactgcatcctccttgacagcagcaatgccccggttcaaggcctgagctatgacatctgagattgaggcacatcccaccaggaaactgtatttgtgttttaagagaatgccagcatgggtccatgcctgttcaagaccaccagtgtgtcccacctggttgaggtggttcctcagaagctgtcctgggtcatttgatgtgtcccgagcaaacagaagcacagagaaaaatggtacttcctttcctttctctttatcattatatagttcaatggctctgtttagcattagaaattttacagcttcatagaggctatattcctccgcctcatttgtgaatagttcatcacaagctatctgtcttgcttcagcagttctcatttcagccaagcctgcccacttcttcctcagcagagtaagggactctttaattttatcaaccaggtcctcattcttcccatcaaatttcagtccaagtttccattgcttgatccagttgtatttgcttatgagtttttctggtaactggaatatttcatccttatgtgactcaaaggaatgcaacttaagtttcagatttctcagatcccacaaggcaacagtctcgtcagctgatcctgtggcaagaatgaactcactatgaggactgaaagaaaggcagttcacttcagcagtgtgagtgtcaactgagtggcttggtttggaagtattgtttgaacgagtatcccaaatcatcagtttctgatcatcagcaactgacccaaacagagactcacagagtagatgccaggaaacatcttctactattgccgtatgccctgtaaagatggtcttcgcatctaccacttttccctcctttggaacggcactgatgtcccacaggcagatggtgtggtcatctgaagcactaagtaagtgcccactgagatttaggttccaagaaagcccatagccttccttctgatgtccacggagacgcaagtctgggttgcattctccagaaggatctggtttagaaggatgttttgtatagtcaaagacaagaatatcactggaaggagtctttgttgtgatgatacaagggttctggggcatataacgggccctgtttacttttccttcatggttgatcttgatttctatttcaatttttccactaactgaaccaaaacctccaaattctcctttctctctgtcgtagtgtgatgcatcaaactgagcatcatcatcaggcagctgcacactggctataacaagatggttttgttcatccgatgtgtgtgtccccaggacaagtcgatgaaggctgaaatctttcccttctggtctggttacatctggaagccactgggcagttaggctgggccactccagagcatgggtcat

SEQ ID NO: 21200 - DNA, 1472 bp, Homo sapiens
  SIMILAR (1139)..(642): 1001254mologous to Homo sapiens progressive ankylosis-like protein,accession number AF274753,Smith-Waterman Score=862.
cagcgcttggagatcttagagtatgcaatctgggcagagacattgccaaggtggtcatggtttccggctagcacgtaccagggcactttgcgaagggagcggtcagagaatacgtcctcaaaggtctctctgacggggatgttatagtgccgatcgtcctcagcaatgagcgttaccactggccagtccttgggtgggtcggtggggtagactgtgatgaattcttccgtgttgtacttggagagccggtacacctggatggtgtggcgcacagcataggcaagaaggaacatttcaacctcaaacagcagggggcgccatgcgccaagcccgcagagggttgtccaactcctattccttttctctgcagctttaatcctttcctggtttttctcacaggatctgaggactattgataaagttccacactccagcttctgtttagcctttccttctccttgactattaatagtcaacttggaacttgtttgggaagcctccgagctggtgctgggctcggaaagccaagaggccagaggcgccacatctttgctttctccacgttgatggcgcatgcgtgtcgggagtgtctggactaagcgccccgtcaggctgatgtctggtttctgtacactgtctttaagcgtgagtgacagagccatgcagacgaaggtgaacttcttgatgtgggctgccgtgactgtgttgctcgtgctcaccagtttgttgctggggttattcttgtcgaaagcaggatacacagcacggatttccgtcaaccagccgtatggcatgtgacccacagggtatgtggctgtcaaaatcgccactgcctctgtggctgcagaactgccaccaaggtcccgggaaacaaagaggttgacaataggccgactgattctctgtgtggccagaattagagccaaaggccaccagaagctcagcatctttcttattgttgcatctccccccagctccgggccacttctgtcagggatgatgtcgtgaatgttcttgtagtagcccaggcacagggtggtgcagcgcacaagtgcgcccatgtacaaggagaggatcgggatgagcaggggctcccggcattccaggtgactgtgaagcaaaatggctacaaaaacaaccagcatgagctccgggtcctgcagccagggcggcagccccacagcctggctcatggcctggaacagcgtggccctcagtgcacagtaattatcaccacggactcgccgtatggaggtgaacttctgagaaacctcttcatagcccttcacataagcaatgatcagacccccgattccccatactcctgcctcatgagcgcataccccatcctcacacaaggggtgctgcaggctgtacaagaagcatagtgctggcatccgtttggcttctgcagaggcctcaggaagcttccaatcatggcagaaggtgaacggggagtaggcaaaccacat

SEQ ID NO: 21201 - DNA, 1359 bp, Homo sapiens
  SIMILAR (443)..(694): 421254mologous to Rattus norvegicus sertolin,accession number AF107727,Smith-Waterman Score=115.
  misc_feature (1)...(1359): n = a,t,c or g
tttattcaaggcacatttgcatttcacagtgaagaacacagagcctctccaacttattcacgcacatttaggagcagaatttgatttcaacactctaatcaataaatatttagcaaaatgtggtgaatattactgatgaggtaatgggagaaagctaaagtaacagtctgaatagttttgtgcatcctgagttttcttaactaagactttatttttaattaaaaacaaaatttacattttcaaaaacggtttgcctcaaaaaaaatagcttctaaactatattaaattggaccaaataaggattttaattattataaaacaaagctcagtacttcagggaaataccacctccacaaacgttgagccaattcaggggctgccagtagaatcctaaagagtgatgtctccggttcatgtgaacaccatctgcagtccacacccacactctgacggggatgttatagtgccgatcgtcctcagcaatgagcgttaccactggcccagtccttgggtgggtcggtggggtagactgtgatgaattcttccgtgttgtacttggagaagcccggttacaccctggatggtgtggcgcaccagcattaggcnaaggaaggaaccatttccaacctgttccaagaccaccagtgtgtcccacctggttgaggtggttcctcagaagctgtcctgggtcatttgatgtgtcccgagcaaacagaagcacagagaaaaatggtacttcctttcctttctctttatcattatatagttcaatggctctgtttagcattagaaattttacagcttcatagaggctatattcctccgccctcatttgtgaatagttcatcacaagctatctgtcttgcttcagcagttctcatttcagccaaagcctgcccacttcttcctcagcagagtaagggactctttaattttatcaaccaggtcctcattcttcccatcaaatttcagtccaagtttccattgcttgatccagttgtatttgcttatgagtttttctggtaacagcatgagctccgggtcctgcagccagggcggcagccccacagcctggctcatggcctggaacagcgtggccctcagtgcacagtaattatcaccacggactcgccgtatggaggtgaacttctgagaaacctcttcatagcccttcctgctctcctccctgcagtcctcattcctgtgcacaccaagacaagactgctcggccgggcactgcatctcgggccgcggctgcccgctggccgccgccttcccgccgtcccgcgccgtggccgccgcctcccgcgccggcgtctcggcgcagctcgcgcctggccacgcttcgggctggggcat

SEQ ID NO: 21202 - DNA, 399 bp, Homo sapiens
  SIMILAR (14)..(43): 1001254mologous to Homo sapiens Similar to D.melanogaster parallel sister chromatids protein,accession number D87450,Smith- Waterman Score=47.
cccacgcgtccgagctgccctcatgtatatactgagtagagatccttacttctaaacgagcaggagactggtttaaagaagaactccggcttttgggtggtctggatcatattgtagataaagtaaaagaatgtgtggatcatttaagtagagatgaggatgaagagaaactggtagcctcactatggggagcacagagatgtttacgagttttacaaagtgtaactgtgcataatcccgaaaatcaaagctacttgatagcatataaagattcccaacttattgtttcatcagctaaagcattacagcattgtgaagaactgatctagcagtacaaccgtgctgtggacacgctatgcttagctgactgtaagcctctgccacacccgaccgtccttc

SEQ ID NO: 21203 - DNA, 180 bp, Homo sapiens
  SIMILAR (1)..(126): 851254mologous to Homo sapiens Similar to D.melanogaster parallel sister chromatids protein,accession number D87450,Smith- Waterman Score=166.
atcaatgtaaccactgtgcgggaatatctgccagaaggagacttttcaataatgacagagatgctcaaaaaatttttgagttttatgaatctcactaacatagtacgccagtgtaacgtgggaaccattgagattgtatttgccctgagtattaaagctagcttagcaaaatacttttaa

SEQ ID NO: 21204 - DNA, 353 bp, Homo sapiens
  SIMILAR (195)..(172): 751254mologous to Homo sapiens Exon XI of human hepatocyte growth factor,accession number R25688,Smith-Waterman Score=36.
  misc_feature (1)...(353): n = a,t,c or g
ngttctttgagggttaaaaacacacaaatgcactgcagttggtgaagtgattatctcccccaccacctccccccaccaaaatctgcatctctatcagtgctcgacaattagttattatnnnnnnnnnnnnnnnnnnnnnnnnnnngttaaacactgaggtaaatcaattttcaaatgattaccagtgtaacagaaaaatgcagttcgccctgattgttctcatccaaatgttttataatattccttaccatctgccacaagtcaggttcaccaaaaatctgtccctttccctaaatccaatgattaataaatatcaatgtattttgcattttaaaataaaatataactaattt

SEQ ID NO: 21205 - DNA, 458 bp, Homo sapiens
  SIMILAR (164)..(226): 1001254mologous to Homo sapiens Similar to D.melanogaster parallel sister chromatids protein,accession number D87450,Smith- Waterman Score=112.
gcatgttagggcaaataaactttatcaaacccacaatttaatctcggtgtactttgatttgtagtgttcagtttagtaaatctagaggtaaacttttatttatacttcttaaaatctgttaaatattaactgttacttcctttccccttcaccctgctttcagtgtgctgttggaacaactggccagaaatctatctctagagtgattgaatatttggaacattgctagctgctttacctttgcttcaggtgctcggtaatgctggagctatccttagacaaagaaaagtcaagtcatgaaagaagtccttgaagatataccaagaacattcatcagtatcattcgtgtttggatttttaaggccacctgatttcttcgtcatgcattcggcatttgctaaatgacagttactacatcaatctgcaactatcaaaaatgaggggaaaaggttcaagct

SEQ ID NO: 21206 - DNA, 466 bp, Homo sapiens
  SIMILAR (67)..(429): 851254mologous to Homo sapiens Similar to D.melanogaster parallel sister chromatids protein,accession number D87450,Smith- Waterman Score=528.
atgcctggcccctgcttaattttgattcaatttccagcagttgctgtccattgtggggtgcagtccggaagggagccctcgcagatcagtgagagaattcacagaccttcagatcttaccgcagatctgctattccttgagcgagagcgggcagcccagctagcagaaagtaaaacagatgagttgatcaaagatgctcccaccactcagcatgataagagtggagagtggcaagaaacaagtggagaaatacagtgggtgtcaactgaaaagactgatggtacagaagagaaacataagaaggaggaggaggatgaagaacttgacctcaataaagcccttcagcatgccggcaaacacatggaggattgcattgtggcctcctacacagcactacttcttgggtgtctctgccaggaaagtccactgtgggaactgtgggcttacaagttccccagggatcacg

SEQ ID NO: 21207 - DNA, 6396 bp, Homo sapiens
  SIMILAR (1024)..(3978): 901254mologous to Homo sapiens Similar to D.melanogaster parallel sister chromatids protein,accession number D87450,Smith- Waterman Score=4500.
gcgagcggctgttggaggaaggaggtgggggccgggagcgcaaatggcgttgagatggttcagggccctgttcaaactccagcactgaccattcaccggcggaagcggcggcgcaggaggcggcggcggcccagcgggggcacacagcaggctctgttaccagctccagcagtggcggccagcgagagctaggcccgcgcccggccggcggcgctcgaggcggggagggaagttgcggggccgccgctcctgcccccccaaccgggcttcctatttaccgaaagcagagtccctcgcctctctcggctctcacctgccggccctgctctcccgcgcgagggttccgcgcccgcccgcgggccgtaaggagcgggagaaggcggaagcggccccgtggccaaagcacccgccaggcttccgaggagaatatgaaactggttgtcaaaatgacatccagatttgcgaaaacatacagtaggaaaggtggaaatggcagttcaaaattcgatgaagtcttttccaacaaacggactacccttagcacaaaatggggagagaccacatttatggctaaattagggcagaagaggcccaatttcaaaccagatatccaagaaattccgaagaaacctaaagtggaagaagaaagtactggagatccttttggatttgatagtgatgatgagtctctaccagtttcttcaaagaatttagcccaggttaagtgttcctcttattcagaatctagtgaagctgctcatttggaagaggtcacttcagtacttgaagctaatagcaaaattagtcatgtggtcattgaagacactgtcgtttctgataaatgcttccctttggaggacactttacttgggaaagaaaagagcacaaaccgaattgtagaagatgatgcaagcataagtagctgtaataaattaataacttcagataaagtggagaattttcatgaagaacatgaaaagaatagtcaccatattcacaaaaatgcttgatggacagtacttaagaaaccccaatgcagaaactacagtgggctttctggaaatcaagggaaacaaaatgatacttgggaactccccagtttggggaaaagaccaaaaatcgccatcagaaatatctccaatcaagggatctgttagaactggtttgtttgaatgggataatgattttgaagatatcagatcagaagactgtattttaagtttggatagtgatccccttttggagatgaaggatgacgattttaaaaatcgattggaaaatctgaatgaagccattgaggaagatattgtacaaagtgttcttaggccaaccaactgtaggacgtactgtagggccaataaaacgaaatcctcccaaggagcatcaaattttgataagctgatggacggcaccagtcaggccttagccaaagcaaacagtgaatcgagtaaagatggcctgaatcaggcaaagaaagggggtgtaagttgtgggaccagttttagagggacagttggacggactagagattacactgttttacatccatcttgcttgtcagtttgtaatgttaccatacaggatactatggaacgcagcatggatgagttcactgcatccactcctgcagatttgggagaagctggtcgtctcagaaaaaaggcagatattgcaacttctaagactactactagatttcgacctagtaatactaaatccaaaaaggatgttaaacttgaattttttggttttgaagatcatgagacaggaggtgatgaaggaggttctggaagttctaattacaaaattaagtattttggctttgatgatctcagtgaaagcgaagatgatgaagatgatgactgtcaagtagaaagaaagacaagcaaaaaaagaactaaaacagctccatcaccctccttgcagcctcccccagaaagcaatgataattcccaggacagtcagtctggtactaacaatgcagaaaacttggattttacagaggacttgcctggtgtgcctgaaagtgtgaagaagcccataaataaacaaggagataaatcaaaggaaaataccagaaagatttttagtggccccaaacggtcacccacaaaagctgtatataatgccagacattggaatcatccagattccagagaaactgcctgggccaccagttgtaaaccttagtgtttccagtgtgtcctttctcaaaaggaccacaaccaaaaagtatggttgggtttttaaggctcctgcaccaccatcccaaagtgataaacactgtgacaatacctactcagccctaccaagatatagttactgcactgaaatgccagacgagaagacaaagaattatatactgttgttcagcacgtgaagcacttcaacgatgttgtagaatttggtgaaaatcaagagttcactgatgacattgagtacttgttaagtggcttaaagagcactcagcctctaaacacacgttgccttagtgttattagcttggctactaaatgtgccatgcccagttttcgaatgcacctgagagcacatgggatggtagcaatggtctttaaaaccttggatgattcccagcaccatcagaatctgtccctctgtacagctgccctcatgtatatactgagtagagatcgtttgaacatggatcttgatagagctagcttagatctaatgattcgacttttggaactggaacaagatgcttcatcagccaagctactgaatgaaaaagacatgaacaaaattaaagaaaaaatccgaaggctctgtgaaactgtacacaacaagcatcttgatctagaaaatataacgactgggcatttagctatggagacattattatcccttacttctaaacgagcaggagactggtttaaagaagaactccggcttttgggtggtctggatcatattgtagataaagtaaaagaatgtgtggatcatttaagtagagatgaggatgaagagaaactggtagcctcactatggggagcagagagatgtttacgagttttagaaagtgtaactgtgcataatcccgaaaatcaaagctacttgatagcatataaagattcccaacttattgtttcatcagctaaagcattacagcattgtgaagaactgattcagcagtacaaccgtgctgaggacagcatatgcttagctgacagtaagcctctgcctcaccagaatgtaactaaccatgtaggcaaagcagtggaggactgcatgagggccatcatcggggtgttgcttaatttaactaatgataatgagtggggcagcaccaaaacaggagagcaggacggtctcattggcacagcgctgaactggtgtgcttccagggttccaaagtacctacctcaggagcagagatttgatattcgagtgctgggcttaggtctgctgataaatctagtggagtatagtgctcggaatcggcactgtcttgtcaacatggaaacatcgtgctcttttgattcttccatctgtagtggagaaggggatgatagtttaaggataggtggacaagttcatgctgtccaggctttagtgcagctattccttgagcgagagcgggcagcccagctagcagaaagtaaaacagatgagttgatcaaagatgctcccaccactcagcatgataagagtggagagtggcaagaaacaagtggagaaatacagtgggtgtcaactgaaaagactgatggtacagaagagaaacataagaaggaggaggaggatgaagaacttgacctcaataaagcccttcagcatgccggcaaacacatggaggattgcattgtggcctcctacacggcactacttcttgggtgtctctgccaggaaagtcccaatccaatgtaacccactgtgcgggaatatcttgcccaaaggaaccttttcaataatgacagagatgctcaaaaaaatttttgaggttttatgaatctcacttggtgctgttggaacaacctggccagaaatctatctctagagtgattgaatatttggaacatttactagctgctttaccttggcttccaggtgctccggtaatgctggagctatccttagacaaagaaaagtcaagtcatgaaagaagtccttgaagatataccaagaacattcatccagtatcattcgtgtttggatttttaaggcccacctgatttcttcgtccatgcattcggcatttgctaaaatgacagttactacatcaatctgcaactatcaaaaatgaggggaaaaggttcaggctgttaacaattccatgcagtatttaaatacatttactttggcagagtttataccctccccttgttttcttgctttattctgggcaagtttgaaggggaaaatttgtgctgctgttagtgcaactgctgtgtatgttgagccactgttgtcatgccagccaggtgcaaaggcagcttagctactgaggtagcgaatgttctgaggacattctagacaacagcttagttcctttttcaggctcatttgcttttgcttttttgttgaatgattccaatcgtaaataaagcttttaataattttgtgaattttttggttgttgttccctgaactactgtctatatttaaaattagatggaatccaaagatacacgggattaatagtatatttttttattcttgattaggtttgggttattgaactattttttacttttgagaccacaaccatattcaatatcataccataatgtgtcatagctataggcaccaagaaaaacaacagtttgaggaggaatattatataagatgatgtgccctgttaaaaggaggaggcaaaatagtcaaacccagggtagtttacacttaatgctagggaggctcttaaaacattattagattttgaggaaagactctctagatatattttctaatgttcagtacaataaatataaggaagctaaaacaccaatgtggaattcctgtttccagataacatgtatattcttctatagagtgacaggatcaattgcataagcgcaaagccttaaattgctggtttagagaagacccttttttcattcagattctttgttcgtagagcagttatttgaaaaacagttatggaacacaaaacattttatagatttaatatcataacattgcaaatttttcttgtattattgttcacaccactggttatacttttttttttccgttttttattgattgggcctgaatacaggctttctagagatctttttcattaatacttttaaatacctttcaggtagttacatcatgtttcttcattggatttgtaaaacttgaagccataaaaatattagtttggtgtgtattggggaaaatagctaaaagtctaatttttacccatttagactttgtttatttccttgtataaagtgacaaatcggggctcttgtatcagtgccagctgtaatgtttttaaatgcagtggctgccttctattgtcttcctatttttgataatgcagattgttgggaaatctgtaaggaagtaactgattccaggcaaatgtttttcttccttctacccaacccaaacccctacccatcatcttttaagaacatagtacgccagtgtaacgtgggaaccattgagattgtatttgccctgagtattaaagctagcttagcaaaatacttttaaaaacatattggtaaatgatacccataaaaataaattagttatattttattttaaaatgcaaaataccattgatatttattaatcattggaattagggaaagggacagatttttggtgaacctgacttgtggcagatggtaaggaatattctaaaacatttggatgagaacaatcagggcgaactgcaggtttctgtcacactggtaatcatttgaaaagatgatttacccccagtgtttaaccagttttgtgtttttttttgttttttaaataataacttaattgtcggagcactaaataaagatccagattttggtgggggaaggtgggtggggaaaaataattcccttccccccaactgcagtgcattgtgtgtttttaacccctcccaagaactcttgcattttagcggtacttgaaggctgacttaactaaaaagttttaaagtaacccttttttccattgtaaatatttctgtaaatactaccaattggaaattagaacaagtagaagtactttttctgaatccaatcctatttttatctttatacagtatttctcagctgtgatcctttggagcaaaagccaacggcaggaaaaaattagtttgtaccagtttcatgaagtatgtactttgggtttttgtaaataattttaactcaaataaaattgctactttcaatacaaaaaaaaaaaaaaaaaaagatt

SEQ ID NO: 21208 - DNA, 221 bp, Homo sapiens
  SIMILAR (3)..(221): 1001254mologous to Homo sapiens mitochondrial citrate transport protein,accession number X96924,Smith-Waterman Score=379.
ggctgaaggggacgtaccagggcctcacagccactgtcctgaagcagggctcgaaccaggccatccgcttcttcgtcatgacctccctgcgcaactggtaccgaggggacaaccccaacaagcccatgaaccctctgatcactggggtcttcggagctattgcaggcgcagccagtgtctttggaaacactcctctggatgtgattaagacccggatgcag

SEQ ID NO: 21209 - DNA, 580 bp, Homo sapiens
  SIMILAR (385)..(579): 811254mologous to Homo sapiens mitochondrial citrate transport protein,accession number X96924,Smith-Waterman Score=274.
ccctctagcctcaacctgaaggttattgccatggatctggcccagatgcacgcctgtcaaggacctggaaatgacctttacattgaagcatctgctgctctgtgtgcaggctctgatttcagtgtgtcaggaggactgcagtgggtccagcttgtagctcatggaagtgctggtgatgataatggctggctcaggtgccacaggcctccatggcaaggtttaggagacaatgaactcgatggttgcagtggagaagtcaatgtcagccaggatttctgtgggaaatacacagatgtggtcaaccacatcacacaacgactggactatgtactctgcagaacttatgcagctcaacgtacttgtcactcaggctctgttgtaaaagaagtgaagttcatccacgaccagacctccccaaaccccaagtacagaggattcttccacggggttagggagattgtgcgggaacaagggctgaaggggaccttccacggcctcacagccactgtccctgaaacagggcttcgaacccaggccatcccttttttcgtcatgaactccctgcgcaactggttccgag

SEQ ID NO: 21210 - DNA, 1717 bp, Homo sapiens
  SIMILAR (88)..(1020): 431254mologous to Homo sapiens mitochondrial citrate transport protein,accession number X96924,Smith-Waterman Score=444.
  misc_feature (1)...(1717): n = a,t,c or g
ggcacgaggtaaccggccgccgccgccaccgcggaccgagcgcggagttctggagtctcggacccgaagccgccacagggcgccccgcctcccgcccgccatgcccgcgccccgcgccccgcgcgctctggcggccgccgcggcccgcgtccgggaaggccaagctgacgcacccggggaaggcgatcctggcaggcggcctgaggggtggaagtacagatctgcatgaccttccccaccgagtacgtgaagacgcagctgcagctggaacgagcgctcgcacccgccgcggtaccggggcatcggggacttcgtgcggcagacggttcgcagccatggcgttcctgggcctgtaccgcggccttagctccctgctctacggttccatccccaaggcggccgttcaggtttggaatgttcgagtgtcctcagcaaccacatgcgggatgccccagggacggctggacagcacgcgtgggctgctgtgccgncctgggcgctgggcgtggaccgaggccgtaggtggtcgtgtgccccatggagaccatcaaggtgaagttcatccacgaccagacctccccaaaccccaagtacagaggattcttccacggggttagggagattgtgcgggaacaagggcttgaaggggacgtaccagggcctcacagccacttgtcctgaagcagggctcgaaccaggccaatccgcttccttcgtcatgacctccctgcgccaatgggtacccgaggggaacaacccccaacaaagcccatgaacccttctgaatcacctggggttctttcggagcttattgcaagcgcaagccaagtgtcttttggaaacactcctctggatgtgatttaagacccggatgccagggccctggaggccgcacaaattaccggaaacacgtgggacctgcggccttgcagatcttgaagaaaggagggggttcaagggcattcttacaagggcactgtccccccgctggggccgggtcttgcctgggatgtggccattagtgtttgttcatctatgatgaagttggttgaagctgcttcaacaaagtgtggaagaacgggattaaggcctagagagacctgcaaggggctcgccccagggaaccgccagagtgttcctgcttacctttgtctcacatgactccagtgaagtagtgccaaaaggcccctttcccacgtccctcgagctctgtaagcctggtctgtgcattgtggctgtcaaatccatgtgtcccccctgtggtctgtgtgtgacacccaccactgtgtcccaagtgtctggccccagccatggctggatgtgcatctggcctatgaaactgaaaccccttctgtgcccacttgtccaatgtgcttactgtgaaccctgtgcctgtgtttcatgttttgtgttaacgtgacccttgtgcccccgcctcccgggggtgcccgtgtggcatgggtcctcggccctgtagccctggcccggtcccagtccggtgccttccaccctgccctggcctaccacagctgcctccgggcctcggcctggcttcaccgcattccaggggctgcagccccctgcttctccccgccattgtgccttaactggccctcgggccctctctccgccccggacagggtggcacccaccactctcaggaccaacactgccaaggcagaataaaccggatcctgttgcaaaacccacgcgtccg

SEQ ID NO: 21211 - DNA, 375 bp, Homo sapiens
  SIMILAR (3)..(359): 931254mologous to Homo sapiens ser/arg-rich pre-mRNA splicing factor SR-A1,accession number AF254411,Smith-Waterman Score=577.
ccacagccggtgactccggggcggaggacgggccagcttcccgtgtgtcccagatgcccacgctgcccccgcccatgccctggaatctgccagctggtgtggactgcaccaccagcggcgtgctggccttgactgctctttttttcaagatggaagaagccaacctggcgagccgagcgaaggcccaggagctgatccaggccaccaaccagatcctcagccacagaaagccaccctcaagtctggggatgaccccagctcctgtgcccacctctttgggtctgccccctggcccctccagctacctgctttctggcagccctcctcttgggggctgcaggttcgaccccccccaccccccccgggctggctgcg

SEQ ID NO: 21212 - DNA, 4056 bp, Homo sapiens
  SIMILAR (2303)..(3724): 731254mologous to Homo sapiens FLJ00034 protein,accession number AK024444,Smith-Waterman Score=1599.
atggcgagcgtggtggtgaagacgatctggcagtccaaagagatccatgaggccggggacacccccacgggggtggagagctgctcccagctagtcccagaggctccccggagggtgaccagccgggccaaggggatcccgaagaaaaagaaggccgtgtcgttccacggggtggagccccagatgtcccatcagcccatgcactggtgcctgaacctcaaacggtcctcggcctgcaccaacgtgtcactgctcaacctggccgccatggagcccactgactccacggggacagactccacagtggaagacctcagcggccaactcacactggctgggccccctgcctcccctaccctaccctgggatccggatgacgcagacatcacggaaatcctgcaggcaccccaaggtcattactttttccatttcacagagaaggaacttgaagcccccccacctgccccccgattcgatatctatgaccccttccaccccaccgacgaggcctactctccaccgcctgctccggagcaaaagtacgacccttttgagcccaccggctccaaccccagctcatcagcggggaccccctcacctgaggaggaagaggaggaggaagaggaagaagaagaggaagaggaagacgaggaggaggaggaaggcctgtcccagagcatcagccgcatctcggagaccctggcgggcatctacgatgacaacagcctgagccaggacttcccaggtgacgagagcccccgcccggacgcgcagcccacacagccgactcccgcccctggaacgccgccccaggtggactccacccgggctgatggagccatgcgccggcgggtcttcgtggtggggaccgaggcagaggcttgtcgggaaggcaaggtctcggtggaggtggtgaccgctggtggagccgccctcccgccgcccctgctgccgcccggcgactcggagatcgaggaaggggagatcgtccagccggaggaggagcccaggctggcgctgtccctcttccgccccggcggccgggccgcccggcctacaccggccgcctcggccacccccacggcccagccccttcctcagcctcccgctccgcgggcccccgagggggacgacttcttgtccctgcatgcggagtcggacggcgagggcgccctgcaggtggacctaggggagccggctcccgcgccgcccgccgccgactcgcgctggggcggcctggacctgcgccgcaagatcctgacccaacggcgggagcgctaccgccagcgctcgccctccccggcgcccgcgcccgccccggccgccgctgctggtccgcccacgcgcaagaagtccaggcgggaacgcaagcgcagcggcgaggccaaggaggccgcctcgtcctcgtcgggcacccagccagcgccgcccgccccggcctcgccctgggactccaagaagcaccgctcgcgggaccgcaagcccggctcccacgcctcgtcgtccgcccgccgccgctcccgctcccgctcccgctcccgctccacccgccgccgctcgcgcagcaccgaccgccgccgcgggggcagccgcaggtcgcggtcccgggagaagcggcgacggcggcggcgctccgcctccccgcccccggccacttcctcatcgtcgtcctcgaggcgcgagcggcaccgcgggaaacaccgggacggtggcggcagcaagaagaagaagaagcggtcgcggtcccggggtgagaagcggtctggggatggcagcgagaaggccccggcgcccgccccgccgccctctggctccacctcgtgtggtgaccgcgacagccgccgccggggggccgtgccaccctccatccaggacctcacggaccacgacctcttcgccatcaagcggaccatcacggtgggccggcttgacaagtccgacccccgaggaccctctcctgctccggcctcctcacctaagcgggaggtcctgtacgactccgagggactgagcggcgaggagcggggcggcaagagcagccagaaggatcggcgccgctcgggggccgcctcctcctcctcctcttcccgggagaaggggtctcgtcggaaggcgctggacgggggtgaccgggatcgggacagggacggagattgggacagggacagttcatccacgatggcccgcccccccaaggagtcggcgccttactcaaggcccccgccatagccaccagtctgcagtggctcaggctcttcatactcgccgccctgctgttcttcccgcatggtgaagctagcacaccaaggcggcggagctgatccgcgagggtgtcagcagcaccaccccggccaaggatgccgcgtcagccggcctgggctccattggcgtcaaattcagccgtgaccgcgagagtcgctcccccttcctcaaacctgacgagcgggcccccactgagatggccaaagcagctccgggcagcaccaagcccaaaaagaccaaggtcaaggccaaggcaggggccaagaaaaccaaggggaccaagggaaagaccaagccatccaagaccaggaaaaaggtccgcagtggaggtggcagcgggggcagtggtggccaggtgtcgctgaagaagtccaaggcggatagctgcagccaggcggcaggcaccaagggggcggaggagacttcctggtccggggaggagcgggcagccaaggttcctagcaccccgccccccaaggcagccccaccaccccctgccctcactccggactcgcagaccgtggacagcagctgcaagacacctgaggtctccttcctgcccgaggaggccactgaggaggctggggtccgaggtggggcggaggaggaggaggaggaagaagaagaggaggaggaagaggaagaggaggaggagcagcagcctgctaccaccacggccaccagcactgctgcagccgccccaagcactgcccccagcgcggggtccacagccggtgactcgggggcggaggacgggccagcttcccgtgtctcccagctgcccacgttgcccccgcccatgccctggaatctgccagctggtgtggactgcaccaccagcggcgtcctggcctgtgagtgtcccctgggggagggtggtgctggggcagtgactgcacttctcttcaagatggaagaagccaacctggcgagccgagcgaaggcccaggagctgatccaggccaccaaccagatcctcagccacagaaagccaccctcaagtctggggatgaccccagctgcctgtgcccacctctttgggtctgccccctggcccctccagctacctgcttcctggcagcctccctctggggggctgcggttcgaccccccccacccccaccgggctggctgccacgtctgacaagagagagggcagcagcagctctgagggccgtggggataccagataagtatctgaacaagctgctcacgccaggagcggccggtggagtaggtgaagctggccatctcagccatactatcagaagaaggacatgcaccaaggaggagtacaaggacatcctgaggaaggccgtccacaagattcttgcctcagcaaaagttgggggaaattcaacccagtgaaggtgagccaacctggtgcgggcctacgtccagcgctaccgctacttcccgcaagcacggtcgcaaagcccaagggaccccccccagggcccccacggccgcccaaaggagccagggcccccagacaagggtggcccgggcctgcccctgccccctctctgagagccctggcaaagctcttcgcccctcacctctttgaaactctggaggtatttatggatccacactccccacctccctcccccgtcagtggggatgacttgggggaaggttgctgcagggaagaggagagccccctgccctgccctgccccgtgtccacctcccttgcccccaagcctgtccccagtgcccctcccttctgtttgtgcccctctccccaaatttcattaaagatttcatgaaacattaaaaaaaaaaaaaaaaa

SEQ ID NO: 21213 - DNA, 432 bp, Homo sapiens
  SIMILAR (310)..(393): 661254mologous to Rattus sordidus alpha-1 inhibitor III,accession number J03524,Smith-Waterman Score=111.
atactctaataccagatcactatatggataaacgggaaactgggacggcatccgggcaccaattcctaattccccccgcgccccacgcgtccgggctgctgacggaggaaatcaggtctcgggcaggggggttcctggaaataagtaacatggttcagtctttctttcttgaacactctcctccactaaggcctatgacaaattgatgatacggggaattccagcccctcaagggtcccatatacttgaacggcatgggggtgttttctgaagttgtcgctgtgatctaaaaccacatttggcttcccagggtaccagaaggagctgatgtacaaacacagcaatggctcatacagtgcctttggggagcgagatggaaatggaaacacatggtaatatcacccaattcccaatgagttctgtactccagag

SEQ ID NO: 21214 - DNA, 610 bp, Homo sapiens
  SIMILAR (76)..(537): 431254mologous to Cavia porcellus alpha- macroglobulin,accession number D84338,Smith-Waterman Score=388.
ggcaccggtttcggattcccgcctcgacgatttcgtccacaatccgggtgtcgggagttgtgaaataacatcagctttgaggagaagaaaaaggttctaattcagaggcaggggaacggcacctttgtacagactgacaaacctctctacaccccagggcagcaagtgtatttccgcattgtcaccatggatagcaacttcgttccagtgaatgacaagtactccatggtggaactacaggatccaaatagcaacaggattgcacagtggctggaagtggtacctgagcaaggcattgtagacctgtccttccaactggcaccagaggcaatgctgggcacctacactgtggcagtggctgagggcaagacctttggtactttcagtgtggaggaatatgtgctgccgaagtttaaggtggaagtggtggaacccaaggagttatcaacggtgcaggaatctttcttagtaaaaatttgttgtaggtacacctatggaaagcccatgctaggggcagtgcaggtatctgtgtgtcagaagggcaaatacttactggtatcgagaggtgggaacgggaaccagcttcctggaccaatggcagggaaccttc

SEQ ID NO: 21215 - DNA, 4771 bp, Homo sapiens
  SIMILAR (4127)..(4429): 461254mologous to Homo sapiens Human alpha-2- macroglobulin,accession number Y97157,Smith-Waterman Score=215.
atgtgggctcagctccttctaggaatgttggccctatcaccagccattgcagaagaacttccaaactacctggtgacattaccagcccggctaaatttcccctccgttcagaaggtttgtttggacctgagccctgggtacagtgatgttaaattcacggttactctggagaccaaggacaagacccagaagttgctagaatactctggactgaagaagaggcacttacattgtatctcctttcttgtaccacctcctgctggtggcacagaagaagtggccacaatccgggtgtcgggagttggaaataacatcagctttgaggagaagaaaaaggttctaattcagaggcaggggaacggcacctttgtacagactgacaaacctctctacaccccagggcagcaagtgtatttccgcattgtcaccatggatagcaacttcgttccagtgaatgacaagtactccatggtggaactacaggatccaaatagcaacaggattgcacagtggctggaagtggtacctgagcaaggcattgtagacctgtccttccaactggcaccagaggcaatgctgggcacctacactgtggcagtggctgagggcaagacctttggtactttcagtgtggaggaatatgtgctttctccatttctccttttactctcttcagtgctgccgaagtttaaggtggaagtggtggaacccaaggagttatcaacggtgcaggaatctttcttagtaaagggggggttgtaggtacacctatggaaagcccatgctaggggcagtgcaggtatctgtgtgtcagaaggcaaatacttactggtatcgagaggtggaacgggaacagcttcctgacaaatgcaggaacctctctggacagactgacaaaacaggatgtttctcagcacctgtggacatggccacctttgacctcattggatatgcgtacagccatcaaatcaatattgtggctactgttgtggaggaagggacaggtgtggaggccaatgccactcaaaatatctacatttctccacaaatgggatcaatgacctttgaagacaccagcaatttttaccatccaaatttccccttcagtgggaagataaaagataggggccatgatgactcctttctcaagaaccatttaatggttctggggatttaaggcacaaaatgaacctttcaccagacccctggttaactgaaaacaaatgcgctatgcttcctctacctttggagaaatccccggtggaaagggacagaacgttctctggagggaaagttttcaataggaaaacttattatataatccggaacaaagggccaccgttactaccaaaaaggcctaacctgggcctgcgaacccttttacaagaacaaacccggaactttcctttggcattcccccggcttaaacggccccttgaaatgtagccagccccacgaagagctggtggaattattacattcgacccgggccatgcaagcccctgacccaagagatcaaccttcttctactattttaaatagggaaaggaagtttggtgatggaggggcacaaacacctgacctctaagaagaaaggactgaaagcctccttctctctctcactgaccttcacttcgagactggcccctgatccttccctggtgatctatgccatttttcccagtggaggtgttgtagctgacaaaattcagttctcagtcgagatgtgctttgacaatcaggtttcccttggcttctccccctcccagcagcttccaggagcagaagtggagctgcagctgcaggcagctcccggatccctgtgtgcgctccgggcggtggatgagagtgtcttactgcttaggccagacagagagctgagcaaccgctctgtctatgggatgtttccattctggtatggtcactacccctatcaagtggctgagtatgatcagtgtccagtgtctggcccatgggactttcctcagcccctcattgacccaatgccccaagggcattcgagccagcgttccattatctggaggccctcgttctctgaaggcacggaccttttcagctttttccgggacgtgggcctgaaaatacatgtccaatgccaaaatcaagaagccagtagattgcagtcacagatctccagaatacagcactgctatgggtgcaggcggtggtcatccagaggcttttgagtcatcaactcctttacatcaagcagaggattctcaggtccgccagtacttcccagagacctggctctgggatctgtttcctattggtaactcggggaaggaggcggtccacgtcacagtttcctgacgccatcaccgagtggaaggcgatgagtttctgcacttcccagtcaagaggcttcgggctttcacccactgttggactaactgctttcaagccgttctttgttgacctgactcttctcttactcagtagtccgtggggaatcctttcgtcttactgccaccatcttcaattacctaaaggattgcatcagggttcagactgacctggctaaatcgcatgagtaccagctagaatcatgggcagattctcagacctccagttgtctctgtgctgatgaagcaaaaacccaccactggaacatcacagctgtcaaattgggtcacattaactttactattagtacaaagattccggacagcaatgaaccatgtgggggccagaaggggtttgttccccaaaagggccgaagtgacacgctcatcaagccagttctcgtcaaacctgagggagtcctggtggagaagacacacagctcattgctgtgcccaaaaggaaaggtggcatctgaatctgtctccctggagctcccagtggacattgttcctgactcgaccaaggcttatgttacggttctgggagacattatgggcacagctctgcagaacctggatggtctggtgcagatgcccagtggctgtggcgagcagaacatggtcttgtttgctcccatcatctatgtcttgcagtacctggagaaggcagggctgctgacggaggagatcaggtctcgggcagtgggtttcctggaaatagggtaccagaaggagctgatgtacaaacacagcaatggctcatacagtgcctttggggagcgagatggaaatggaaacacatggctgacagcgtttgtcacaaaatgctttggccaagctcagaaattcatcttcattgatcccaagaacatccaggatgctctcaagtggatggcaggaaaccagctccccagtggctgctatgccaacgtgggaaatctccttcacacagctatgaaaggtgggtgttgatgatgaggtctcctggactgcgtatgtcacagctgcattgctggagatgggaaaggatgtagatgacccaatggtgagtcagggtctatggtgtctcaagaattcggccacctccacgaccaacctctacacacaggccctgttggcttacattttctccctggctggggaaatggacatcagaaacattctccttaaacagttagatcaacaggctatcatctcaggagaatccatttactggagccagaaacctactccatcatcgaacgccagcccttggtctgagcctgcggctgtagatgtggaactcacagcatatgcattgttggcccagcttaccaagcccagcctgactcaaaaggagatagcgaaggccactagcatagtggcttggttggccaagcaacacaatgcatatgggggcttctcttctactcaggatactgtagttgctctccaagctcttgccaaatatgccactaccgcctacatgccatctgaggagatcaacctggttgtaaaatccactgagaatttccagcgcacattcaacatacagtcagttaacagattggtatttcagcaggataccctgcccaatgtccctggaatgtacacgttggaggcctcaggccagggctgtgtctatgtgcagacggtgttgagatacaatattctccctcccataaatatgaagacctttagtcttagtgtggaaagaggaaaagctagatgtgagcagccgacttcacctcgatccttgactctcactattcggagccaggtatgtggggagccgtagctcttgcaatatggctattgtggaagtgaagatgctatctgggttcagtcccatggagggcaccaatcagttacttctccagcaacccctggtgaagaaggttgaatttggaacttgacaccacttaaacatttactttggatgaaagctcattaagaacactcagacttacaccttcaccattagccaaagtgtgctggtcaccaacttgaaaccagcaaccatcaaggtctatgactactacctaccagatgaacaggcaacaattcagtattctgatccctgtgaatgaggataggagctggaaactcaattagtcctctgtgacatttactggagggtggaacattcttctgtcgcttgaagcagaactcattcaatcaaataatttaatttctctgactactatatgggtaacaaatgaatatgtctgaacctcagctataatactttctactacctttgcaaggagatgggataggaacaatcactcataggaggcgttgcatggacagggtcatagggggaagaaaggtggtttatctgttttatttagccatttcagggggctcttcacaagaggagacggtggtagagggtgaactagagaagataagaatgtcttcct

SEQ ID NO: 21216 - DNA, 522 bp, Homo sapiens
  SIMILAR (3)..(305): 951254mologous to Sus scrofa h2-calponin,accession number Z19539,Smith-Waterman Score=500.
cagagctccgcacctggatcgagggactcaccggcctctccgtcggccccgacttccagaagggcctgaaggatggaactatcttatgcacactcatgaacaagctacagccgggctccgtccccaagatcaaccgctccatgcagaactggcaccagctagaaaacctgtccaacttcatcaaggccatggtcagctacggcatgaaccctgtggacctgttcgaggccaacgacctgtttgagagtgggaacatgacgcaggtgcaggtgtctcttctcgccctggcggggaagatgggcaccaacaaatgcgccagccagtcaggcatgactgcctacggcacgagaaggcatctctatgaccccaagaaccatatcctgccccccatggaccactcgaccatcaagcctccagatgggcacgaacaagtgcgccagccaggtgggcatgacggctcccgggacccggcggcacatctatgataccaagctgggaaccgacgaagtgtgacaactccac

SEQ ID NO: 21217 - DNA, 1233 bp, Homo sapiens
  SIMILAR (421)..(1230): 761254mologous to Mus musculus h2-calponin,accession number Z19543,Smith-Waterman Score=1040.
atgcatcaagaagacctcagagcctggtatcttgatcttggacttcctagccaccagaatgaaaccactgatgtatcagtagtttatgaaaggtttagtttaactgatgccacctatccaaaacaggcaaagcagtgggacttccccttccttcgagtcagcacagctcagcccacagcctggaagtgccagcgggcaccttcaccctacacgcatcaggatacggccttgatcccttcccccacagcccggtggctcagtcctgagaaggaaccaaagcagggggaggtgggggaaaaatccctgctgcctgatcccacgctgccactcacagaccctcggttgactggcagcactgaacagaaaaaagacttagccgctggtcctgtcggatccgccctgcgacggcgccctccagccgtaagctccacgcagttcaacaagggcccctcctacaggctcttggcggatgtccagaacaggcttctgcccaaatatgactcccagaaggaggcagagctccgcagctggatcaagggattcactggcctctccatccgccccgacttccagaagggcctgaaggacgggattattttatgcacactcgtgaacaaactgcagccgggctcagtccccaagatcaacggcttccgtgtagaactggcactagctagaaaacctctccaacttcctcaaggcaatggtcagctacggcatgatcccgtggacctatttgaggccaacgacctgtttgagagtgggaacaatatgcaggtgcgggtgtctcttcttgccctggcagggaaggccaagactaaggggctgcggagcggggtggacatccgtgacaagtactcaaagaagcagaacttcgacgacaccaccatgaaggccagccagtgcgtcatccggctgcagattaccaacaaatgtgccagccagtcaggcatgaccgcatatggcacgaggaggcatctctacgaccccaagaaccgcatcctgccccccatggacaattcgaccatcagcctccagatgggtacaaacaagtacgccagccaggtgggcatgacggctcccgggacccagcggcacatctatgacaccaatttgggaatcgacaagtgtgagaactcctccatgtccctgaagatgggctacacgcaggttgccaatcacagcggccaggtctttggcctaggccggcaaatatacgaacccaagtactag

SEQ ID NO: 21218 - DNA, 389 bp, Homo sapiens
  SIMILAR (8)..(388): 1001254mologous to Homo sapiens neutral calponin,accession number D83735,Smith-Waterman Score=655.
tttcgtccagaaggaggcagagctccgcacctggatcgagggactcaccggcctctccatcggccccgacttccagaagggcctgaaggatggaactatcttatgcacactcatgaacaagctacagccgggctccgtccccaagatcaaccgctccatgcagaactggcaccagctagaaaacctgtccaacttcatcaaggccatggtcagctacggcatgaaccctgtggacctgttcgaggccaacgacctgtttgagagtgggaacatgacgcaagtgcaggtgtctcttctcgccctggcggggaaggccaagactaaggggctgcagagcggggtggacattggcgtcaagtactcggagaagcaggagcggaatttcgacg

SEQ ID NO: 21219 - DNA, 1116 bp, Homo sapiens
  SIMILAR (367)..(1113): 761254mologous to Mus musculus h2-calponin,accession number Z19543,Smith-Waterman Score=960.
atgcatcaagaagacctcagagcctggtatcttgatcttggacttcctagccaccagaatgctcagcctacagcctggaagtgccagcgggcaccttcaccctacacgcatcaggatatggccttgatcccttcccccacagcccggtggctcagtcctgagaaggaaccaaagcagggggaggtgggggaaaaatccctgctgcctgatcccacgctgccactcacagaccctcggttgactggcagcactgaacaggcccatgccgaaggcctggccgctctgatgagcgccctgcgtgtatcccatcttcagggacgtggaggagttgtcacacttgtcgattcccagcttggtgtcatagccgtaagctccacgcagttcaacaagggcccctcctacaggctcttggcggacgtccagaacaggcttctgcccaaatatgactcccagaaggaggcagagctccgcagctggatcaagggattcactggcctctccatccgccccgacttccagaagggcctgaaggacgggattattttatgcacactcgtgaacaaactgcagccgggctcagtccccaagatcaacggcttccgtgtagaactggcactagctagaaaacctctccaacttcctcaaggcaatggtcagctacggcatgatcccgtggacctatttgaggccaacaacctgtttgagagtgggaacaatatgcaggtgcgggtgtctcttctcgccctggcagggaaggccaagactaaggggctgcggagcggggtggacatccgtgacaagtactcagagaagcagaacttcgacgacaccaccatgaaggccagccagtgcgtcatccggctgcagattaccaacaaatgtgccagccagtcaggcatgaccgcatatggcacgaggaggcatctctacgaccccaagaaccgcatcctgccccccatggacaattcgaccatcagcctccagatgggtacaaacaagtgcgccagccaggtgggcatgacggctcccgggacccagcggcacatctatgacaccaagttgggaatcgacaagtgtgagaactcctccatgtccctgaagatgggctacacgtag

SEQ ID NO: 21220 - DNA, 1263 bp, Homo sapiens
  SIMILAR (397)..(1257): 751254mologous to Sus scrofa h2-calponin,accession number Z19539,Smith-Waterman Score=1074.
atgcatcaagaagacctcagagcctggtatcttgatcttggacttcctagccaccagaatgggatactcagttcaaatacatcaaaagaaaacattcttcaggtacagaaaccacttactgataggctgagaaaagggggaagaggagaggcaaccagaaaccttcagggacccgttccctccatatccaggtctcttctctccagcacagctcagcccacagcctggacatgccagcggggaccttcaccctacacgcatcaggatacggccttgatcccttccgccacagcccggtggctcagtcctgagaaggaagcaaagcaaggggagggcaaagatgttttactagtcctgttggtgtctcaaattggctctcgccgtaagctccacgcgttcaacaagggcccctcctacaggctcttggcggacgtccagaacaggcttctgttcaaatatgactcccagaaggaggcagagctccgcagctggatcaagggattcactggcctctccatccgccccgacttccagaagggcctgaaggacgggattattttatgcacactcgtgaacaaactgcagccgggctcagtccccaagatcaacggcttccgtgtagaactggcaccagctagaaaacctctccaacatcctcaaggcaatggtcagctacggcatgatcccgtggacctatttgaggccaacgacctgtttgagagtgggaacaatatgcaggtgcgggtgtctcttctcgccctggcagggaaggccaagactaaggggctgcagagcggggtggacatccgtgacaagtactcagagaagcagaacttcaacgacaccaccatgaaggccaggctgtgcgtcatccggctgcagattaccaacaaatgtgccagccagtcaggcatgaccgcatacgtcacgaggaggcatctctacgaccccaagaaccgcatcctgccccccatggacaactcgaccatcagcctccggatgggtacaaacaagtgcgccagccaggtgggcatgacggctcccgggaaccagtggcacatctatgacaccaagttgggaatcgacaagtgtgagaactcctccatgtccctgaagatgggctacacgcaggtcgccaatcacagcagacaggtctttggcctaggccggcaaatatatgaacccaagtaccagccgggtggcccagtggcccacggggctccctccgccggcaactgcccagggccaggggaggccccttag

SEQ ID NO: 21221 - DNA, 530 bp, Homo sapiens
  SIMILAR (24)..(521): 271254mologous to Hydra vulgaris myosin heavy chain,accession number L35595,Smith-Waterman Score=164.
tttcgtggtacctcagtgagctccagcagtcagaggctctgaaagaggaggcggagaagaggagggaagacctgaaactgaaagctcaagaatccattatgcagtggaagcttaagcataagaagttagaacgagcgttggagaaacaatctgaaactgttgatgaactgacaggcaagaataatcagattttaaaagaaaaggatgaattgaaaacccagctgtatgcagcattacaacaaatagagaatcttcgaaaggaattgaatgatgtcctaacaaagcgtgcccttcaggaggaggagcttcactccgaggaggagaaattacgtgatattaagtctcatcaagctgaccttgaattggaagttaagaattccctggataccatccatagactggagagcgaattgaaaaagcagagtaagatccaaagccagatgaaagttgagaaagctcacttggaggaagaaattgcagagctcaagaagagccaggcccaggacaaagctaaacttcttgagatgcaa

SEQ ID NO: 21222 - DNA, 854 bp, Homo sapiens
  SIMILAR (292)..(621): 321254mologous to Streptococcus pyogenes protective antigen,accession number AF086813,Smith-Waterman Score=118.
atgccagagagctggcttgctgcttttcctccatatggggatataaagaaagttgtcggtctgcagctcaaagaaggtctgcaccagaatctgaccatgcaagatagtattcagatctttgatttccagcttccaggactgttacggccaagttcggtactatggactctgaaaccctatcatacagcaggtttggccagtgatagggattcatacaaggggatcttggcttgcatgccctgcatgttcggctctaggagatccccattacgtgatattaagtctcatcaagctgaccttgaattggaagttaagaattccctggataccatccatagactggagagcgaattgaaaaagcagagtaagatccaaagccagatgaaagttgagaaagctcacttggaggaagaaattgcagagctcaagaagagccaggcccaggacaaagctaaacttcttgagatgcaagagtccatcaaggacctgagtgccatccgagcagatcttgctaataaattggctgaggaagagagagccaagaaaaccagtgcctaaggggcctttgggccttcattgcccaggcaaattccagggatgaaggaacagctacaatcatcacgcagttagagttggaacgagatgtgcaccagagggagctgaaagatctcacatcatcattgcagagtgtgaaaacaaaacacgaacagaatatccaggagcttatgaagcactttaagaaagaaaagagtgaggctgagaatcatatcaggactctgaaggtacctctgctaaattatcctgatgatactgaaggaatttttctggtggctcatgaagttaataaagcgtaa

SEQ ID NO: 21223 - DNA, 769 bp, Homo sapiens
  SIMILAR (1)..(651): 771254mologous to Homo sapiens myosin heavy chain (876 AA),accession number X03740,Smith-Waterman Score=785.
aacaccagcctgatcaacaccaagaagaagctggagacagacatttcccaaatccagggagagatggaagacatcatccaggaagcccgcaatgcagaagagaaggccaagaaggccatcactgatgctgccatgatggctgaggagctgaagaaggaacaggacaccagcgcccatctggagcggatgaagaagaacctggaacagacggtgaaggacctgcagcatcgtctggatgaggctgagcagctggccctgaagggtgggaagaagcagatccagaaactggaggccagggttcgtgaacttgaaggtgaagttgaaagtgaacagaagcgcaatgttgaagctgtcaagggtctacgcaaacatgagagaaaagtgaaggaactcacttaccaaactgaggaagaccgcaagaatattctcaggctcccaggaccttggtggacaaactgcaagcaaaggtgaaatcctacaagagacaagctgaagaagcggaggaacaatccaacgtcaacctctccaaattccgcaggatccagcacgagctggaggaggccgattttacgggctgacattgctgagtcccaggtcaacaagctgagggtgaagagcagggaggttcacacaaaaatcataagtgaagagtaatttatctaactgctgaaaggtgaccaaagaaatgcacaaaatgtgaaaatctttgtcactccattttgtacttatgacttttggagataaaaaatttatctgccaaaaaaaaaaa

SEQ ID NO: 21224 - DNA, 5874 bp, Homo sapiens
  SIMILAR (30)..(5639): 971254mologous to Homo sapiens myosin heavy chain IIb,accession number AF111783,Smith-Waterman Score=9059.
tttcgtgctaccatcaataacctgcagccatgagttccgactctgagatggccatttttggggaggctgctcctttcctccgaaagtctgaaagggagcgaattgaagcccagaacaagccttttgatgccaagacatcagtctttgtggtggaccctaaggagtcctttgtgaaagcaacagtgcagagcagggaaggggggaaggtgacagctaagaccgaagctggagctactgtaacagtgaaagatgaccaagtcttccccatgaaccctcccaaatatgacaagatcgaggacatggccatgatgactcatctacacgagcctgctgtgctgtacaacctcaaagagcgctacgcagcctggatgatctacacctactcaggcttgttctgtgtcactgtcaacccctacaagtggttgccagtgtataatgcagaggtggtgacagcctaccgaggcaaaaagcgccaggaggccccaccccacatcttctccatctctgacaatgcctatcagttcatgctgactgatcgggagaatcagtctatcttgattactggagaatctggtgcagggaagactgtgaacacgaagcgtgtcatccagtactttgcaacaattgcagttactggagagaagaaaaaagaggaacctgcctctggcaaaatgcaggggacccttgaagatcaaatcatcagtgctaaccccctactggaagccttcggcaatgccaagaccgtgaggaatgacaactcctctcgctttggtaaattcatcaggatccattttggtgccacaggcaaactggcttctgcagatattgaaacatatctgctagagaagtcccgagttacttttcagctaaaggctgaaagaagctaccacatattttatcaaatcctgtccaataagaaaccagagctcattgaaatgcttctgatcaccaccaacccatatgacttcgcatttgtcagccaaggggaaattactgtgcccagcattgatgaccaggaagagctgatggccacagatagtgctgtggacatcctgggtttcactgctgatgaaaaggtggccatttacaagctcactggagccgtgatgcattatgggaacatgaaattcaagcaaaagcaaagggaagagcaggcagagccagatggcacggaagttgctgacaaagctgcttatctgacaagtctgaactctgctgacctgctcaaatctctctgctatcccagagtcaaggtcggcaatgagttcgtaaccaaaggccagactgtgcagcaggtgtacaacgcagtgggtgctctggccaaagccatctacgagaagatgttcctgtggatggtcacccgcatcaaccagcagctggacaccaagcagcccaggcagtacttcatcggggtcttggacattgctggctttgagatctttgatttcaacagcctggagcagctgtgcatcaacttcaccaacgagaaactgcaacagtttttcaaccaccacatgttcgtgctggagcaggaagagtacaagaaggaaggcatcgagtgggagttcattgacttcgggatggacctggctgcctgcatcgagctcatcgagaagcctatgggcatcttctccatcctagaagaggagtgcatgttccccaaggcaacagacacctccttcaagaacaagctgtatgaacaacatcttggaaaatccaacaacttccagaagcccaagcctgccaaaggcaagcctgaggctcacttctcactggtgcactatgccggcaccgtggactacaacatcgccggctggctggacaaaaacaaggaccccctgaatgagactgtggtggggctgtaccagaagtctgcaatgaagactctggctttcctcttctctggggcacaaactgctgaagcagagggtggtggtggaaagaaaggtggcaaaaagaagggttcttctttccagacagtgtcagctcttttcagggagaatttgaataagctgatgaccaacttgaggagcactcacccccactttgtgcggtgcatcatccccaatgaaactaaaactcctggtgccatggagcatgagcttgtcctgcatcagctgaggtgtaacggtgtgctggaaggcatccgcatctgcaggaaaggcttcccaagcagaatcctttatgcagacttcaaacagagatacaaggttctaaatgcgagtgctatcccagagggtcagttcattgacagcaagaaggcttctgagaaacttctagggtctattgaaattgaccacacccagtacaaattcggtcataccaaggttttcttcaaagctggcctgctgggaactctagaagaaatgcgagatgaaaagctagctcaactcatcacgcgcactcaagccatatgcagggggttcctgatgagagtggagttcagaaagatgatggagaggagagagtccatcttctgcattcagtacaacatccgtgctttcatgaatgtgaagcactggccctggatgaagctgtatttcaagatcaagcccctcctcaagagtgcagagacagagaaggagatggccaacatgaaggaagaatttgagaaaaccaaagaagagctggctaagacagaggcaaaaaggaaagaactagaagaaaagatggtgacgctaatgcaagagaaaaatgacttacaactccaagttcaagctgaagcagatgccttggctgatgcagaggaaagatgtgatcagttgattaaaaccaaaatccaacttgaggccaaaatcaaagaggtaactgaaagagctgaggatgaggaagagatcaatgctgagctgacagccaagaagaggaaactggaggatgaatgttcagagctcaagaaagacattgatgaccttgagctgacactggccaaggttgagaaggagaaacatgccacagagaacaaggtgaaaaacctcacagaagagatggcaggtctggatgaaaccattgctaagctgaccaaggagaagaaggctctccaggaggcccaccagcagaccctggatgacctgcagatggaggaggacaaagtcaacaccctgaccaaagctaaaaccaagctagaacagcaagtggacgatcttgaaggatctctggaacaagaaaagaaactttgcatggacttagaaagagccaagagaaaactggagggtgacctaaaattggcccaagaatccacaatggatacagaaaatgacaaacagcaacttaatgagaaactcaaaaagaaagagtttgaaatgagcaatctgcaaggcaagattgaagatgaacaagcccttgcaatgcagctacaaaagaagatcaaagaattacaggcccgcattgaggagctggaggaggaaatcgaggcagagcgggcctcccgggccaaagcagaaaagcagcgctctgacctctcccgggagctggaggagatcagtgagaggctggaagaagccggtggggccacttcagcccagattgagttgaacaagaagcgggaggctgagttccagaaaatgcgcagggacctggaagagtccaccctgcagcacgaagccacggcagctgctcttcggaagaagcacgcagatagtgtggctgagcttgggaagcagatcgacagccttcagcgggtcaagcagaagctggagaaggaaaagagtgagctgaagatggagatcaatgaccttgctagtaacatggagactgtctccaaagccaaggcaaactttgagaaaatgtgccgcaccctagaggaccagcttagtgaaataaaaacaaaggaagaagagcagcaacgcttaataaatgagttgtcagcccagaaggcacgtttacacacagaatcaggtgagttttcacgacagctagatgaaaaagatgctatggtttctcagctatcccgaggcaaacaagcatttacacaacagattgaagaattaaagaggcagctagaagaggagactaaggccaagagcactctggcccatgccctgcagtcagcccgccatgactgtgacctgctgcgggaacagtatgaggaggagcaggaagccaaggctgagctgcagaggggaatgtccaaggccaacagtgaggttgcccagtggaggaccaagtacgagacggacgccatccagcgcacagaggagctggaggaggccaagaagaagctagcccagcgtctgcaggatgcagaagaacatgtagaagctgtgaattccaaatgtgcttctcttgaaaagacaaagcagaggctacagaatgaagtagaggacctcatgattgatgtggaacgatctaatgctgcctgcatagctctcgataagaagcaaagaaactttgacaaggttctggcagaatggaaacagaagtatgaggaaactcaggctgaacttgaggcctcccagaaggagtcgcgttctctcagcactgagctgttcaaggtgaagaatgcctacgaggaatccctggatcatcttgaaactctaaagcgagagaataagaacttacaacaggagatttctgacctgacagagcaaattgcagagggtggaaagcatatccatgaactggagaaagtaaagaaacaacttgatcatgagaagagtgaactacagacttccctagaggaagcagaggcatctcttgagcatgaagaaggcaaaattcttcgcattcaacttgagctaaatcaggtgaaatctgagattgaccgaaaaattgctgaaaaagatgaagaactcgatcagctaaagaggaaccatctcagagttgtggagtcaatgcagagtacactggatgctgagatcaggagcagaaatgatgctctgaggatcaagaagaagatggagggagatcttaatgaaatggaaatccagctgaaccatgccaaccgccaggctgctgaggcactaaggaatcttagaaacacacaaggaatactgaaggacactcagctacatttggatgatgccatcagaggccaagatgaccttaaggaacaattggcaatggttgagcgcagagctaacctgatgcaggctgaagttgaagagctcagggcatccctggaacggactgagagaggcaggaaaatggcagagcaagagcttctggatgccagtgaacgtgtgcaacttctgcacactcagaacaccagcctgatcaacaccaagaagaagctggaaacagacatttcccaaatccagggagagatggaggacatcgtccaggaagcccgcaatgcagaggagaaggccaagaaggccatcactgatgctgccatgatggctgaggagctgaagaaggaacaggacaccagcgcccaaccatggagcggatgaagaagaacatggagcagacccgtgaaggatctgcagctccgtctggatgaggctgagcagctggccctgaagggtgggaagaagcagatccagaaacttggaggccagggtacgggaagcttggaaggaagaaggtttgagaattgagccaaaagcgtaatgcttaaggcttgtccaaaggtcttgcgccaacattgagaggccgagttgaaggaactcactttaccagaccggaaagaagattagaaagaatattctcaggctgcaggacttggtggacaaattgcaaaccaaagtcaaagcttacaagagacaagctgaagaggctgaggaacaatccaatgtcaaccttgccaagttccgcaagctccagcacgagctggaggaggccaaggaacgggctgacattgctgagtcccaagtcaacaagctgagagtgaagagtcgggaggttcacacaaaagtcataagtgaagagtaattc

SEQ ID NO: 21225 - DNA, 399 bp, Homo sapiens
  SIMILAR (273)..(398): 971254mologous to Homo sapiens F25451_2,accession number AC002115,Smith-Waterman Score=202.
taccctcgagcttggcacgaggagtacacagcagaaccagcggcggcggctaagcaaagactgtagtttcggcgacagcgacgacggctcctgtgatccgcccaattatcgcggccaacacataccagcaggtccagcaaactctggaggcccgagcagctgctgcagccacagtagttcctcccatggtgggtggccctccttttgtaggccctgttggctttggccctggtgatcggagtcacctggacagcccagaggctcgagaagccatgttcctgcggcgggcagctgtggccccccagagggcccctatcctgcgtccagccttcgtcccccacgtgctacagagagcagattccgctctcttctctgcagcagccggcccccgccctatgg

SEQ ID NO: 21226 - DNA, 1751 bp, Homo sapiens
  SIMILAR (537)..(1583): 701254mologous to Homo sapiens F25451_2,accession number AC002115,Smith-Waterman Score=1081.
tttcgtatcctcgggagcccacccggacgaagggggagagtagacagcagaaccagcggcggcggctaagcagagactgtagtagcggcgacagcgacgacggcagcgatggctggggcggggccagccccgggactcccgggtgcaggaggacccgtggtcccgggtcccggcgctgcgcatcccgggcaaaagcggcgaggaacgcttgaaggaaatggaggcggagatggccctgtttgagcaggaagttctgggggctccagtacctggaatcccaactgctgtgcctgcggtgcccactgtccccacggtccccacagtagaagcgatgcaggtcccagcggctcctgtgatccgcccaattatcgcgaccaacacataccaagcaggtccagcagactctggaaggccgagcaagctgctggaagccacagtaagttcctcccatggggggtggccctccttttgtaggccctgttggctttggccctggtgatcggagtcacctggacagcccagaggctcgagaagccatgttcctgcggcgggcagctgtggccccccagagggcccctatcctgcgtccagccttcgtcccccacgtgctacagagagcagattccgctctctcctctgcagcagccggcccccgccctatggccctacggccccctcaccaggccctcgtgggcccccctctgcctgggccccctggaccacccatgatgctgccaccaatggctcgggctccagggcccccgctgggctccatggctgcactgaggccccctctggaagagccagcagcaccccgagagctgggcctaggcctggggttgggcctgaaagagaaagaagaggcagtggtggcggcggcggctgggctggaggaggctagcgcggctgtggccgtgggggcaggaggtgccccagctggccttgcagtcattgggcccaagcctgccgctggccctggccatgccattgcccgagcctgagcccctgcccctcccgttggaggtcgtccggggcctcctgccccccgctgcgcattactgaactcctgtccctgcgtcctcggccccggccccctcgggccagagccacccccaggcctcatggctcttgaggtcccagagcccctgggtgaagacaagaagaaggggaagccaggagaaattgaacaccggtgcattgccacagcggccagggagcaagctgggaggaccccccaacctgctggaagtgggatgcagaatgactttcccgggtcttctgtggggatctggggcaatgaggtgaacgattgacatcttgggcacgcggcctcagcccgcttccccatcccttccttaaaggccaaggtgatccggtgacaaagcgcacaggcaagacccaagggctacgggcttcgtcagcttcaaggaccccaggcgactacgtgcgcccccatgcgtgagatgaatgggaagtatgtggtgctcgcgccccccatcaagcttcgcaagagcatgtggaaggaccggaatctggacgtgttccgcaagaagcagaaggaaaagaagaagctgggcctgagatagggtctgtggccaggcacccgcttcccacctggccgggcgctggctcctcccccagttctctttggaaaacccccagctgtccacccatccccatgccccaaaaccagtttcaataaaaaatacgttcatttccaaaaaaaaaaaaaaaaaaaaagggcggccgct

SEQ ID NO: 21227 - DNA, 1122 bp, Homo sapiens
  SIMILAR (40)..(612): 791254mologous to Homo sapiens p40,accession number U93570,Smith-Waterman Score=755.
atgcccgggggaaaaattggatttttaattgagaagggagcaacggaacaaagctcgacagggaatgactttgacgagctgagagaagaaggcggcagaagatcaaattactctgagctacaggaggacattcaaaccaaaggcaaagaagttgaaaactttgaaaaaaatttagaagaatgtgtaactactatttccaatacagagaagtgcgtaaaggagctgatggagctgaaaaccaaggctcgagaactacgtgaagaatgcagaagcttcaggagccaatgcaatcaactggaagaaagggtaccagcgatgaaagatgaaatgaatgaaatgaagcgagaagggaagtttagagaaaaaagaataaaaagaaacgagcaaagcctccaagaaatatgggactatgtgaaaagaccaaatctacctctgattggtgtacctgaaagcgaccgggagaatggaaccaaattggaaaacactctgcgggatattatccaggagaacttccccagtctaacaaggcgagggcaaccattcagaattatggagaatacagagaacgcccccaaagataaccttctcgagaaagaacaacttccaagacacaataattgtttagaattgacccaagaagaaccagcgtgggatctgcagtttgatctcttggaccttaatgatatctcctctgccttaaaacaccacgaggagaaaaacttgatttccctcctccctcagcgcggggccgattacttaagtttccggagccactttcagaagaactttgtctgtgtggagaactgctctttgcaagagcgaacagtgacagggactgttaaagtcaaaaatgtgagttttgagaagaaagttcagatccgtatcactttcgattcttggaaaaactacactgacgtagactgtgtctatatgaaaaatgtgtatggtggcacagatagtgataccttctcatttgccattggcttaccccctgtcattccaactgagcagaaaattgagttctgcatttcttaccatgctaatggggcaaatctttttgggacaacaaatgatggggcaggaaatataaaaattgtgtcattgttcaatgggaagccctga

SEQ ID NO: 21228 - DNA, 1593 bp, Homo sapiens
  SIMILAR (466)..(867): 591254mologous to Homo sapiens serine-threonine specific protein phosphatase,accession number Y18207,Smith-Waterman Score= 330.
  misc_feature (1)...(1593): n = a,t,c or g
cacgaggccgcgggggcaaggcctggagctgtggttcgaatttgtgcaggcagcgggtgctggcttttagggtccgccgcctctctgcctaatgagctgcaccagaatgatccaggttttagatccacgtcctttgacaagttcggtcatgcccgtggatgtggccatgaggctttgcttggcacattcaccacctgtgaagagtttcctgggcccgtacgatgaatttcaacgacgacattttgtgaataaattaaagcccctgaaatcatgtctcaatataaaacacaaagccaaatcacagaatgactggaagtgctcacacaaccaagccaagaagcgcgttgttgtttgctgactccaagggcctctctctcactgcgatccatgtcttctccgacctaccagaacaaccagcgtgggatctgcagtttgatctcttggaccttaatgatatctcctctggccttaaaacaccacggaggagaaaaacttgattttagatttcccttcagccttcaaccgattacttaatgttttcggagccactttcagaaggaactttgtctgtctgggagaactgctcgttgcaaggagcgaacagtgacagggactgtttaaagtcaaaaatgtggagttttgaggaagaaagtttcagatccgttatcacttttcggattcttgggaaaaacttacacttgacgtagactgtgtctatatggaaaatgtgtatgggtgggcacaggtagtgataccttctcatttgccattgacttaccccctgtcattccaactgagcagaaaattgagttctgcatttcttaccatgctaatgggcaagtcttttgggacaacaatgatggtcaagaattattggattgttcatgttcaatggaagcctgatggggtgcagacacagatggcaccccagggactgtgcattccaccagacgtctcctaagacagagttagagtcaacaatctttggcagtccgaggctggctagtgggctcttcccagagtggcagagctgggggagaatggagaacttgcgcctcttatgcgatgaattaagcaacaatgtaactggtcttgacttgtcatattcccccatgcaatcctaggtctgtattgctcaattttaggaagcctttgctactccatcagtaggtttagatttgagcttttgagacctgggctatggaaaagaaagacacttgagaatttagtgctggggcctgtacagatgatgctacccaatctggctttgaaggatcaagtaacaggttgaaaactatttttataaaggtcctactttcttcagttcccttcttccttccctctcaatccactagcttttcatgttggggcaaggaaaagttggagggaagggatgggctgatgggtgatgggaaagctgtgttaaatggtatgagggaatgtgtgaaaagtatacacaaaggggctctgaagctcaagtcagagggagttgggaggtctgatccattgttggtgggaaaaccgtaagggttatttttgtggttttttaaggttgggttttaccattcctttccccggggggaatttnttttc

SEQ ID NO: 21229 - DNA, 273 bp, Homo sapiens
  SIMILAR (3)..(113): 701254mologous to Homo sapiens putative,accession number L19267,Smith-Waterman Score=139.
gccggggtggcagtggcggcagtggcagtggtggggagaagcccagcggccctgttccccgcagccgcctggacaccacaagagccccaggtctgcagtgtgcccctcagttgagtgggcagggccgggggtggtccagccctcgcccggcccccaccccagctgcccttgctattgtctgtgcttttgaagagtgttaaattatggaagcccctcaggttcctccctgtcccgcaggacctcttatttatactaaagttccctgttttctca

SEQ ID NO: 21230 - DNA, 1062 bp, Homo sapiens
  SIMILAR (597)..(851): 511254mologous to Homo sapiens putative,accession number L19267,Smith-Waterman Score=173.
atgagcgtccggaagctgatgggagctctcaagggaatggaggccctggcaggggaatctgcaggtgtgattcaggacatctctaaaggatgtgtggcatacaccattaactccttttctcccacccctcaagccattgacctcaacaagccaattgacaagcggatctacaagggcacccacccacctgccacgatttcaaccagttcactgctgccaccgagaccatctgctgctgtttgggagcttctctccgaggaggacctgggcctggtgtggacctgctgtgtgagcggggccatgtccaacggccttcttggggactttgcggttgatcgacaagaccaaggtgacatatctgagtggctgcctgagtcggagagcctgttcctggcatcacacgccagtggcacctgtacctgtacaacgtcagccacccctgcgcctcggccccgccccatacagcctgctgaagcagggcgagggcttctctgtctatgctgccaagacaaggcaccccgcaacccgctggccaagtgggcggtgggagcggcgggaccggggggcaagaaggagcacaagcgctaccacagcctgggcaacatcagccggggtggagtggcggcagtggcagtggtggggagaagcccagcggccctgttcccccagccgcctggaccccgccaaggtgctgggcactgcgctgtgcccgcgctccacgaggtgcccctgctggagccccttgtgtgcaagaagatcgcccagagcggctcacagtcctcctgttcctggaggactgcatcatcactgcctccaggagggcctcatctgcacctgggcccggccgggcaaggcgggctctcctcccaaccaggcaactccccgagtggcacagtgatcaacgtattaacaagactaaccatgatggtggactgctccagtccccccacctgcacaaaatttgggggccccccagatggcccggacacgggcgatgtaatagcccttgtggcctcagccttgtccccacccactgccaagtacaatgacctcttcctctga

SEQ ID NO: 21231 - DNA, 677 bp, Homo sapiens
  SIMILAR (45)..(377): 711254mologous to Homo sapiens putative,accession number L19267,Smith-Waterman Score=375.
caacgtcccatttgacctaccaagcccattggacaacgggtctcaaaggggcaccagccccacccgccacggatttcacccagttccattgctgcccacgagaccatttcgcggctggtgggcttctcagcgggtcaagtgccagtacctggatctcatcaaaaagggaccccagcaagctgttcaatgaggagcggttgatcgacaagaccaaggtgacatatctgaagtggctgcctgagtcggagagcctgttcctggcatcacacgccagtggccacctgtacctgtacaacgtcagccacccctgcgcctcggccccgccccagtacagcctgctgaagcagggcgagggcttctctgtctatgctgccaagtacaatgacctcttcctctgaaacatcagtgttaccctcatccctgtccccagcatgtgactggtcactcctggggagacactccccgcccctgccacaagagccccaggtctgcagtgtgcccctcagttgagtgggcagggccgggggtggtccagccctcgcccggcccccaccccagctgcccttgctattgtctgtgcttttgaagagtgttaaattatggaagcccctcaggttcctccctgtcccgcaggacctcttatttatactaaagttccctgttttctcagcgaaaaa

SEQ ID NO: 21232 - DNA, 6303 bp, Homo sapiens
  SIMILAR (3137)..(5767): 791254mologous to Homo sapiens Human myotonic dystrophy gene protein,accession number R41001,Smith-Waterman Score=3811.
atgagcgtccggaagctgatgggagctctcaagggaatggaggccctggcaggggaatctgcaggtgtgattcaggacatctctaaaggatgtgtggcatacaccattaactccttttctcccacccctcaagtccattgacctcaacaagccaattgacaagcggatctacaagggcacccagcccacctgccacgatttcaaccagttcactgctgccaccgagaccatctcgctgctgtttgggagcttctctccgaggaggacctgggcctggtgtggacctgctgtgtgagcggggccatgtccaacggccttcttggggactttgcggttgatcgacaagaccaaggtgacatatctgaagtggctgcctgagtcggagagcctgttcctggcatcacacgccagtggccacctgtacctgtacaacgtcagccacccctgcgcctcggccccgccccagtacagcctgctgaagcaggtcatggggcttctctttctatgctgccaagagcaaggcaccccgcaacccgctggccaagtgggcggtgggtgaggggcccctcaacgagttcgccttctcgcccgatggccggcacctggcctgtgtgagccaggatggctgcctgcgcgtcttccacttcgactccatgctcctgcgtgggctcatgaagagctactttgggggcctgctgtgtgtgtgctggagccctgacggccgctacgtggtgacgggtggcgaagatgacctggtcaccgtgtggtccttcaccgagggccgcgtggtggctcgaggccatggccacaagtcctgggtcaacgctgtggcctttgactctctctacaccacaagggcagaggaggcggcgacagcagccggtgctgatggggagcggagcggcgaagaggaggaggaggagcccgaggctgcgggcacaggctcggccgggggcgccccactctctccactgcccaaggctggctccattacttaccgctttggctcggcgggccaggacacgcagttctgcctgtgggacctcactgaagacgtgctctacccgcacccgcccctggcccgcacccgcaccctccctggcacacctggcaccacgccaccggccgccagcagctcgaggggtggcgagcctggcccaggccccctgcctcgctcgctgtcccgctccaacagtctcccgcacccagctggcgggggcaaggcgggcggcccgggtgtggcggcagagcctggcacaccattcagcattggccgcttcgccacgctcacactgcaggagcggcgggaccggggggcagagaaggagcacaagcgctaccacagcctgggcaacatcagccggggtggcagtggcggcagtggcagtggtggggagaagcccagcggccctgttccccgcagccgcctggaccccgccaaggtgctgggcactgcgctgtgcccgcgcatccacgaggtgcccctgctggagccccttgtgtgcaagaagatcgcccaggagcggctcacagtcctcctgttcctggaggactgcatcatcactgcctgccaggagggcctcatctgcacctggccgcggccgggcaaggcgttcacagacgaggagaccgaggcccagacaggggaaggaagttggcccaggtcacccagcaagtcagtggtagagggcatctcctcccaaccaggcaactccccgagtggcacagtggtgtgaagccatggatatcgggcccccccaaccccatgcccccagcctcctagccataaccctccctgctgacctcacagatcaacgtattaacaagactaacccatgatggatggactgctccaagtccccccacctgcacaaaatttgggggccccccaagactgggcccggacaccggaaattgtaatagcccttgtgggcctcagccgttgtcccccacccacttgccaagtacaatggacctcttcctcttgaaacatcagtgtttaccctcatcccttgtccccaagcatgttgactgggtcactcctgggggagacactccccggcccctggccacaagagccccaggtctgcagtgtgcccctcagttgagtgggcagggccgcgggtggtccagccctcgcccggcccccaccccaggttgcccttgctattgtctgtggttttggaagagtgttaaaattatgggaaggcccttcaggttcctccctgttcccgcaggacctgtttattttatactaaagttccctgtttttttcaggggggtttgttccccttcggaggagatggatgtaggaggacctgtgtgtgtaatttgttgggtttaagggagttccgtttttccccagaggaggagtgcaggcctgctcccagcccagcgcctcccaccccttttcatagcaggaaaagccggagcccagggagggaacggacctgcgagtcacacaactggtgacccacaccaagcggctgggagcagggaccctcttggggagaagagcatccttgcccgcagccagggcccctcatcaaagtcctcggtgttttttaaattatcagaactgcccaggaccacgttttccaaggccctgcccagctgggactcctcggtccttgcctcctagtttctcaggcctggccctctcaaggcccaggcacccccaggccggtttgaggcccccgacttcccactttggagaaccggtccaccctggaaaagaagagctcagattcctctgtgctctcggagccgcagggaggtgtgtcttcccgcgccaccctccaccccccgaaatgtttctgtttctaatcccagcctgggcaggaatgtggctccccggccaggggccaaggagctattttggggtctcgtttgcccagggagggcttggctccaccactttcctcccccagcctttgggcagcaggtcacccctgttcaggctctgagggtgccccctcctggtcctgtcctcaccaccccttccccacctcctgggaaaaaaaaaaaaaaaaaaaaaaaaaagctggtataaagcagagagcctgagggctaaatttaactgtccgagtcggaatccatctctgagtcacccaagaagctgccctggcctcccgtccccttcccaggcctcaacccctttctcccacccagccccaacccccagccctcaccccctagcccccagttctggagcttgtcgggagcaagggggtggttgctactgggtcactcagcctcaattggccctgttcagcaatgggcaggttcttcttgaaattcatcacacctgtggcttcctctgtgctctacctttttattggggtgacagtgtgacagctgagattctccatgcattccccctactctagcactgaagggttctgaagggccctggaaggagggagcttggggggctggcttgtgaggggttaaggctgggaggcgggaggggggctggaccaaggggtggggagaaggggaggaggcctcggccggccgcagagagaagtggccagagaggcccaggggacagccagggacaggcagacatgcagccagggctccagggcctggacaggggctgccaggccctgtgacaggaggaccccgagcccccggcccggggaggggccatggtgctgcctgtccaacatgtcagccgaggtgcggctgaggcggctccagcagctggtgttggacccgggcttcctggggctggagcccctgctcgaccttctcctgggcgtccaccaggagctgggcgcctccgaactggcccaggacaagtacgtggccgacttcttgcagtgggcggagcccatcgtggtgaggcttaaggaggtccgactgcagagggacgacttcgagattctgaaggtgatcggacgcggggcgttcagcgaggtagcggtagtgaagatgaagcagacgggccaggtgtatgccatgaagatcatgaacaagtgggacatgctgaagaggggcgaggtgtcgtgcttccgtgaggagagggacgtgttggtgaatggggaccggcggtggatcacgcagctgcacttcgccttccaggatgagaactacctgtacctggtcatggagtattacgtgggcggggacctgctgacactgctgagcaagtttggggagcggattccggccgagatggcgcgcttctacctggcggagattgtcatggccatagactcggtgcaccggcttggctacgtgcacagggacatcaaacccgacaacatcctgctggaccgctgtggccacatccgcctggccgacttcggctcttgcctcaagctgcgggcagatggaacggtgcggtcgctggtggctgtgggcaccccagactacctgtcccccgagatcctgcaggctgtgggcggtgggcctgggacaggcagctacgggcccgagtgtgactggtgggcgctgggtgtattcgcctatgaaatgttctatgggcagacgcccttctacgcggattccacggcggagacctatggcaagatcgtccactacaaggagcacctctctctgccgctggtggacgaaggggtccctgaggaggctcgagacttcattcagcggttgctgtgtcccccggagacacggctgggccggggtggagcaggcgacttccggacacatcccttcttctttggcctcgactgggatggtctccgggacagcgtgcccccctttacaccggatttcgaaggtgccaccgacacatgcaacttcgacttggtggaggacgggctcactgccatggtgagcgggggcggggagacactgtcggacattcgggaaggtgcgccgctaggggtccacctgccttttgtgggctactcctactcctgcatggccctcagggacagtgaggtcccaggccccacacccatggaagtggaggccgagcagctgcttgagccacacgtgcaagcgcccagcctggagccctcggtgtccccacaggatgaaacagctgaagtggcagttccagcggctgtccctgcggcagaggctgaggccgaggtgacgctgcgggagctccaggaagccctggaggaggaggtgctcacccggcagagcctgagccgggagatggaggccatccgcacggacaaccagaacttcgccagtcaactacgcgaggcagaggctcggaaccgggacctagaggcacacgtccggcagttgcaggagcggatggagttgctgcaggcagagggagccacagctgtcacgggggtccccagtccccgggccacggatccaccttcccatctagatggccccccggccgtggctgtgggccagtgcccgctggtggggccaggccccatgcaccgccgccacctgctgctccctgccagggtccctaggcctggcctatcggaggcgctttccctgctcctgttcgccgttgttctgtctcgtgccgccgccctgggctgcattgggttggtggcccacgccggccaactcaccgcagtctggcgccgcccaggagccgcccgcgctccctgaaccctagaactgtcttcgactccggggccccgttggaagactgagtgcccggggcacggcacagaagccgcgcccaccgcctgccagttcacaaccgctccgagcgtgggtctccgcccagctccagtcctgtgtaccgggcccgccccctagcggccggggagggaggggccgggtccgcggccggcgaacggggctcgaagggtccttgtagccgggaatgctgctgctgctgctgctgctgctgctgctgctggggggatcacagaccatttctttctttcggccaggctgaggccctgacgtggatgggcaaactgcaggcctgggaaggcagcaagccgggccgtccgtgttccatcctccacgcacccccacctatcgttggttcgcaaagtgcaaagctttcttgtgcatgacgccctgctctggggagcgtctggcgcgatctctgcctgcttactcgggaaatttgcttttgccaaacccgctttttcggggatcccgcgcccccctcctcacttgcgctgctctcggagccccagccggctccgcccgcttcggcggtttggatatttattgacctcgtcctccgactcgctgacaggctacaggacccccaacaaccccaatccacgttttggatgcactgagaccccgacattcctcggtatttattgtctgtccccacctaggacccccacccccgaccctcgcgaataaaaggccctccatctgccc

SEQ ID NO: 21233 - DNA, 614 bp, Homo sapiens
  SIMILAR (190)..(465): 981254mologous to Homo sapiens similar to mouse Int- 6,accession number U62962,Smith-Waterman Score=465.
cttaatgcagaatgggatgcagccatggaggaccttacacggttaaaagagaccatagataataattctgtgagttctccacttcagtctcttcagcagagaacatggctcattcactggtctctgtttgttttcttcaatcaccccaaaggtcgcgataatattattgacctcttcctttatcagccacacatgttggcagataaattgaacatgactccagaagaagctgaaaggtggattgtaaatttgattagaaatgcaagactggatgccaagattgattctaaattaggtcatgtggttatgggtaacaatgcagtctcaccctatcagcaagtgattgaaaagaccaaaagcctttcctttagaagccagatgttggccatgaatattgagaagaaacttaatcagaatagcaggtcagaggctcctaactgggcaactcaagattctggcttctactgaagaaccataaagaaaagatgaaaaaaaaaactatcaaagaaagatgaaataataaaactattatataaagggtgacttacattttggaaacaacatattacgtataaattttgaagaattggaataaaattgattcattttaaaaa

SEQ ID NO: 21234 - DNA, 909 bp, Homo sapiens; identical to SEQ ID NO: 524
  SIMILAR (1)..(633): 871254mologous to Homo sapiens similar to mouse Int- 6,accession number U62962,Smith-Waterman Score=958.

SEQ ID NO: 21235 - DNA, 3733 bp, Homo sapiens
  SIMILAR (2631)..(2861): 871254mologous to Homo sapiens similar to mouse Int- 6,accession number U62962,Smith-Waterman Score=349.
gatattggaaagaaaggcccacccagaaggtgataccaagagccacggaaaatcatggactcaaaagctacctccagaaaacaaaactgagtattgatgaagcagctttcctactcccagacaccaatctcaagtctgagcttctggaacttctgacccactggcttcaagttggggttcccatgaccccctctttgggttcgattaatttgctgggatggctcacagaactcagggaaacacatacgtacatttgctggtttattgtaaaggagactacaagggatacagatgaagagatgtgtaggacagagccagctctggcctgctctatctctcattactgtgatgacggctgtatccagatgctaaacactccagagacactccaatgcagtgctaaagactcaaaacacttcatccccaaagaatgtagcattccaggagaaaacaggcctccttctgacactggtaaaactgtgaagtttctttccctgaatattttcaatctgcagttggctgaatccacagatgcagaacagagagctaactgcattttgcggtgcttcttaactgagacgacgctaaactaccagaagatccttagtgtccgtccaggaaccaaactcgcgaccgcctcgcacgtgtcaggcctaggactacagacaccacctttcggccttgctcagcacctcatccgcccccacgccttccttgcgcccaaagaccccctcacctcctttacagagagaaattcaagaagcggaaagactagatgccgatccaaaaagtgcgcgatgcgagtagtcaagtcgtactccgccatcttgccaaagaaaagggagtctgtgctcactaaaactttattggtagcgccgacaaacgaacagacagatcctgtactgcgcatgtgctgtggtaaaactggcctaaagaaaggggcggggtttaccctggagagcagaggacaacgacgcatgcgcgcgggttgtcccaccctttgcgttagggcgcgagtgacggaaacagatccctctatttgtagtgaggtcacgttttcctggatgatcttgatgcttatggatgtttgtcagtgtctgggcattgaagagtttggcatttattgtagtcttcgcagtctggacctgtttgtgcccatctttcttgagaaggttttccaggtatttgaagggacttcaagcccaataatgctgtggtttttgcagactcatagaggtaccaccttggtggccttggataagatccagaagaattctctggattatcaggcagaaactcttgttcttttcccttactttctcccaaacaaatggaatctctctgtctttgctgagccacctggaactggggatgtggtgatgcaagcacccctgtggccaccaccactgggactgtactgggccctggaacactatgatcagcatgtggcaaagccagccaggcaaaggagcctctccctctggccaccaccaccaacagcccacaaggggtttttgcaaggccactgccaatgttcactcaaaacccaaaggctcttcagtcagcttatggcgaatgctgccaggcctgagactcaggcttcagggcagtggactcctttcagcccagggcagatccagaaatgctctccaagatccagaaatgctctcgggaccccaagagcctgcttgttgctctaccctactgtggccgagctgggtagcactgagttcaatgtaaagccttccatttgctgcactctcccttaccaaggtgcacagtcccccagtctccacaccctacaactgcgggggaatggggttggggggcagcatcagcaattcaagactgtctctctggatcccttcaatgcctcttttagagacatgaagctaaaactaggtaaatcagggatttcttcttggtttgtatccattgctgctgctgtgggggatgaaggtttggttcccaggtcaatggagttatattcccagaaagcttatgactgcctctgctgtgtcatgcaggttgtcaggaaagtaggggaaagctggcagtcacagacctcgcccagctcccacacaacccaaaaggccaatcttacttccaccctgccccccacaacagcactgagtgtgtttccagggagtggataccaggagtggggcactgctgtaaagatacttgaaagtatggaagcgactttggagcaggacaacaagacgaggttggaacagtttggagggttcagaagaaaagaagacagaaagatgtgggaaagtttggaacttcctagagacttgtggaatgattttgaccaaaatgctgatagtgatatggacaatgaagtccaggctgaggtggtctcagatggagataaggaacttgttagaaactggagtaaagtgtggaagggaaatgtggggctggagccccgatacagagtccccactggggcactgactagcagagttgtgagaagaggtccaccatccttcagacctcagaaatgtagatccactgacagcttgcaccatgaacctggaaaagctgcaggcactcaatgccagcctgtgaaggatctgcccaaggctgtgggagcccactccttgcatcagccagccctggattttaggcaggaatatttaaatcccttttccaaaaatgcaaaattccagtacgaatgtgggaattattcaggagcagcagaaaatttttatttttttaaagggttggttccagcaacagatagaaatgctttaagttcactctggggaaagctggcctctgaaatcttaatgcagaattgggatgcagccatggaagaccttacacggttaaaagagaccatagataataatgatgaaaaacctagcttcacacatgtagttggaaaagaaagatatcttaatgcaattcagacaatgtgtccacaattctttcgctattttgacttacagcagttcataacaaacaagggattgttcgaaaacgtcggccaagggtctaaaagatctagttaagttttatcaaacaggagttcttacacatataaaagacccaatttacagaatttgttggaatgtttaatatgttaactttgactttgatgggggctccagaaaaagctgaggggaatgtgaaccagggcttgtgaaatgacttcttccttggtggctagtcctgagggtttcaatgaaaaatgccccgtctcttcatatttgagacttttctgtcgcatcccacccagtgtatcagccattaaccatgttggcagattaaattgaacatgactccagaagaagctgaaagggtggattggtaaaatttgattaggaaatggcaagcctggatgccccaagatttgattcctaaattagggtcatgtgggttatggggtaacaatgcagttctcaccccttcagcaagtgattgaaaagacccaaaagcctttcctttagaagcccagatgttggcccatgaataatgagaaagaacctaaatcagaatagcaggtcagaaggctccctaacgggggcaactccaagattctgggcttctactgaagaaccataaagaaaagatgaaaaaaaaaaactatcaaagaaagatgaaataatagatctattatataaagcggtcactcacacttttggaaacacacatattacggtataaattttgaagaattggaataaaattgattcattttaaaaaaaaaaaaaaaaaggtt

SEQ ID NO: 21236 - DNA, 2267 bp, Homo sapiens
  SIMILAR (99)..(2069): 811254mologous to Homo sapiens Human secreted protein clone bf169_13 protein sequence SEQ ID NO:94,accession number Y53044,Smith-Waterman Score=2597.
  misc_feature (1)...(2267): n = a,t,c or g
gcggcctttcatttccgcttccggtgcgggccgcgcgcgagcgcagcggtgggaggcggcgaccagccggttgaggccccaggcttggcctcaccacaatgtggcacgaggctcggaagcttgggcggaggcttcggggcttgttgttcgactccaggaagagggcggagcggagacgggagtattatgaaaagatcaagaaggacccagcccagttcctgcaggtacatggccgagcttgcaaggtgcacctnggattctgcagtcgccctggccgctgagagccctgttaatatgatgccctggcagggggacaccaacaacatgattgaccgattcgatgtccgtgcccacctgggaccacatccccgactacaccccccctcttgctcaccaccatttttcccagaaccaggagtcggacgaacgggaagtgtaactacgagcgctacagaggcctggtgcagaacgactttgccggcatctcagaggagcagtgcctgtaccagatctacattgatgagttgtacggaggcctccagagacccagcgaagatgagaagaagaagctggcagagaagaaggcttccatcggttatacctacgaggacagcacggtggccgaggtagagaaggcggcagaaaagccagaggaggaggagtcagcggccgaggaggagagcaactcggacgaagatgaggtcatccccgacatcgacgtggaggtggacgtggatgaattgaaccaggagcaggtggcagatctcaacaaacaggccacgacttatggcatggccgacggtgacttcgtcaggatgctccggaaagacaaggaggaggcagaggccatcaagcatgccaaggctcttgaggaggagaaggccatgtactcgggacgccgctctcgacgccagcggagagagtttcgggagaagcggctgaggggtcgcaagatcagcccacccagctatgcccgccgagacagccccacctatgacccctataagcggtcaccctcggagtccagctcagagtcccgctcccgctcccgctccccgaccccgggccgcgaggagaagatcacgttcatcaccagttttgggggcagcgatgaggaggcagccgcagccgctgctgccgcagcagcatcaggagtcaccacagggaagccccccgcacctccccagcctggcggccccgccccgggacgtaatgccagcgcccgccgccgctcctcctcctcctcctcctcctcttctgcctcgaggacctccagctcccgctccagctctcgctccagctcccgctctcgccgtggtgggggctactaccgttccggccgccacgcccgctcccggtcccgctcctggtcccgctcccgctcccgctcccggcgctattcccggtcccgtagccgtggccggcggcactcaggtgggggctcccgagacggacaccggtactcccgctcgcccgcccggcgtggtggttacgggccccggcgcagaagcaggagccgctcccactcaggggaccgctacaggcggggcggccggggcctcaggcaccacagcagtagccgcagccgcagcagctggtccctcagcccgtcccgcagtcgcagcctgactcgcagccgcagccatagccccagccccagccagagccgcagccgcagccgcagccgcagccagagcccctcgccatcacccgcaagagagaagctgaccaggccggccgcgtcccctgctgtgggcgagaagctgaaaaagaccgaacctgccggctggtaaagagacaggagctgccaaagtcacccaagctgacgcctcaggagaagctgaaactgaggatgcagaagccgctgaaacaggcagttcaaggcggataagaaggcggcacaaagaaaaagatgatcccaggcagagcatgagcggcaggagcggaaagacgaggcctcgagccatggcccgcaagatcggcatgaaggagcgggaacgcccgagagaaggagagagaagagtgggaacgccagtacagccggcagagccgctcaccccttcccccgattacagtcgagaatacagctcttctcgaaggcgctcaaggtcccgatcccgaagcccccattaccgacattaggcagaagagtggggggtggggaggacaagggggtgggtaaggggctcaagctgtgatgctgctggttttatctctagtgaaataaagtcaaaagttatttaattcccgtcaaaaaaaaaaaaaaa

SEQ ID NO: 21237 - DNA, 612 bp, Homo sapiens
  SIMILAR (34)..(201): 1001254mologous to Homo sapiens Human tumour suppressor (kismet) protein,accession number Y23330,Smith-Waterman Score=297.
atgactatcatcatcatggggtttatctctgcagaattggtggatccaaatatttttatccagcccatcacagaagaacgtgcttctaggactttgtatcgcattgaacttctaaggaaagtacgggaacaggcccttcgacatccacagttgtttgaacgcttgaagctttgccatccaaatccagatttaccagtctggctcctagatgctaaaggtattattctagaggagatgaaagttaaaagtgaaaaccttaaagaggagcctcagtcttctgaagaagaatctatgtcttctgtggaaaccaggacactaataaaatctgagcctgcctggagcagggtgtgctttgtggctgtgtcactgccaattattaatgtgaacatcatcatcggtggctgttgctgctgcctggtgttgcaagctaagctcagccgggctttgcacggctccgcaatgatctctataattaacttagatgattcactgctgtacacccattgtgctcttttcaaggccggcgacatccatttacatgaggagctaaaaacaagtattgccttctcgtggaggagtttccaagtgctcacccacccgttctctccctaa

SEQ ID NO: 21238 - DNA, 1230 bp, Homo sapiens
  SIMILAR (247)..(1227): 901254mologous to Homo sapiens KIAA0308,accession number AB002306,Smith-Waterman Score=1430.
atggggagaaaccagagcagaaaagctgaaaattctaaaaatcagagtgcctcttttcctccaaacgaatgcagctcctcaccagaaatggaacaaagctggacagagaatgactttgacgagttgagagaagaagccttcagacgattgcttgtgtcgggagttgcggacagccatagccccgcgggcctggcgctgacggaccctggagcggtgtctgacagaggtcggcaaagccaccggctggccccagtgcatcctcacatatgcgcgcagatccctggctccggtgctactggggtcgcacctggacgcgggttgcagacccctggcaaattgtggagctgggggaagggatttcttccagaaagcatgtatgaacgtattctcactggtcccgttgtgagagaggaagtaagcaggcgggggagacggcctaaaagtggaattgcaaaggccacagcagcagcagctgctgcatctgccaccagtgtttcaggcaatcctttgttagccaatggactacttccaggtgtggatctcacaactcttcaggccttacaacaaaacctacaaaacttgcagtcactgcaagtaactgctgggttgatgggaatgcctaccggccttccttctggaggagaagctaaaaacatggctgctatgttccccatgctgctgtcaggaatggctggattaccaaatctgttgggcatgggaggactcctgacaaagcctacggaatctgggacagaagacaaaaagggaagtgactctaaggagtcagaaggaaaaacagaaaggacagagagccaaagttcagagaatggtggagaaaactctgtgtcaagttctccttccacatcctctactgctgcattaaatacagctgcagctgccaacccattagctcttaacccactattactatctaatatactttatccagggatgcttctcactccaggccttaatcttcatattccaactttgtcccagtccaatacttttgatgtacaaaacaaaaacagtgacttaggctcgtctaagtctgtagaagtaaaagaagaagattccagaattaaagatcaggaagacaaaggaggaactgaaccaagtcctctcaatgaaaacagcacagatgagggttcagagaaagctgatgcttcatctggatctgatagtacatcgtcgtcatctgaggattcagattcttgtaatgaaaactga

SEQ ID NO: 21239 - DNA, 1629 bp, Homo sapiens
  SIMILAR (163)..(1626): 991254mologous to Homo sapiens Human tumour suppressor (kismet) protein,accession number Y23330,Smith-Waterman Score=2473.
atggctgaaaaaaaggcaataatggaacttaaactcagtcttctgactccgagctccaggattttgccacaaatcagcagctgccagggaccaaaaccagaggcagagaatcaagggaagctgatgcttgagaaagatgccccatatttatcctgtggcagtgaaaaattggtggatccaaatatttttatccagcccatcacagaagaacgtgcttctaggactttgtatcgcattgaacttctaaggaaagtacgggaacaggcccttcgacatccacagttgtttgaacgcttgaagctttgccatccaaatccagatttaccagtctggtgggaatgtggccctcatgatagggatttgcttattggtgctgccaaacacggggtgagccgaacagactatcacattcttcgtgatcctgaactctcatttatggcagctcagaggaactacagtcaaagtaagatggctcattcaaggacttctaccccacttctacagcaatatcaagtagcactttctgcttctcctcttacctctctacctaggctcctagatgctaaaggtattattctagaggagatgaaagttaaaagtgaaaaccttaaagaggagcctcagtcttctgaagaagaatctatgtcttctgtggaaaccaggacactaataaaatctgagcctgtaagtccaaagaatggtgttttaccacaggctactggagaccagaaatctggtggaaaatgtgaaacagacagacgcatggttgcagccagaacagaacccctaactccaaacccagcttctaagaaaccaagagtccacaaaaggggatcagaatctagttctgattctgactcagattctgagagatcatcttgttcttccagatcatcttcttcctcatcatcctcttcttgctcccactctcgatcaggctctagttcttcttcatcttcatcttgttcttcagcatcttcttcatcctcttcctccacctcttcctcctcctcctcctcttcatcttcatcagaagaaagtgacagtgatgaagaagaagcccaaaaacgagaaagtactactcacatgaaagcctatgatgaagaaagcgtcgcgtcactgagcactacccaggatgagactcaggatagttttcagatgaacaatgggacaccagagtctgcttatatcttacaaggtggatatatgctggcagcctcgtattggccaaaggatcgtgtgatgatcaataggttggacagtatttgtcaaacagttctgaaaggaaagtggccttcagctagaagaagttatgatgctaacacagtggcttctttctataccacaaaactgctggacagccctggagcagctacagaatacagcgagcccagtgtacccactcccccaggtgccggtgttaaagaagaacatgatcagtcaacacagatgtcaaaggtgaagaagcatgtacgagaaaaggagtttacagtgaaaatcaaagacgaaggtggtttgaagttgacatttcagaagcaagggcttgctcagaaaagaccatttgatggtgaagacggtgctctggggcagcagcagtacctcactcggcttcgagagcttcaaaattaa

SEQ ID NO: 21240 - DNA, 7032 bp, Homo sapiens
  SIMILAR (1367)..(3319): 891254mologous to Homo sapiens Human tumour suppressor (kismet) protein,accession number Y23330,Smith-Waterman Score=2968.
  misc_feature (1)...(7032): n = a,t,c or g
aaaaaggcagaattagatatagaggccatcaggggctgggacagttcggttattgacactccaagaattaggaagcagacatgaccttttagtgccacacaagatgaattggctgaattatctgaagctgaaagtgaaggagatgaaaagcccaaactccggagaccctgtgaccgttccaatggctatggaagaactgaatgctttaaagttgagaaaaacctgctagtttatgggtggggccgatggagagagattctatctcatggccgtttcaaaaggcagctaaatgaacacgatgtatagataatatgccgagctctcttagcatattgcctttgttactaccgaggagatgagaagatctaagggttcatatggaatcgcattactccaactgaagatggacagacacgagagctacagaatcatctaggcctatcagctcctgtacccaggggtcgaaaagggaagaaagtaaaaactcaaacaagctcatttgatatacaaaaagcagaatggcttcgaaaatataatcccgagcagctccttcaagatgaaggctacaaaaaacatataaaacaccactgtaataaggttttgcttcgtgtgagaatgctgtattatctaaagcaagaagttattggaaatgagtgtcagaaagtatttgatggagttgatgcaagtgacattgatgtttgggtaccagaaccagaccactcagaagttcctgctgagtggtgggattttgatgctgataagtcactccttattggagtttttaaacatggatatgaaaaatataacactattcgagcagacccagcattatgcttcttggaaagagtgggaaaacctgatgagaaagcagttgctgctgaacagagagcgaatgattatatggatggggatgtggaagatccagaatacaaacctgccccagccatctttaaagatgatatagaggatgatgtttcctcaccaggagatcttgttatagcagatggagatggtcaactgatggagggtgataaagtatattggcctactcaatcagctttaaccacacgtttgaggcgtctcatcactgcataccagcgtactaataaaaacagacaaattcaacagatacaaccgactttctcggtgcctaccagtgtaatgcagcctatttatgaggaagccactcttaatcctaaaatggcagccaagatagaaagacagcaaagatggacaagaagagaagaagctgacttttatagggttgtatctacatttggagtggtttttgaccctgacagaggccaatttgattggacaaaatttagagctatggctaggctacataagaaaactgatgatatgtttggaaaaatatttgtacgcattcatgtccatgtgtcggagggtttgtccgtcttccttccaaaagaagaattggtggatccaaatatttttatccagcccatcacagaagaacggtgcttctaggactttggtatcgcattgaacttctaaggaaagtacggggnacaggcccttcgacatccacagttgtttgaacgcttgaagctttgccatccaaatcgcagatttaccagtctggtgggaatgtggccctcatgatagggatttgcttattggtgctgccaaacacggggtgagccgaacagactatcacattcttcgtgatcctgaactctcatttatggcagctcagaggaactacagtcaaagtaagatggctcattcaaggacttctaccccacttctacagcaatatcaagtagcactttctgcttctcctcttacctctctacctaggctcctagatgctaaaggtattattctagaggagatgaaagttaaaagtgaaaaccttaaagaggagcctcagtcttctgaagaagaatctatgtcttctgtggaaaccaggacactgataaaatctgagcctgtaagtccaaagaatggtgttttaccacaggctactggagaccagaaatctggtggaaaatgtgaaacagacagacgcatggttgcagccagaacagaacccctaactccaaacccagcttctaagaaaccaagagtccacaaaaggggatcagaatctagttctgattctgactcagattctgagagatcatcttgttcttccagatcatcttcttcctcatcatcctcttcttgctcccactctcgatcaggctctagttcttcttcatcttcatcttgttcttcagcatcttcttcatcctcttcctccacctcttcctcctcctcctcctcttcatcttcatcagaagaaagtgacagtgatgaagaagaagcccaaaaacgagaaagtactactcacatgaaagcctatgatgaagaaagcgtcgcgtcactgagcactacccaggatgagactcaggatagttttcagatgaacaatgggacaccagagtctgcttatatcttacaaggtggatatatgctggcagcctcgtattggccaaaggatcgtgtgatgatcaataggttggacagtatttgtcaaacagttctgaaaggaaagtggccttcagctagaagaagttatgatgctaacacagtggcttctttctataccacaaaactgctggacagccctggagcagctacagaatacagcgagcccagtgtacccactcccccaggtgccggtgttaaagaagaacatgatcagtcaacacagatgtcaaaggaaggtggtttgaagttgacatttcagaagcaagggcttgctcagaaaagaccatttgatggtgaagacggtgctctggggcagcagcagtacctcactcggcttcgagagcttcaaagtgcatcagagaccagcctcgtcaatttcccaaaatccataccagtatcaggtacttccattcaaccaacccttggtgccaatggtgtgatattagacaaccagcctatagtcaaaaaaaggcgaggaaggaggaagaatgtagaaggtgttgacatcttcttttttaacagaaataaaccacctaatcatgtttctttaggcttaacctcctcacagatttccacagggataaatccagcactatcctatactcaacctcaaggaattcctgatacagaaagtccagttccagttattaatcttaaagatggaacgagacttgcaggagatgatgcaccaaagagaaaggatttggaaaaatggcttaaggagcacccgggttatgtggaagatttgggagcttttattcctagaatgcagcttcatgagggaagacccaaacaaaaaagacaccgttgcagaaaaccccaattaaactagatgtggatagtctcactggagaagaacgtgttcaactgattaacagaagaaatgctagaaaggttggaggtgcatttgctccccctttgaaagatttatgtagattcctaaaagaaaattcagaatatggagtagctcctgaatggggagatgttgttaagcaatctggatttcttccagaaagcatgtatgaacgtattctcactggtcccgttgtgagagaggaagtaagcaggcgggggagacggcctaaaagtggaattgcaaaggccacagcagcagcagctgctgcatctgccaccagtgtttcaggcaatccttttgtttaagccaatggacctacttccaggtgtggatctcacaactcttcaggccttacaacaaaacctacaaaacttgcagtcactgcaagtaactgctgggttgatgggaatgcctaccgggccttccttcctggaggaagaagctaaaaacatggctgctatgttccccatgctgctgtcaggaatggctggattaccaaatctgttgggcatgggaggactcctgacaaagcctacggaatctgggacagaagacaaaaagggaagtgactctaaggagtcagaaggaaaaacagaaaggacagagagccaaagttcagagaatggtggagaaaactctgtgtcaagttctccttccgcatcctctacttgctgcatttaaatacagctgcagctgccaacccattagctcttaacccactattactatctaatatactttatccagggatgcttctcactccagggccttaatcttcaaatccccaatttgtgcccaagtcaaatacttctgatggacaaaacaaaccacgagtgactaggcctcgtctaagtctgtagaagtaaaagaagaagattccagaattaaggatcaggaagacaaaggaggaactgacccaagtcctctcaatgaaaacagcacagatgagggttcagagaaagctgatgcttcatctggatctgatagtacatcgtcgtcatctgaggattcagattctagtaatgaagactgattcccagactctgcacttaaaatatgaactgattttggattttttctttaataattaattgtaaataccccagtgttgagtgcatcaataacttactggaccgaacattttcagttaatttggtttaggagtgcaaactgctttcagagactttttgcatgtaatatttcttaagattcataagtttctgaactcgtatgtactatcaaatacataaaggtgtaaaattacaacaaaaggcattataattttgttgggggttaattttatgaaaattatgctcaataagagttgtatatttaatatatttgcagtgaacacagaatactttatgcatattactgatttaatttgaatatagttttacagcctccttgacacctataatttacagatcaaaactcagcaataatttgggcagctaatgaatgtcatgaaagctgtagaatctacatcaccatccattgctttaattacatgaaaatgctctagtgttgtgatgcactgctgatgtttccaattcaggtacaagtatgttttaaagaagaaataagtttcccaatcagccaatttaactggctacctgttacctcagctgagttagtttaggaagtttacattcgtttctaattctatacttgttttcaggggttttttttaaacacatcctatatatcatgtcaatctgggcaagaaatatggacttgctttttgctgagcttaattccagatatcaggtaaaattaagtcataaaataatcatgtgtgcatgtgactttggcaccctatagacatacttagttttaacttttcaaaggttggcctcctattaaaaataatcatgcctcacatgagtaatgtctgtttccagggttcagaaaaggcatactcatgaaatgccactgaaaagaactttcaacacagcatacttcatgtaaaagaaaccgcctgtacgctttctttgagtacaatactatttgcgttttatgacatggaaatattccagaattaacagataatagtggtaaacgaatatgccgatagtctaaactcattttgagtttctaggtgtaagcagactaaatgttgcccagaatcagtgttgggttatcagtttatattaaatatactgagttgcccgttttgaaaatgcactttgaataatctcaaaaagatgtacaagttatacctgtaaaccacaaaagtgaagcctgaggcttctgttcaatttcatagactcctttaccatgtaaaatttgtctgatatttgatttgtgatacaatttctcctgctaaagctgctattattctgacaaggtaggaggtccaggttcacctttatatatatttaaaacaattagtactggattgggacataaaaatattgacattctaaggagagatatatgttagcatttttctggtactcaaataagttagtagtaaagtctgcaagggcataaatttagggggaaaaagtgtcccagttctctcctacagaaaaaatactttcagtatgttttgataaaactgttgctttgtcatgagttagtcaattgtatcaggttttccaagacctttaccagtaaattatgtttctgtatgtaaaataaccccttattagagagacagtgttatatgtatttaccaaaattatataagttcccattggggattgtattgattttgtattttccccaaaatagtactttgaattgataggtcctttatggcaatgtcttaggcaataggtctctataatggcccatccaggggagaagtgggtagtaattcttcatcatgaaaatgatatattacatatttagtatcttccctttgcagtattgcacttttgtttaactagaatacacctatgagatagccaaagtttcaaacacagttatcttagtttaccggtggagtatttcaacaccaaccacatttcccttcctccctctaattctacccacatgatctttattccttcctttcgccaattaaaaaaaaaaaaaaaaggaaaaaaaatctgtagatcttgtcactaaaatctaatttatatcaaatttatgagagaaagtattttcctaattatggtcaaataaatttggttaacatcctagtgattctctttctatataataaggcaattacagttttcaaagcattaagtctaacataactttaaacattctcttaggtttcaagacacttctatttaatattcattggggaaaagttgtccagctatcagctaagaaaacacatgcaaatatggttgtgtaaagttaagggttataaggaaaaaaaaatccagtagaattaccataatccccaaagtgccagtggaaagaatacccccaagtatgtgttgggtagttacctaaaagaattaatagctgttattgcccttgtatttatagccccttgtttccaggttttatgattcaagtcttagtcccaatctttcttttggacatttgcaatatttaccagttgtgttttgtgtagtctgaatttgctttctgtagttgagcaaacgtcttaaaaagtcatttgtaatttattaaattactttctatgatgttctatagagcaaatggaagtttaattattttttattaaacatattctttgactacccatg

SEQ ID NO: 21241 - DNA, 530 bp, Homo sapiens
  SIMILAR (1)..(276): 731254mologous to Homo sapiens HSPC272,accession number AF161390,Smith-Waterman Score=319.
  misc_feature (1)...(530): n = a,t,c or g
gctgaggctgatgccattatacaaatggtacgtgagggtcaaagggcgcggagacagcaacaagcagcaacgtcggagtctagccagtcagaggcgtctgtccggagggaggaatcacccatggatgtggaccagccatctcccagtgctcaagatactcaatccattgcctccgatggaaccccacagggggnagaaggaaaaggaagaaagaccacctgagttacccctgctcagcgagcagctgagntttggacgagctgtgggacatgcttggggagtgtctaaaggaactagaggaatcccatgaccagcatgcggtgctagagactcaccgcactgtgttaaaccagatcctacggcagtccacgacccaccttgctgatgggccttttgctgtcctggtagactacattcgtgtcctcgactttgatgtcaagcgcaaatatttccgccaagagctggagcgtttagatgaggggctccggaaagaagacatggctgtgcatgtccgtcgtgaccatgtgttt

SEQ ID NO: 21242 - DNA, 397 bp, Homo sapiens
  SIMILAR (7)..(216): 981254mologous to Rattus sp. DNA binding protein,accession number U08214,Smith-Waterman Score=363.
  misc_feature (1)...(397): n = a,t,c or g
tacttccaggtacccctgcaaggctttgctgccctcgaaggcatgaatggcattcagaagtttcagatccatcgagatgacaggtccacagatcgcctgccttcagctcacacatgttttaatcagctggatctgcctgcctatgagagctttgagaagctccgccacatgctactgttggctatccaggagtgctctgaaggctttgggctggcctaataaggccctgcccaactccgtggggttttttttaccattgttggacctggggaggggggagttaaaaaaagaaccagaaagaaattgtcaaaaaccaataaatgaaatccaccaactcnnnnnnnnnnnnnnnnnnnnnnnnnnnnnnnnnannnnnggggggccccccccctccccc

SEQ ID NO: 21243 - DNA, 599 bp, Homo sapiens
  SIMILAR (444)..(599): 751254mologous to Homo sapiens HSPC272,accession number AF161390,Smith-Waterman Score=191.
acacacacacacacacacacacacacaacagaagaagacttgaagtctatacacaggaggctagttctgactggtcacaggtctggattgtagactgtaggaaatgtaagcatccaaggagctgttgggaaaagcttacaaaacacagtggagaaaagcagaagagttgggaaaggcatccttttgtcctggatagctacagttttccccacccaaatatgggaagcttctttgcaagctcaatgtatgagaagtggaagggccaacctctagcctgtctctaaggaaagcagagttgcacccttatgtgatttttgtctcccttttatccagtcggagtctagccagtcagaggcgtctgtccggagggaggaatcacccatggatgtggaccagccatctcccagtgctcaagatactcaatccattgcctccgacggaaccccacagggggagaaggaaaaggaagaaagaccacctgagttaccccgctcagcgagcagctgagtttggacgagctgtgggacatgcttggggagtgtctaaaggaactagaggaatcccatgaccagcatgcggtgctagtgctacagcctgct

SEQ ID NO: 21244 - DNA, 731 bp, Homo sapiens
  SIMILAR (2)..(553): 1001254mologous to Homo sapiens HSPC272,accession number AF161390,Smith-Waterman Score=916.
cacgcccacaccccctactgcacccacccctgtcacttctgctccagccctggtcgctgccacggctatttccaccattgtcgtagctgcttcgaccacagtgactacccccacgactgctaccactactgtttcaatttctcccactactaagggcagcaaatctccagcgaaggtgagtgatgggggcagcagcagtacagactttaagatggtgtcctctggcctcactgaaaaccagctacagctctctgtggaggtgttgacatcccactcttgttctgaggaaggcttagaggatgcagccaacgtactactgcagctctcccggggggactctgggacccgggacactgttctcaagctgctactgaatggagcccgccatctgggttataccctttgtaaacaaataggtaccctgctggccgagctgcgggaatacaacctcgagcagcagcggcgagcccaatgtgaaaccctctctcctgatggcctgcctgaggagcagccacagaccaccaagctgaagggcaaaatgcagagcaggttcctccggtttaggctcagctagcagcatccaggcagctgttcggcagctggaggctgaggctgatgccattatacaaatgtcggagtctagccagtcagaggcgtctgtccggagggaggaatcacccatggatgtggaccagccatctcccagtgctcaagatactcaatccattgcc

SEQ ID NO: 21245 - DNA, 603 bp, Homo sapiens
  SIMILAR (602)..(507): 1001254mologous to Homo sapiens KIAA1578 protein,accession number AB046798,Smith-Waterman Score=173.
cataacattaatatttttgaagagtctaggccagttgtcttatatagaacatctcacaatttgtatttatctaattgtttcctcataattaaatacaggtcaaacatttcttggcaggaatacacagatgacgtctatttcgcactgtgttacacgagacatacatccatttaacccttaattatcacttgatttgtaaaccattaactatatgtaaagcctactgccccaccaaaatgagctctttgaagtgaaggactagaatgaatgagtcctcagtgtctctggcagggattacaacagggcaaggcccagaagaagctactggaagtacctaataaattgacccaaacaatcaattagccagcaaatgtcctaatacttgcctaaggaggctcttcaagttacagacctcctcataaataaatttctggatttataccaggccacacacttaatatccaagggccaggagcaagcggaacttaccagttcctgagcctcgaaggggcaggaagggcgatgcggatacagcagttggccacttctgtgaatatgtctggattgcggcatgcggctggcccaaggacacgaaggatgtag

SEQ ID NO: 21246 - DNA, 2003 bp, Homo sapiens
  SIMILAR (639)..(1673): 751254mologous to Homo sapiens HSPC272,accession number AF161390,Smith-Waterman Score=1253.
atgccacagcttccaggtatcagtctccctgaaggtgtggacccctcttttctggctgccctgcctgatgacatccgtcgggaagttctacagaaccagctaggcattcgtccaccaacccggactgccccctccacaaatagctcagcgcctgcagtggtggggaatcctggtgtgactgaagtgagccctgagtttctggctgccctgcctccagccattcaggaggaagtactggcacagcagacagctgagcagcagcgaccagaactagcacagaatgccagctcagacacccttatggaccctgtgaccttaatccagactctgccctcagacctgcgccgtagtgtcctagaggatatggaggacagtgtgttagctgtgatgccacctgacattgcagctgaggctcaagccctgagacgagagcaagaagcccggcagcgacagctcatgcatgagcgtctgtttgggcacagtagcacctccgcactctctgctattctccgaagcccggctttcaccagtcgcttaagtggcaaccgtggggtccagtatactcgccttgctgtgcagagaggtggcaccttccagatggggggtagcagcagccattaacaggccttctggcagtaaatgtagatactctcctccgcctccgaggacggctccttctggaccacgaagccctttcttgtctcttggtcctactttttgtggatgagccaaagctcaatactagccgtctacaccgagtactgagaaatctctgctaccatgcccagacccgccactgggtcatccgcagtctgctctccatcttgcagcgcagcagtgagagtgagctatgcattgaaacacccaaactcactacaagtgaggaaaagggcaaaaagtcgagcaagagctgtgggtcaagtagccatgagaaccgtcccctggacctgctacacaagatggagtcaaagagctccaaccagctttcctggcttcttcagtatccatggatgcagccctagggttcagggactaatatatttcagatccagcgttcaggggggcgtaaacataccgagaagcatgcaagcggtggctccaccgtccacatccatccccaagctgctcctgttgtctgcagacacgttttggatacactcattcaattggccaaggtatttcccagccacttcacacagcagcggaccaaagaaacaaactgtgagagtgatcgggaaaggggcaataaggcctgtagcccatgctcctcacagtcctccagcagtggcatttgcacagacttctgggacttattggtaaaactggacaacatgaatgtcagccggaaaggcaagaactccgtgaagtcagtgccagtgagcgctggcgaaaacaaggtgtcagaagcacaggctaattctggcagcggtgcttcctccaccaccactgccacctcaaccacatctaccaccaccaccactgccgcctccaccacgcccacaccccctactgcacccacccctgtcacttctgctccagccctggttgctgccacggctatttccaccattgtcgtagctgcttcgaccacagtgactacccccacgactgctaccactactgtttcaatttctcccactactaagggcagcaaatctccagcgaaggtgagtgatgggggcagcagcagtacagactttaagatggtgtcctctggcctcactgaaaaccagctacagctctctgtagaggtgttgacatcccactcttgttctgaggaaggcttagaggatgcagccaacgtactactgcagctatcccgtcgacctgcacgcatgctagctatgcactggccgtcgttgtacaacgtcgagactgagaaaaccctggcgttacccaacttaatcgccttgcagacatccccgttcgccagcggcgtaatagcgaagagctcgaccgatcgccttatcaatcagtgcgcacctgtatggcgatggcgctga

SEQ ID NO: 21247 - DNA, 6959 bp, Homo sapiens
  SIMILAR (1047)..(3878): 891254mologous to Homo sapiens HSPC272,accession number AF161390,Smith-Waterman Score=4170.
atggtgtccccagaacccaagacaggacactcaataaggaattggctggatgagttaaaagatctcccaatattacatgcatactccaatctcccctcatccccggctgttgatctcgccatccatagctccaaggaaggtagaatggactggactgaaggtcaagtcacaggaccggttgttcgctcagcagctacaagtggagctggtagcactacctctggtgttgtgtctggcagcctcggctctcgggagatcaactacatccttcgtgtccttgggccagccgcatgccgcaatccagacatattcacagaagtggccaactgctgtatccgcatcgcccttcctgcccctcgaggctcaggaactggcaacggctcttctaggattcctcgggaatctgctccagaaatggccacggcagaatctctggtggaagagctctcagaggatgcagctggtggggcatccccaggagtggagctgcctgctctgggctgctcagaactgccagctgctgaagtgtcacccacagcctcctctaagaatttggaaactatttgtgagtatgcttattgtatggcaatgttaccggaaacgggtcttgatccataccccaagagagggttcttggatctcacacaagaaagaatttggacagacatccccccatccccaggaaatatccctaccacccatccactgatggtgcgccatgcagaccacagttctctgacactgggcagtggctcttcaacaactcgtctcacccagggcatcgggcgcagtcagaggaccctaaggcagctgacggccaatactggccacaccattcatgttcactaccctgggaatcgccagcccaaccctcctcttatactgcagaggttgcttggtccctcagctgctgctgacatccttcagctgagcagcagccttcccctacaaagccggggtcgggcccgcctcctgggtaggcaacgatgacgtccacatcatcgcccgttctgatgatgagctgctggatgactttttccatgatcagaggcacagctaccagccaagcaggaaccctgtccagcatccccacagccctgacccgctggacagaagaatgcaaagttctcgatgctgagagcatgcatgactgtgtttcagtggttaaagtgtccattgtcaatcacctggaattcctgagggatgaggagctggaagaaaggcgagagaagcgcaggaaacaactggctgaggaagaaacaaagataactgataaaggcaaagaagataaggagaacagggatcagagtgcacagtgtactgcatctaagtcaaatgactccactgaacagaatctctcagatgggacgcctatgcctgacagctacccaacaaccccatcttcaactgatgcagctacatctgagtccaaggagacccttggcactctgcaatcctcacaacagcaaccaacactcccaaccccaccagctttgggagaggttcctcaggagctgcagtctccagctggagaagggggcagctctacacagctattgatgcctgtagagccagaggaattgggtcccacaaggccaagtggggaagcagaaacaactcagatggagttatccccagctcccactataacctcactttccccagagagagctgaggattctgatgcactgacggctgtcagcagtcagctagaaggctctcctatggatacaagcagcctggcttcctgtaccttagaggaggctgtgggtgacacttcagcagctggcagttctgagcagcccagagcaggcagctccactcctggggatgccccaccagctgtggcggaagtgcaaggcaggagtgatgggtcaggggaatctgcccagccacctgaggacagctccccacctgcatcctctgagagctcttccaccagagattctgccgtggccatttctggagcagattcccgaggaatcctagaagagccgttgccttcaacaagcagtgaagaagaagatccccttgcgggtatcagtctccctgaaggtgtggacccctcttttctggctgccctgcctgatgacatccgtcgggaagttctacagaaccagctaggcattcgtccaccaacccggactgccccctccacaaatagctcagcgcctgcagtggtggggaatcctggtgtgactgaagtgagccctgagtttctggctgccctgcctccagccattcaggaggaagtactggcacagcagagagctgagcagcagcgacgagaactagcacagaatgccagctcagacacccctatggaccctgtgaccttcatccagactctgccctcagacctgcgccgtagtgtcctagaggatatggaggacagtgtgttagctgtgatgccacctgacattgcagctgaggctcaagccctgagacgagagcaagaagcccggcagcgacagctcatgcatgagcgtctgtttgggcacagtagcacctccgcactctctgctattctccgaagcccggctttcaccagtcgcttaagtggcaaccgtggggtccagtatactcgccttgctgtgcagagaggtggcaccttccagatggggggtagcagcagccataacaggccttctggcagtaatgtagatactctcctccgcctccgaggacggctccttctggaccacgaagccctttcttgtctcttggtcctactttttgtggatgagccaaagctcaatactagccgtctacaccgagtactgagaaatctctgctaccatgcccagacccgccactgggtcatccgcagtctgctctccatcttgcagcgcagcagtgagagtgagctatgcattgaaacacccaaactcactacaagtgaggaaaagggcaaaaagtcgagcaagagctgtgggtcaagtagccatgagaaccgtcccctggacctgctacacaagatggagtcaaagagctccaaccagctttcctggctctcagtatccatggatgcagccctaggctgcaggactaatatatttcagatccagcgttcaggggggcgtaaacataccgagaagcatgcaagcggtggctccaccgtccacatccatccccaagctgctcctgttgtctgcagacacgttttggatacactcattcaattggccaaggtatttcccagccacttcacacagcagcggaccaaagaaacaaactgtgagagtgatcgggaaaggggcaataaggcctgtagcccatgctcctcacagtcctccagcagtggcatttgcacagacttctgggacttattggtaaaactggacaacatgaatgtcagccggaaaggcaaagaactccgtggaagtcagtgccagtgagcgctggcgggtgagggggaaacctctccatacagccttcgaggcctctccactgggggcagctcatgaacatgttgtcacacccagtcatccgccggagctctctcttaactgagaaactcctcagactcctttctctcatctcaattgctctcccagaaaacaaggtgtcagaagcacaggctaattctggcagcggtgcttcctccaccaccactgccacctcaaccacatctaccaccaccaccactgccgcctccaccacgcccacacccccgtacgtgcacccaccccgtgtcacttctgctccagcccgtggttgctgccacggctatttccaccattgtcgtagctgcttcgaccacagtgactacccccacgactgctaccactactgtttcaatttctcccactactaagggcagcaaatctccagcgaaggtgagtgatgggggcagcagcagtacagactttaagatgggtgtcctctggcctcactgaaaaccagctacagctctctgtagaggtgttgacatcccactcttgttctgaggaaggcttagaggatgcagccaacgtactactgcagctctcccggggggactctgggacccgggacactgttctcaagctgctactgaatggagcccgccatctgggttataccctttgtaaacaaataggtaccctgctggccgagctgcgggaatacaacctcgagcagcagcggcgagcccaatgtgaaaccctctctcctgatggcctgcctgaggagcagccacagaccaccaagctgaagggcaaaatgcagagcaggttttgacatggctgagaatgtggtaattgtggcatctcagaagcgacctttgggtggccgggagctccagctgccttctatgtccatgttgacatccaagacatctacccagaagttcttcttgagggtactacaggtcatcatccagctccgggacgacacgcgccgggctaacaagaaagccaagcagacaggcaggctaggttcctccggtttaggctcagctagcagcatccaggcagctgttcggcagctggaaggctgaaggcttgatgccattatacaaatggtacgtgagggtcaaagggcgcggagacagcaacaagcagcaacgtcggagtctagccagtcagaggcgtctgtccggagggaggaatcacccatggatgtggaccagccatctcccagtgctcaagatactcaatccattgcctccgatggaaccccacagggggagaaggaaaaggaagaaagaccacctgagttacccctgctcagcgagcagctgagttttggacgagctgtgggacatgcttggggagtgtctaaaggaactagaggaatcccatgaccagcatgcggtgctagtgctacagcctgctgtcgaggccttctttctggtccatgccacagagcgggagagcaagcctcctgtccgagacacccgtgagagccagctggcacacatcaaggacgagcctcctccactctcccctgcccccttaaccccagccacgcctttcttcctttgaccaattcttttccggggagccctcattctatgcacatctccttcaagcctgccccctgacacacagaagttccttcgctttgcagagactcaccgcactgtgttaaaccagatcctacggcagtccacgacccaccttgctgatgggccttttgctgtcctggtagactacattcgtgtcctcgactttgatgtcaagcgcaaatatttccgccaagagctggagcgtttagatgaggggctccggaaaagaagacatggctgtgcatgtccgtcgtgaccatgtgtttgaagactcctatcgtgagctgcatcgcaaatcccccgaagaaatgaagaatcgattgtatatagtatttgaaggagaagaagggcaggatgctgggcgggctcctgcgggagtgggtatatgattcatcttttcgagagatgttttaaccctatgtatggcttgtttccgtacctcacctgggtgattcgagtcacctaacaccatcaatccatctttcccactggcaaccccaaccacctcagctaatttcaagttttgttcgggacgcattgtgggccaaagctgtatatgacaacccgtcttctgggagtgctactttactcgatccttttacaaacaccatcttggggcaagttcagtcagatatacagatatgggagagtgaaggattaccactttctaccaaggtctgggtttatctggctgggaaaatgatgtctccacactaaggctatgacctcacctttcaggcactgagggtcccaggagttttgggagtttgtgaagtttcgtggacctcaaacccaatggggggcaaccatcttgggtaacagaggaggaataagaaggaagtatgtaccccctggtattgccagatgaggatgacaggagccatccgccaacaagtggcggcctttcttagaaggcttcctatgagatcattccaaagccgcctcatttccatcttcaactgagcatgagttagagctgcttatatcaggactgcccaccattgacatcgatgatctgaatcccaacactgaataccacaagtaccagtccaactctatttcagatcccagtggttcctggaagaaacattgccgttcctttcgaatcaaaactgacccgtgcccaaagttccctcccagtttgttcacggggtaccttccaagggtaacccctggcaagggctttgcctgcccctcgaagggcatggaatgggcatttcaggaagttttcaggttcccttcggaggtggacaggtcccacagatcgccctgccttcagctcacacatgtttttaattcagctggatctgcctgcctatgagagctttgagaagctccgccacatgctactgttggctatcccaggagtgctctgaaggctttgggctggcctaataaggccctgcccaactcccgtggggtttttttttaccattgttggacctggggaggggggagttaaaaaaaagaaccgggaaagaaattgtcaaaaacccaataaatgaaaatccaccaactcaccgtgtgtgtccccagctgccccatcttccccaaggcgcaataacctggttcctcattcctcaattcttctcccccgcccgccctgtttccttcaaccttcctcttccccctttcccatgccggtcccatgatcccccaccccatgtgttttaaaaaaaggcagtaagcctttggcaggggaccctgtctgttcccaattgttttgaacagtgtgctcctcagattctgtgttcagaaggatttgctgcattgagacttgaaacctttggataggggaaaaaattatatatatatatatatttttttgttctgtttggcatttcttaattttgtgcttgggaatgtgttgatgtgcacaaccaaatattccaatccggaacaagattggcgtctgtgttgtggaggtttctaaataaagagcactcttcataaaaaaaaaaaaaaaaaa

SEQ ID NO: 21248 - DNA, 1359 bp, Homo sapiens
  SIMILAR (1)..(1356): 1001254mologous to Homo sapiens NY-REN-50 antigen,accession number AF155112,Smith-Waterman Score=2352.
ccatgtgagggaggggcccgctcctgcttggtgacagagtcagcacgcggtggcctgcagttcctccagcagtgtgaccgggaggatctggtggaattggctctgcctcagctggctcaggttgtgaccgtgtatgagtttcttctgatgaaggttgaaaaagatcatctagcaaagccttttttcccagctatatataaggaatttgaagagttgcataaaatggttaagaaaatgtgccaagattacctcagtagttctggtctgtgttcccaggagaccctggaaataaacaatgataaggttgctgagtcattaggaatcacagaattcctacggaagaaagaaatacacccagacaaccttggacccaagcacctcagccgagacatggatggggagcagctagagggagctagcagcgagaagagggaacgtgaggctgcggaggagggactggcctcagtgaaaaggcccagaagagaagccctgtccaacgataccactgaatctcttgctgccaacagcagaggccgggagaagcccaggcccttgcatgctttgcccgctggtttttcccctccagtaaatgtgactgtctctccccgttctgaagaaagccatacaacgacggtttctggtggcaatgggagcgtgttccaggcgggcccgcagcttcaggcactggctaacttagaagccaggagggggtctataggtgctgctctctcatcccgggatgtcagtgggctgcctgtttatgctcagtcaggagagcctaggaggctgacccaggcacaggtggcagcgtttcctggagagaatgctttggaacactcttcagaccaggacacctgggacagcctgaggagcccgggtttctgcagccctttgtcatctggtggtggagcagagtccctgccgcctggggggcctggacatgcagaggcaggacacctcggcaaggtttgtgacttccacctgaaccaccagcagcccagccccaccagcgtcctgcctacagaggtggcagcccctccgcttgagaaaattttgtctgtggatagcgtggcagtggactgtgcctacaggactgtgcccaagccagggcctcagcctggcccacatggatcactattgactgaagggtgtctcagaagcctttcgggggacttgaaccggttcccctgtgggatggaggtgcactctggccagagagaactggagagcgtggttgctgtcggcgaagccatggctttgaaatttccaatgggagccatgagttactgtctcagggacagaagcagatttttattcagacttccgatgggcttatcttgtcccctccaggtacaatag

SEQ ID NO: 21249 - DNA, 865 bp, Homo sapiens
  SIMILAR (287)..(355): 391254mologous to Apis mellifera zinc finger protein,accession number L01589,Smith-Waterman Score=55.
ccgctgcaggaattcggcacgaggtttcatccagttcaggacgtttatttatttccaacttgcatacaaaacatactgagaaactaaaaccatcgttaaaagtgaagacacgttgagacaggtatctcgacctgccaagtatacagctaaagctgagttcataaaaagggatgatttggccgacggtcatctgccagattctgatgatgattcagaagtcagtgtggaagaagatcagagggagaggcaggcgctctttgacttatcaagctgctccctgaggcccaaaagcttcaagtgtcagacttgtaaaaagtcatatatagggaagtggggactggcccagcattttaaacttaatccaggccatggccagctggaccctgagatggtgctatctgagaaagccaatgggagcaccctccgggggtgcacagaggaaaggacgctcagcctgaccttcccggggctgtccgtgccagcggctccgcgtgagggaggggcccgctcctgcttggtgagagagtcagcacgcagtggcctgcagaaaaacgttgacctcttggcgagaatgcaaagaagggaacgcttgcttatacactgttggtgaactgtcacccctacaactcagcttgcaaccagccctggccaccagtttccccacactgagctgaatatcggacatgcccatcttagacattccagcccattctgaaattccacatcgattcacctgacaaagtctgaagttccagggcaatttatctggaaaagcttacctggaatcacgtgtcatttcaaccaacaactgttgaagaggacgtggcattaaaaccaagggtatcaattatttataaaaaaaaaa

SEQ ID NO: 21250 - DNA, 1374 bp, Homo sapiens
  SIMILAR (835)..(1110): 711254mologous to Homo sapiens NY-REN-50 antigen,accession number AF155112,Smith-Waterman Score=309.
cacatccatttatttccaacttgcatacaagacatactgagaaactaaaaaaatcgttaaaagtaaagacacgttctggacgggtatctcgacctcccaaatataaagctaaagattataagttcataaaaacagaggatctggcggatggtcatctgtcagattctgatgattactcagaactctgtgtggaagaagatgaagatcagagggagaggcacgcactctttgacttatcgagctgctccctgaggcccaaaagctttaagtgtcagacttgtgaaaagtcatatatagggaaggggggactggcccgacattttaaacttaacccaggccacggccagttggaccccgagatggtgctgtctgagaaagccagtggaagcaccctccgggggtgcgacggaggaaaggacgctcagcctgacctccctggggctgtccatgccagcggatccatgtgagggaggggcccgctcctgcttggtgacagagtcagcacgcggtggcctgcagaatggtcagtctgtagacgttgaagagacattgccatctgaaccagaaaatggagctcttttgcgatcagagagataccaaggacctagaagacgcgcatgctcagagacccttgcagagtcccgcacagctgtcctccagcagagaagagctgctcagctacctggtggccctgctgcggcaggggagcagagggcgtcgccaagcaaagccaggctcaaggagttcctccagcagtgtgaccgggaggatctggtggaattggctctgcctcagctggctcaggttgtgaccgtgtatgagtttcttctgatgaaggttgctgagtcattaggaatcacagaattcctacggaagaaagaaatacacccagacaaccttggacccaagcacctcagccgagacatggatggggagcagctagagggagctagcagcgacgaagagggaacgtgaggctgcggaggagggactggcctcagtgaaaaggcccagaagagaagccctgtccaacgattaccacttgaatctcttgctgccaacagcagaggccgggagaagcccaggcccttgcatgctttggccgctggtacaatagtgtctcaggaggaggacattgtcacagtgactgatgcagaggggcgtgcctgcggatgggcccgctagaaggagttcctctagaagctgtggagtcggtcgtcaccgtggagccagagccctcacagtgaaatggggtcagatactagaattcgtctgattttatccagagaaggtctatggcaagcaatgtatatttttctaatgtgaatattgcacagatgaaccttttatttataaagaataatgtctttctgc

SEQ ID NO: 21251 - DNA, 559 bp, Homo sapiens
  SIMILAR (324)..(1): 781254mologous to Homo sapiens NY-REN-50 antigen,accession number AF155112,Smith-Waterman Score=412.
caaagggctgcagaaacccgggctcctcaggctgtcacaggtgtcctggtctgaagagtgttccaaagcattctctccaggaaacgctgccacctgtgcctgggtcagcctcctaggctctcctgactgagcataaacaggcagcccactgacatcccgggatgagagagcagcaccttatagaccccccccctggcttctaagttagccagtgcctgaagctgcgggcccgcctggaacacgctcccattgccacccagaaaccgtcgttgtatggctttcttcagaacggggagagacagtcacatttactggaggggaaaaactctaaacattttgggaaacaggtgaacatggcgtgtacgtgtgtcatgggccactcactgcactcacccacccaaaaccagctaggccaagtcacctgccctgcagaaaagtcaaagcatcgatgctccttgctccttgggattggtagcaattttaaaaaatacgtccctattctctattcacaaagacagattttgtattaaaaatatgctctaagagccaaaaaaaaaaa

SEQ ID NO: 21252 - DNA, 1889 bp, Homo sapiens
  SIMILAR (1214)..(1270): 1001254mologous to Homo sapiens NY-REN-50 antigen,accession number AF155112,Smith-Waterman Score=99.
  misc_feature (1)...(1889): n = a,t,c or g
atggtgctgtctgagaaagccagtggaagcaccctccgggggtgcacggaggaaaggacgctcagcctgacctccctggggctgtccatgccagcggatccatgtgagggaggggcccgctcctgcttggtgacagagtcagcacgcggtggcctgcagttcctccagcagtgtgaccgggaggatctggtggaattggctctgcctcagctggctcaggttgtgaccgtgtatgagtttcttctgatgaaggttgctgagtcattaggaatcacagaattcctacggaagaaagaaatacacccagacaaccttggacccaagcacctcagccgagacatggatggggagcagctagagggagctagcagcgagaagagggaacgtgaggctgcggaggagggactggcctcagtgaaaaggcccagaagagaagccctgtccaacgataccactgaatctcttgctgccaacagcagaggccgggagaagcccaggcccttgcatgctttggccgctgaaagccatacaacgacggtttctggtggcaatgggagcgtgttccaggcgggcccgcagcttcaggcactggctaacttagaagccaggagggggtctataggtgctgctctctcatcccgggatgtcagtgggctgcctgtttatgctcagtcaggagagcctaggaggctgacccaggcacaggtggcagcgtttcctggagagaatgctttggaacactcttcagctcaggacacctgggacagcctgaggagcccgggtttctgcagccctttgtcatctggtggtggagcagagtccctgccgcctggggggcctggacatgcagaggcaggacacctcggcaaggtttgtgacttccacctgaaccaccagcagcccagccccaccagcgtcctgcctacagaggtggcagcccctccgcttgagaaaattttgtctgtggatagcgtggcagtggactgtgcctacaggactgtgcccaagccagggcctcagcctggcccacatggatcactattgactgaagggtgtctcagaagcctttcgggggacttgaaccggttcccctgtgggatggaggtgcactctggccagagagaactggagagcgtggtttgcttgtccgcggaaaccatggctttttgaaatttcccaaatgggagcccatgagttactgtctcaagggacaagaagcagatttttattcagacttccgatgggcttatcttgtcccctccaggtacaatagtgncctcaggaggaggacattgtcacagtgactgatgcagaggggcgtgcctgccggatgggcccgcctagaaggagttcctctagcagctgtggagtcggtcgtcaccgtggagccagagccctccacagtgcaagtggagtcagatcctagattcgtctgattttatccagagaaggtctatggcaagcaaatgtatattttttctaatgtgaatattgccacagatgaaccttttatttataaagaataatgtctttctgccctgctgtctacatttttctatggagcttgtcataataatagcagatattacctgaatcaggaatccctgtggcgcgtctgacgctcatggagtttttcatgatggtgatgagtagcactgcactgtcacctgatgattggccctgctccgtttcccttctctcctgggagatatgctgcttttcccccagacttgctccatactaaaagctttttttgggttcaattaaaaaaaaaataagctagtcattttgggcagcattttattgataaaagggggaaaaagtcatttctacttgcatgattttttaaattaaattaaattaaattaatttaaaaaaaaaaaaaaaaa

SEQ ID NO: 21253 - DNA, 346 bp, Homo sapiens
  SIMILAR (36)..(1): 1001254mologous to Homo sapiens phosphoinositol 3-phosphate- binding protein-2,accession number AF302150,Smith-Waterman Score= 60.
tgaaacaggttctgatttttcttctccattagattccatcaacttctgccactgttgttaactctggttcactcttgtagagtctataatctggaccctcatttttgtacttaactgttgagaaaggctttgatcctatcatacctatttctgtagtacctctttgctgcttatgtttactcagcccttccatgacatcctgaattcgccaaagttctttctgaatctgtgcacgctgaattcctgctgattccgtctgaacttcaccaaggtgatccagctgctcttgcatctggttcctggtaacagttacatcgtattctaacttatcatattctctccatgc

SEQ ID NO: 21254 - DNA, 570 bp, Homo sapiens
  SIMILAR (1)..(423): 931254mologous to Homo sapiens phosphoinositol 3-phosphate- binding protein-2,accession number AF302150,Smith-Waterman Score= 693.
agagcccagattatggcccgctaccttgaaggttatagaacactcccaagaaacagcaagacaaggcctgaaagtatctgcagtgtaaccccttccactcatgacaagacattaggacccggagcggaggagaaacggaggtccatgcgagatgacacaatgtggcagctctacgaatggctgcagcgtcagttttataacaaacagagcaccctccctcgacacagtactttgagtagtcccaaaaccatggtaaatatttctggccagacaatgcactatattcccacatcacgttcccacgggtcaattggtgcttatcagggttactcccctcaacgaacaaacagatcggaagtgtcttcaccaattcagagaggagatgtgacactagaccgcagacacagggcccatcaccgtaaggtaaaatagctgctgattgtgttttaactcagtaccttctaaatgctgtgttttctttgtagtatagtattttaaatgtgagcgacaaaagaatggggctaaagtaagcaaggcagctcttttttgttgtggaaaaaaaaaaaaaaa

SEQ ID NO: 21255 - DNA, 2407 bp, Homo sapiens
  SIMILAR (1844)..(2257): 621254mologous to Homo sapiens phosphoinositol 3-phosphate- binding protein-2,accession number AF302150,Smith-Waterman Score= 388.
ttgtgctttctgacctttgcctcttttattatagagatgagaaagaagagggtatcctgggaagcatactgttacctagttttcagataagctttgcttaccctctgaagatcacattaatcgcaaatatgcttttaaggcagcccatccaaacatgcggacctattatttctgcactgatacaggaaaggaaatggagttgtggatgaaagccatgttagatgctgccctagtacagacagaacctgtgaaaagagtggacaagattacatctgaaaatgcaccaacctaaagaaaccaataacattcccaaccatagggtgctaattaaaccagagatccaaaacaatcaaaaaaacaaggaaatgagcaaaattgaagaaaaaaaggcattagaagctgaaaaatatggatttcagaaggatggtcaagatagacccttaacaaaaattaatagtgtaaagctgaattctctgccatctgaatatgagagtgggtcagcatgccctgctcagactgtgcactacagaccaatcaacttgagcagttcagagaacaaaatagtcaatgttagcctggcagatcttagaggtggaaatcgccccaatacagggcccttatacacagaggccgatcgagtcatacagagaacaaattcaatgcagcagttgggaacagtgggattaaaatccaggaaggggaggggttcatggaaggaagaaaccaggggagtaatttcttaccaaacattaccaagaaatatgccaagtcacagagcccagattatggcccgctaacactgaaggttatagaacactcccaagaaacagcaagacaaggccttgaaagtatctgcagtgttaaccccttccactcatgacaagacattaggacccggagccgaggagaaacggaggtccatgagagatgacacaatgtggcagctctacgaatggcagcagcgtcagttttataacaaacagagcaccctccctcgacacagtactttgagtagtcccaaaaccatggtaaatatttctgaccagacaatgcactctattcccacatcaccttcccacgggtcaatagctgcttatcagggatactcccctcaacgaacttacagatcggaagtgtcttcaccaattcagagaggagatgtgacaatagaccgcagacacagggcccatcaccctaagccagaggagcttacgctgctgctaataaagctgagacggcagcaagccgaactgagtagtatccgggagcatacgttagcacagctcatgcagctaaagcttgaggcccacagcccaaagtggtgtagagaaaaggtggcgacggcgactggagcagcagagactgtagcatcggatacccacctcccacgaaccggttcctcttccccctccttgctgtgtgtttgatgtgttgaagcaggagggagaacgccgcgagcagcgccgtgagcaacactaccatcgtccccagcactgcggatccgggccctagcggcgggcccagtatcggaggtggtggcggcggtggaggcggcggcatcgagaaccagagaaagaaaaaagaaggcattcaagatcacattctaggaggaggaggactctcatcttctagacacagtcaaggagcagatcaagagagtgattacattgtcagtctaggagtcgttgatgattcaaaagcccaagacagagaagatctcattccagagagagaggcagaagcacggctagacattatagaagtacaaacagagagacaacaacgaagaagcaggagtggaacaagatctcctaaaaagtctcggtgtcctaaaagaaaattgtctctctcaccatcccctgggaaacataaaaagaagaagaaagataaagagagaaataggtatgaaagagaacgatcaacaagcaagaagaagagtaaagatagggaaaaggaccaggaaagaaaatcagagagtgatacagatgtaaaagttacacgggtttatgatgaagaggaacaagggtatgacaccagccaagagatagaaatgcatgcagataacccagcagccattcagacagtggtgttacaaagggatgatttacaaaatggactgcttagtacgtgtcgagaactttctcgagccactgccgaattggaacgagcatggagagaatatgataagttagaatacgatgtaactgttaccaggaaccagatgcaagagcagctggatcaccttggtgaagttcagtgctggtgttacaggacagagaaatatgttatggaaaggggtcccgaacaagaccctaagagagcgttcttggatttcgtgcaagaaagaattcagggagagtccgcagtgcaaagtgaaagcaagtttattaagacagtaaagaaataa

SEQ ID NO: 21256 - DNA, 180 bp, Homo sapiens
  SIMILAR (25)..(72): 1001254mologous to Gallus gallus aspartate aminotransferase precursor,accession number M12105,Smith-Waterman Score=82.
tgctgtgttaagtgggtgtcaaactccagcaacgtgggctaccttgcccatgccattcaccaggtcaccaagtatgtccctggtgcgaggaaacagagacaacctttcttggtggtgagtggatcatttctttcagccacagtgtgtgacactcagcatttgagaacatgtggcgtgtat

SEQ ID NO: 21257 - DNA, 212 bp, Homo sapiens
  SIMILAR (155)..(93): 451254mologous to Hepatitis C virus envelope protein 1,accession number AJ250219,Smith-Waterman Score=41.
gctgtgttaagtgggtgtcaaactccagcaacgtgggctaccttgcccatgccattcaccaggtcaccaataatgtccctgtcttcagccttcacacagacaatgagagagggtagatggtggtgagtggatcatttctttagtgacacagggcaggggcatccatggctggcgtctgaatattaaaccaaactctccccggcccttgtatc

SEQ ID NO: 21258 - DNA, 312 bp, Homo sapiens
  SIMILAR (100)..(273): 1001254mologous to Homo sapiens aspartate aminotransferase precursor (2.6.1.1),accession number M22632,Smith-Waterman Score= 313.
ggctgcccactgccctcctacggtccaccatggccctgctgcactccggccgcgtcctccccgggatcgccgccgccttccacccgggcctcgcgccgcgcctctgccagagccagctcctggtggacccatgtggaaatgggacctccagatcccattctgggagtcactgaagcctttaagagggacaccaatagcaaaaagatgaatctgggagttggtgcctaccgggatgataacggaaagccttacgtgctgcctagcgtccgcaagtttgtcactgtgcagaccatttctggaactggagcctta

SEQ ID NO: 21259 - DNA, 506 bp, Homo sapiens
  SIMILAR (9)..(65): 1001254mologous to Homo sapiens aspartate aminotransferase precursor (2.6.1.1),accession number M22632,Smith-Waterman Score= 98.
ggtccaccatggccctgctgcactccggccgcgtcctccccgggatcgccgccgccttccacccgtgtcctcgccgccgcggcctctgccagagccagctcctggtggacccatgtggaaatgggacctccagatcccattctgggagtcactgaagcctttaagagggacaccaatagcaaaaagatgaatctgggagttggtgcctaccgggatgataacggaaagccttacgtgctgcctagcgtccgcaaggcagaggcccagattgccgcaaaaaatttggacctcctccctttgttgaatgtggtgtgcagcctctcatctcacactgtgagtccagcggcgcagggtggtaccaggaaagaggatattctaggctttgcgtgctgctagctgggttcaggcttcacccactggaaagaaccaccatctgctctaaccatgtagacttattgcggcctggtttctctgttacaataaaattactgtagacccaaaaaaaa

SEQ ID NO: 21260 - DNA, 303 bp, Homo sapiens
  SIMILAR (1)..(150): 981254mologous to Homo sapiens aspartate aminotransferase precursor (2.6.1.1),accession number M22632,Smith-Waterman Score= 269.
aaaaggaatctctttgcgttgtttgacatggcctaccaaggctttgccagtggtgatggtgataaggatgcctgggctgtgcgccacttcatcgaacagggcattaatgtttgtctctgccaatcatatgccaagaacatgggcttatatgagtgttttggcgtcgtggtacctgaaagcggtatttggagtcggtgtagccagccggcgatctatagcctgtcggagacagcatggaaacatggggaggacgggagggaaggcagcaaacggaccgcgccctatgaggctcgcacgggactg

SEQ ID NO: 21261 - DNA, 425 bp, Homo sapiens
  SIMILAR (2)..(361): 851254mologous to Homo sapiens aspartate aminotransferase precursor (2.6.1.1),accession number M22632,Smith-Waterman Score= 539.
acgcccagaatagtggaaggaaatagcaacagttgtgaagaaaaggaatctctttgcgctctttgacatggcctaccaaggctttgccagtggtgatggtgataaggatgcctgggctctgcaccacttcatcgaacagggcattaatgtttgtctctgccaatcatatgccaagaacatgggcttatatggtgagcatgtaggagccttcactgtggtctgcaaagatgcagatgaagccaaaagggtagagtcacagttgaagatcttgattagtcccatgtattccaactctcccctcaatggggcccagattgcttctaccattccaaacaccccagttggtttgaaggtctgggtcatgggaggcctacatgatcatcctcaggttatgagtgacgagaaagagacaacactgagagcag

SEQ ID NO: 21262 - DNA, 2598 bp, Homo sapiens
  SIMILAR (1017)..(1427): 771254mologous to Homo sapiens glutamic-oxaloacetic transaminase 2, mitochondrial (aspartate aminotransferase 2),accession number BC000525,Smith-Waterman Score=487.
ggcacgaggcaggagccggttccctgtgtgtgtgtccggctcgccctctgctccgtcctgcggctgcccactgcccatcctaccggtccaccatggcccatgcatgcacgtccggccgcgtcctccccgggatcgccgccgccattccacccgggcctcgccgccgcggcctctgccagagccagctcctggtggacccatgtggaaatgggacctccagatcccattctgggagtcactgaagcctttaagagggacaccaatagcaaaaagatgaatctgggagttggtgcctaccgggatgataacggaaaagccttaccgtgctgccctagcgtccgcaaggcagaaggcccaagattgccgcaaaaaatttgggacaaggaatacctggcccattgggggaactggctgaattttgcaaggcatctgcagaactagccctgggtgagaacaaccgaagtcttgaaagagtgggccggtttgtcactgtgcagacccatttctgggaactgggagccttaaggattcggagccagttttcttgcaaagattttttaagttcagccgagatgtctttctgcccaaaccaacctggggggaaaccacacacccatctttcagggatgctgggcatgcagcttacaaggttatcgggtattatgaccccaagacttgcggttttgacttcacaggcgctgtggaggatatttcaaaaataccagagcagagtgttcttctttctgcatgcctgcggcccaacaatcccacgggagtggacccgcgtccggaacagtggaaggaaatagcaacagtggtgaagaaaaggaatctctttgcgttctttgacatggcctaccaaggctttgccagtggtgatggtgataaggatgcctgggctgtgcgccacttcatcgaacagggcattaatgtttgtctctgccaatcatatgccaagaacatgggcttatatggtgagcgtgtaggagccttcactatggtctgcaaagatgcacgatgaatccaaaagggtagagtcacagttgaagatcttgatccgtcccatgtattccaaccctcccctcaatggggcccggattgctgctgccattctgaacaccccagatttgcgaaaacaatggctgcaagaagtgaaaggcatggctgaccgcattcattgggcatgcgggacttcaactggtctccaaccttcaaggaagggagggtttccacccaccaattgggcaacacattcaccgaccaaattgggcatgttctgttttcacaggggttaaaagctggaacaggtggagcggctgatcaaggagttctccatctacatgacaaaagatggccgcatctctgtggcaggggtcacctccagcaacgtgggctaccttgcccatgccattcaccaggtcaccaagtacgtgtccctggtgcgaggaaacggagacaacctttctgtcttgagcctctgcttattgagagcttcacacagacaatgagagagggtggatggtggtgagtggatcatttctttcagccacagtgtgtaacactcaagcatttgaatgtttctcagaaaagaacatgtaggtgacacagggcagaggcatcccatgggctgggcgtctgggaattatttaaaccaaacatcctcccccggtcctttttttcttccaactttttttcaaaggagttttacatgtggcaaggaaagttcatcgcaccaaaaaaacctgtcaaattaatgccatttgcaatatttccagaagcctttaacttaagttgtcagggtttcttcgtaagaaacagcacaccgttagaggcttttggagagaaggccagctagttctgtccatgagtagtcggcctcgtgtctggtcctcccatcttgggaacaaccttatccaacagggccgcactgccagaaatggatgttttatgaaaaccaaatgagggctggctgccacttccagcaaggggaaataattgcagtttccctgtctttatttaagaaaaaagacaaggctctcttttctcccctggtcattgccggttcttttccttaccacgcaaaaaattttttaaactattgccagattttcaacccccaatcctaactgccttggattgacccatccaactcccatccttatcggagatttatttaaggaatggaaggaaccataattttctgctggaatgccggtacccctcaaccctttttcaagcaaagaatcagtggagagttaaggaaactgttactttatctcgggcatcctcattgaatgatagtgtcaagttttctcccagttgggaatgttgtctctgccccggttgggacctccccccctttgttgaaatgttggttgtgcagcctctcattctcacaactgtgagtcccagcggcgcagggctggtaccagggaaagaggatattcttaaggctttgcgtgctgctagctgggtttcaggcttcacccacttggaaagaaccccccttctgctctacccatgtaagacttattttgcggccctggttttctctgttacaataaaattactggtagacccaaaaaaaaaaagtcgacg

SEQ ID NO: 21263 - DNA, 217 bp, Homo sapiens
  SIMILAR (1)..(138): 1001254mologous to Homo sapiens Human secreted protein, SEQ ID NO: 5084,accession number G01003,Smith-Waterman Score=248.
cagcgtgcagggtcaaagacagccggccccccatgtcagtggtctaggatggccagtgaaggcaccaacatcccaagtcctgtggtgcgccagattgacaagcagtttctgatttgcagtatatgcctggaacggtacatcagagattacagattgaaacagaactccatgtggaaaaatcagtaattaaaaaagatttttaccagcaaaaaaaaaa

SEQ ID NO: 21264 - DNA, 400 bp, Homo sapiens
  SIMILAR (171)..(22): 271254mologous to Homo sapiens en533_1 secreted protein- 1,accession number Y28808,Smith-Waterman Score=60.
  misc_feature (1)...(400): n = a,t,c or g
cattaaaccggcctataaaaatgggatgttccaaattttaaaaggaaaccaagccnnnnnnnnnnnnccccttcatattcatacataggcttgaaagtctatagaattgagaacgatataaagaattctattacaagaatacactccattgatgacagaacattcccatgtcataaagcaaaagcattgagtttaaggctgtgttgctttcaaaagtataatggaaagtgctgtacattcattggaacaacatagccaatttattaatctattctagaatattaatagctttcatacattctccacaaacagaccaatcactgccacacaattcatctttagaaagtttttaagcatcatgatttgtagcttactgtcatgaaaacaaaacaaataattc

SEQ ID NO: 21265 - DNA, 351 bp, Homo sapiens
  SIMILAR (1)..(351): 771254mologous to Mus musculus neural activity-related ring finger protein,accession number AB043550,Smith-Waterman Score=435.
gtgatggaattttactgccagtcctgtgagactgccatgtgtcgggagtgcacggagggggagcacgcagagcaccccacagttccactcaaggatgtggtggaacagcacaaggcctcgctccaggtccagctggatgctgtcaacaaaaggtgggggaccctccccaaacccccaactggctgcctgtacttgaggcctggcctcatggcctcttgtctagttaaccaaccaaaaggccagcatcgggatgacattcattccacctttgatgagctccagaagactttaaatgtgcgcaagagtgtgctgcttatggaattggaggtcaactatggcctcaaacacaaa

SEQ ID NO: 21266 - DNA, 7295 bp, Homo sapiens
  SIMILAR (323)..(808): 641254mologous to Homo sapiens tripartite motif protein TRIM2,accession number AF220018,Smith-Waterman Score=503.
acagacgctcagtgagaaaaagatgtcctgtaagatcaagaccgattggtgtgaatactgaagggggtcttccacttgttaatgacccagaaacattcctgccgacttccagccttctctcatttcctccatttttctcttcctctgttctgtgcatgaactggcacatcactacttagagcagaagatatgctgggcttctgatgatggctgcactgcatgcagcagcagcgtgcagggtcaaagacagccggcccccccatgtcagtggtctaggatggccagttgaaggcaccaacatcccaaagtctggtggtgggccagatttgacaagcagtttttgatttgcagtatatgcctggaacggtacaagaatcccaaggttctcccctgtctgcacactttctgcgagaggtgcctgcagaactacattcctggcccacagtttaaccctctcctgcccagtgtgccgccagacctccatcctgcccgagaaaggggtggccgcgctccagaacaatttcttcatcacaaacctgatggacgtgctgcaaccgaactccaggcagcaacgctgaggagtcttccatcctggagacagtcactgctgtggctgcgggaaagccttctctcttgcccaaaccacgatgggaatgtgatggaattttactgccagtcctgtgagactgccatgtgtcgggagtgcacggagggggagcacgcagagcaccccacagttccactcaaggatgtggtggaacagcacaaggcctcgctccaggtccagctggatgctgtcaacaaaaggtgggggaccctccccaaacccccaactggctgcctgtacttgaggcctggcctcatggcctcttgtctagttaaccaaccaaaaggccagcatcgtggatgacattcattccacctttgatgagctccagaagactttaaatgtgcgcaagagtgtgctgcttatggaattggaggtcaactatggcctcaaacacaaagtcctccagtcgcagctggatactcctgctccaggggcaggagagcattaagagctgcagcaacttcacagcgcagaccctcaaccatggcacggagaccgaggtcctactggtgaagaagcagatgagcgagaagctgaacgagctggccgaccaggacttccccttgcacccgcgggagaacgaccagctggatttcatcgtggaaaccgaggggctgaagaagtccatccacaacctcgggacaatcttaaccaccaacgccgttgcctcagagacagtggccacgggcgaggggctgcggcagaccatcatcgggcagcccatgtccgtcaccatcaccaccaaggacaaagacggtgagctgtgcaaaaccggcaacgcctacctcaccgccgaactgagcacccccgacgggagcgtggcagacggggagatcctggacaacaagaacggcacctatgagtttttgtacactgtccagaaggaaggggactttaccctgtctctgagtctctatgaccagcacatccgaggcagcccgtttaagctgaaagtgatccgatccgctgatgtgtctccccccacagaaggcgtgaagaggcgcgttaagtccccggggagcggccacgtcaagcagaaagctgtgaaaagacccgcaagcatgtacagcactggaaaacgaaaagagaatcccatcgaagacgatttgatctttcgagtgggtaccaaaggaagaaataaaggagagtttacaaatcttcagggggtagctgcatctacaaatggaaagatattaattgcagacagtaacaaccaatgtgtgcagatattttccaatgatggccagttcaaaagtcgttttggcatacggggacgctctccggggcagctgcagcggcccacaggagtggctgtacatcccagtggggacataatcattgccgattatgataataaatgggtcagcattttctcctccgatgggaaatttaagacaaaaattggatcaggaaagctgatgggacccaaaggagtttctgtggaccgcaatgggcacattattgttgtggacaacaaggcgtgctgcgtgtttatcttccagccaaacgggaaaatagtcaccaggtttggtagccgaggaaatggggacaggcagtttgcaggtccccattttgcagctgtaaatagcaataatgagattattattacagatttccataatcattctgtcaaggtgtttaatcaggaaggagaattcatgttgaagtttggctcaaatggagaaggaaatgggcagtttaatgctccaacaggtgtagcagtggattcaaatggaaacatcattgtggcccgactggggaaacagcaggatccaggttttttgatggtagtggatcatttttgtcctacattaacacatctgcttgacccactcctatggcccccaaggccttgggccctaacttcagatgggtcatgttgttggttgcagactctggaaatcactgtttcaaagtctatccgatacttacagtaatggtgggcaggtggataccccgcttccatggtcttgcactatgaaactggaatggatttctcaatggcgggaccagattatgactaggagtttttatggccagaagggaatcatttgggtgaacttttccaaggttattttctggaatgttaacaattttcccttaaaaatgacttatccaatttctgtatttcacctttagggttaaaaaaaactcttctactgaatctataaaaactgcagttttacatctgtgaactatggcttaagggacaggatttatgtagctaaactaattttgcaaatcaaacagacacttaaaaaaactagcatatgtaaaggtattcgttaatcctgtgaatggtagcttttgcacagaacttccaaaagcaaaacaaaaacaaaatctattgtagttatatacttcatttaacctaggtcacaagacccagggaatcttctaacctcacttttacagtaggtattactcttgtgacatttttttggttatcaacaactaaatataaattactttggaaaaagtaaggctgtcttgcaaaatgatcccagctctgattagcagccctctggagttcagaacttaagtatcagtgcaaatttctcaacctttctgggttagacaaagatccttttttgtgagttcttttcaccacccctttggctcaccttgtatcagcaaacaaagtacttcttcagggaaaccgtgaaatttctaatgccttgaaaagcatattacaaaagtaatgctaccttttgggaaacaaactgccccgttaactccagatcattgcactggaatgtaatcaagaaagttagtcatgttttatgtaccatgttttcacacgtgtctcttctcttcgacttcctgaaagcggaaggttttacctcctgcaaaatttcagcacaatgtagggtagggccaccagttatcctagggacagagagccataatgtagcccctttgggagggacttgatgggtgtcaaccaaagggcatgtggattggatttaatgaatccccccttagaaaagccaagtgtttacccaaagttgtgttatccttgaaagcatttacaggttaagggcatgttatggttatttatcattgtttaatgaatagtagaggtgtccaagggacctatgtatacatgattagggtaagatagaatgtattatatatatatatatatatacacacaccacatatatatagctgaatctttggtgtattgaaataggcagcactctgaaagacagaagcttcgtccagccactcttcagcacattcctttactaagcagtttaaagccgtcctagtggagcaagccctaaagcagatttaatttttgccattttggggggggtgacgggtggtggcttttagtcagaaaatggccttcttgtgctttcaaaaaaaaaacaaaaaaaaaaccacacacacacataaaaaacccaacaggtcaaaataaaagttgaacttgagttacatttaatttaaatataaatgcattttgagaaatgttaagaacaatttagtcaatcgttcatctgtcattggtactgtaaaataagctgtggtctatttccactgtttaattttctactcagttctaccaaataggatgtcatgtttgacatttttgatagtgactttggggtcttcttcactgaaagcaccttagaactgtactataagaaaacatttcccctatgtataattatatgaatgtgatgtttattgcttattaatttataattcagtcattctctatataggacttcttaaaattttagaagggaaatccaagctaccttcaaattgtctgttaaatttattatgcccaaatcaacctctgaaaaaaggtttttccaggaagatttacatttaggtttaatattttttttagttaggtagagttttaaaaaatacttgagcctgtccgtgataaagctataaaattcaataactttttagaatgttaaatgaagacactgtttcctaacatcagtgagatacatctttgaatttaaacattcatatttactgagtacctactaggtaccaagtactcttttaggcactggaaatacagtgatggacaaaacaaggtaaaaaatcgctggccccctcagagctgacattctggggtgggaatttcattttgccacgtactaacgttctgcacaaaagacaggctagactcttgtctagattgtttaaaagaaacttttcaaattggttacattaattttagtttattttcacaagtaaaaatggctttttatttagattctttctgtcccaggctgttgatcttaaaactagttgatttaaagagttttttttgcacaacatttccaattatatttgtgaacttagaaattaacttacaatctaaccagccatcatataatatcctatcaggctagatatctcaatagtagactgaatacaaagctaattttttttttacatgtcaatattggcacaaacttggaatgaaagaatagtttgattcagacctgctccactatgtgttgctaaaacacatgctatgagcactccagggcaacactatattttttccaaaaaatatgtgattatatatgttaaagtatagataacatttcacacttggatacatatgtgcatttactgtatttcttggcaagcatatttttgggggaaagtgctgctgatatgatacaagtagacaaaatttaaatgaaattttgtcacattctatgggaaaatgggtttctgggtaaactgaggaagggtatttaaaataagtgggcttttttctggggctaccctttattgtttggatttctctttgtccagtgtatagaacctgtcatacattcatgataagtagcactgaaaaattactcattcaaatttcccctgggcacgtaaggcaaaatattgccggttgggatttcaaggtcagtgacgacgcatttgctcccagtacagaccccccagccccccttgctggacatggggaggcagagagtcacttgaccatccagaaatacatgactacaagtcctttatgactgtttgccattttttttaatggtacttagtattttgatcaaactttagtctccagaactaaacaagtccctaagtttccttattttaatttactgtgactagatttgaagcaaataaatactccagatccatgcagctagaacacacttgcttccactactaaatatacagggtatgtcctaacatggagttaactggaatagcacgacactagcaagaatgtgcgaatccttagcactgacgggttaacagaaatgctttggtaatacctacttagttaattggaggaagtagtaaataaacattaggtaatctgcagattacttcaaatggggaaaaatcttttttgtagactctatagtaccctctctattccactagcttctgaaaaggggaggagtatttttagtttgaccaatttaataatttaaaaacaagacatctcccaggtagggaaaaaatggaaagctatttcatggcaaacattatcttaatttaggcttaaaagtgaaagtggggtaatactgttgggtttctgttaaatgttggcaggggtttttaaactttataattactttaatatttttggataactggaaatctagtattgccataaagggaaactaagtgcccatcaaagatttgtttggtataaataaagaattatttgttttgttttcaatgacagtaagctacaaatcatgatgcttaaaaactttctaaagatgaattgtgtggcagtgattggtctgtttgtggagaatgtatgaaagctattaatattctagaatagattaataaattggctatgttgttccaatgaatgtacagcacttccattaacttttgcaaagcaacacagccttaaactcaatgcttttgctttatgacatgggaatgttctgttcatcaatggagtgtattcttgtaatagaattctttatatcgttctcaattctatagactttcaagcctatgtatgaatatgaaggggtttttttttttttgctttgttttctttttagattttgtacattccatctttataggtctgtttcatatgttttatgtatagaacacctaagtcttgcactctctgacattggatactggatatatccccgtcatttgttcttttatgaatcaaaatgttggctgcctatttaaagaaaagaatgaacgctgtgcatcaaagtgtttgtatgttcgtagctacatacgtaccccagtattttgggatgctttaggctacaatgaaactttcaattaattctgtcttgaaacataggagaaacaggattcatgtgtatctctttaccatgcccaaaatctcaaatcattataataaagcttgttttctccaaaaaaaaaaaaaaaaaaaaaaaaaaaaaaaaaaaaaaaaaaaaaaaaaaaaaaaaaaaaaaaaaaaaaaaagggggcccttaaaaaaaaaacccctggggggccccaaatttatccccctatcaaaaaaaaaatttttttttaaaaatgggaatataaaaaaaacatatcctgggcccttataaaaaaaactgaggggggaaaaaattacttttggggatttttttaaaaaaaactttttttgggggggaaaaaaatagggaacatcctcctctaaaaaaattaaccttttgaggaaaaa

SEQ ID NO: 21267 - DNA, 594 bp, Homo sapiens
  SIMILAR (1)..(81): 1001254mologous to Rattus norvegicus vacuolar protein sorting homolog r-vps33b,accession number U35245,Smith-Waterman Score=132.
cttcctggaaaaaaggatttattcattgaggcagatctcatgagccctttggatcgaattgccaatgtctccatcctgaagtgtatggcttcttacatctggggaagagtcccaccaaagatcgattccaagcttcgcttcttggatgagcgagggaaactaggcgctaacttacctattcacccccgcgcccgttcccggcagccgggactcagggaagccaggccctgctcgcgagtccccaccccgattgcgcacccgcgacttcagcccgaggggcggggattttcttggagcgacgggacgcgacgccaatcgcgacgaggcttcgccccgtggcgcggtttgaaattttgcggggctcaacggctcgcggagcggctacgcggagtgacatcgccggtgtttgcgggattccggtctacaccccgcagagactccgcagcgtacgaggagaaccccgccttctaccagaaaaagaagcgacttcctagatctcccggaagtccctttcgctcccagcgcttcgcgtaccaggaaggggacggcgtcctgaaagggacatttgaaaaacggaggcaacgcgtctattaa

SEQ ID NO: 21268 - DNA, 614 bp, Homo sapiens
  SIMILAR (3)..(206): 981254mologous to Homo sapiens VPS33B,accession number AL357472,Smith-Waterman Score=371.
ggctggaaggagatcagcgttggatcaacactgtatctcaggccttacaccttctcagcactctctatggaccctttccaaactgctatggaattggcaggtgcgccaagatggcatatgaattgtggaggaacctggaggaggaggaggatggcgaaaccaagggccgaaggccagagattggacatatctttctcttggacagaggtaaattatgcccagcgttcctgtcatctttcagccctagaagacacgggaatatggaaggcgtggtggcaaagttaaaatcctaaagttagggctgtgaatcccagctttgaggagcgtgggtccttggccctatggaaagtatcaaagctgcccttggacatgctgtgtagaaggctgggtcagggagaaccttcatggtcagggatctctgtttcagatgtggactttgtgacagcactttgctcccaagtggtttatgagggcctagtagatgacaccttccgcatcaagtgtggtaagtgctatggtcctctgcatcttggcaagatggacgggtcatcagccttggcacctgccacgtggggcagggtttgtgggagagacccacaccctgaatgaactgc

SEQ ID NO: 21269 - DNA, 402 bp, Homo sapiens
  SIMILAR (292)..(369): 961254mologous to Homo sapiens VPS33B,accession number AL357472,Smith-Waterman Score=122.
gtcccttagttagtaagttaggtcggtttaactcccaaagcacataccaataaactcgggttaccctgtggattgcatttagtagagagctggtaccccgtaggagggggaagactgtgggtggggagaagggtggggagtatatcttgattagttccagggaattatagttgaacagcttccgagagtttttggatgtgattggtgctgtcgtgtcctgaatggtgttatctgtggcagtgtcatgaatccatagaccttaggtgaaacctgacacagatttcttccccaggaaagattactgatgccttcagttctctggccaagaggagcaattttcgtgccatcagcaaaaagctgaatttggtatgtggaacagggatggttaggggagacagtggg

SEQ ID NO: 21270 - DNA, 677 bp, Homo sapiens
  SIMILAR (292)..(369): 961254mologous to Homo sapiens Amino acid sequence of a human secreted protein,accession number Y10815,Smith-Waterman Score=121.
tgtcgaccgcattgagtttacgggtccacccacgcgttcgctgcacaggaatatttttctcctggccttttattactacttgccatagccttaactctgggctgccacagcatggtagcccagttataccagtcatagaaagcagtggtgcccaagagcatggcactcacgtctctgtctataaactggtgctgtgatcccgtggggactgtggaactggagaggctctatgggttgccgttggggcctaagatctgtgctgtcttttttgcttctgcatttaactccttaggatacaggttcattttcttgacgacagcagtcacaaacagcgctcgctttatggaggcaatgagtgaggtgaaagcctgttgtatataccggccagtgttgacatcttccctgaacacattcatcagtgagatgcaggcatctggcacccagctgctataaccaagtgtccacctattacctgttaagagccgggagtacggaacgtgttgggatatagagaacattatctgagaaaagagtttctcttcctgctcccaggatatttctcttttctgtttatgaagtacaacccatgctgctaagatgcgagcaggaagaggcatcctttgctaaatcctgtttgaatgtcattgtaaataaagcatcagctctcagatgtaaaa

SEQ ID NO: 21271 - DNA, 3073 bp, Homo sapiens
  SIMILAR (79)..(711): 951254mologous to Rattus norvegicus vacuolar protein sorting homolog r-vps33b,accession number U35245,Smith-Waterman Score=1011.
  misc_feature (1)...(3073): n = a,t,c or g
atggggcctgtggcagctcccctggggctctcattgccagcaacagatggtgctcactcagtcagaggcaactcagtactggtcccctcaggtttgatccccaaggattaccgatctctgaaaacacagtatctgcagagctatggccctgagcacctgctaaccttctccaatctgcgaagagctgggctcctaacggagcaggcccccggggacaccctcacagccgtggagagtaaagtgagcaagctggtgaccgacaaggctgcaggaaagattactgatgccttcagttctctggccaagaggagcaattttcgtgccatcagcaaaaagctgaatttgatcccacgtgtggacggcgagtatgatctgaaagtgccccgagacatggcttacgtcttcggtggtgcttatgtgcccctgagctgccgaatcattgagcaggtgctagagcggcgaagctggcagggccttgatgaggtggtacggctgctcaactgcagtgactttgcattcacagatatgactaaggaagacaaggcttccagtgagtccctgcgcctcatcttggtggtgttcttgggtggttgtacattctctgagatctcagccctccggttcctgggcagagagaaaggctacaggttcattttcctgacgacagcagtcacaaacagcgctcgccttatggaggccatgagtgagcttcctggaaaaaaggatttattcattgagacagatctcatgagccctctggatcgaattgccaatgtctccctcctgaagcaacacgaagtagacaagctatacaaggtggagaacaagccagccctcagctccaatgaacaattgtgcttcttggtcagaccccgcatcaagaatatgcgatacattgccagtcttgtcaatgctgacaaattggctggccgaactcgcaaatacaaagtgatcttcagccctcaaaagttctatgcgtgtgagatggtgcttgaggaagagggaatctatggagatgtgagctgtgatgaatgggccttctctttgctgcctcttgatgtggatctgctgagcatggaactaccagaatttttcagggattactttctggaaggagatcagcgttggatcaacactgtagctcaggccttacaccttctcagcactctctatggacccctttcccaaacttgctatggaattggcaggtgcgccaaagatggcatatgaatttgtggaaggaacctgggaggaggaggaggatggccgaaacccaagggcccgacgggaaggatttggaccatatctttctccttggacagaagatgtggactttgttgacagcactttgcttcccaagttggtttatgagggcctagtagatgacaccttccgcatcaagtgtgggagtgtcgactttggcccagaagtcacatcctctgacaagagcctgaaggtgctactcaatgccgaggacaaggtgtttaatgagattcggaacgagcacttctccaatgtctttggcttcttgagccagaaggcccggaacttgcaggcccagtatgatcgccggagaggcatggacattaagcagatgaagaatttcgtgtcccaggagctcaagggcctgaaacaggagcaccancgtgctgagtctccatattgggggcctgtgaatccatcatgaagaagaaaaccaagcaggatttccaggagcctaatcaagacttgagcatgcactgctagaggggttcaacatccgggagagcaccagctacattgaggaacacatagaccggcaggtgtccgcctatagaaagcctgcgcctcatgtgccttttgtccatcactgagaatggtttgatccccaaggattaccgatctctgaaaacacagtatctgcagagctatggccctgagcacctgctaaccttctccaatctgcgaagagctggggctcctaacggagcaggcccccggggacaacctcacagccgtggagagtaaagtgagcaagctgggtgaccgacaaggctgcaggaaagattactgatgccctcagtttctctggccaagaggagccaatttcgtgccatcagcaaaaagctgaatttgatccaccgtggggacggcgagtatgatctgaaagtgcccccgagacatggcttactctcacagtggtgcttatgtgcccctgagctgccgaatcattgagcaggtgctagagcggcgaagctggcagggccttgatgaggtggtacggctgctcaactgcagtgactttgcattcacagatatgactaaggaagacaaggcttccagtgagtccctgcgccttcatcttggtggtgttctggggtggttgtacattctctgagatcttcagccctccggttcctgggcagagagaaaaggctacaggttccattttccctgacgacagccagtcacaaacagcgctcgcccttatggaggcccatgagtgaggtgaaagcctgatgtttttccccggcccagtgttgacatccttcccctgaacacattcctcagtgagatgcaggcatctggcacccagctgctataaccaagtgtcccaccaactacctgctaagagccgggagcatggaacgtgttgggatttagagaacattatctgagaaaagagttcacttcctgctcccaggatatttctcttttctgtttatgaagtacaacccatgctgctaagatgcgagcaggaagaggcatcctttgctaaatcctgtttgaatgtcattgtaaataaagcctctgctctcagatgtaatacgttggtcgttctggacacgcacttccatctttattagtgaaagcccattggagcttgctacaggggcttcctgtgcttcttggcctggactttgtagtggctccaggcctggtctggttcttccctgtaaaaatcactctaccactctgtacctgagtttcctcaaccataaaatgagggagatggctgaggtgaccagcaagcacgtttccagttctaaaatgttgtgattcattacatttttgagaaaatgaaaaaaaaaaa

SEQ ID NO: 21272 - DNA, 306 bp, Homo sapiens
  SIMILAR (1)..(171): 1001254mologous to Homo sapiens Arf-like 2 binding protein BART1,accession number AF126062,Smith-Waterman Score=295.
  misc_feature (1)...(306): n = a,t,c or g
gaaaaatacattgaagaacagctgctgcagcggattcctgagttcaacatggcagccttcaccacaacattacagcaccataaggatgaagtggctggtgacatattcgacatgctgctcaccttcacagattttttggcttttaaagaaatgtttttggactacagagcacttcccagaacaatctgcggcactaggtcctacctccagccaatgantgggatcattctggatgtcaccagcccaataggctcagctcatgatgacagaacacatcttgggaaagactgactctggttatgtaac

SEQ ID NO: 21273 - DNA, 470 bp, Homo sapiens
  SIMILAR (47)..(241): 981254mologous to Homo sapiens Arf-like 2 binding protein BART1,accession number AF126062,Smith-Waterman Score=327.
  misc_feature (1)...(470): n = a,t,c or g
cgagttgggccgcgggcggggttggagcctactcggggcgactgcgatggacgccttagaaggagagagctttgcgctgtctttctcctccgcctctgatgcagaatttgatgctgtggttggatatttagaggacattatcatggatgacgagttccagttattacagagaaatttcatggacaagtactacctggagtttgaagacacagaagagaataaactcatctacacacctatgaatgtatgctgtgtgctagaaatagactaaaacatattcctatagcatgttagtgtgtttgcatgtttgctgaaaatcctttgtgtataaaccagtttgtaaggttctctgggttaggtagggactctgcagtttcttcctgtcaaaatctctcctaccaagatggtgttccactgtccagcccagcatgagtagcaggtagagcacagctntactggctgttgtatgc

SEQ ID NO: 21274 - DNA, 2067 bp, Homo sapiens
  SIMILAR (108)..(215): 971254mologous to Mus musculus Similar to binder of Arl Two,accession number BC002131,Smith-Waterman Score=175.
agcggccgcgccctgcatgcgagttgggccgcgggcggggttggagcctactcggggcgactgcgatcggacgccttagaaggagagagctttgcgcgtgtctttcatcctccgcctctgatgcagaatttgatgctgtggttggatatttagaggacattatcatggatgacgagttccagttattacagagaaatttcatggacaagtactaccttggagtttgaagacacagaagagaataaactcatctacacaccctatttttaatgaatacatttctttggtagaaaaatacattgaagaacagcatgctgcagcgggattcctgagttcaacatggcagcctttcaccacaacattacaccatctgttcccgtttgcaggcaccataaggatgaagtggcttggtgacaatattcggcaatgctggctccacctttcacaagattttcctgggctttttaaagaaatgtttttgggacttacagaggcaggaaaaaggaaggccgaggactgggacttaagcagtggcttagttggtgacttcattgtgcaaatcatcttctctggccagcttcccagaacaatctgcggcactaggtcctacctccagccaatggaatggggatccattctgggatgtcaccagcccaatagggttcagctcatgattgacagaacacatcttgggaaagactgactctgttatgtaactcttccatttatgttaagtatttaataaggtcaaaaccaaaatggacctaaccctcctggacctattttatccggaaacaccttcttgtattcattaaccatagtactcctccccacctcaagtagacacctctctcaggagcttctgaagtcagacgcctctgggagcgagccctatgtcagggcactcccacctggggggggccctttccccaggcataacctgctgggtgttgttaagtgtgggacttaaccccgccgcccaccaccctctgttcccagcagggctctgcatggaatctttgtggcacttgcacctcttttttcacatggggccacagttttcagtatttcaggcctcagtgggggttcctggatgtttatcttggggtgtttacttcaaggcccagtttgagattttgggagtctcctgtgatcacatcttgtgttcgggtgtagggaatcaacagaagggagacgtcctcttacataaaaagctccatgtggaaaagctactcctagtctttaacatttggcagtccttgtgttcactgtcttctgggtcctgatgtagtcccactgttttctaggaagtctcttttaagcattatttttgaaaaaaaaaatatttttatagatgaatactcaggctaaccctagtggatgtgatcttggaacttccatgattatccacttaaagatcaaagtattaatatgctgtgtgcttttttaggtgtttgttagtactgggaaggcaaaaatgccttcctaccatggacattccatccctattttactggggcacctatggaatgtatgctgtgtgctaggaaataggactaaaaccatattccctatagccatgttagtgtgtttgccatgtttgctgtaaaatccctttgtgtataaaaccagttttgtaaaggttcctctggggttaggtaggggactctgccagtttccttccctgtcaaaatctcctccctacccaagatggtgtccccactgtcccagccccagcatgagtagcaggtagagcacagcttttactggctgtttgtatgcctttggtttaagtgcaatgtgtgggtaggattacttatccaggaaaacatattatgtccatctcttaggaacggaggaaaaaagcatagtagttccaattccccagtgtgtcccctttgattttttttttttttaatagtaaaaataaggaatctgtactgacttttcacttggcctattctggtttttaaaggacaagctacaagctctgtgtttctgtactgatgtgtcacttattaaatacttttgtaccatgatttacacttccctcggccaggcaggcgt

SEQ ID NO: 21275 - DNA, 462 bp, Homo sapiens
  SIMILAR (323)..(436): 361254mologous to Mycoplasma pneumoniae heat shock protein DnaJ,accession number AE000015,Smith-Waterman Score=50.
gaccccgctgcaggaattcggcacgagggcacgcgggactgctacgaggtgctgggcgtgagccgctcggcgggcaaggcggagatcgcgcgggcctaccgccagctggcccggcgctaccaccctgaccgctaccggccccagcccggagacgagggccccgggcggacgccgcagagcgccgaggaggctttcctgctggtggcaaccgcctacgagacactcaagtcctcctgcatatgcccaagaggattgggagtggaatggacaccagcagaagcaccacagttattcctgtagagattagaaacaaggagcttattgccctgcttgtcaaggctcaggacagacaggaggaagaaacaagtataaagggtttggttttggaaagaagttggaatctccagaccctgggaccttaagatccacaaaattggtgaaagaaaaaaggctatcttattg

SEQ ID NO: 21276 - DNA, 1757 bp, Homo sapiens
  SIMILAR (896)..(1417): 321254mologous to Caenorhabditis elegans C47A4.1,accession number Z82263,Smith-Waterman Score=276.
atgggggcgccgctgctctctcccggctggggagccggggctgccggccggcgctggtggatgctgctggcgcccctgctgccggcgctgctgctggtgcggcccgcgggggccctggtggaggggctctactgcggcacgcgggactgctacgaggtgctgggcgtgagccgctcggcgggcaaggcggagatcgcgcgggcctaccgccagctggcccggcgctaccaccctgaccgctaccggccccagcccggagacgagggccccgggcggacgccgcagagcgccgaggaggctttcctgctggtggcaaccgcctacgagacactcaagattgtttttccagagctgaaaatagtcaaggagctaacaactttattgatgccttccagagcagtttggataatttggagtcataaaatgagtggtggaggggcgggccctgaactagatattggttatgttccagtcctcctgcatatgcccaagaggattgggagtggaatggacaccagcagaagcaccacagttattcctgtagagattagaaacaaggagcttattgccctgcttgtcaaggctcaggacagacaggaggaagaaacaaattataaactaaggccatttaatggactgtcctatgaagttggatatcttgtcattttacaggatgaagaaacacgaaaagattatgattacatgctggatcatccagaagagtactacagccattactaccactactatagcaggcgcttggcccctaaggtggatgttagagtagtgattttggtcagcgtgtgtgctatttcggtgtttcagtttttcagctggtggaatagctacaataaggcaatcagctacctagccacagtgcccaagtaccgtatccaagctacagagattgccaagcagcagggactgctcaaaaaagccaaagcaaaaagcaaaaacaacaaagtccaaagaagaaattcgtgacgaggaggagaacatcataaagaacattataaaaagtaaaatagatataaaggggggctatcagaaaccccaaatctgtgatcttctcctgtttcaaattatcttagctccttttcacctatgctcatatatagtttggcattgtcggtggatctataattttaacatcaaaggcaaagaatatggagaggaagagagattatacattatacgtaaatctatgaagatgtcaaagtctcaatttgatagtctagaagatcatcagaaagaaacttttcttaaacgagagctctggatcaaggagaattatgaggtctacaagcaagaacaagaggaagaattaaagaaaaagttggcaaatgaccccagatggaagagatacaggagatggatgaagaatgaagggcctgggcggttaacatttgtggatgactgaagattgatggaatgctactatgccaaaccttaattgtgatattattttcataactgaattattttaggaattgtatcaattggctgctgctcagcagtaactaaaattcctcaagtatttgattaaacagaataatgtcaaaatttaaaccttcccttaaaactttatacataagacatttatgattgttcaatttttataatctatttgtggattttgttaaaagatttcacatgaagatttattagttgccatttaaaatttttatatgtttagttaaaagatttgacatgaaaatttattagataccatttaaaaattttaaaaaaaaaaaaaa

SEQ ID NO: 21277 - DNA, 1269 bp, Homo sapiens; identical to SEQ ID NO: 7537
  SIMILAR (448)..(861): 781254mologous to Danio rerio heat shock protein hsp90beta,accession number AF068772,Smith-Waterman Score=584.

SEQ ID NO: 21278 - DNA, 739 bp, Homo sapiens
  SIMILAR (325)..(738): 671254mologous to Brugia pahangi heat shock protein 90,accession number AJ005785,Smith-Waterman Score=498.
atgcctgaggaagtgcaccttggagagaaggaggtggagacttttgcctttcaggcagaaattgcccaactcatgtctcttatcatcaataccttctattccaacaaggagattttcctttgggagttgatctctaatgcttctgatgccttggacaagattcgctatgaaagcctaacagacccttccaagttggacagtggtaaagagctgaaaattgacatcatccccaatactcaggaacataccctgactttggtagacacaggcattggcatgaccaaagctgatctcataaataatttgggaaccattgccaagtttcaagatcagacagagtacttagaagagatgcaggtcaaagaagtagtggagaagcactctcagttcctaggctatcccatcaccctttatctggagaaggaacgagagaaagaaattagtgatggtaaggcagaggaagagaaaggtgagaaagaagaggaaaataaagatgacgaagaaaagcccaagatcgaagatgtgggttcagatgaggaggatgacagtggtaaggataagaagaagaaaactaagaagatcaaagagaaatacattgatcaggaagaactaaacaagaccaagcctatttggaccagaaacactgaagacatcacccaagaggagtatggagaattctataagagcctcaccaatgactggaaagaccacttggcagtcaggtacttttctgtagaag

SEQ ID NO: 21279 - DNA, 608 bp, Homo sapiens
  SIMILAR (7)..(393): 931254mologous to Homo sapiens 90kDa heat shock protein,accession number M16660,Smith-Waterman Score=595.
ccaggtatctcattttatcgtggtgtggtgactctgggactgcccctgaacatctcccgagaaatgctccagcagagcaaaatcttgaaagtcattcgcaaaaacattgttaagaagtgccttgagctcttctctgagctggcagaagacaaggagaattacaagaaattctatgaggcattctctaaaaatctcaagcttggaatccacgaagactccactaaccgccgccgcctgtttgagctgctgcgctatcatacctcccagtctggagatgagatgacatctctgtcagagtatgtttctcgcatgaaggagacacagaagtccatctattacatcactggtgagagcaaagagcaggtggccaactcagcttttgtggagcgagtgcccctgtcccacctggctccccctgctggtgtctagtgtttttttccctctcctgtccttgtgttgaaggcagtaaactaagggtgtcaagccccattccctctctactcttgacagcaggattggatgttgtgtattgtggtttattttattttcttcattttgttctgaaattaaagtatgcaaaataaagaatatgccgtttttatacaaaa

SEQ ID NO: 21280 - DNA, 2657 bp, Homo sapiens
  SIMILAR (1232)..(2317): 501254mologous to Homo sapiens 90 kD heat shock protein,accession number J04988,Smith-Waterman Score=628.
  misc_feature (1)...(2657): n = a,t,c or g
actccggcgcagtgttgggactgtctgggtatcggaaagcaagcctacgttgctcactattacgtataatccttttcttttcaagatttttattttagatgcctgaggaagtgcaccatggagaggaggaggtggagacttttgcctttcaggcagaaattgcccaactcatgtccctcatcatcaataccttctattccaacaaggagattttccttcgggagttgatctctaatgcttctgaatgccttggacaagattcgctatgagagcctgacagacccttcgaagttggacagtggtaaagagctgaaaattgacatcatccccaaccctcaggaaccgtaccctggactttgggtagacacaggcattgggcatgaccaaagctgatctcataaataatttgggaaccattgccaagtctggtactaaagcattcatggaggctcttcaggctggtgcagacatctccatgattgggcagtttggtgatggcttttattcgcgccaacttggtggcaaaagaaagtggttgtgatcacaaagcacccccgatgatgaacagtatgcttgggagtcttctgctggaggttccttcactgtgcgtgctgaccatggtgagcccattgnccaggggtaccccaagtgatcctccatcttaaagaagatcagacagagtacctagaagagaggcgggtcccaagaagtagtgaagaagcatttctcagttcataggctatcccatcaccctttatttggagaaggaacgagagaaggaaattagtgatgatgaggcagaggaagagaaaggtgagaaagaagaggaagataaagatgatgaagaaaaacccaagatcgaagatgtgggttcagatgaggaggatgacagcggtaaggataagaagaagaaaactaagaagatcaaagagaaatacattgatcaggaagaactaaacaagaccaagcctatttggaccagaaaccctgatgacatcaccccaagaggagtatggagaattctacaagagcctcactaatgactgggaagaccacttggcagtcaagcacttttctgtagaaggtcagttggaattcagggcattgctatttattcctcgtcgggctccctttgacctttttgagaacaagaagaaaaagaacaacatcaaactctatgtccgccgtgtgttcatcatggacagctgtgatgagttggtaccagaataatctcaattttatcccgggtgtggttgactctgaggatctgcccctgaacatcttccgaaaaatgcttcaacaaaacaaaatctttggaaggtcattcgcaaaaacattgttaagaagtgccttgagctcttctctgagctggcagaagacaaggagaattacaagaaattctatgaggcattctctaaaaatctcaagcttggaatccacgaagactccactaacccgccgccgcctgtctgagctgctgcgctatcatacctcccagtctggaagatgagatgacatctctgtcagagtatgtttctccgcatgaaggagacacagatgtccatctattacatcactggtgagagcaaaagagcaggtggccaactcagcttttgtggagcgagtgcggaaacggggcttcgaggtggtatatatgacccgagcccattgaacgagtactgtgtgcagcagctcaaggaatttgatgggaagaagctggttctcagttaccaaggagggtctggagctgcctgaggatgaggaggagaagaagaagatggaagagagcaaggcaaagtttgagaacctctgcaagctcatgaaagaaatcttagataagaaggttgagaagggtgacaatctccaaatagactttgtgtcttcaccttgcctgcattggtcacaagcacctaggggcgggtcaggcattaattgagcgggatcatgaaaagcccagggcacttcgggaccatcccccccaggggggtattatgatgggcaaaaaagcaccttgagaatcaccccctgaccacccccattttgtggagacgcgtgcgggcagaaaggctgatgcccgacaagtaatgataagggcagttaaggaccctggtgggtgctgcttgtttgaaacccgcccctgctatcttctggctttttccttggaggatccccagaccccactcccaaccgcatctatcgcataaaanttacaaagcttaggtctaggtatttgatgaagatgaaagtggcagcagaggaacccaatgctgcagttcctgatgagatcccccctctcgagggcgatgaggatgcgtctccgcatggaagaagtcgattagggtaggagtttcatagttggaaaacttgtgcccttgtataggtgtccccatgggcttcccactgcagcctcgagtggcccctgtcccacctggctccccgctgctggtgtctagtgtttttttcccctctccctgtcccttgttgttgaaggccaagtaaactaagggtgtcaagccccattccctctctatctcttgacagcagggattggatgttgtgtattgtggtttaatttatttacattcatttttgttttgaaattaaagtatgcaaaataaagaatatgccgtttttatacaaaaaaaaaaaaaaaaaaa

SEQ ID NO: 21281 - DNA, 429 bp, Homo sapiens
  SIMILAR (19)..(249): 1001254mologous to Homo sapiens monoamine oxidase A,accession number M68857,Smith-Waterman Score=383.
atgattgaaaaagtcagactatctgctgccaaactcttgactgaatatggcgttagtgttttggttttagaagctcgggacagggttggaggaagaacatatactataaggaatgagcatgttgattacgtagatgttggtggagcttatgtgggaccaacccaaaacagaatcttacgcttgtctaaggagctgggcatagagacttacaaagtgaatgtcagtgagcgtctcgttcaatatgtcaagctctcttctgatggtcatcctgtgtccatcattgtgtccccatatgcagtgctggtgaccattttgctcaatcttttgacccggaagcctgaaagagcagtgttaactacctgctatgatacaagcactgtgccttggttattgtttgatggatgcagtaactggaaaacagccatttaa

SEQ ID NO: 21282 - DNA, 1308 bp, Homo sapiens
  SIMILAR (226)..(1305): 991254mologous to Homo sapiens monoamine oxidase A,accession number M68857,Smith-Waterman Score=1913.
aatgagcatgttgattacgtagatgttggtggagcttatgtgggaccaacccaaaacagaatcttacgcttgtctaaggagctgggcatagagacttacaaagtgaatgtcagtgagcgtctcgttcaatatgtcaagtggccctcacaagctatcctcactcccagaatgggaggctctgggttccctcctaatgcatttgaaggccacaggggtgggggtggcaggactgctaggcggtttgcttatctttttgtgaatatcaatgtgacctctgagcctcacgaagtgtctgccctgtggttcttgtggtatgtgaagcagtgcgggggcaccactcggatattctctgtcaccaatggtggccaggaacggaagtttgtaggtggatctggtcaagtgagcgaacggataatggacctcctcggagaccaagtgaagctgaaccatcctgtcactcacgttgaccagtcaagtgacaacatcatcatagagacgctgaaccatgaacattatgagtgcaaatacgtaattaatgcgatccctccgaccttgactgccaagattcacttcagaccagagcttccagcagagagaaaccagttaattcagcggcttccaatgggagctgtcattaagtgcatgatgtattacaaggaggccttctggaagaagaaggattactgtggctgcatgatcattgaagatgaagatgctccaatttcaataaccttggatgacaccaagccagatgggtcactgcctgccatcatgggcttcattcttgcccggaaagctgatcgacttgctaagctacataaggaaataaggaagaagaaaatctgtgagctctatgccaaagtgctgggatcccaagaagctttacatccagtgcattatgaagagaagaactggtgtgaggagcagtactctgggggctgctacacggcctacttccctcctgggatcatgactcaatatggaagggtgattcgtcaacccgtgggcaggattttctttgcgggcacagagactgccacaaagtggagcggctacatggaaggggcagttgaggctggagaacgagcagctagggaggtcttaaatggtctcgggaaggtgaccgagaaagatatctgggtacaagaacctgaatcaaaggacgttccagcggtagaaatcacccacaccttctgggaaaggaacctgccctctgtttctggcctgctgaagatcattggattttccacatcagtaactgccctggggtttgtgctgtacaaatacaagctcctgccacggtcttga

SEQ ID NO: 21283 - DNA, 3436 bp, Homo sapiens
  SIMILAR (2497)..(2952): 431254mologous to Rattus sp. monoamine oxidase A; MAO A,accession number S45812,Smith-Waterman Score=179.
ggcggagccaggccggcctatagtcacttctccccgcccctgactgggccgggagcccggggctggtctctaagagtgggtaccgagaacagcctgaccgtggagaagggctgcgggaagcagaacaccgcccccagcgcccagcgtgctccagaaacatgagcacaaacgcctcagcctccttccccggcggcaccggcaccggcaccagtacccgcaccagtaccggcaccggcaccagtacccgcaccagtaccggcaccggcaccagtacccgcaccagtaccggcaccggcaccagtacccgcaccagtaccggcaccggcaccgagcgcaaggcggagggcccgcccgaagccgggggcacaactgcccaggtcccgaacccggactccagcttggacgacacctcctacagcctgtccgaatggagcgtccgttctgagtggcggtccgtctcggatccgctagccagttcccaagtggagcacgtcctcaactgccgaggccgccttcctggagctccagcatacactccccaatcagcactaccggtcttagcgagagtactgactccgactccaagagtggcctccggggtttcagcgcttacaacccgagcagtcggatccccaagtctaccaccagctcgaactcctccgatggggccgtcacagcctccaatcaggacaccggcattccctgggtattagtaacaggacctaccccgcccgtaaactcccccgtagagtcattgcaagggtctgccttctcctcagggttcagcaccccacggggtttggtaaaaggaccgaccctgcccccggattccaacctgacctcagtgtccgactacacttggatatttgtacggggacctcctatacccaatgacctttcgcaagtgtcaatacaagcacctcctacacccagtaacacccccgagtgtcagtacaagggtctgccgcatcctcagtgtccagcttcccctggggtttggtaccaggaccacctctacccaataacatttccccagtgtcgccacaagcacctcctgcaccccataacatccccccagtgtcaaggcaggcgtctacccccacctcagtgcctgacactccgcggggttcaatacaagaacctcctgcacccagtaatcctttccagctgccgacacaaggacattctaaacctaataactctcgccgagtgtcagtacaagggtccgccccgctctcagtgcccagctccccccgggtatcagctgaaacatcagctccgcccctgggcgctcccggagtatcagcaaaaggtgcccggctccccccgggtatcaaaagaaggatcggctccgcccccgggctccccgggggagttgatagaagggtccttcccaccctttgccgtccccactcctgtgcctacgacccaggagcgtgtcagccaaagcatggagaatcaagagaaggcgagtatcgcgggccacatgttcgacgtagtcgtgatcggaggtggcatttcaggactatctgctgccaaactcttgactgaatatggcgttagtgttttggttttagaagctcgggacagggttggaggaagaacatatactataaggaatgagcatgttgattacgtagatgttggtggagcttatgtgggaccaacccaaaacagaatcttacgcttgtctaaggagctgggcatagagacttacaaagtgaatgtcagtgagcgtctcgttcaatatgtcaaggggaaaacatatccatttcggggcgcctttccaccagtatggaatcccattgcatatttggattacaataatctgtggaggacaatagataacatggggaaggagattccaactgatgcaccctgggaggctcaacatgctgacaaatgggacaaaatgaccatgaaagagctcattgacaaaatctgctggacaaagactgcttaggcggtttgcttatctttttgtgaatatcaatgtgacctctgagcctcacgaagtgtctgccctgtggttcttgtggtatgtgaagcagtgcgggggcaccactcggatattctctgtcaccaatggtggccagcgaacggaagtttgcaggtggatctgggcaagtgagcgaacggataatggacctcctccgtgaccaagtgaagctgaaccatactgtcactcacgttgacccagcaaggggacaacatcatcatagagacgctgaaccatgaacattatgagtgcaaatacgtaattaatgcgatccctccgaccttgactgccaagattcacttcagaccagagcttccagcagagagaaaccagttaattcagcggcttccaatgggagctgtcattaagtgcatgatgtattacaaggaggccttctggaagaaggaagggattactgtggctggcatgatccattggaagatggaaggatggcttccaatttcaataaaccttgggatggacaccaaggccagatggggtcactgcctgccttcatggggctttcattcttgcccgggaaagctgatcgacttgctaagctacataaggaaataagggaagaaaggaaaatctggtgaggctctatggccaaagtggctggggattccaagaaagctttaccatccagtggcattatgaagagaaggaactgggtgttgagggagcagtacttctggggggctgctacacggcctactttccctcctgggggatcatggacttcaatattgggaaggggtgatttcgttcaaccccttggggcagggatttttcttttttcgggggcacagagactgccacaaagtggagccggctacatgggaagggggcagtttgaggcttggagaacgagcagctaggggaggtctttaaatggtctcgggaaggtgacccgagaaaagacatctgggtaccaggaacctgaatccaaaggacgttccagcggtagaaatcaacccacaccttcttggggaaaggaaccttgccctcttgtttctggccctgcctgaagatcattgggattttcccacatcgagtaactgcccctgggggtttgtgcttgttacaaatacaagctcctgccacggtctttgaagtttctgtttcttatgctctctgcttcactggttttcaataccaccaagaggaaaaatattgacaagttttaaaggctgtgtcaattgggccatgtttaaagtgtactggatttaacttacctttggctttaatcccaatcattgttaaaagtaaaaacaatttcaaagaatcacctaattaattttcagttaaggttcaagctcccttcttattttgttcagtgttaggttcaactcatgtttattgattaggattaaagccttgtgattcactttctggaaatttcacaaagttaaacgtgatgtgctcatcagaaac

SEQ ID NO: 21284 - DNA, 767 bp, Homo sapiens
  SIMILAR (2)..(766): 1001254mologous to Homo sapiens OGG1 protein type 2b,accession number AB019528,Smith-Waterman Score=1367.
cgtgcgcaagtacttccagctagatgttaccctggctcaactgtatcaccactggggttccgtggactcccacttccaagaggtggctcagaaattccaaggtgtgcgactgctgcgacaagaccccatcgaatgccttttctcttttatctgttcctccaacaacaacatcgcccgcatcactggcatggtggagcggctgtgccaggcttttggacctcggctcatccagcttgatgatgtcacctaccatggcttccccagcctgcaggccctggctgggccagaggtggaggctcatctcaggaagctgggcctgggctatcgtgcccgttacgtgagtgccagtgcccgagccatcctggaagaacagggcgggctagcctggctgcagcagctacgagagtcctcatatgaggaggcccacaaggccctctgcatcctgcctggagtgggcaccaagggcctccttggcaatgcatttgatggccaccagcttctgcgtcctcttatcttctgccaggatcacctccgagaaggcccccctatcgggagaggggattcacaaggtgaagaactggaaccccagcttccctccagcctctcctccattccctatgggttctgtgaccactgctggaccaaggacgtggatgaccctcccctagtcactcatccatcccctggctccagagatggtcacatgacccaggcctggccagtcaaagtagtctctcccctggccacagtaattggtcatgtgatgc

SEQ ID NO: 21285 - DNA, 585 bp, Homo sapiens
  SIMILAR (282)..(584): 1001254mologous to Homo sapiens 8-hydroxyguanine-DNA glycosylase,accession number Y13277,Smith-Waterman Score=563.
cgtgcgcaagtacttccagctagatgttaccctggctcaactgtatcaccactggggttccgtggactcccacttccaagaggtggctcagaaattccaaggtgtgcgactgctgcgacaagaccccatcgaatgccttttctcttttatctgttcctccaacaacaacatcgcccgcatcactggcatggtggagcggctgtgccaggcttttggacctcggctcatccagcttgatgatgtcacctaccatggcttccccagcctgcaggccctggctgggcctccttggcaatgcatttgatggccaccagcttctgcgtcctcttatcttctgccaggatcacctccgagaaggcccccctatcgggagaggggattcacaaggtgaagaactggaaccccagcttccctccagcctctcctccattccctatgggttctgtgaccactgctggaccaaggacgtggatgaccctcccctagtcactcatccatcccctggctccagagatggtcacatgacccaggcctggccagtcaaagtagtctctcccctggccacagtaattggtcatgtgatgc

SEQ ID NO: 21286 - DNA, 7632 bp, Homo sapiens
  SIMILAR (1)..(3648): 991254mologous to Homo sapiens putative 8-hydroxyguanine DNA glycosylase,accession number AF176815,Smith-Waterman Score=6416.
atgggggtggactttgatgtgaagactttctgccacaacttgcgggcgactaagccaccatacgagtgcccggtggagacctgccgaaaggtctacaagagttacagtggtattgagtaccacctgtaccactatgaccacgacaacccaccacccccacaacaaactccactccgcaagcacaagaaaaaggggcgccagtcacgcccagccaacaagcagtcacccagcccctcagaggtctcacagtcaccaggccgtgaggtgatgagctatgcacaggcccagcgcatggtggaggtggacttgcatggccgcgtccaccgcatcagcatctttgacaacctggatgtggtgtcagaggatgaggaagcccccgaggaggcccctgagaatggcagcaacaaggagaacactgagacaccagctgctactcccaagtcaggcaaacataagaacaaggagaagcgcaaggactccaaccatcaccaccaccacaatgtttctgcgagcaccactcccaagctgccagaggtggtctatcgggagctggaacaggacacccctgatgccccaccccggccaacttcctattaccggtacatcgagaagtctgcagaggagctggacgaggaagtagagtatgacatggacgaggaggactacatctggctggatatcatgaatgagcgtcggaagacagagggtgtaagtcccatcccgcaggagatctttgagtacctaatggaccgactggagaaggagtcgtactttgagagtcataataaaggcgaccctaatgcgctagtggacgaggatgctgtttgctgtatctgcaatgatggtgagtgccagaacagcaatgtcatcctcttctgtgacatgtgcaacctggccgtgcaccaggagtgctacggtgtcccctatatccctgagggccagtggctgtgccgccgttgcctgcagtcaccctctcgtgctgtggattgtgccctgtgccccaacaagggcggtgccttcaagcagacagatgacgggcgctgggcccatgtggtgtgtgccttgtggatccctgaggtctgcttcgccaacacggtcttcctagagcctattgacagcattgagcacatcccaccagctcgctggaagctcacctgctacatttgcaaacaacggggctcaggggcctgcatccagtgccacaaggccaactgttacacagctttccatgtgacatgcgcccagcaggctggcctttacatgaagatggagcctgtgcgggagacaggcgccaacggcacctctttcagtgtccgcaagacagcctactgcgacatccacacgcctccaggttcagcacgccgactgcctgccctgtcccacagcgagggtgaggaggatgaagatgaggaggaggatgagggtaagggctggagctcagagaaagtcaagaaggccaaggccaagtcccggatcaaaatgaagaaggcacggaagatcctggcagagaagcgggcagcagcacctgtggtgtcagtgccctgcatcccaccacacaggcttagtaaaatcaccaaccgcctgaccatccaaaggaagagccagttcatgcagaggctgcacagctactggacactgaagcggcagtcacggaatggggtcccattgctacgtcgcctgcagacacacctgcaatctcagaggaactgtgaccaagttgggagagattctgaggataagaactgggcccttaaagaacagctcaagtcctggcagcggctccggcatgacttggagcgagctcggctgctcgtggaattgatccgcaagcgggaaaaactcaaaagggagacgatcaaggttcagcagattgccatggagatgcagctgactcctttcctcatcctccttcgcaaaaccttggagcagctccaagagaaggacacaggcaacatcttcagcgagccggtccctctgtctgaggtaaccgaattggacgaagtacctgactacctagaccacatcaaaaagcccatggactttttcaccatgaagcagaacttggaggcttaccgctacctgaattttgatgattttgaggaggacttcaacctcatcgtcagcaactgcctcaagtataacgccaaggacaccatcttctaccgggcagcagtgcggcttcgtgagcagggtggtgctgtgctccgccaggcccggcgccaggcagaaaaaatgggcattgactttgagacgggcatgcatatcccccacagcctggctggagatgaggccacacaccacactgaagatgcagccgaggaagagcggctggtcttgctggagaaccagaagcacctgccagtggaagaacagctaaagctgcttctggagcggctggacgaagtgaatgccagcaagcagagtgtgggccgctcacggcgtgcaaagatgatcaagaaagagatgacggcactgcggcggaagcttgcccatcagcgagagacgggacgtgatggccctgagcggcatggcccctcgagccggggtagtctgacaccccacccggcagcctgtgacaaggatgggcagacagatagtgcggcagaggagagcagcagccaggagacaagcaaaggcctgggtcccaacatgtcctcaacccccgcacatgaggtgggcaggagaacctcagttctgttctccaaaaagaacccgaagacagctggaccgcccaagaggccgggccggccccccaaaaaccgggagagccagatgacccccagccacggaggcagtcctgtggggcccccccagctccccatcatgagttccctgcgtcagcgcaagcggggtaggagcccccggcccagttcgagctcagacagcgacagtgataagtccacagaagaccccccaatggacttaccagccaatggcttcagcggtggaaaccaaccagtgaagaagagtttcttggtataccgtaatgactgcagccttccccggagcagctcagactctgagtccagcagcagtagcagtagcagcgctgcttcagaccggaccagcacaacgccctcaaaacaaggccggggcaaaccctccttctctcggggcactttcccagaggacagcagtgaggatacctcaggcactgagaatgaggcctactccgtgggcactggccgcggcgtgggccacagcatggtaaggaagagtctgggccggggagctggctggctgtcagaggatgaggactccccgctggatgctctggacctcgtgtgggccaaatgccgaggctatccatcatacccagctctgatcattgatccaaagatgccccgagaaggtatgttccaccatggggttcccatccctgtgcccccactggaggtgctgaaacttggggagcagatgacccaggaagcccgagagcatctctacctcgtcctcttctttgacaacaaacgaacctggcagtggctgcccaggaccaagctggttcctctgggtgtgaaccaggacctagacaaggagaagatgctggagggccgcaagtccaacatccgcaagtcagtacagatcgcctaccacagggctctgcagcaccgcagcaaggtgcaaggcgagcagagcacctccactcctgccctgtgggcctccatcccgtgccctcgctctgagctgcgcctggacctggttctgccttctggacaatctttccggtggagggagcaaagtcctgcacactggagtggtgtactagcggatcaagtatggacactgactcagactgaggagcagctccactgcactgtgtaccgaggagacaagagccaggctagcaggcccacaccagacgagctggaggccgtgcgcaagtacttccagctagatgttaccctggctcaactgtatcaccactggggttccgtggactcccacttccaagaggtggctcagaaattccaaggtgtgcgactgctgcgacaagaccccatcgaatgccttttctcttttatctgttcctccaacaacaacatcgcccgcatcactggcatggtggagcggctgtgccaggcttttggacctcggctcatccagcttgatgatgtcacctaccatggcttccccagcctgcaggccctggctgggccagaggtggaggctcatctcaggaagctgggcctgggctatcgtgcccgttacgtgagtgccagtgcccgagccatcctggaagaacagggcgggctagcctggctgcagcagctacgagagtcctcatatgaggaggcccacaaggccctctgcatcctgcctggagtgggcaccaagctcctggcgctcggcggggctaactgcagcgcggagatctcggccgccaagctccgcctcccgccccgggctgtgccccggggctcgcctgaggccgaccacccgcaccccacctctagcggctttgctcgaggcccaccttcttcccacccccggcaaactccactccacaggatccccatatcctgggccatgagtgagttgaaagactgccccttgcagttccacgacttcaagtctgtggatcacctgaaggtctgtccccgctacacggcagtgctggcacgctctgaggatgatggcatcggcatcgaggagctggacaccctgcagctggagctggagaccctgctgtcttctgccagccggcgcctgcgtgtgcttgaggccgaaacccagatcctcaccgactggcaggataagaaaggtgacagacgattcctgaagctgggtcgagaccatgaacttggagctccccccaaacatgggaagcccaagaagcagaaactggaagggaaggcaggacatgggccgggccctggcccaggacggcccaaatccaaaaaccttcagcccaagatccaggaatatgaattcactgatgaccctatcgacgtgccacggatccccaaaaatgatgcccccaacaggttctgggcttcagtggagccctactgtgctgacatcaccagcgaggaggtccgcacacttgaggagttactgaagcccccagaagatgaggctgagcattacaagatcccacccctggggaagcactactcccagcgctgggcccaggaggacctgctggaggagcagaaggatggggcccgggcagcggctgtggctgacaagaagaaaggcctcatggggccactgaccgaactggacactaaagatgtggatgccctgctgaagaagtctgaggcccagcatgaacagccggaagatggatgcccctttggtgccctgacgcagcgcctcctgcaggccctggtggaggaaaatattatttcccctatggaggattctcctattcctgacatgtctgggaaagaatcaggggctgacggggcaagcacctcccctcgcaatcagaacaagcccttcagtgtgccgcatactaagtccctggagagccgcatcaaggaggagctaattgcccagggccttttggagtctgaggaccgccccgcagaggactccgaggatgaggtccttgctgagcttcgcaaacggcaggctgagctgaaggcacttagtgcccacaaccgcaccaagaagcacgacctgctgaggctggcaaaggaggaggtgagccggcaggagctgaggcagcgggtgcgcatggctgacaacgaggtcatggacgcctttcgcaagatcatggctgcccggcagaagaagcggactcccaccaagaaagaaaaggaccaggcctggaagactctgaaggagcgtgagagcatcctgaagctgctggatggagttccaaatgccttacagctgactttcagcaacaccagggttgagcgcattgagaagagatgtctggagctgtttggccgagactactgtttcagcgtgattccaaacacgaatggggatatctgtggccactatccccggcacatcgtgttcctggagtatgagagttctgagaaggagaaagacacgtttgagagtaccgtacaggtgagcaagttgcaagacctcatccaccgcagcaagatggcccggtgcagaggacggtttgtctgcccagtaatcctgttcaagggcaaggtagagatggagaagccttcagatgggggtgcagatgatgcctgggcagatgtggaggacgtcacggaggaggactgtgctcttcgaagtggtgacacgcatctttttgataaggtcagaggctatgacatcaagctgcttcgatacctgtcagtcaaatacatctgtgacctgatggtggagaacaagaaggtgaagtttggcatgaatgtaacctcctctgagaaggtggacaaagcccagcgctatgccgacttcactctcctctccatcccgtatccagatgatgatgatggtggtgatgatgttgatgatggtgatgatgatgatgatgataatgatgctggagactacgttgatgccccattgagcatccccgacttcctgactcactctctgaacattgactggagccagtatcagtgttgggatctggtgcaacaaacacaaaactacctgaagctgctgctttccttagttaacagtgatgggcagacggactctaaatccctggtagcaatcaggacttctgtaggaggtgcacttgctcaaacaagtggaaatgcattggcttatggaaccaagaaggcccaagaacagagccaggatgggctcatccacacgtccctgaagcccactgagatcctctacctcactgtggcctatgactggttcctcttcgggcacatgttggtagattggctcagcaaaggtgctgagattttcttcttctgcttcaattttttgaagcatattacctccgaggagttctctgctctgaagacccagaggaggaagagtttgccagcccgggatggaggcttcaccctggaagacatctgcatgctgagacgaaaggaccgtggcagcaccaccagccttggcagcgacttctccctggtcatggagagttccccaggagccactgggagcttcacctatgaggccgtggagctggtcccagcaggagcgccaactcaggcagcttggaggaagagccactcatcctctccacagagtgtcctctggaaccggccacaaccctcagaggaccgcttgccttcccagcaggggctggcggaagccaggtcttccagctcctcttcctcaaaccattctgataactttttcaggatgggtagcagtcccctggaggtccccaaacccagatcagtggaccatcccctgcccggatcctctctctccacagactatggcagctggcagatggtaacgggctgtggcagtattcaggagcgggctgtcctgcacacagactcctctctccctttcagcttcccggatgagctccctaacagttgtctgcttgcagccctgagtgatcgagagactcggctgcaggaggtgcgctcagccttcttggctgcgtacagcagcacagtggggcttcgggcagtagcccccagtccttccggtgccatcgggggcctgctggagcaatttgcccgtggtgttggactccggagcatcagcagcaatgccttgtga

SEQ ID NO: 21287 - DNA, 478 bp, Homo sapiens
  SIMILAR (231)..(374): 951254mologous to Homo sapiens ADA3-like protein,accession number AF069733,Smith-Waterman Score=240.
  misc_feature (1)...(478): n = a,t,c or g
cagattggcttctgtgtgtgtgtctgagttctttttggaacctgtctccccttaactaaaatgtgaaagtacaggttttaatctttgttgtactttcttacctacacctgaacactgggcttggccttggactagggacttgagagagatataagataggtaagtgaatgaatgaatgaagcatggctggccagtgcttacccactcagggttgggtgccatcttttccacagatcccacccctggggaagcactactcccagcgctgggcccaggaggacctgctggaggagcagaaggatggggcccgggcagcggctgtggctgacaagaagaaaggcctcatggggccactgcccgaactggacactaaaggtaggcctctcacctccctgccaaccccaggtcaggacttgaatttnnnncttcagcccaccctcgtgccaagcttggcgtgagcattccatacgtttcagtt

SEQ ID NO: 21288 - DNA, 1538 bp, Homo sapiens
  SIMILAR (3)..(707): 1001254mologous to Homo sapiens 8-hydroxyguanine-DNA glycosylase,accession number Y13277,Smith-Waterman Score=1256.
acaagagccaggctagcaggcccacaccagacgagctggaggccgtgcgcaagtacttccagctagatgttaccctggctcaactgtatcaccactggggttccgtggactcccacttccaagaggtggctcagaaattccaaggtgtgcgactgctgcgacaagaccccatcgaatgccttttctcttttatctgttcctccaacaacaacatcgcccgcatcactggcatggtggagcggctgtgccaggcttttggacctcggctcatccagcttgatgatgtcacctaccatggcttccccagcctgcaggccctggctgggccagaggtggaggctcatctcaggaagctgggcctgggctatcgtgcccgttacgtgagtgccagtgcccgagccatcctggaagaacagggcgggctagcctggctgcagcagctacgagagtcctcatatgaggaggcccacaaggccctctgcatcctgcctggagtgggcaccaaggtggctgactgcatctgcctgatggccctagacaagccccaggctgtgcccgtggatgtccatatgtggcacattgcccaacgtgactacagctggcaccctaccacgtcccaggcgaagggaccgagcccccagaccaacaaggaactgggaaactttttccggagcctgtggggaccttatgctggctgggcccaagcgctctgtcaggtcatcaccacttttatgacctttctcggaccccataggctggatcagatgcctcctgaagaattacagacttcttcctctagacttggagggcctccttggcaatgcatttgatggccaccagcttctgcgtcctcttatcttctgccaggatcacctccgagaaggcccccctatcgggagaggggattcacaaggtgaagaactggaaccccagcttccctccagcctctcctccattccctatgggttctgtgaccactgctggaccaaggacgtggatgaccctcccctagtcactcatccatcccctggctccagagatggtcacatgacccaggcctggccagtcaaagtagtctctcccctggccacagtaattggtcatgtgatgcaagccagcttactagcactttgagaatgagtctcctgttgagctggtaggatgtaagcctggagctaatggcgatcatctttgccaccacctggggagatcctgcttgggaatgaaattaacacaaaggaagtccaacctgagaaatggccaaatatatttcctgataacattatgtggccctctggatccagccatgcctgaggtctacccctgggcttttggattatgtgtacagttggttcatccctttttctgctaattcgagtcatggctaatttaacaccctttagaaccttaaagaaccatcagcatcacccgggaacttttttagaaatgcaaaatctctactgctttggatcctgggtcaaaaaaaagaaaaaaaaagaaatgcaaaactttaggccctgccccagatttactaaatc

SEQ ID NO: 21289 - DNA, 1491 bp, Homo sapiens
  SIMILAR (3)..(707): 1001254mologous to Homo sapiens 8-hydroxyguanine-DNA glycosylase,accession number Y13277,Smith-Waterman Score=1256.
acaagagccaggctagcaggcccacaccagacgagctggaggccgtgcgcaagtacttccagctagatgttaccctggctcaactgtatcaccactggggttccgtggactcccacttccaagaggtggctcagaaattccaaggtgtgcgactgctgcgacaagaccccatcgaatgccttttctcttttatctgttcctccaacaacaacatcgcccgcatcactggcatggtggagcggctgtgccaggcttttggacctcggctcatccagcttgatgatgtcacctaccatggcttccccagcctgcaggccctggctgggccagaggtggaggctcatctcaggaagctgggcctgggctatcgtgcccgttacgtgagtgccagtgcccgagccatcctggaagaacagggcgggctagcctggctgcagcagctacgagagtcctcatatgaggaggcccacaaggccctctgcatcctgcctggagtgggcaccaaggtggctgactgcatctgcctgatggccctagacaagccccaggctgtgcccgtggatgtccatatgtggcacattgcccaacgtgactacagctggcaccctaccacgtcccaggcgaagggaccgagcccccagaccaacaaggaactgggaaactttttccggagcctgtggggaccttatgctggctgggcccaagcggctggatcagatgcctcctgaagaattacagacttcttcctctagacttggagggcctccttggcaatgcatttgatggccaccagcttctgcgtcctcttatcttctgccaggatcacctccgagaaggcccccctatcgggagaggggattcacaaggtgaagaactggaaccccagcttccctccagcctctcctccattccctatgggttctgtgaccactgctggaccaaggacgtggatgaccctcccctagtcactcatccatcccctggctccagagatggtcacatgacccaggcctggccagtcaaagtagtctctcccctggccacagtaattggtcatgtgatgcaagccagcttactagcactttgagaatgagtctcctgttgagctggtaggatgtaagcctggagctaatggcgatcatctttgccaccacctggggagatcctgcttgggaatgaaattaacacaaaggaagtccaacctgagaaatggccaaatatatttcctgataacattatgtggccctctggatccagccatgcctgaggtctacccctgggcttttggattatgtgtacagttggttcatccctttttctgctaattcgagtcatggctaatttaacaccctttagaaccttaaagaaccatcagcatcacccgggaacttttttagaaatgcaaaatctctactgctttggatcctgggtcaaaaaaaagaaaaaaaaagaaatgcaaaactttaggccctgccccagatttactaaatc

SEQ ID NO: 21290 - DNA, 2108 bp, Homo sapiens
  SIMILAR (311)..(1582): 1001254mologous to Homo sapiens 8-hydroxyguanine-DNA glycosylase,accession number Y13277,Smith-Waterman Score=2288.
gaacccagaagaacacagctgtgcgcgcccacaggctctgggggcgggagaagataagtcgcaaggagggggcgggacctacacctcaggaaagccggagaattggggcacgaagcggggctttgatgacccgcaaagggcgaggcatgcaggaggtggaggaattaagtgaaacagggaaggttgttaaacagcaccgtgtgggcgaggccttaagggtcgtggtccttgtctgggcggggtctttgggcgtcgacgaggcctggttctgggtaggcggggctactacggggcggtgcctgctgtggaaatgcctgcccgcgcgcttctgcccaggcgcatggggcatcgtactctagcctccactcctgccctgtgggcctccatcccgtgccctcgctctgagctgcgcctggacctggttctgccttctggacaatctttccggtggagggagcaaagtcctgcacactggagtggtgtactagcggatcaagtatggacactgactcagactgaggagcagctccactgcactgtgtaccgaggagacaagagccaggctagcaggcccacaccagacgagctggaggccgtgcgcaagtacttccagctagatgttaccctggctcaactgtatcaccactggggttccgtggactcccacttccaagaggtggctcagaaattccaaggtgtgcgactgctgcgacaagaccccatcgaatgccttttctcttttatctgttcctccaacaacaacatcgcccgcatcactggcatggtggagcggctgtgccaggcttttggacctcggctcatccagcttgatgatgtcacctaccatggcttccccagcctgcaggccctggctgggccagaggtggaggctcatctcaggaagctgggcctgggctatcgtgcccgttacgtgagtgccagtgcccgagccatcctggaagaacagggcgggctagcctggctgcagcagctacgagagtcctcatatgaggaggcccacaaggccctctgcatcctgcctggagtgggcaccaaggtggctgactgcatctgcctgatggccctagacaagccccaggctgtgcccgtggatgtccatatgtggcacattgcccaacgtgactacagctggcaccctaccacgtcccaggcgaagggaccgagcccccagaccaacaaggaactgggaaactttttccggagcctgtggggaccttatgctggctgggcccaagcgggcctccttggcaatgcatttgatggccaccagcttctgcgtcctcttatcttctgccaggatcacctccgagaaggcccccctatcgggagaggggattcacaaggtgaagaactggaaccccagcttccctccagcctctcctccattccctatgggttctgtgaccactgctggaccaaggacgtggatgaccctcccctagtcactcatccatcccctggctccagagatggtcacatgacccaggcctggccagtcaaagtagtctctcccctggccacagtaattggtcatgtgatgcaagccagcttactagcactttgagaatgagtctcctgttgagctggtaggatgtaagcctggagctaatggcgatcatctttgccaccgcctggggagagcctgcttgggaatgaaattaacacaaaggaagtccaacctgagaaatggccaaatatatttcctgataacattatgtggccctctggatccagccatgcctgaggtctacccctgggcttttggattatgtgtacagttggttcatccctttttctgctaattcgagtcatggctaatttaacaccctttagaaccttaaagaaccatcagcatcacccgggaacttttttagaaatgcaaaatctctactgctttggatcctgggtcaaaaaaaagaaaaaaaaaagaaatgcaaaactttaggccctgccccagatttactaaatcaatctgcagtttaacaaaatcctcaggtgatttgtatgctcattgaactttaagaagcagtgttttagaacaggttcttaaaaaggaacaaataaactcatttaactaaagttaactg

SEQ ID NO: 21291 - DNA, 4321 bp, Homo sapiens
  SIMILAR (864)..(3671): 991254mologous to Homo sapiens putative 8-hydroxyguanine DNA glycosylase,accession number AF176815,Smith-Waterman Score=4948.
ccggactcgaggtggccgatgtgacagcatgggggtggactttgatgtgaagactttctgccacaacttgcgggcgactaagccaccatacgagtgcccggtggagacctgccgaaaggtctacaagagttacagtggtattgagtaccacctgtaccactatgaccacgacaacccaccacccccacaacaaactccactccgcaagcacaagaaaaaggggcgccagtcacgcccagccaacaagcagtcacccagcccctcagaggtctcacagtcaccaggccgtgaggtgatgagctatgcacaggcccagcgcatggtggaggtggacttgcatggccgcgtccaccgcatcagcatctttgacaacctggatgtggtgtcagaggatgaggaagcccccgaggaggcccctgagaatggcagcaacaaggagaacactgagacaccagctgctactcccaagtcaggcaaacataagaacaaggagaagcgcaaggactccaaccatcaccaccaccacaatgtttctgcgagcaccactcccaagctgccagaggtggtctatcgggagctggaacaggacacccctgatgccccaccccggccaacttcctattaccggtacatcgagaagtctgcagaggagctggacgaggaagtagagtatgacatggacgaggaggactacatctggctggatatcatgaatgagcgtcggaagacagagggtgtaagtcccatcccgcaggagatctttgagtacctaatggaccgactggagaaggagtcgtactttgagagtcataataaaggcgaccctaatgcgctagtggacgaggatgctgtttgctgtatcttgcaatgatggtgagtgccagaacagcaatgtcatcctcttctgtgacatgtgcaacctggccgtgcaccaggagtgctacggtgtcccctatatccctgagggccagtggctgtgccgccgttgcctgcagtcaccctctcgtgctgtggattgtgccctgtgccccaacaagggcggtgccttcaagcagacagatgacgggcgctgggcccatgtggtgtgtgccttgtggatccctgaggtctgcttcgccaacacggtcttcctagagcctattgacagcattgagcacatcccaccagctcgctggaagctcacctgctacatttgcaaacaacggggctcaggggcctgcatccagtgccacaaggccaactgttacacagctttccatgtgacatgcgcccagcaggctggcctttacatgaagatggagcctgtgcgggagacaggcgccaacggcacctctttcagtgtccgcaagacagcctactgcgacatccacacgcctccaggttcagcacgccgactgcctgccctgtcccacagcgagggtgaggaggatgaagatgaggaggaggatgagggtaagggctggagctcagagaaagtcaagaaggccaaggccaagtcccggatcaaaatgaagaaggcacggaagatcctggcagagaagcgggcagcagcacctgtggtgtcagtgccctgcatcccaccacacaggcttagtaaaatcaccaaccgcctgaccatccaaaggaagagccagttcatgcagaggctgcacagctactggacactgaagcggcagtcacggaatggggtcccattgctacgtcgcctgcagacacacctgcaatctcagaggaactgtgaccaagttgggagagattctgaggataagaactgggcccttaaagaacagctcaagtcctggcagcggctccggcatgacttggagcgagctcggctgctcgtggaattgatccgcaagcgggaaaaactcaaaagggagacgatcaaggttcagcagattgccatggagatgcagctgactcctttcctcatcctccttcgcaaaaccttggagcagctccaagagaaggacacaggcaacatcttcagcgagccggtccctctgtctgaggtacctgactacctagaccacatcaaaaagcccatggactttttcaccatgaagcagaacttggaggcttaccgctacctgaattttgatgattttgaggaggacttcaacctcatcgtcagcaactgcctcaagtataacgccaaggacaccatcttctaccgggcagcagtgcggcttcgtgagcagggtggtgctgtcgtccgccaggcccggcgccaggcagaaaaaatgggcattgactttgagacgggcatgcatatcccccacagcctggctggagatgaggccacacaccacactgaagatgcagccgaggaagagcggctggtcttgctggagaaccagaagcacctgccagtggaagaacagctaaagctgcttctggagcggctggacgaagtgaatgccagcaagcagagtgtgggccgctcacggcgtgcaaagatgatcaagaaagagatgacggcactgcggcggaagcttgcccatcagcgagagacgggacgtgatggccctgagcggcatggcccctcgagccggggtagtctgacaccccacccggcagcctgtgacaaggatgggcagacagatagtgcggcagaggagagcagcagccaggagacaagcaaaggcctgggtcccaacatgtcctcaacccccgcacatgaggtgggcaggagaacctcagttctgttctccaaaaagaacccgaagacagctggaccgcccaagaggccgggccggccccccaaaaaccgggagagccagatgacccccagccacggaggcagtcctgtggggcccccccagctccccatcatgagttccctgcgtcagcgcaagcggggtaggagcccccggcccagttcgagctcagacagcgacagtgataagtccacagaagaccccccaatggacttaccagccaatggcttcagcggtggaaaccaaccagtgaagaagagtttcttggtataccgtaatgactgcagccttccccggagcagctcagactctgagtccagcagcagtagcagtagcagcgctgcttcagaccggaccagcacaacgccctcaaaacaaggccggggcaaaccctccttctctcggggcactttcccagaggacagcagtgaggatacctcaggcactgagaatgaggcctactccgtgggcactggccgcggcgtgggccacagcatggtaaggaagagtctgggccggggagctggctggctgtcagaggatgaggactccccgctggatgctctggacctcgtgtgggccaaatgccgaggctatccatcatacccagctctgatcattgatccaaagatgccccgagaaggtatgttccaccatggggttcccatccctgtgcccccactggaggtgctgaaacttggggagcagatgacccaggaagcccgagagcatctctacctcgtcctcttctttgacaacaaacgaacctggcagtggctgcccaggaccaagctggttcctctgggtgtgaaccaggacctagacaaggagaagatgctggagggccgcaagtccaacatccgcaagtcagtacagatcgcctaccacagggctctgcagcaccgcagcaaggtgcaaggcgagcagagcagtgagaccagcgatagtgattgatactgctcaacacagcccaacctatagtgccctgtgacttctctcctcccctttgctcactgtcctggagtggcaccggcctctgcactgactcatttctggtcttggggccagtctcaggggaagctgggtgggggaggtccctcctgccctaagtgcagctggactgtacagaacactccaagggccaatggcagttcagcgcaaggagagggagggcccacaggtcagaaaaagctccagagacctcacagcattgtagggcggggtggtgggccaaagttaggacactgcgtaaaacaggccatcccaccacctctacctgctcatgccaggagaatccataactgcctagagcctggggccctaccggtcgtgaggtgagtgggcatctgtccagcctggaagaggggcactaggtgactccctcccctgctgttgtaaatactgtaattatcggagaatttaaattattctcatttgtaactgcgtttccgggtcgcgccagagtcatttggtactaaaaaaaaaaagactgggggctgtccccatttcccttctctttcccatagattcccccacctttcaaactggtttgtatttatttcaaaggaagaaaatatattgattcttagaaaataaaaaaa

SEQ ID NO: 21292 - DNA, 2628 bp, Homo sapiens
  SIMILAR (565)..(2490): 981254mologous to Homo sapiens putative 8-hydroxyguanine DNA glycosylase,accession number AF176815,Smith-Waterman Score=3274.
atggagaacaaaatcactggatataccaccgttgatatatcccaatggcatcgtaaagaacattttgaggcatttcagtcagttgctcaatgtacctataaccagaccgttcagctggatattacggcctttttaaagaccgtaaagaaaaataagcacaagttttatccggcctttattcacattcttgcccgcctgatgaatgctcatccggaattccgtatggcaatgaaagacggtgagctggtgatatgggatagtgttcacccttgttacaccgttttccatgagcaaactgaaacgttttcatcgctctggagtgaataccacgacgatttccggcagtttctacacatatattcgcaagatgtggcgtgttacggtgaaaacctggcctatttccctaaagggtttattgagaatatgtttttcgtctcagccaatccctgggtgagtttcaccagttttgatttaaacgtggccaatatggacaacttcttcgcccccgttttcaccatgggcaaatattatacgcaaggcgacaaggtgctgatgccgctggcgattcagagagattctgaggataagaactgggcccttaaagaacagctcaagtcctggcagcggctccggcatgacttggagcgagctcggctgctcgtggaattgatccgcaagcgggaaaaactcaaaagggagacgatcaaggttcagcagattgccatggagatgcagctgactcctttcctcatcctccttcgcaaaaccttggagcagctccaagagaaggacacaggcaacatcttcagcgagccggtccctctgtctgaggtaaccgaattggacgaagtacctgactacctagaccacatcaaaaagcccatggactttttcaccatgaagcagaacttggaggcttaccgctacctgaattttgatgattttgaggaggacttcaacctcatcgtcagcaactgcctcaagtataacgccaaggacaccatcttctaccgggcagcagtgcggcttcgtgagcagggtggtgctgtgctccgccaggcccggcgccaggcagaaaaaatgggcattgactttgagacgggcatgcatatcccccacagcctggctggagatgaggccacacaccacactgaagatgcagccgaggaagagcggctggtcttgctggagaaccagaagcacctgccagtggaagaacagctaaagctgcttctggagcggctggacgaagtgaatgccagcaagcagagtgtgggccgctcacggcgtgcaaagatgatcaagaaagagatgacggcactgcggcggaagcttgcccatcagcgagagacgggacgtgatggccctgagcggcatggcccctcgagccggggtagtctgacaccccacccggcagcctgtgacaaggatgggcagacagatagtgcggcagaggagagcagcagccaggagacaagcaaaggcctgggtcccaacatgtcctcaacccccgcacatgaggtgggcaggagaacctcagttctgttctccaaaaagaacccgaagacagctggaccgcccaagaggccgggccggccccccaaaaaccgggagagccagatgacccccagccacggaggcagtcctgtggggcccccccagctccccatcatgagttccctgcgtcagcgcaagcggggtaggagcccccggcccagttcgagctcagacagcgacagtgataagtccacagaagaccccccaatggacttaccagccaatggcttcagcggtggaaaccaaccagtgaagaagagtttcttggtataccgtaatgactgcagccttccccggagcagctcagactctgagtccagcagcagtagcagtagcagcgctgcttcagaccggaccagcacaacgccctcaaaacaaggccggggcaaaccctccttctctcggggcactttcccagaggacagcagtgaggatacctcaggcactgagaatgaggcctactccgtgggcactggccgcggcgtgggccacagcatggtaaggaagagtctgggccggggagctggctggctgtcagaggatgaggactccccgctggatgctctggacctcgtgtgggccaaatgccgaggctatccatcatacccagctctgatcattgatccaaagatgccccgagaaggtatgttccaccatggggttcccatccctgtgcccccactggaggtgctgaaacttggggagcagatgacccaggaagcccgagagcatctctacctcgtcctcttctttgacaacaaacgaacctggcagtggctgcccaggaccaagctggttcctctgggtgtgaaccaggacctagacaaggagaagatgctggagggccgcaagtccaacatccgcaagtcagtacagatcgcctaccacagggctctgcagcaccgcagcaaggtgcaaggcgagcagagcaccccagacaaacccccggcaaacgtcccattccgaggaaagcatgagcagatggagtatggaagaaatgcccaagacggcaggcagcagctgtggcggccggcgggacgacaatccgaggagaggcctctgatgtcctga

SEQ ID NO: 21293 - DNA, 1677 bp, Homo sapiens
  SIMILAR (346)..(1401): 921254mologous to Homo sapiens 8-hydroxyguanine-specific DNA glycosylase type 1c,accession number AF088282,Smith-Waterman Score= 1705.
ctccaccgcggtgcgccgcccgggcaggtagaacccagaagaacacagctgtgcgcgcccacaggctctgggggcgggagaagataagtcgcaaggagggggcgggacctacacctcaggaaagccggagaattggggcacgcaagcgggggggctttgatgaccccccaaagggcgaggcatgcaggaggtggaggaattaagtgaaacagggaaggttgttaaacagcaccgtgtgggcgaggccttaagggtcgtggtcctcgtctgggcggggtctttgggcgtcgacgaggcctggttctgggtaggcggggctactacggggcggtgcctgctgtggaaatgcctgcccgcgcgcttctgcccaggcgcatggggcatcgtactctagcctccactcctgccctgtgggcctccatcccgtgccctcgctctgagctgcgcctggacctggttctgccttctggacaatctttccggtggtggagggagcaaagtcctgcacactggagtggtgtactagcggatcaagtatggacactgactcagactgaggagcagctccactgcactgtgtaccgaggagacaagagccaggctagcaggcccacaccagacgagctggaggccgtgcgcaagtacttccagctagatgttaccctggctcaactgtatcaccactggggttccgtggactcccacttccaagaggtggctcagaaattccaaggtgtgcgactgctgcgacaagaccccatcgaatgccttttctcttttatctgttcctccaacaacaacatcgcccgcatcactggcatggtggagcggctgtgccaggcttttggacctcggctcatccagcttgatgatgtcacctaccatggcttccccagcctgcaggccctggctgggccagaggtggaggctcatctcaggaagctgggcctgggctatcgtgcccgttacgtgagtgccagtgcccgagccatcctggaagaacagggcgggctagcctggctgcagcagctacgagagtcctcatatgaggaggcccacaaggccctctgcatcctgcctggagtgggcaccaaggtggctgactgcatctgcctgatggccctagacaagccccaggctgtgcccgtggatgtccatatgtggcacattgcccaacgtgactacagctggcaccctaccacgtcccaggcgaagggaccgagcccccagaccaacaaggaactgggaaactttttccggagcctgtgggaaccttatgctggctgggcccaagcgactccaccctccttacaggtgctgttcagtgccgacctgcgccaatcccgccatgctcaggagccaccagcaaagcgcagaaagggttccaaagggccggaaggctagatggggcaccctggacaaagaaattccctyaagcaccttcccctccattccccacttctctctccccatccccacccagtctcatgttggggaggggcctccctgtgactacctcaaaggccaggcacccccaaatcaagcagtcagtttgcacaacaagatggggtgggggatattgagggagacagtcgctaaggatggttttatcttccctttattacaagaaggaacaataaaatagaaacatttgtatggaaaaaaaaaaaaaaaaaa

SEQ ID NO: 21294 - DNA, 2533 bp, Homo sapiens
  SIMILAR (1669)..(2097): 391254mologous to Homo sapiens ADA3-like protein,accession number AF069733,Smith-Waterman Score=179.
  misc_feature (1)...(2533): n = a,t,c or g
agagcccttacgaacgcttgggccttccggaagttttccacctagggctgtctcggtatttttaaattcttgcactcgagtcactatttaagctcctccaggaatgggtgcagcttccctttgtgccttcggccttcttgtcacctttgccacagcctcccccaggtatgcaatggtacagcccagcttcagattgggcaccaaattaggacaagccgaagcggacgagcccttcgtttcttccggttctgtacccccatcctttctctcgcccctcctacccgcagctcctggcgctcggcggggctaactgcagcgcggagatctcggccgccaagctccgcctcccgccccgggctgtgccccggggctcgcctgaggccgaccacccgcaccccacctctagcggctttgctcgaggcccaccttcttcccacccccggcaaactccagtaggctcgccctcgctgactccccgcccccgcgtcaactgcaaggggcccgcccatagccagttccggggcggttgctcacatcgaccggaactccccgccccctcccgcggcccctggggccgtaggaggccgcagcgaggaggtagagggggcgggggtcgcactagggtgtccctagagaacgaggactctgaaggcgggacatttgggcgacccccgggcggggccagccattaaacagtcccacttctgtgccagacactgaactgggctcttgacgggcatcatctcttaatcctcagaacatcccagggagctccacaggatccccatatcctgggccatgagtgagttgaaagactgccccttgcagttccacgacattcaagtctgtggatcacctgaaggtctgtccccgctacacggcagtgctggcacgctcatgaggatgatggcatcggcatcgaggagctggacaccctgcagctggagctggagaccctgctgtcttctgccagccggcgccatgcgtgtgcttgaggccgaaacccagatcctcaccgacctggcaggataaggaaaggtgacagacgattcctgaagcttgggtcgagaccattgaatttggagctccccccaaacatgggaagcccaagaaagcaaaaactggaaagggaaggcaggacatgggcccgggcccttgcccaggacggcccaaatccaaaaaccttcagcccaaagatccaggaatatgaattcactgatgaccctatcgacgtgccacggatccccaaaaatgatgcccccaacaggttctgggcttcagtggagccctactgtgctgacatcaccagcgaggaggtccgcacacttgaggagttactgaagcccccagaagatgaggctgagcattacaagatcccacccctggggaagcactactcccagcgctgggcccaggaggacctgctggaggagcagaaggatggggcccgggcagcggctgtggctgacaagaagaaaggcctcatggggccactgaccgaactggacactaaagatgtggatgccctgctgaagaagtctgaggcccagcatgaacagccggaagatggatgcccctttggtgccctgacgcagcgcctcctgcaggccctggtggaggaaaatattatttcccctatggaggattctcctattcctgacatgtctgggaaagaatcaggggctgacggggcaagcacctcccctcgcaatcagaacaagcccttcagtgtgccgcatactaagtccctggagagccgcatcaaggaggagcttattgccctaggcccttttgtaggccggggacctgctcgcaaaggactccgaggatgaggtccttgctgagcttcgcaaacggcagggttgagctggaaggcacttagtgcccacaaccgcaccaagaaggcccgacctgctgaggctggcaaaggaggaggtgagccggcaggaagttgaggcagcggngtgcgcagggctgagagggagggcatggacgcctttcgcaagattcatggcttgcccggcagaagaaagcggaactccccacccaagaaaagaaaaggaccaggcctggaaaaactcttgaaaggagcgtgaagagcatccttgaagcttgcttggatggggttagccccttaaccccctgccctcaggctgattaatcttggccctaaggggaggggaagggaggcccaacttcctttctttgggccacaggaaacaattgccctgtggctgtcccttcaaatggcggcagtctcctaagaagcccgtggcccttccccctgaggtcattttggcctagctctgtacaaccaggacacaggaagccctgctgggctagcctgaggcctagtctctgcttggtcccctgagatgggggttggaggggacttcgtttctgggtcttcctcttcccctctttaccatcccccactcccctaatcccctacccctgtctccccttcaaggacttctcccttgtggttttgtaaagtgcaaacttaagaataaagtgactgctgtggtttttc

SEQ ID NO: 21295 - DNA, 331 bp, Homo sapiens
  SIMILAR (113)..(331): 1001254mologous to Homo sapiens hPTTG,accession number AJ223953,Smith-Waterman Score=370.
ggaccaacggcaactgtctgatgagtgccagccccaaaccgcgcgctgctcgggaccttagagcctctgactcaggctggaagatttgagagctggattaaaataatccagaatggctactctgatctatgttgataaggaaaatggagaaccaggcacccgtgtggttgctaaggatgggctgaagctggggtctggaccttcaatcaaagccttagatgggagatctcaagtttcaacaccacgttttggcaaaacgttcgatgccccaccagccttacctaaagcgactagaaaggctttgggaactgtcaacagagctacagaaaag

SEQ ID NO: 21296 - DNA, 1149 bp, Homo sapiens
  SIMILAR (433)..(858): 381254mologous to Homo sapiens pituitary tumor transforming gene protein,accession number AF062649,Smith-Waterman Score=117.
ggcacgaggctccggcggggaaggaggcgggctgcggctgcggctggggctgaagctgaagctggggctggggttgggggactgcccggggcttatatggctcctagcccgtttgagcgtggtctcggactgctaactgtaccaacggcaatctgtctgatgagtgccagccccaaaccgcgcgctgctcgggaccttagagcctctgactcaggctggaagatttgagagctggattaagtacttgttggctcacgcccgtgactgttccgctgtttagctcttgttttttgtgtggacactcctaggatagaaagtttggtatgttgctatacctttgcttctcccaccttccccaatatctaatatgtatttctcattcttagaataatccagaatggcgtactctgatctatgttgataaggaaaatggagaaccaggcacccgtgtggttgctaaggatgggctgaagctgggggtctggaccttcaatcaaagccttagatggggagatctcaagtttcaaacaccacgttttggcaaaacgttcgatgcccccacccagccttacctaaagctacctagaaaggctttggggaactgtcaacaggagctacagaaaagtctgtaaaggacccaggggacccctcaaacaaaaaacagccaaagcttttccggcccaaaaaagatggacctgaagaaggactgttaaaagcaaaaaagcctctgtttcctggccttcaggattgatgccctatcccagaaattagaaaaattcctttccccttcaatccctcctagactttgaggagtttttgaccctgccctgaagagcacccagattgcggcaccttccccctttgagttggagttgcctctcatgattcccttgacgagggagagagagctttgaaaaagctggtttcagctggggcccccctttcacctgtggaaggatggccctcttccaccatggggaattccaatctgtttgcagttttcctttcaaggcatttctgttcggacctggggtgttggatttgccacctgtttgctgtgacatagatatttaaatttcttagtgcttcaagagtttgtgtgtatttgtattaataaagcattcttcaacagaaaaaaaaaaaaaaaaa

SEQ ID NO: 21297 - DNA, 1348 bp, Homo sapiens
  SIMILAR (806)..(922): 941254mologous to Homo sapiens Human spermidine/spermine N1- acetyltransferase,accession number W58394,Smith-Waterman Score=208.
tatgcccggacagaggatcgcctcgctggcctactctctcctcccgtacggcgccggaatcccagctccacttaccaggccgcggctaccccgccgtcccccccgactcccgccaccccgctctctcaggctcttcaggatccaagtccgtaggccctttaaggggtctagttgccgtttgcgaggccctgggactttggtcccagacagcggggatccggatggcttccgtgcggatccgagaggccaaggagggagactgtggagatatcctgaggctgattcgggtgaaaactgcaggccggtaacccgggggtcagagtggcgcggccagagcggggtcctaagaggcgggggcagggggaggggctcgccttgggaacctgctcggggagcagcggggcccttctgctctaatctagcttccgtacccacgccttaggagctagccgaattcgaaaaactctcggatcaggtgaagatcagtgaagaaggtgggggctcagcgcccaggttctggcggaggctggggaggaaatgagggatgggttccccaggcgacagctccaggctgggcatacacccacgtcctctttctctatctctttgtcacaactccaatctcggcagccctgagagcagatggctttggagacaatcctttctatcactgtttggtagcagagattcttccagcgcccgggaagctactgggtaagagcacctggcccttagaagtccacctctccagccggcctcagaggtctccccacaggcttccagaagccttactccccttttctctctctcagggccctgcgtggtgggctatgggatatactatttcatctacagtacatggaagggacgcaccatttatctggaggatatctatgtgatgccagaatatcggggtactgggcagaagctgaggctggggtgggagcaaagcaccccacagaccccactgttatcccctgtccccagagcccagccggtgtcattttctgatccccttcagctcaaacaatagctattttttgcctctttctctccacaacaggtcaagggattggttccaaaataatcaaaaaggtggctgaggtggccttggataagggctgctcccaattccgcctggccgtcctggactggaaccagagggccatggacttgtacaaggccctaggagcccaagatctgacggaagctgagggctggcacttcttctgctttcaaggagaggcaacgagaaagttggcaggaaagtgacgccatccctaggaggatctctgtcttgagtttctccttccccatcagctgaagcactcttcagagactacgtcca

SEQ ID NO: 21298 - DNA, 1046 bp, Homo sapiens
  SIMILAR (318)..(794): 441254mologous to Homo sapiens Human spermidine/spermine N1- acetyltransferase,accession number W58394,Smith-Waterman Score=177.
tttcgtggctatgcccggacagaggatcgcctcgctggcctactctctcctcccgtacggggccggaatcccagcttcacttaccaggccgcggctaccccgccgtcccccccgactgccgccaccccgctgtctcaggcgtcttcaggatccaagtccgtaggccctttaaggggtctagttgccgtttgcgaggccctgggactttggtcccagacagcggggatccggatggcttccgtgcggatcccgagaggccaaggagggagactgtggagatatcctgaaggctgattcgggtgaagactgcaggcccggagctagccgaattcgaaaaactcttcggatcaggtgaaagatcagttgaagaagcccttgagagcagattggcttttggagacaatcctttctatcacttgttttggtaagcagagattcttccagcgcccggggaaagctactggggccctgcgtggtgggctatgggatatactatttcatctacagtacatggaagggacgcaccatttatctggaggatatctatgtgattgccggaaatatcggggtccaagggattggttcccaaaaataatcaaaaaaggtgggctgaggtggcccttggaataaggggctgctcccccaatttccgcttggcccgtcccctggacttggaacccagagggcccatgggacttgtacaaggcccctaggagccccaagatctgacggaagcttgagggctggcacttcttctgctttcaaggagaggcaacgagaaagttggcaggaaagtgacgccatccctaggaggatctctgtcttgagtttctccttcccccatcagctgaagcactcttcagcttcagagatacgtccacagacactgatgctgaggcctccctggaggaaggagggttaggggtgcctatcctcaagtattggaagagcagaatttgagggagagacctttcttccttgttgagggtgaaaaataaataagaattacatgtcctgaaaaaaaaaaaaaagtcgacgcggccgcg

SEQ ID NO: 21299 - DNA, 2334 bp, Homo sapiens
  SIMILAR (1)..(435): 931254mologous to Escherichia coli open reading frame upstream glnE,accession number Z21844,Smith-Waterman Score=720.
atggctcaggaaatcgaattaaagtttattgttaatcacagtgccgttgaggcgttgcgtgaccatctcaatacgctgggcggcgagcaccatgaccccgtgcagttgctgaatatttactacgaaacgccggataactggctgcgtgggcacgatatgggcttacgtattcgtggcgaaaacggtcgctatgagatgaccatgaaagttgcaggaagagtgacaggcgggtttcatcagcgcccggaatataacgtggcgttgagcgaaccgacgctcgacctggcgcagttaccgacggaagtctggccgaacggcgaattgcccgccgatctcgcctcccgcgtgcagccgctgttcagcacccatttttattccgaaaaatggctggtggcgggcgatggttgccccattgaaatggccctccaccggggcattcaaccggttattcgtccctttattaacatggtggagatccccagacaggtgatgtttaccgtgtatgtgacatcaacgccttacgatccgttggttacacctgtttataccattagttttggtggccgggttgaagtaccgcaaaactgcgaattaaatgccgggcagattgttgaatttgattttggtgatatcggcgcatcgttatttagtgcggcagggccgggtaatcgacctgctggtgtcatgccgcaaaccaagagcattgcggtcaaatacagaccacttccaacgaccaccaacacttccgacatcggcttaccacaaggttacaagaacaagggtctgggccagaaacactaccctggaacccaaggggcaccttattacaccagtattcaccccacgagaaaattaaggcagtaccttaatttaagcgtcaggtggatgtttttgctcttatttcgatcaatgaataaacaggaaaacaggggggttttatatcagcaggatctatgtgaacgctattcaggacgggtcacacgcgcaaaaaaaagccagcctgtttccagactggcttttgtgcttttcaagccggtgttacatcgcttttttggtcaactcgataacgcgcagctgcgcgatcgctttggccagttccgcagacgcctgagcgtaatctacgtcgccgtgagagctgctaatgtgctcttcagccttacgtttcgcttccatggctcgcgcttcgtcgagatcctggccgcgaattgcggtgtcggccagaacggtcacgttgccaggctgcacttcaagaatgccgccagacagatagataaactcttcgtgaccgtgctgtttcacgatgcgaatcataccaggcttaatggcggtgagcagcggtgcgtggccagggtagatccccagttcaccttcgctacccgttacctggattttctcgaccagaccagagaacatttgttgctctgcgctgacgacgtccaggtgcctcagagtcacttccccaggagtggccgggagagggctgagagtttctgtgctctacagtttggagacgctggccttcggctcctgtcggaacacctcaccatgctccaggtgctgaacctgtgcgagaccccggtcacagacgctggcctgctggccctgagctccatgaagagtctctgcagtttaaacatgaacagcaccaagctctcagctgacacctacgaagatctgaaggagagagagaaagttctgggatttggtggctacaaacttttcaaccaccagaaaagtacaaatgatagtggaatcaggggccgccagcttcccctggtgcagactgcagctcagcattgccagggagaccatctgcccttctcactccagtcttcacatcccccagaaggaacccatatcggtgggctcaggcagatgctgacttctggactggtcaactgtggctgccaggaccagagccagagagtttcccgaacactcatagccagcccggagactccagaaaagaaaagaaaagaaagaaggaaaagggagagaaagaaagagaagggaagaagaaagaaaaagcgaagaggagagaagaagaagaagagaagggaaggaggagagaaaagagaagaagaagaggagaagagaggcagggagaacaaaatggcaacaaaagccaaaattgacaaatgggatctaattaaactaaagagcttctgcacagcaaaagaaaccaccatcagagtgaaaaggaaacctacagaatgggagaaaatttttacaatctacccatctgacaaagggctaatatccagaatctacaaagaacttaaacaaatttacaagaaaaaatcaaccccatcaaaaagtgggcgaaggatatga

SEQ ID NO: 21300 - DNA, 1081 bp, Homo sapiens
  SIMILAR (295)..(438): 411254mologous to Homo sapiens Polyproline-rich domain from dynamin,accession number Y56033,Smith-Waterman Score=61.
cgagattccgctcgaggtcaagagttattttgtcgcgggtgaaacgtcttcctgccttgagctgggagcttcaccaggcttcggtgtagcggacgtccacttccttcaaattgggaagcttggcctgggggtggcaataagagtccctgtcacgtgtaggccattcccttgcagaagctgccagtgcctggctccacccgcattgccggctgggggtctctgccaccctctccccaccttggtgctgtgggctacctgggctcttggaggggtgggtggcctcggtgtccctgtccctgacatgggcctggtacacagcagaggcccagaagcatctggaggatgccccagtgagcacgccctggcggcaggagcctggctgtaggaggtgggccccggccaagggctgccgggggattcccttaagtagcttccagagcacgaaggtgccagcgtggctcacgggtgccattgtgccttctcgcctttgagcccagcccttctctcccaggatgctggcctctgccagtcccgcccgctccttctggggcagcgtaggtgtctgagtcaggaggtctggagtgggcttgggaatgtacatttctgccagcccccagaagacgctgccaccacccccagctgcccggaggcactcacagctcagggccagcaggccagcgtctgtgaccgggtctcgcacaggttcagcacctggagcatggtgaggtgttccgacaggaccgaaggccagcgtctccaaacactcggagattaagtgagcaagtcgggtaggcagtgagtaagcggtcgctggctcactgtcaggacttatctcaggcaacaggctttcctggtcattctttttccgcgtctggcatcggagcctttcctcagaagcttccagggtatgattgggttctgaaggctgccactctatcgtgggttcaagcccggtgcgcaggcagcgcagagcgaattgcgtctgcgttatcagcagtctaatactgttcggttgtgggacagtggtcttcccagggtcggatggggtgacaccctggtgcctggcttcaccacacaccat

SEQ ID NO: 21301 - DNA, 1380 bp, Homo sapiens
  SIMILAR (1129)..(1344): 1001254mologous to Homo sapiens iron inhibited ABC transporter 2,accession number AF261091,Smith-Waterman Score=377.
atgcggggtctgtgccgggtctacgagcggatcctcttcatgccccggcctgactacgcatcccgctatgctggcgagatgcggggtctgtgccgggtctacgagcggatcctcttcatgccccggcctgactacgcatcccgctatggtgaggcctggggatgtggggacggctgcgcctaccaaagcctgcccacctcccgccccataccccattgctgctgcgagccctcacccccacagcccggtcttctggaagggctgctggacaagaacaaggtggcctgggtcctggctttggctctgtggacgcgagcaggaaacatgtactgtattcccaggagaggagatactggaatgaccctggccctctccccacccttcctccctgtggaggaggctttgtctgatgaggtggtgagggcctgcaccagccgcacaatccctttcccaggcggagccctctttattcggcccttcatgctgctcctggatgagcctaccaaccacctggacctagatgcttgcgtgtggttggaagaagaactaaaaacagccctctttattcggcccttcatgctgctcctggatgagcctaccaaccacctggacctagatgcttgcgtgagaatggaactggaaatgcagatgcaagagaacagaaaaaaggaacaagagaagagcaaggaaaaaggaaaggatgaaaaagagaagaagaaaggaaaggaagaaaaggccaagaagggggtgagaatggaactggaaatgcagatgcaagagaacagaaaaaaggaacaagagaagagcaaggaaaaaggaaaggatgaaaaagagaagaagaaaggaaaggaagaaaaggccaagaagggggaagtggatgcggtgttgcaagtgttgccatccaaatgtatccctatgatctgtgccgggcatgaagaatacttaagaaagtccatgctgctctctgctattgggaagcgtgaagtgcccatccctgagcacatcgacatctaccatctgactcgagagatgccccctagtgacaagacacccttgcattgtgtgatggaagtcgacacagagcgggccatgctggagaaagaggcagagcggctggctcatgaggatggaaagtccatgctgctctctgctattgggaagcgtgaagtgcccatccctgagcacatcgacatctaccatctgactcgagagatgccccctagtgacaagacacccttgcattgtgtgatggaagtcgacacagagcgggccatgctggagaaagaggcagagcggctggctcatgaggatgcggagtgtgagaagctcatggagctctacgagccctggaggagctggatgccgacaagcgagagatga

SEQ ID NO: 21302 - DNA, 2225 bp, Homo sapiens
  SIMILAR (1302)..(1640): 861254mologous to Homo sapiens ABC transporter,accession number AJ005016,Smith-Waterman Score=502.
gctggcgtcctggcctctcaccccaacagtactgatgttcacatcatcaacctctcactcacctttcatggtcaagagctgctcagtgacaccaaactggaattaaactcaggccgtcgttatggcctcattggtttaaatggaattggaaagtccatgctgctctctgctattgggaagcgtgaagtgcccatccctgagcacatcgacatctaccatctgactcgagagatgccccctagtgacaagacacccttgcattgtgtgatggaagtcgacacagagcgggccatgctggagaaagaggcagagcggctggctcatgaggatgcggagtgtgagaagctcatggagctctacgagcgcctggaggagctggatgccgacaaggcagagatgagggcctcgcggatcttgcatggactgggtttcacacctgccatgcagcgcaagaagctaaaagacttcagtgggggctggaggatgagggttgcccttgccagagccctctttattcggcccttcatgctgctcctggatgagcctaccaaccacctggacctagatgcttgcgtgtggttggaagaagaactaaaaacttttaagcgcatcttggtcctcgtctcccattcccaggattttctgaatggtgtctgtaccaatatcattcacatgcacaacaagaaactgaagtattatacgggtaattatgatcagtatgtgaagacgcggctagagctggaggagaaccagatgaagaggtttcactgggagcaagatcagattgcacacatgaagaactacattgcgaggtttggtcatggcagtgccaagctggcccggcaggcccagagcaaggagaagacgctacagaaaatgatggcatcaggactgacagagagggtcgtgagcgataagacactgtcattttatttcccaccatgtggcaagatccctccacctgtcattatggtgcaaaatgtgagcttcaagtatacaaaagatgggccttgcatctacaataatctagaatttggaattgaccttgacacacgagtggctctggtagggcccaatggagcagggaagtcaactcttctgaagctgctaactggagagctactacccacagatggcatgatccgaaaacactctcatgtcaagatagggcgttaccatcagcatttacaagagcagctggacttagatctctcacctttggagtacatgatgaagtgctacccagagatcaaggagaaggaagaaatgaggaagattcattgggcgatacggtctcactggggaaacaacaggtgagcccaatccggaacttgtcagacgggcagaagtgccgagtgtgtctggcctggctggcctggcagaacccccacatgctcttcctggatgaacccaccaatcacctggatatcgagaccatcgacgccctggcagatgccatcaatgagtttgagggtggtatgatgctggtcagccatgacttcagactcattcagcaggttgcacaggaaatttgggtctgtgagaagcagacaatcaccaagtggcctgggagacatcctgggcttacaaggagcacctcaagtccaagctggtggattgaggagccccagctcaccaaggagttacccacaacgtgttgagccttttacctgggttcgggtcaggagctccatcgtgggaactaacagctgctaacctgaccagccgctcaggacaggaccctggggctacactcctgcattgctgcaatacatgctcccccagcctctcccctgcccctcaacctgccttagctgcactctcttacctacagctggacagtacctgtctgtttcctgtcctccttccagttacatctgtccatgtctggactcggctggccgttccctccagccccttgctggttatcttacatctgagtgtgatgcagtcagaggcacctgcgggttagcccaggggcccaagccctggatttggcctgcggaggagcttaggatcctcgttttctgggttttggtgatgttggaggagtaccccccagcccaccgccccgattcctttttgcttctggtttggagctccggaccaggaccttcgtcctggtcagtttttaaataattatttagcagtgtaacttttaaacctgcgtgacatctacaaagcgcccaataaagaaagaggaagccaaaaaaaaaaaaaaaaaa

SEQ ID NO: 21303 - DNA, 2271 bp, Homo sapiens
  SIMILAR (111)..(809): 671254mologous to Homo sapiens ATP-binding cassette, sub- family F (GCN20), member 2,accession number BC001661,Smith-Waterman Score=691.
cccacgcgtacgcgcggaggatcctaaggagcagctctgttgcgacataagccgagcagcgaggcccagctccctgaaacaacagtaacctacccctgtgggtcatcatcatgccctccgacctggccaagaagaaggcagccaaaaagaaggaggctgccaaagctcgacagcggcccagaaaaggacatgaagaaaatggagatgttgtcacagaaccacaggtggcagagaagaatgaggccaatggacgagagagaccagagaagtagatttgctgaccaaggagctagaggactttgagatgaagaaagctgctgctcgagctgtcactggcgtcctggcctctcaccccaacagtactgatgttcacatcatcaacctctcactcacctttcatggtcaagagctgctcagtgacaccaaactggaattaaactcaggccgtcgttattggcctcattggtttaaatggaattggaattggaaagtccatgctgctctttgctattgggaagcgtgaagtgcccatccctgagcacatcgacatctaccatctgactcgagagatgccccctagtgacaagacacccttgcattgtgtgatggaagtcgacacagagcgggccatgctggagaatgaggcagagcggctggctcatgaggatgcggagtgtgagaagctcatggagctctacgagcgcctggaggagctggatgccgactaggcagagatgagggcctcgcggatctttgcatggactgggtttcacacctgccatgcagcgcaagaagctaaaagacttcagtgggggctggaggatgagggttgcccttgccagagccctctttattcggcccttcatgctgctcctggatgagcctaccaaccacctggacctagatgcttgcgtgtggttggaagaagaactaaaaacttttaagcgcatcttggtcctcgtctcccattcccaggattttctgaatggtgtctgtaccaatatcattcacatgcacaacaagaaactgaagtattatacgggtaattatgatcagtatgtgaagacgcggctagagctggaggagaaccagatgaagaggtttcactgggagcaagatcagattgcacacatgaagaactacattgcgaggtttggtcatggcagtgccaagctggcccggcaggcccagagcaaggagaagacgctacagaaaatgatggcatcaggactgacagagagggtcgtgagcgataagacactgtcattttatttcccaccatgtggcaagatccctccacctgtcattatggtgcaaaatgtgagcttcaagtatacaaaagatgggccttgcatctacaataatctagaatttggaattgaccttgacacacgagtggctctggtagggcccaatggagcagggaagtcaactcttctgaagctgctaactggagagctactacccacagatggcatgatccgaaaacactctcatgtcaagatagggcgttaccatcagcatttacaagagcagctggacttagatctctcacctttggagtacatgatgaagtgctacccagagatcaaggagaaggaagaaatgaggaagatcattgggcgatacggtctcactgggaaacaacaggtgagcccaatccggaacttgtcagacgggcagaagtgccgagtgtgtctggcctggctggcctggcagaacccccacatgctcttcctggatgaacccaccaatcacctggatatcgagaccatcgacgccctggcagatgccatcaatgagtttgagggtggtatgatgctggtcagccatgacttcagactcattcagcaggttgcacaggaaatttgggtctgtgagaagcagacaatcaccaagtggcctggagacatcctggcttacaaggagcacctcaagtccaagctggtggatgaggagccccagctcaccaagaggacccacaacgtgtgcaccctgacattggcatctctgccaaggccatgagcatcatgaactcgtttgtaaacgacgtgtttgagcagctggcgtgtgaggctgcccggctggcccagtactcgggccggaccaccctgacatcccgagaagtccagacggctgtgcgtctgctgctgcctggggagctggccaagcacgctgtgtctgagggcaccaaggctgtcaccaagtacaccagctccaagtgacccagggcctgacaaaaataaagggtgaactgttaaaaaaaaaaaa

SEQ ID NO: 21304 - DNA, 797 bp, Homo sapiens
  SIMILAR (734)..(3): 851254mologous to Homo sapiens putative p150,accession number U93574,Smith-Waterman Score=1046.
catgctgttttggttactgtagccttgtagtatagtttgaagtcaggtagcgtgatgcctccagctttgttcttttggcttaggattgacttggcgatgcgggctcttttttggttccatatgaacttgaaagtcgttttttccaattctgtgaagaaagtcattggtagcttgatggggatggcattgaatctataaattaccttgggcagtatggccatttttacgatattgattcttcctacccatgagcatggaatgttcttccatttgtttgtatcctcttttatttcattgagcagtggtttgtagttttccttgaagaggtccttcacgtcccttataagttggattcctaggtattttattctctttgaagcaattgtgaatgggagttcactcatgatttggctctctgtttgtctgttattggtgtgtaagaatgcttgtgatttttgcacattgattttgtatcctgagactttgctgaagttgcttatcagcttaaggagattttgggctgagatgatggcgttttctagatatacaatcatgtcatctgcaaacagggacaacttgacttcctcttttcctaattgaatgccctttatttccttctcctgcctgattgccctctggtagaatttggctgtgaatccatctagtcccggactttttttggttggtaagctattaattattgcctcaatttcagatcctgttattggtgtattcagagattcaacttcttcctggtttagtcttgggagagtgtatgtgtcgaggaatttatccat

SEQ ID NO: 21305 - DNA, 1236 bp, Homo sapiens
  SIMILAR (655)..(5): 951254mologous to Homo sapiens putative p150,accession number U93565,Smith-Waterman Score=1049.
actaccatgctgttttggttactgcagccttgtagtatagtttgaagtcaggtagcatgatgcctccagctttgttcttttggcttaggattgacttggcaatgcgggctcttttttggttccatatgaactttaaggtagttttttccaattctgtgaagaaagtcattggtagcttgatggggatggcattgaatctataaattaccttgggcagtatggccattttcacgatattgattcttcctacccatgagcatggaatgttcttccatttgtttgtatcctcttttatttcattgagcagtggtttgtagctctccttgaagaggtccttcacatcccttgtaagttggattcctaggtattttattctctttgaagcaattgtgaatgggagttcactcatgatttggctttctgtttgtctgttattggtgcataagaatgcttgtgatttttgcacattgattttgtatcctgagactttgttgaagttgcttatcagcttaaggagattttgggctgagacgatggggttttctagatatgcaatcatgtcatctgcaaacagggacaatttgacttcctcttttcctgattgaatgccctttatttccttctcctgcctgattgccctggccagaacttccaacccatcaatatctaatttattgagagtttttagcatgaagggttgttgaattctgtcaaaggccttttctgcatccattgagataatcctgtggtttttgtctttggttctgtttatatgctggattacgtttattgattttcgtatgttgaaccacccttgcacccctgggatgaagcccacttgatcatggtggataagctttttgatgtgttgctggattcggtttgccagtattttattgaggatttttgcatcaatgttaatcaaggatattggtctaaaattctctttttttgttgcatctctgccaggctttggtatcaggatgatgctggcctcataaaatgagttagggaggattccctctttttctattgattggaatagtttcagaaggaatggcaccagctcctccttgtacctctggtagaattcggctgtgaatccatctggtcctggactttttttggttggtaagctattaattattgcctcaatttcagagcctggtctattcagagattcaacttcttcctggtttagtcttgggagagtgtatgtgtcgaggaatttgtcca

SEQ ID NO: 21306 - DNA, 1260 bp, Homo sapiens
  SIMILAR (653)..(612): 1001254mologous to Homo sapiens putative p150,accession number U93572,Smith-Waterman Score=63.
tcatgctattttggttactgtagccttgtagtatagtttgaagtcaggtagcgtgatgcctccagctttgttcttttggcttaggattgacttggcaatgcgggctctttgttggttccatatgaactttaaagtagttttttccaattctgtgaagaaagtcattggtagctcgatggggatggcattgaatctataaattaccttgggcagtatggccattttctcgatattgattcttcctacccatgagcatggaatgttcttccatttctttgtatcctcttttacttcattgagcagtggtttgtagttctccttggagaggtccttcacatcccttgtaagttggattcttaggtattttattctctttgaagcaattgtgaatgggagttcactgatgatttgactctctgtttgtttgttattggtgtataagaatgcttgtgatttttgcacattgattttgtatcctgagactttgctgaagttgcttatcagcttaaggagattttgggctgagatgatggggttttctagatatacaatcatgtcatctgcaaacagggacaattggacttcctcttttcctaattgaatgccctttcttccttctcctgcctgattgccctggccagaacttccaacactctggtagaatttagctgtgaatccatctggtcctggactttttttggttggtaagctgttaattattgcctcaatttcagagcctgttattggtctattcagagattcaacttcttcctggcttagtcttgggagtgtgtatgtgtcgaggaattcaaccatttcttctagattttctagtttatttgcgtagaggtgtttatagtattctctgatggtagtttgtatttctgtgggatcactggtgatatcccctttgtcattttttattgcatctatttgattcttctctcttttcttctttattagtcttgctagcagtttatcaattttgttgatcttttcaaaaaaccagctcttcagttctgctctaatcttagttatttcttgccttctgctagcttttgaaggtgtttgctcttgctcctctagttcttttaattgtgatgttagggtgtcaattttagatctttcctgctttctcttatgggcatttagtgctatacatttccctctacacactgctttgaatgtgtcccagagattctggtatgttgtgtctttgttctcgttggtttcaaagaacatctttatttctgccttcat

SEQ ID NO: 21307 - DNA, 1059 bp, Homo sapiens
  SIMILAR (1059)..(634): 951254mologous to Homo sapiens NAG13,accession number AF194537,Smith-Waterman Score=696.
ttatgctgttttggttactgtagccttgtagtatagtttgaagtcaggtagcatgatgccttcagctttattcttttggcttaggattgacttggcgatgcgggctctcttttggttccatatgaacttgaaagtagttttttccaattctgtgaagaaagtcattggtagcttgatggggatggcattgaatctgtaaattaccttgggcagtatggccattttcacgatattgattcttcctacccatgagcatggaatgttcttccatttgtttgtatcctcttttatttcattgagcagtggtttgtagttctccttgaagaggtccttcacgtcccttgtaagttggattcctaggtattttattctctttgaagcaatcatgaatgggagttcactcatgatttggctctctgtttgtctgttattggtgtataagaatgcttgtgatttttgtacattgattttgtatcctgagactttgctgaagttgcttatcagcttaaggagattttgggctgagacaatggggttttctagatatactatcatgtcatctgcaaagagggacaatttgacttcctcttttcctaattgaataccctttatttccttctcctgcctaattgccatcccagggatgaagcccacttgatcatggtggataagctttttgatgtgctgctggattcggtttgtcagtattttattgaggatttttgcatcaatgttcatcaaggatattggtctaaaattctcttttttggttgtgtctctgccaggctttggtatcaggatgatgctggcctcataaaatgagtttgggaggattccctctttttctattgattggaataatttcagaaggaatggtaccagttcctccttgtacctctggtagaattcagctgtgaatccatctggtcctggactttttttggttggtaagctattgattattgcctcaatttcagagcctgttattggtctatacagagattcaacttcttcctgttttagtcttgggagggtgtatgtgtcgaggaatttatccat

SEQ ID NO: 21308 - DNA, 1323 bp, Homo sapiens
  SIMILAR (892)..(1320): 931254mologous to Homo sapiens putative p150,accession number U93572,Smith-Waterman Score=692.
atgaaaaacaagcccagtaaaagatgtattcacagctgtattctaccagataccccaagaggaactggtaccattcctactgaaactactccaaaaattgaggagaaaggactcctctccaactcattctatgaggccagcctcaccctgaaactaaaacctgggagagacacaacaagaagaaatgttcaggccaacatttttaggaacattgatgcaaaaagactcaacaaaatgctggcaatcggaatcgagaagcatacccataagctattccacaacaatcaggcaggcttaatcccgtggttagaagtaagtcctggccagaacaatcaggcaagagagaaacataaagggccttcccaaatagaaagagagaaactcaaactatccctgtttgcagatgacatgattctatatttagaaaatcttcatagtgttcacccaaaatctccttcagctgataaacaactgcggcaaagtttcaggatacaagatcaacatcttcaaatcagtagcatccttatacaccaccaacagccaaaccaagagcctaatcaggaacacaatcctattcagaattgccacaaaaagaataaaatttctagaaatatggttaatcagggaaggacaaatgggtatttccagtatacccggtgtaaccacccagagacactccgggcaccaccctcaattgccaggggttgtggtagagtggtgtcagcgattcaagggtgttttttctacctctttagtgcctttttcagtgataaaaagttaaaagcagatattgctttcaatttgatgtttgattcttatgaagctgataagcaacttcagcgaagtctcaggatacaaaagcaatgtacaaaaatcacaagcattcttatacaccaacaacagacagagagccaaatcatgagtgaactcccattcacaattgcttcaaagacaataaaatacctaggaatccaccttacaagggacgtgaaggacctcttcaaggagaactacaaaccactgctcaatgaaataaaagaggatacaaacaaatggaagaacattccatgctcatgggtaggaagaatcaatatcgtgaaaatggtcatactgcccaaggtaatttatagattcaatgccatccccatcaagctaccaatgactttcttcacagaattggaaaaaactactttaaagttcatatggaaccaaaaaagagcccgcattgccaagtcaatcctaagccaaaagaacaaagctggaggcatcacactacctgacttcaaactacactacaaggctacagtaaccaaaacagcatag

SEQ ID NO: 21309 - DNA, 1071 bp, Homo sapiens
  SIMILAR (58)..(693): 881254mologous to Homo sapiens putative p150,accession number U93574,Smith-Waterman Score=921.
atgggagactttaacaccccactgtcaatattagacagatcaatgagacagaaagttaacaaggatatccaggaattcaacctcagctctgcaccaagcagaccagtgtgcagagagaaatttatagcactaaatgcccacaagagaaagcaggaaagatccaaaattgtcaccctaacatcacaattaaaagaactagagaagcaagagcaaacacattcaaaagctagcagaaggcaagaaataactaaaatcagagcagaactgaaggaaatagagacacaaaaaacccttcaaaaaatcagtgaatccaggagctggttttttgaaaagatcaacaaaattgatagaccactagcaagactaataaagaagaaaagagagaagaatcaaatagatgcaataaaaaatgataaaggggatatcatcaccactgatcccacagaaatacaaactaccatcagagaatactataaacatctctatgcaaataaactagaaaatctagaagaaatggataaattcctcgacacatacaccctcccaagactaaaccagaaagaagttgaatctctgaatagaccaataacaggctctgaaattgtggcaataatcaatagcttaccaaccacaaagagtccaggaccagatggattcacagccgaattttaccagaggtacaaggaggaactgagaataacatacctaggaatccaacttacaagggatgtgaaagaccacttcaaggagaactacaaaccactgctcaatgcaataaaagaggatacaaacaaatggaagaacattccatgctcatgggtaggaagaatcaatatcatgaaaatggccatactgcccaaggtaatttatagattcaatgccatccccatcaagctaccaatgactttcttcacagaattggaaaaaactactttaaagttcatatggaaccaaaaaagagcccgcatcgccaagtcgaccctaagccaaaagaacaaagctggaggcatcatgctacctgacttcaaactatactacaaggctacagtaaccaaaacagcatggtactag

SEQ ID NO: 21310 - DNA, 1191 bp, Homo sapiens; identical to SEQ ID NO: 10992
  SIMILAR (490)..(1188): 941254mologous to Homo sapiens putative p150,accession number U93563,Smith-Waterman Score=1171.

SEQ ID NO: 21311 - DNA, 1746 bp, Homo sapiens
  SIMILAR (1329)..(40): 921254mologous to Homo sapiens putative p150,accession number U93564,Smith-Waterman Score=2077.
ttagacgtgaatttcttgcccatgcttatgtcttgaattgcctaggctttcttctagggtttttatggttttaggtctaatgttgaagtctttaatccatcttgaattaatttttgtgtaaggtgtaaggaagggatccagtttccgctttctacctatggctagccagatttcccagcaccatttattaaatagggaatcctttccccattgcttgtttttgtcaggtttgtcaaagatcagatggttgcagatgtgtggtattgtttctgagggctctattctgttccattggtctacatctctcttttggtaccagtaccatgctgttttggttactatagccttgtagtatagtttgaagtcaggtagtgtgatgcctccagctttgttcttttggcttaggattgacttggcgatgcgtgctcttttttggttccatatgaactttaaagtagttttttccaattctgtgaagaaagtcattggtagcttgatggggatggcatcgaatctataaattaccttgggcagcatggccattttcatgatattgattcttcctatccatgagcatggaatgttcttccatttgtttgtatcctcttttatttcgttgagcagtggtttgtagttctccttgaagaggtccttcacatcccttgtaagttggatccctaggtattgtattctctttgaagcaattgtgaatgggagttcactcatgatttggctctctatttgtctgttattggtgtataagaatgcttgtgatttttgcacattgattttgtatcctgagactttgctgaagttgcttatcagcttaaggagattttgggctgagacgatggggttttctagatatacaatcatgtcatctgcaaacagggacaatttgacttcctcttttcctaatcgaatacactttttttctttctcctgtcttattgccctggccagaacttccaacactatattgaataggagtggtgagagaaggcatccctgtcttgtgccagttttcaaagggaatgcttccagtttttgcccattgaggatgatattggctgtgggtttgtcataaatagctcttattattttgagatatgtcccatcaatacctaatttattgagagtttttagcatgaagggctgttgaattttgtcagaggccttttctgcatctattgagataatcatgtggtttttgtctttggttctgtttatatactggattacgtttattaatttgtgtatgttgaaccagccttgcatcccagggatgaagcccacttgatcatggtggataagctttttgatgtgctgcagctcctccttgtacctctggtagaattcggctgtgaatccatctggtcctggaatttttttggttggtaagctattaattattgcctcaatttcagggcctgttattggtttattaagagattcagcttcttcctggtttagtcttgggagggtgtatgtgtcgaggaatttatccatttcttctagattttctagtttatttgcgtagaggtgtttatagtattctctgatggtagtttgtatttctgtgggatcggtggtgatatctcctttatcattttttattgtgtctatttgattcttctctctttttttctttattagtcttgctagcggtctatcaattttgttgatcttttcaaaaaaccagctccttgattcattgattttttgaagggttttttgtgtctccat

SEQ ID NO: 21312 - DNA, 733 bp, Homo sapiens
  SIMILAR (32)..(730): 941254mologous to Homo sapiens putative p150,accession number U93563,Smith-Waterman Score=1171.
gctgcccttcatcctccagagctccaccagggtgatcgtagaccagaagggtccagtccaaaatctccttaagctgataagcaacttcagcaaagtctcaggatacaaaatcaatgtacaaaaatcacaagcattcttatacaccaataacagacaaacagagagccaaatcatgagtaaactcccattcacaattgcttcaaagagaataaaatacctaggaatccaacttacaagggacgtgaaggacctcttcaaggagaactacaaaccactgctcagtgaaataaaagaggatacaaacaaatggaagaacattccatgctcatgggtaggaagaatcaatattgtgaaaatggccatactgcccaaggtaatttatagattcaatgccatccccatcaagctaccaatgactttcttcacagaattggaaaaaactactttaaagttcatatggaaccaaaaaagagcccgcatcgccaagtcaatcctaagccaaaagaacaaagctggaggcatcatgctacgtgacttcaaactatactacaaggctacagtaaccaaaacagcatggtactggtaccaaaacagagatatagatcaatggaatagaacagagccctcagaaataacgccacatatctacaactatctgatctttgacaaacctgagaaaaacaagcaatggggaaaggattccctatttaataaatggtgctgggaaaactga

SEQ ID NO: 21313 - DNA, 755 bp, Homo sapiens
  SIMILAR (339)..(755): 991254mologous to Escherichia coli Probable ATP-dependent helicase Lhr (EC 3.6.1.-) (Large helicase- related protein),accession number D90809,Smith-Waterman Score=712.
ttcaaattaccgtctttacgctgcataccgctaaacaattttttaccggtagcatcagtgacctccagccagcaatcggcagtaaagttcatcaccagcgcattcggatcagccaccggcgtggtcacgccagcctgatcggttggcaacggcgcagcaccatctggcgttgttgctgccgttggtgccggggtcgcggcggtatcaacatttgcctgcgaaggcgaaacaaccgcattctgttgcggatcaacagctggtgctggcgcagttacggcaggtgtttgcgtgttggttgcggtagtatccacagacgctggcggcgtggacgttgtatccggcaaaccgttgccgccgcggcgatggatgcattacaggtagacgaatggtactcccgcgtacgccgtgccgcaccgtggaaagatctgccaagacgtgtttttgacgccacgctggatatgctttccgggcgctatccctctggcgatttttctgcttttcgccccaaactggtctggaacagggagaccgggatattgaccgcccgacctggcgctcaattgttggcggttaccagcggcggcaccattccggatcgtggcatgtatagcgtgttattacccgaaggtgaagaaaaggccggttcgcggcgggtgggtgaactggatgaggagatggtatatgagtcgcgggtgaacgacattatcactctcggcgctacctcatggcggatccagcaaatcacccgcgatcag

SEQ ID NO: 21314 - DNA, 1032 bp, Homo sapiens
  SIMILAR (370)..(1032): 1001254mologous to Escherichia coli lysophospholipase L2 (aa 1-340),accession number X03155,Smith-Waterman Score=1186.
atggagctaaccgttaatccaggcgaaaacgtgcaaaagctgttgtttaacatgggaatgcactctgtaacagaccgatactggcgagcagcgtcacaattgccagcacaataccaagacttaacatccatttatgacgtttatacagtcgtagctctcaatacgccccgggcagatgactaccacccggtcatggtgctgtgcgcgaaaacggacaaagcgcaccggaatgtcatccacaccagtaaactctgcttcatcacgctgacgccagaaatcagtcagcggtcccatggtaaaagcagcaaacgcgttttctcttgtttcccagtctttttgctgctgaaacatcggcgtattgtggcacaaaaatatgcggaactggcctatgacctgttccatttggggtttgatgtcttaatcatcgaccatcgcgggcagggacgttccggtcgcctgttagccgatccgcatctcgggcatgttaatcgctttaatgattatgttgatgatctggcggcattctggcagcaggaggttcagcccggtccgtggcgtaaacgctatatactggcacattcgatgggcggtgcgatctccacattatttctgcaacgccatccaggtgtatgtgacgccattgcgctaactgcgccaatgtttgggatcgtgattcgtatgccgtcatttatggcacggcagatcctcaactgggccgaagcgcatccacgtttccgtgatggctatgcaataggcaccgggcgctggcgcgcgttgccgtttgctatcaacgtactgacccacagcagacagcgatatcgacgtaacttacgcttctatgctgatgacccaacgattcgcgtcggtgggccgacctaccattgggtacgcgaaagtattctggctggcgaacaggtgttagccggtgcgggtgatgacgccacgccaacgcttctcttgcaggctgaagaggaacgcgtggtggataaccgcatgcatgaccgtttttgtgaactccgcaccgccgcgggg

SEQ ID NO: 21315 - DNA, 1357 bp, Homo sapiens
  SIMILAR (1357)..(293): 951254mologous to Homo sapiens putative p150,accession number U93568,Smith-Waterman Score=1732.
ctgatgcctgagtcagcaggtgggtagagctggcatctgagtctaaaggcgctggcctggggcttgggccttctgtgtagacctgaatcctgggtttgtggtgcaagcctagtactggagtccaccagagtggacttgtcaactggatctgtaggaagaagcctgaagcacatgtctttggtgtccatcctgaagcctgggtccatggggtcaggcctggttcagggatggtcctagtccctgagtccacagggattggcctgaagcctaattccatgggagctgactgggaacatgctgttttggttactgtagccttgtagtatagtttgaagtcaggtagtgtgatgcctccagctttgttcttttggcttaggattgacttggctatgcgggctcttttttggttccatatgaactttaaagtagttttttccaattctgtgaagaaagtcactggtagcttgatggggatggcattgaatctataaattaccttgggcagtatggccattttcacgatattgattcttcctacccatgagcatggaatgttcttccatttgtttgtatcctcttttatttccttgagcagtggtttgtagttctccttgaagaggtccttcacgtcccttgtaagttggattcctaggtattttattctctttgaagcaattgtgaatgggagtttactcatgatttggctctctgtttgtctgttattggtgtataagaatgcttgtgatttttgtacattgattttttttttgtatcctgagactttgctgaagttgcttatcagcttaaggagattttgggctgaggcagtggggttttctagatatacaatcatgtcgtctgcaaacagggacaatttgacttcctcttttcctaattgaataccctttatttccttctcctgcctaattgccctggccagaacttccaacactatgttgaataggagtggtgagagagggcatccctgtcttgtgccagttttcaaagggaatgcttccagtttttgcccattcagtatgatattgggtgtggatttgtcatagatagctctaattattttgaaatacgtcccatcgatacctaatttattgagaggttttagcatgaagggttgttgaattttatcaaaggccttttctgcatctattgagataatcatgtggtttttgtcttcggttctgtttatatgctggattacatttattgatttgcgtatattgaaccagccttgcatcccagggatgaagcccacttgatcatggtggataagctttttgatgtgctgctggatttgttttgccagtattttattgaggatttttgcatcaatgttcat

SEQ ID NO: 21316 - DNA, 852 bp, Homo sapiens
  SIMILAR (58)..(696): 941254mologous to Homo sapiens putative p150,accession number U93574,Smith-Waterman Score=1018.
atgccctctctcaccactcctattcaacatagtgttggaagttctgggccagggccaattaggcaggagaaggaaataaagggtattcaattaggaaaagaggaagtcaaattgttcctgtttgcagatgacatgattgtatatctagaaaaccccattgtctcagcccaaaatctccttaagctgataagaaacttcagcaaagtctccagatacaaaatcaatgtacaaaaatcacaagcattcttatacaccaataacagacaaacagagagccaaataatgagtgaactcccattcacgattgcttcaaagagaataaaatacttaagaatccaacttaaaagggacgtgaaggacctcttcaaggagaactacaaaccactgctcaacgaaataaaagaggatacaaagaaatggaagaacattccatgctcatgggtaggaagaatcagtatcgtgaaaatggccatactgcccaaggtaatttatagattcaatgccatccccatcaagctaccaatgactttcttcacagaattggaaaaaactactttaaagttcatatggaaccaaaaaagagcccgcatcgccaagtcaatcctaagccaaaagaacaaagctggaggcatcacactacctgacttcaaactatactacaaggctacagtaaccaaaacagcatggaaattccattttaccatgtttggagtggatctcaaagaaacctgcactgcaccttcactctggaaagatttagccctgaacacagtggagctggtttgcaaactctgtgtgcggcaggtggaaggagcaaggcagatcttccagctcaactgcaccgtgtcagag

SEQ ID NO: 21317 - DNA, 795 bp, Homo sapiens
  SIMILAR (6)..(473): 991254mologous to Escherichia coli similar to,accession number D90881,Smith-Waterman Score=792.
gtgcgatgaatactgaagccacgcacgaccaaaatgaagcacttactaccggcgctcgcctgcgtaatgctcgcgaacaactaggacttagtcagcaggccgttgccgagcgactttgcctgaaggtttccacggtacgcgacattgaagaagataaggcacccgccgatcttgcttcaacattcctgcgcggatatatccgctcttatgcgcgtctggtacatattccagaagaagaactgctgccagggctggaaaagcaggctccacttcgggctgcaaaagttgcgccgatgcagagtttttccctcggtaaacgccgcaaaaaacgcgacggctggctgatgaccttcacttggctggtgttgtttgtggttatcggcctgagcggtgcctggtggtggcaagaccgcaaagctcagcaggaagagatcaccactatggccgatcaatcttcggcggaactgagcacccccccagccacggttggtgaagttcgtcttggaggagtagacctgggtggagggaggaccctggagggacctgcaggcatgcaagctcatcaaccccatggaggtaagagagcatgtgccccgcagaccctcatcaaccccatggaggtaagagagcatgtgccccgcaggcatgcaagccagtgcttctgggtgaagtcaggcagggatatgggggaccccagtggcctggtcagtctgtcgtctgtgacgctatccacgatcctgtgccagatggccagctacccactgactctggtgcgcaccaggatgcaggcccaag

SEQ ID NO: 21318 - DNA, 1023 bp, Homo sapiens
  SIMILAR (160)..(444): 1001254mologous to Escherichia coli alternate gene name srlQ,accession number U29579,Smith-Waterman Score=478.
tcaaagtttggccgtaaaagccccaacgtagtttgcagtcttgaaagcgtcgataagctgattaccgacgcaggtatcgatccggcgtttcgtcaggcgctggaagagaaagggatcgatgtgatcataaccggagagagcaatgagtgaagcactacggaacgtctgggcgatgattttgttcgcgccgccaatatcatcctgcactgtgaaggcaaagtggtggtttcgggaattggcaaatcgggccacattggtaagaaaatcgccgcaacgcttgccagtaccggcactccggctttttttgtccatccggcagaagcgctgcacggcgatctggggatgatcgaaagccgcgatgtgatgctgtttatctcttactccggtggcgcgaaggaactggatctgattattccgcgtctggaagataaatctatcgcgcttgcgccgaactccagaacggtgattacctgatgttggtttagcgccggggatgggggcctgccgggcccggattatggacaagattttgcggctcacccagcgggggctggggccctctataaatgcagggatctcatcaatgacaacatcctgcggactgtttcctgccagtcccatgatgatggcgacatccgtggcatggcctttgcccgtcagtgacaacgacccgtacagatcgaccacaatatggctcgtcgcggttaataagccgctactttccagccgatcaataaaactttttccggcattcattggccccacggtatgcgaactggagggaccaatcccaattttgaaaatatcgaatgcactaatcatatccacaccctcggattgccgttcagtgaagtggagcggaacgactgcgatggcttcaatttccagcttcacatctttcggcaaacgcgcgacctgcacacagctccgggtcggataggtcgcctgatgctcatcgaagaactgcttatagacttcgttgatggtggcaaaatcattcagatcggtgataaacacggtcat

SEQ ID NO: 21319 - DNA, 2163 bp, Homo sapiens
  SIMILAR (430)..(933): 821254mologous to Escherichia coli PTS SYSTEM, GLUCITOL/SORBITOL-SPECIFIC IIBC COMPONENT (EIIBC-GUT) (GLUCITOL/SORBITOL-PERMEASE IIBC COMPONENT) (PHOSPHOTRANSFERASE ENZYME II),accession number D90892,Smith-Waterman Score=724.
atgaccgccatcgccagcgcgtcacccatcatcagggtattgacggtgctggaggtcggcgcaaggtgcatcgggcaggcttcgcgttctacggagatatccagcaccgcttttgccgccaggcccagcggtgacgtcggtttgccgcagcgcgatagatttatcttccagacgcggaataatcagatccagttccttcgcgccaccggagtaagagataaacagcatcacatcgcggctttcgatcatccccagatcgccgtgcagcgcttctgccggatggacaaaaaaagccggagtgccggtactggcaagcgttgcggcgattttcttaccaatgtggcccgatttgccaattcccgaaaccaccactttgccttcacagtgcaagatgatattggcggcgcgaacaaaatcatcgcccagacgagcaacatcatgacgcatattcggatcgaaaaaggaacgggtggctggggcggcccgcttgagctgaaagccacgccgggaaaaaaaatcgtctatatcaccgccggtacccggcctgcgattgttgacaaactggcacagcttactggctggcaggctattgacggatttaaagaaggtgaacccgcggaggcggaaattggtgtcgcggtaatcgactgtggcggcacattacgctgcggcatctatccgaaacgacgtattcccaccattaatatccactcgacgggcaagtccggtccgctggcgcagtacattgtggaagatatttatgtctctggcggtaaagaagaaaacatcactgtagtaggtgatgcgacaccacaaccctctttcgtgggcccggactatgacaccagtgaaaaattaatgatcgtcaggaagaagcccatcggcgtccagatgctgtaccaggtcggaacggtatcaatgctgttatacacacgcaccatcatccagacaaagatgacgccaagaaccatcgtcactatcagccacagcgtacgcaatgccggtgacagctttttcagcattgccagcaaccagccgatgccgcctacggcaaaaaagatcgaaccgctggcgatttcgttactgagtgctgaagcccctacccggttgagcgagttaaaagcgcgcattggtgaaccaagatggagcatagaggcgataaagccaatgcccatcagcacccataaaccaaacatgcaggcgataacgcccccagctagacgagccatactaagcccctgcgcttgtgagtccagaagcaggcaggaaccctgccctcctgggtgccactgcagctgcccaaaccacagctgcagatccaggctaaaaggagttctgagcatggaacaatacctgctacaacaaaagcacgtaggaactcccccggggccctttcgcccaccggacaccaaccaaccctgttggaaaacgaagcccagtcaaagggaagagtacacaagaagggtaggcttcacaggacacagtaaccagggagccaagataattcgaacacatattatatgtaggcggcgaacgagttttgccctggagcgccctggtgacggtttccaagcggtagtagggggcacagtcctaatggggctaccacggactaaaaacgttggtttgcccgtgaccatcctcggaagagttcacaggcggtccagcgagaggtttccccgaacgagcgagagcgcaattaaccggaaggacgccgggccaaaggacccagttagacaacgacttgcttacaaaaagcaccccatggagaggcgtcatgggccccacgttgttgcccggacttttggccgggccattccaacccttgggccacaccggaccgttctatccacaaggtttcaggtggcaaaaaacccattgggtccgattggcccaagcccattggcagttttaacttggacagttccgaggcccaaaaacggccgacggggggggaagcaaagggcccggattatctgccagtcacggcgcgaagcatcatgtaataacgtatgtttagccagatcttccggtgtcttcaagggtttttcgccagtcagcagtagcggcgaacacaccggcaataaatattcggcgtacagtttttccttgtgccccttatttgtctttcttccgctctctgggcggctcctgcaacggtaa

SEQ ID NO: 21320 - DNA, 1524 bp, Homo sapiens
  SIMILAR (1485)..(724): 991254mologous to Escherichia coli Oligopeptide transport system permease protein OppB,accession number D90849,Smith-Waterman Score=1289.
ttatttttcacgaatgtagtcgaaattacgagtacgtaaaaactccgcccgcaccacgccgaccagactcatccagccaaacaagacagtaattgccagcagccaccagaagttaggctgtacgacgctggaaagtaaaataatcaaaaacagcgtcggcatccccgaccatacttcaataaagcgttgtccccagagatcgactttaccgccgtaatagccttgtagcgcccccgccagcacgcccatcacgctggaacagagagtcagcatcaggccaaacagaaccgagatccgcgtgccatagagaatgcgtgccagcacatcgccgccgttggcatccgttcccagccagttttgccgggagggtggagaagggaagggcttattggtagcaaagttgatactggtagcaccaaagcgaatcggtgcccacagtacccagccgttattttccagccgttgtttcagccacgggtcctgataatcagcctgacttgccagcgggccgccaaaatcgctttcgctgtagtttttcaataacgggaaataccaactgccgtcataacgcaccagcaacggtttatcgttggcgataagttcagaacacaaactcaaaccaaacaagacgaggaaaatccataacgaccagtagccgcgacggttatgacgaaaacgcgcccaacgggcctgattgacggggctgagtcgcgacattaacgtccgcggatcaaccagcgtatagctgatatcactgacaatattcagcagcaggccaatcagggtgaaaatatacaaggtaccaaacattacaggataatcgcgcgagacggtcgcttcgtagcccagtaagcccagaccattgagtgaaaacatcacctcaatcagcagcgagccggtaaaaaacatgctgataaacgtcgccggaaaaccggcaatcaccagcagcatggcgttgcggaacacatgtttccagagaatatttttttcacttacccctttcgcacgcgcggtcaccacgtattgcttgcgcacttcatcaaggaatgagttttttgtcagcatggtcagcgccgcaaagccaccaatcactgtcgccagcaccggcagcgtgatatgccacagataatcggtgattttctgataccacggcagcgaatcaaagttagcggaaaccaggccgcgtagagggaacaggtcgaaatagctgccgcccgcgaagaagacaatcagcaggatggcaaacaaaaaggccggaatggcgtagccgatgatgataaatgcgctactccagacgtcaaagcggctcccattataaacagctttgcgaatgcctaacggaatcgacaccagatagataatcagcgtgctccacaatccgagggtgatggaaaccggcagactgtctttaatcagcgtcagcaccgaggcgctgcgaaacaggctatcgccaaaatcaaagcggatgtagtcccagagcatttgaagaacgttcggggtcctctagagcacctggggcatcag

SEQ ID NO: 21321 - DNA, 2025 bp, Homo sapiens
  SIMILAR (804)..(388): 1001254mologous to Salmonella typhimurium elongation factor Tu,accession number X55116,Smith-Waterman Score=721.
atggaaggtcagtcgatcgtcaacgttgatgagatccaccgtgccgcccgctttttctatcaggccagacagcgggatttgtacggtgccggaggatcaaatgctatctgtgctgatgtacagcacaagttcttgcgcattggcgtacgctgtcaggcctatcctgatgctcacatcatgatgatgtccgcttcgttgttacaggaaggagatgttgtgctggtagtgacccattccgggcgaaccagtgatgtaaaagcggccgtagaactggcaaaaaagaacggggcaaagattatttgtataacccatagctaccattcaccgatagcgaaactggccgattatattatttgctcaccagccccggaaacgccgttattaggtccccagaactttagcaacaacgcccgcgccaacggtacggccgccttcacggattgcgaaacgcagaccgtcgtccatcgcgatcgggtggatcagggtaacaaccattttgatgttgtcgcccggcattaccatctctacgccttccggcagttcgatggtaccagtcacgtcagtagtacggaagtagaactgcggacggtagcctttgaagaacggagtatgacggccgccttcatctttggacagaatgtacacttcagattcgaacttggtgtgcggcttgatggtgcccggcttagccagtacctgaccacgttcgatttcttcacgtttgataccacgcagcagaacacctacgttctcaccagcacggccttcgtccagcagtttgcggaacatttcaacgccagtacagaactaaacataaagttagatcttgtctttgaatcaatggctaggcatttcgggttcccgttcaatgaccatccccagggcgttggctttttgattctggagacgatgtgcagcgaaattcaggctgcgtgtcgggaaacggcgcaacggatcccggaaagtgatgctgaactggcgcgctgcattttcgacagtctggcgctgctgtatgccgatgtgttgcatgagctggcgcagctgcgcggtgaagatttctcgcaactgcatattgtcgccgtgaggcttgccagatccccgttgctcaaccagctatgcgccgatgcctgcggtattcgggtgatcgccgggcctgttgaagcctcgacgctcggcaatatcggcatccagttaatgacgctggatgaactcaacaatgtggatgatttccgtcaggtcgtcagcaccaccgcgaatctgaccacctttacccctaatcctgacagtgaaattgcccactatgtggcgcagattcactctacacgacagacaaaggagctttgcgcatgaccactcaactggaacaggcctgggagctagcgaaacagcgtttcgcggcgatggggattgatgtcgaggaggcgctgcgccaacttgatcgtttacccgtttcaatgcactgctggcagggcgatgatgtttccggttttgaaaacccggaaggttcgctgaccggggggattcaggccacaggcaattatccgggcaaagcgcgtaatgccagtgagctacgtgccgatctggaacaggctatgcggctgattccggggccgaaacggcgtaatttacatgccatctatggatcaaaggttttcgcggtagcgggatgcgtcgtgttgatgacgaccatgcccgacagttgcaattcgtggcaaaaatgcaggaataaaacaatgaacaagaagattcattccctggccttgttggtcaatctggggatttatggggtagcgcaggcacaagagccgaccgatactcctgtttcacatgacgatactattgtcgttaccgccgccgagcagaacttacaggcgcctggcgtttcgaccatcaccgcagatgaaatccgcaaaaacccggttgcccgcgatgtgtcgaagatcatccgtaccatgccaggcgttaacctgaccggtaactccaccagtggtcagcgtgggaataaccgacagattgatattcgcg

SEQ ID NO: 21322 - DNA, 1454 bp, Homo sapiens
  SIMILAR (1)..(1407): 991254mologous to Escherichia coli transcriptional activator protein from homology search,accession number D28595,Smith-Waterman Score=2353.
atggagtgcgatgcgtctgcgttgctacgttacgattcgcggcagtttattccgcttgccatcgacggtctggcaaaggatgtactcggtagacgctttgcgctggaagggcatccacggctggaagcgattgcccgcgccggggatgtggtgcgctttcccgcagacagcgaattgcccgatccctatgacggtttgattcctgggcaggagagtctgaaggttcacgcctgcgttggtctgccattgtttgccgggcaaaacctgatcggcgcactgacgctcgacgggatgcagcccgatcagttcgatgttttcagcgacgaagagctacggctgattgctgcgctggcggcgggagcgttaagcaatgcgttgctgattgaacaactggaaagccagaatatgctgccaggcgatgccacgccgtttgaagcggtgaaacagacgcagatgattggcttgtcccctggcatgacgcaactgaaaaaagagattgagattgtggcggcgtccgatctcaacgtcctgatcagcggtgagactggaaccggtaaggagctggtggcgaaagcgattcatgaagcctcgccacgggcggtgaatccgctggtctatctcaactgtgctgcactgccggaaagtgtgcggaaaagtgagttgttcgggcatgtgaaaggagcgtttactggcgctatcagtaatcgcagcgggaagtttgaaatggcggataacggcacgctgtttctggatgagatcggcgagttgtcgttggcattgcaggccaagctgctgagggtgttgcagtatggcgatattcagcgcgttggcgatgaccgttgtttgcgggtcgatgtgcgcgtgctggcggcgactaaccgcgatttacgcgaagaggtgctggcagggcgattccgcgccgatttgtttcatcgcctgagcgtgtttccactttcggtgccgccgctgcgtgagcggggcgatgatgtcattctgctggcggggtatttctgcgagcagtgtcgtttgcggcaggggctctcccgcgtggtattaagtgccggagcgcgaaatttactgcaacactacagttttccgggaaacgtgcgcgaactggaacatgctattcatcgggcggtagttctggcgagagccacccgcagcggcgatgaagtgattcttgaggcgcaacattttgcttttcctgaggtgacgttgccgacgccagaagtggcggcggtgcccgttgttaagcaaaacctgcgtgaagcgacagaagcgttccagcgtgaaactattcgtcaggcactggcacaaaatcatcacaactgggctgcctgcgcgcggatgctggaaaccgacgtcgccaacctgcatcggctggcgaaacgtctgggattgaaggattaaataatcccggcctgatagaaatcctgcaggtttattgcgccggt

SEQ ID NO: 21323 - DNA, 4303 bp, Homo sapiens
  SIMILAR (3523)..(3792): 1001254mologous to Escherichia coli K12 suppressor of ompF assembly mutants,accession number AE000296,Smith-Waterman Score= 462.
tcaccagcgcattcggatagccaccggcgtggtcacgccagcctgatcggttggcaacggcgcagcaccatctggcgttgttgctgccgttggtgccggggtcgcggcggtatcaacatttgcctgcgaaggcgaaacaaccgcattctgttgcggatcaacagctggtgctggcgcagttacggcaggtgtttgcgtgttggttgcggtagtatccacagacgctggcggcgtggacgttgtagccgggtctgtagttgtcgacgtatttaatggaacactctgcccctgctcgctattactgctcagttccgccgaagattgatcggccatagtggtgatctcttcctgctgagctttgcggtcttgccaccaccaggcaccgctcaggccgataaccacaaacaacaccagccaagtgaaggtcatcagccagccgtcgcgttttttgcggcgtttaccgagggaaaaactctgcatcggcgcaacttttgcagcccgaagtggagcctgcttttccagccctggcagcagttcttcttctggaatatgtaccagacgcgcataagagcggatatatccgcgcaggaatgttgaagcaagatcggcgggtgccttatcttcttcaatgtcgcgtaccgtggaaaccttcaggcaaagtcgctcggcaacggcctgctgactaagtcctagttgttcgcgagcattacgcaggcgagcgccggtagtaagtgcttcattttggtcgtgcgtggcttcagtattcattcgccgatgtttcagcagcaaaaagactgggaaacaagagaaaacgcgtttgctgcttttaccatgggaccgctgactgatttctggcgtcagcgtgatgaagcagagtttactggtgtggatgacattccggtgcgctttgtccgttttcgcgcacagcaccatgaccgggtggtagtcatctgcccggggcgtattgagagctacgtaaaatatgcggaactggcctatgacctgttccatttggggttatatctatcagtcaggtccagtcttgcggcgcgcgtgggtagcggcaacctggccggcgttgcgctggctattaccgccggtggacctggagccgtcttttggatgtgggttgccgcgtttatcggcatggcgacctcgtttgccgaatgttctctggcacaactttataaagaacgtgacgtcaatgggcagtttcgtggcggaccggcatggtatatggcgcgcgggctggggatgcgctggatgggcgttctgttcgccgtctttttgctcatcgcctatggcataattttcagcggagttcaagcgaacgccgttgcccgcgccctgagtttttcttttgattttcccccgctggtgacaggcattattctcgctgtctttactctgctggcaatcactcgcggtcttcatggcgtcgcccggctcatgcagggctttgtcccgttgatggcgataatctgggtactgaccagcctggtaatttgcgtaatgaatatcgggcaacttccccacgtcatttggtctatttttgagagtgcttttggctggcaggaagcggcaggcggcgcggcgggatataccttaagccaggcgattactaacggttttcagcgcactatgagcaaagtaactccccagccgaaaatcggctttgtttcccttggctgtccgaaaaaccttgttgattcagagcgtattctcaccgaactccgcactgaaggttatgacgtggtaccgagctatgacgatgcggacatggtgatcgtcaacacctgcggctttattgacagcgcggtacaagaatcactggaagccattggtgaagcgttgaatgaaaacggcaaggttattgtgaccggttgtctgggggcaaaagaagatcagatccgcgaagtccacccgaaagtgctggaaatcaccgggcctcatagctatgagcaggttctggagcacgttcatcactacgtgccaaaaccgaaacacaacccattcctgagcctggtgccagaacaaggtgtgaaactgacgccgcgtcattatgcctatctgaaaatttctgaaggctgtaatcaccgctgcaccttctgcattattccgtctatgcgcggcgacctgtcgcttttggcggtgaatgctgaattaaaacgcagaattttgtccgatagtggtatcggtgtaccattcgcgcagacgaaaattcttaaccttaatctggaatacgccatgaccacacgcgtgattgctctcgacttagacggcaccttattgaccccgaaaaagaccctgcttccttcatcgatagaagccctggcccgcgctcgcgaagcaggctatcaattaatcatcgtcacaggtcgccatcacgtcgctattcatcctttttatcaggcgctggcgctggatacacctgctatttgctgtaatggcacctatttgtatgattatcatgcaaaaaccgtgctggaagcggacccaatgcccgttattaaagccctgcaactcattgagatgctgaatgaacaccacattcacggtctgatgtatgtcgatgatgcaatggtctatgagcacccgaccgggcatgtcattcgcacatctaactgggcgcaaaccctgccgccggaacagcgtccgactttcacacaagtcgcttctctggctgaaacggcgcaacaagttaacgccgtatggaagttcgccctgacgcacgatgacctgccgcaattgcagcattttggtaagcatgtcgaacatgaactgggactggagtgtgaatggtcctggcacgatcaggttgatattgcacgcggcggcaacagcaaagattcaaacttcaaaaccgatcccggcgcgatatcgtcggggacaggcactgtccatgtggcaggccctgtctctttgccatcgaaagccgctggtatcgcagataaccctctggtgatccgcggacctggcgctgggcgcgacgtcaccgccggggcgattcagtcggatatcaaccggctggcacgcctgatccaccagctcggtaaacggcacgctaccgtcgaattgcaggaacagccagccggcaaggcaaacacgggccgaagtgcagtgaacccgaaggcagaactggcgaccaaaatggcggaatatccggatcaccggaacacgacgcagttaaccgggccacagcacgaccaggagtatcatcagcttcgtcagaaatcgtctcatggtatcctcaatgggcctgaattagtctttatcgattcggctggctaccgcgccctgctggttgcgatatttcgcatcttcacggcggttccagcccaccagatcggctggcagcgtcaccgactccagcgtcaccgccagcgccagctctcctgggtgaagatagaacgcctcgccctcgtcgagaacgatctcatcgctcatcacgcggtcaagcgcggcgctcacttcatctttgggaccgctcagatcgataaacgctgccgtgtgaccacggaagatgttgccacgcaaatgaccaacaagtcgggtttgctggaaattactcaactgcagggcaaacttaacggtggacaggtttcactgccgggcacgctggacgcgacatcaataaatccgcggataaacttccagccacggctggaaaacgttgagattggtaccattctgaaggcgtttaactatccgatttcgttgaccggaaaaatgtcactggctggtgatttctccggtgctgacatagatgccgacgcattccgccacaactggccaaggacaggcacatgtcgaaatgaccgacacgcgcatggaagggatgaacttccagcagatgattcagcaagcggtagagcgtaatggcggtgatgtgaaggccgctgaaaactttgataacgtgacgcggcttgaccgctttaccaccgatttgacgttgaaggatggcgtcgtgacgttaaacgacatgcaaggtcaatcgcctgtgctggcgctgacaggggaaggcatgttgaatctggcagatcaaacctgcgacacccagtttgatattcgggtcgtgggtggctggaacggggaaagcaaactgattgatttcctgaaagaaacgccagtaccgctgcgggtttatggcaactggcagcaactcaattacagcctgcaagtggatcagttactgcgcaaacatctacaggacgaagcgaaacgtcgcctgaatgactgggccgagcggaataaagattcccgtaatggcaaagatgtgaagaagttgctggagaagatgtag

SEQ ID NO: 21324 - DNA, 4810 bp, Homo sapiens
  SIMILAR (976)..(1158): 1001254mologous to Escherichia coli L-rhamnose isomerase,accession number L19201,Smith-Waterman Score=323.
ttaaacgacatgcaaagtcaatcgcctgtgctggcgctgacagcggaaggcatgttgaatctggccgatcaaacctgcgacacccagttcgatattcgggtcgtgggtggctgaaccgggcacagcaactgattgattcctgaaagaacgcagtacgctggggttatgcaccggagcagtcattccgcctaagggctcgtcgtgcacttttcggaaacagactccgtaatatggcgaggatgacccgtgtgcactgcacgctctgaaattgtcaggcccctggctaagcgaggctcggtgggcaatcgtgtaaggcgccttccataggcggacggtccccccgcaagcattggacgccgtctgtcccgttgggctctcgctatacgccgagacgtccgattcgtccagattagttattcgagctcggtacctaacggcgaggagcagatggtggttatcacctaagttgaccggcctggcgcgcgtcctgattgggttgtggatcaggtattcgatctgttcgttaacctcgacgcgaccgacgagcagatggacttcccgatcgtttacgctcctgcgctgaactggtatcgcgggtctggaccacgaagatatggcggaagacatgacttcgccgacggtcaggctaataccgtcgatgccaataaatcctttgtacagaatatatttcatcaactgactatcctggactttaaaccatatctggcgattattttcccatgtaaaactcattggaacaggcctgggagctagcgaaacagcgtttcgcggcggtggggattgatgtcgaggaggcgctgcgccaacttgatcgtttacccgtttcaatgcactgctggcagggcgatgatgtttccggttttgaaaacccggaaggttcgctgaccggggggattcaggccacaggcaattatccgggcaaagcgcgtaatgccagtgagctacgtgccgatgctttcccatgccgacgacagcattcgccagttctggattgatcactgcaaagccagccgtcgcgtttcggcctattttggcgagcaactcggcacaccatcggtgatgaacatctggatcccggatggtatgaaagatatcaccgttgaccgtctcgccccgcgtcagcgtctgctggcagcacgttgctgccgttggtgccggggtcgcggcggtatcaacatttgcctgcgaaggcgaaacaaccgcattctgttgcggatcaacagctggtgctggcgcagttacggcaggtgtttgcgtgttggttgcggtagtatccacagacgctggcggcgtggacgttgtagccgggtctgtagttgtcgacgtatttaatggaacactctgcccctgctcgctattaaggaatgagttttttgtcagcatggtcagcgccgcaaagccaccaatcactgtcgccagcaccggcagcgtgatatgccacagataatcggtgattttctgataccacggcagcgaatcaaagttagcggaaaccaggccgcgtagagggaacaggtcgaaatagctgccgcccgcgaagaagacaatcagcaggatggcaaacaaaaaggccggaatggcgtagccgatgatgataaatgcgctactccagacgtcaaagcggctcccattataaacagctttgcgaatgcctaacggaatcgacacctggtggtatgacgtcaataaagcggccaaactgccgtccgccagcaaacagggaacacctaagttcgtatcgatccgattattgttgcccaggatggttcgctttctggtcctggtatggcatactgttttggttactatagccttgtagtatagtttgaagtcaggtagcgtgatgcctccagctttgttcttttggcttaggattgacttggcgatgcgggctctgttttggttccatatgaacttgaaagtagttttttccaattctgtgaagaaagtcattggtagcttgatggggatggcattgaatctataaattacttgggcagtgtgccatattcgcatatggaccagtagtgacacagaaacatctggctcgcctgacgggatgcgacgaattttcgccgccccataaagtacgcccacgactcgttcgcactggcccgtgccgtggagtagctcatctgggcgtaattccgggaaagccgccaggcgcttgatgcagtgtgggaagaggaacaggtgaagtttattgaagatatcaacttttccggaatgattcagggccgccgttcccgcagatggggcagaatagcccggcaaaccgatggtcggaatgccgccgtctggcgtgttgtgcaaggccaaaagcgacagaaggggcgacgccgtaacgctcatttttgactttgtcgcgtccggcatcgtgcgtttttttctctgacgtagtacgcgagaacgccaatcaagctgccgacaatcagcgataacgcatgcgaagccaaaattgttcgtcccgatacggatctggttttgctcgcggtggtacggttcgacgttgcggtctaaccagcgcaattcgaaataagggagccagtgttcattaatacggtaacggaaggtgttagtgatttcccaatgatgatctttcccgttgctactattaaagtcattcactcgcatgaagtaatgtggctcaaatgtataggaaaatttatcggtgattttaaaattccagtaggtgccaatttcataggtgtcattattatccagttccccgctcaaatctgttgaactatagttattatggttatagcgatttcgtactgtcagattaaaccatggtacaaatttagtagttgacgtccagatacacatcgaacccaatacgctgtttggttcgcgaccaccggtgctgccggacgatgacgcgttgtgggatatattcgaacatggtatcttgagatggtcgggtccgggctttccccactttctggacttgtgcgctggatcttttgccgatggcgccgctacaggggggctcgggacgccctattgggtctcttatcgccccatgccgagtccgccggcccgttggtgttatcccggtgttccccttgggccccctggtttgtgcccgggggacccctctttgttgcccttgcagcaatgtggttgcattgggtgccccgtgggccggttgaaagtccccccgcttggaccgtgggtcgttgctggccgctgacattgcagaaacggtggtcagccacgtcgagggggcgcgttttgcgctggtggaacgcgtggctgaagaggtggcggagctgctgttagcacgcttcaactcgccgtgggtgcgtatcaaactcagcaagccaggcgcagtggcgcgggcggcgaatgttggcgtaatcattgagcgtggcaataatccacatccgggttgatgtgctgaagtcgcgtaagtcattcggctgccttcgcgttctacggagatatccagcaccgcttttgccgccaggcccagcggtgacgtcgctttgccggtcatcgccagcagcgcgatagatttatcttccagacgcggaataatcagatccagttccttcgcgccaccggagtaagagataaacagcatcacatcgcggctttcgatcatccccagatcgccgtgcagcgcttctgccggatggacaaaaaaagccggagtgccggtactggcaagcgttgcggcgattttcttaccaatgtggcccgatttgccaattcccgaaaccaccactttgccttcacagtgcaggatgatattggcggcgcgaacaaaatcatcgcccagacgttccggtaaacggcttgcttcctgcaactccagcattaacgtctgacgtcccgcgttcagtagtgcttcactcattgctctccgatgcaggttggcgacgtcggtttccagcatccgcgcgcaggcagcccagttgtgatgattttgtgccagtgcctgacgaatagtttcacgctggaacgcttctgtcgcttcacgcaggttttgcttaaccacgggcaccgccgccacttctggcgtcggcaacgtcacctcaggaaaagcaaaatgttgcgcctcaagaatcacttcatcgccgctgcgggtggctctcgccagaactaccgcccgatgaatagcatgttccagttcgcgcacgtttcccggaaactgtagtgttgcagtaaatttcgcgctccggcacttaatagccaccgctgggagagcccctgccgcaaaacggtagttgagcgttttgagccggaagcggtgattgtactgtttaccatcttcatactgcgccgccgatgcgctaaacgctaaaactacataattaccgatcgccaggctaacattgttaaatgccgcaccggtatcggtattgaaaatggtgtaataattgccgctatttgcagaagaaacggtaccagtaaaggtagtggtcattgtttcctgagtatcaaatacgcaatcttgcaggcgaatcgcctgttcagccaaatccggattaatctcgcgtttaatttctactcctaaaccgcgaaacgcttctgcctgcgccagcacatttccgcgccctgaagagagttttttcattgcctgccgataattatcctgcgctttgtcgagactttgaccactcgcggacatgtcatcgatgaacaatacggtgcaggtataattgtcttttgggtgagttttattgaacgcgtaaggccctgtgtcatcgttgtcgtatggtgttctgaataaccttttgcctaagcctgttcggccagacgaccaagttacacgaaacat

SEQ ID NO: 21325 - DNA, 2341 bp, Homo sapiens
  SIMILAR (1)..(1041): 961254mologous to Homo sapiens putative p150,accession number U93563,Smith-Waterman Score=1742.
atgggagactttaacaccccactgtcaacattagacagatcaatgagacagaaagtcaacaaggatacccaggaattgaactcagctctgcaccaagcagacctaatagacatctacagaactctccaccccaaatcaacagaatatacatttttttcagcaccacaccacacctattctaaaattgaccacatacttggaagtaaagctctcctcagcaaatgtaaaagaacagagattataacaaactatctctcagaccacagtgcaatcaaactagaactcaggattaagaatctcactcaaaaccactcaactacatggaaactgaacaacctgctcctgagtgactactgggtacataacgaaatgaaggcagaaataaagatgttctttgaaaccaacgagaacaaagacacaacataccagaatctctgggacgcattcaaagcagtgtgtagagggaaatttatagcactaaatgcccacaagagaaagcaggaaagatccaaaattgacaccctaacatcacaattaaaagaactagaaaagcaagagcaaacacattcaaaagctagcagaaggcaagaaataactaaaatcagagcagaactgaaggaaatagagacacaaaaaacccttcaaaaaattaatgaatccaggagctggttttttgaaaggatcaacaaaattgatagaccgctagccagactaataaagaaaaaaagagagaagaatcaaatagacacaataaaaaatgataaaggggatatcaccaccgatcccacagaaatacaaactaccatcagagaatactacaaacacctctacgcaaataaactagaaaatctagaagaaatggataaattcctcgacacatacactctcccaagactaaaccaggaagaagttgaatctctgaatagaccaataacaggagctgaaaatgtggcaataatcaatagtttaccaaccaaaaagagtccaggaccagatggattcacagccgaattctaccagaggtacaaggaggaactgctgataagcaacttcagcaaagtctcaggatacaaaatcaatgtacgaaaatcaccaagcattcctatacaccaacaacagacaaacagagagccaaatcatgagtgaactcccattcacacttactacaacaagaataaaatacctaggaatccaacttacaagggatgtgaaggacctcttcacggagaactacaaaccactgctcaatgaaataaaagaggatacaaacaaatggaagaacattccatgctcatgggtaggaagaatcaatatcgtgaaaatggccatacttgcccaaggtaatttacagattcaatgccatccccatcaagctaccaatgactttcttcacagaattggaaaaaaactactttaaagttcatatggaaccaaaaaagagcccgcattgccaagtcaatcctaagacaaaagaacaaagctggaggcatcacactacctgacttcaaactatactacaaggctacaataaccaaaatggcatggtaatgttaccaaaacagagttatagatcaatgcaccagaacacagcccctcagaaataacgccacatatctacaactatctgatctttgacaaacctgacaaaaacaagaaatggggaaaggattccctatttaataaatggtgctgggaaaactggctagccatatgtagaaagctgaaactggatcccttccttacaccttatacaaaaattaattcaagatggattaaagacttaaatgttagacctaaaaccataaaaaccttagaagaaaacctaggcaataccattcaggacataggcatgagcaaggactttatgtctaaaacaccaaaagcaatggcaacaaaagccaaaattgacaaatgggatctaattaaactaaagagcttctgcacagcaaaagaaactaccatcagagtgaacaggcaacctacagaatgggagaaaatttttgcaatctactcatctgacaaagggctaatatccagaatctacaatgaactcaaacaaatttacaagaaaaaaacaaacaaccccatcaaaaagtgggcaaaggacatgaacagacacttctcaaaaaaagacatttatgcagccaaaagacacatgaaaaaatgctcatcatcactggccatcagagaaatgcaaatcaaaaccacaatgagatgccatttcacaccagttagaatggtgatcattaaaaagtcaggaaacaacaggtgggaactgaacaatgacaacacatggacacgggaaggggaacatcacacaccggggactattgtggggtag

SEQ ID NO: 21326 - DNA, 595 bp, Homo sapiens
  SIMILAR (144)..(76): 911254mologous to Homo sapiens Human secreted protein, SEQ ID NO: 7678,accession number G03597,Smith-Waterman Score=106.
atgttgctcaggctggtcttgaactcctgggctcaggcaatcctccttgagcccatctgcctttgcctcccaaaatgctggtgtgtccggaattggtggattcttggtctcgctgacttcaagaatgaagccgtggaccctcgcgatgttcagatgtgtctggagtttcttccttctggtgggttcatggtcttgttggcttcaggagtaaagctgcagaccttcgcagtgagtgtcacagttcttaaaagcagcgcatctggagttgtttgttgctcctgtctggagttgttcgtccctcccggtgggtttgtggtctcgctggcttcaagagtgaagctgcagaccttcacagtgagtgttacagctcataaaggcggtgtggacccaaagagtgaacagcagcaagatttagtgcaaaaagcaaaagaacacagcttctgcagtgtggaagcagacctgagcgggttgccgctgctggctggggcagcctgcttttattcccttatggagccccacccacatcctgctgattggtccattttacagagagctgattgatccgttttccagagagctgattggtccattttga

SEQ ID NO: 21327 - DNA, 418 bp, Homo sapiens
  SIMILAR (32)..(235): 911254mologous to Rattus norvegicus GABA transporter,accession number M95762,Smith-Waterman Score=332.
ggacctctggcagcagcttcactaaggtgggatggatagcagggtctcaggcacaaccagtaatggagagacaaaaccagtgtatccagtcatggaaaagaaggaggaagatggcaccctggagcgggggcactggaacaacaagatggagtttgtgctgtcagtggctggggagatcattggcttaggcaacgtctggaggtttccctatctctgctacaaaaatgggggaggtgagatgagagcccttgtgccaccccacccactcctggaaggaggatacttccatctcctgcacttacggcccctctggggagtcccatagatgtatagaattctggaggtaggaggacgcttagaggtcattaaggacactctgtaagagactaagacctagaaaggttacgtgactatccca

SEQ ID NO: 21328 - DNA, 736 bp, Homo sapiens
  SIMILAR (1)..(261): 911254mologous to Homo sapiens Human secreted protein, SEQ ID NO: 6407,accession number G02326,Smith-Waterman Score=400.
atgtttggtggctatgagactatagaagcatatgaagatgatctttatagggacgagttatctagtgaactgagtgttgatagtgaggtggaatttcaactctatagccgaatttattatgcccaagatcttgatgatgtcatcagggaggaagaacatgaaaaaaagaactctgggaatttggaatcttcgagtagtaaaccaaatcagaagaagctaattgtcctttcagatagtgaggtcatccagctgtcagatggttttaaaacccagaagccttccaagctccaagccctttcatcattcatcgcattgccatatatcgagagaagacaagtctcccaaggaggcccttgggtggttgatgggactgggtgccgtggagcagggggtggtgctcgtcggggaggctcgggccgcacaggagcccatggagggggagggaggctcaggcatggcgagctgcaggttccgagccctgccccacgggaaggcagctaaggcccagcgagaaattgagcacagcagctgctggcccagactccgtgcattccgtggaggaataagaggtggcaaggacaagaacaaaaggatctgggaggacatcgggccagggtattgtcccatcaggctctccacattggacggcagtgtgcgttccaattatagctcctctccccgtgtacaaatgcagtacgctctaacaagaggcatccccacagtggaatcctcataa

SEQ ID NO: 21329 - DNA, 2106 bp, Homo sapiens
  SIMILAR (326)..(436): 671254mologous to Rattus norvegicus GABA transporter,accession number M95762,Smith-Waterman Score=127.
agcgtgtcgaattccacctacgtggtagagaggggcggctgtgtggcggtttgtcacatctagatccatgttttgcttccctggagccgcattcttttaggactaccttgatttattccgtccctgggctggtggggccgaggagtgtcggaggagagccagtgctttgcgtggtcctctgaattctgccaggtagccctgctccggcgtccgtgaaggggccaggacagtgtccgccaggaggggctgtgctcccagacaggaagcaggagaggttgcagccctgttctgaccctgccattccgccctctcctcacccctgccccacagggactgcatcgccctctgcttcctcaacagcggcaccagctttgtggccggctttgccatcttctccatcctggggcttcatgttttcaggagcagggggtgcccatttctgaggtggccgagtcaggccctggcctggctttcatcgcttacccgcgggctgtggtgatgctgcccttctctcctctctgggcctgctgtttcttcttcatggtcgttctcctgggactggatagccagtttgtgtgtgtagaaagcctggtgacagcgctggtggacatgtaccctcacgtgttccgcaagaagaaccggagggaagtcctcatccttggagtatctgtcatctccttccttgtggggctgatcatgctcacagagggcggaatgtacgtgttccagctctttgactactatgcggccagtggcatgtgcctcctgttcgtggccatcttcgagtccctctgtgtggcttgggtttacggagccaagcgcttctacgacaacatcgaagacatgattgggtacaggccatggcctcttatcaaatactgttggctcttcctcacaccagctgtgtgcacagccacctttctcttctccctgataaagtacactccgctgacctacaacaagaagtacacgtacccgtggtggggcgatgccctgggctggctcctggctctgtcctccatggtctgcattcctgcctggagcctctacagactcggaaccctcaagggccccttcagagaggttataatacctgtctccatccgtatgaccaaagttgccggaactgccggcctcagcgggaatgtgggacccagatgtgatctcagtcgcatcgaggagcttcctgatggtggaacacggtgtgggatggatagcagggtctcaggcacaaccagtaatggagagacaaaaccagtgtatccagtcatggaaaagaaggaggaagatggcaccctggagcgggggcactggaacaacaagatggagtttgtgctgtcagtggctggggagatcattggcttaggcaacgtctggaggtttccctatctctgctacaaaaatgggggagttgttggcttctacaattcaattaaaaatatccccatcctccagagagttattttattcgtcagaattcataacatgctcaacaaaggtcaaggcgttttggcaaagtgcgatgcggctaagaaaatagaagagaaggaagctgatgcaggatctgccagtgttcctggtgatgtcatgaggacgaagaaactctcttttgagggggcctggcatccctgtttgctggtgggtctcaaactgagtgatgcattggaattgcgtggcgggtttattagtgcacggattgctgggccccgagccgcagagtctgattcagtgggcctggagcgggaactgagagtttgcattgctaacaagcttccaggtgaagctgacgctgctggtccagggaccaccttttggaagcactgctctatgccaataacagatggagcagacgcagtggagggaaggaacacccaggaagctttcttccggcagctcaacccagaagctgccttcctgcatttcatggagatggtagacaccaatgctctccacgtgcatgggattcacaccagaaaaaatcatccaggccagaaagaggccgctcacagccagcatggaacgttccccatccgctggactttaaacctgctgaagcgaacatttcagaaaggaaatagagcagagccaaattccccagccatgtga

SEQ ID NO: 21330 - DNA, 549 bp, Homo sapiens
  SIMILAR (188)..(99): 901254mologous to Homo sapiens Human secreted protein, SEQ ID NO: 7141,accession number G03060,Smith-Waterman Score=139.
atgaagctgcggaccctcgcggtgagtgctacagctcttaaggtggcgcgtctggagtttgttccttttgatgttcggatgtgttcggagtttctttcttccggagtgaagctgcagaccttcgcggtgagtgttacagctcttaatgcactgcgtctggagttgttcgttcctcccggtgggctcatggtctcgctggcttcaggagtgaagctgcagatcttcacggtgagtgttacagctcataaaagcagtgtggacccaaagacccttgggtggtcgatgggactgggcgccgtggagcagggggcggcgctcatcggggaggcttgggccgcacaggagcccatggagggggtgggaggctcaggcatggcgggctgcaggtctcgagccctgccccgcggaaaggcagctaaggccccgtgagaaatcgagcgcagcgctggagtcttcctggctgtgcccaccaacgggcaggcagtggcggcccccgtcggtcaaagctgtgtcatcgctcagaggcttgctaagctgcaagtcatgcag

SEQ ID NO: 21331 - DNA, 1756 bp, Homo sapiens
  SIMILAR (1342)..(1443): 501254mologous to Rattus norvegicus GABA transporter,accession number M95762,Smith-Waterman Score=91.
  misc_feature (1)...(1756): n = a,t,c or g
ggctctggcagcagcttcactaaggtgggatggatagcagggtctcaggcacaaccagtaatggagagacaaaaccagtgtatccagtcatggaaaagaaggaggaagatggcaccctggagcgggggcactggaacaacaagatggagtttgtgctgtcagtggctggggagatcattggcttaggcaacgtctggaggtttccctatctctgctacaaaaatgggggaggtgccttcttcatcccctacctcgtcttcctctttacctgtggcattcctgtcttccttctggagacagcactaggccagtacactagccagggaggcgtcacagcctggaggaagatctgccccatctttgagggcattggctatgcctcccagatgatcgtcatcctcctcaacgtctactacatcattgtgttggcctgggccctgttctacctcttcagcagcttcaccatcgacctgccctggggcggctgctaccatgagtggaacacagggaactgggtggacgtggtagagccggtggctgaggggaatggtgtgggaatggatccaacacaccccacgtgtgcagggaacagggtggacgtggtagagccggtggctgaagggaatggtgtgggaatggatccaacacaccccatgtgtgcagggaacagggtggacgtggtagagcacgtggctgaaggggcagggaacagggtggacgtggtagagcatgtggctgagggaaatggtgtgggaatggatccaacacaccccacgtgtgcagggaacagggtggacgtggtagagcaggtggctgaggggaatgaacactgtatggagttccagaagaccaacggctccctgaatggtacctctgagaatgccacctctcctgtcatcgagttctgggattcccctcctggcccacagtttgtctgtgtggagtgcctggtgacagcctccatagacatgttccccaggcagctccggaagagcgggcggcgcgagctcctcatcctcaccatcgccgtcatgtgctacctgatagggcttttcctggtcaccgagggcgggatgtacatcttccagctgtttgactactatgcttccagtggcatatgcctgctgttcctgtcattgtttgaagtggtctgcataagctgggtgtatggggcggaccgtttctatgacaacattgaggacatgattggctaccggccatggcccctggtgaagatctcctggctcttcctgacccctggactttgcctggccactttcctcttctccttgagcaagtacacccccctcaagtacaacaacgtctatgtgtacccgccctggggatacctccattggctggttcctggctctgtcctccatggtctgtgtcccactcttcgtcgtcatcaccctcctgaagactcggggtcctttcaggaaggtaggtggtgtaggggagagtgacctcttaaaggagggcactgagagaggctggacttggggcaggacacacaactggggccagggagcagacacaaactctgagtgtggggcagcccttcagtctcacagaatcttaacgagacgaactttgaagaccagtccagtggcttttcagaaatgctctgaaaagtcctagagtcctagacctacagaatctgacctcccatggatgatctgggcaggctaacggagggcaaactgctgaaaggttcangagaaaactaagtcacanacatgaacagggaggtgcc

SEQ ID NO: 21332 - DNA, 7080 bp, Homo sapiens
  SIMILAR (153)..(4934): 951254mologous to Homo sapiens retinoblastoma binding protein 2, RBP2,accession number S66431,Smith-Waterman Score=7857.
gaggaagcgattctggggtttctgtgttgaacggttcttgtccgcgaagatgcgcttcggcctctgtcaggggacttgaacgggcttagtgggcttcagccagcttttctccaccggttccccacggggaccccccccccccggccgttgcaatggcgggcgtggggccggggggctacgcggcggagttcgtgccaccgccagagtgccccgtctttgagccgagttgggaggagttcacagatccgctcagctttatcggccgcatccggcctttggcggagaaaaccggcatctgcaaaattcggccgcccaaggactggcagcctccatttgcctgtgaagtaaaaagctttcgtttcactccaagagtccagcgcctgaatgaacttgaggcaatgaccagagtgagattggatttcttggatcaactagcaaaattttgggaacttcaaggatctactctgaagatccctgtggtagagagaaaaatcctggatctgtatgctttgagcaagattgttgccagcaaaggaggttttgaaatggtcaccaaagagaagaaatggtctaaagtgggtagtcgcttgggatatctgccaggaaaaggaactgggtctcttttgaagtcacattatgaaagaattctctacccatatgagcttttccagtctggtgtgagccttatgggtgtgcagatgcctaatttagatcttaaagaaaaagtggagcctgaggttctcagcactgatacccaaacttccccagagccaggcacaaggatgaacattctgccgaagagaacaagacgtgtgaagactcagtcagaatctggagatgtgagtagaaacacggaactgaagaaacttcagatttttggggctgggcccaaggttgtgggcttggcaatgggaacaaaagataaagaagatgaggtcacccgaagacgaaaagttaccaacaggtcagacgcatttaacatgcaaatgagacaacggaaaggcactctctctgttaactttgttgatctctatgtttgtatgttttgtggtcggggaaacaatgaagataaattgcttttgtgtgatggatgtgatgacagctatcatacattttgtctaattcctccactacctgatgtgcccaaaggagactggaggtgtcctaaatgtgtcgccgaggaatgtagcaaacctcgagaagcctttggatttgaacaagctgtacgagagtatacacttcagagctttggagagatggcagataattttaagtctgattattttaatatgccagtccatatggttcccacagaactagtagaaaaggaattttggcggctggtaagcagcattgaagaagatgttattgtggaatatggagcagatatctcctcaaaagactttggaagtggatttccggtgaaggatgggcggagaaagattctgccagaagaagaggaatatgcactttctggttggaatttgaataacatgcctgtcctggaacagtctgttcttgcacatattaatgtggacatctctggtatgaaagtgccgtggctctatgtgggaatgtgcttctcttctttttgctggcacattgaggatcactggagttattccatcaactacttgcactggggggagccaaagacatggtatggtgtgccatctcatgctgcagagcaactggaggaggtgatgagagagctggcccccgagttatttgaatcccagcctgatcttctgcatcagttagttaccatcatgaaccccaacgtgctaatggagcatggtgtgcctgtgtacaggaccaatcagtgtgctggcgagtttgttgtgacatttcctcgtgcctatcactctggatttaaccagggctacaactttgctgaagctgtgaacttctgtactgctgactggttgcccattggacgtcaatgtgtaaatcattaccgacgcctaaggcgccactgtgtcttttcacacgaggaactaattttcaagatggcagcagatccagaatgcttagatgtggggctggctgccatggtctgcaaagaattgactctcatgactgaagaagaaacacgattaagagagtctgttgtacagatgggtgtcctgatgtcagaagaagaagtgtttgaacttgttcctgatgatgagcggcagtgttcagcatgcagaaccacatgttttctctctgctctcacatgttcctgtaatcctgagcggcttgtatgtctctaccatccaactgatctgtgcccctgccccatgcagaagaaatgtcttagatatcgctacccattagaagacctcccttctctgctatatggtgtaaaagtcagggcacagtcctatgacacttgggtcagtcgtgttacagaagcattgtctgctaacttcaaccacaaaaaagatttgattgaattgcgagtaatgctggaagatgctgaggataggaaatacccagagaatgatctctttcgaaaactcagggatgctgtaaaagaagctgagacctgtgcttctgtggctcagctgcttctgagcaaaaagcagaaacacagacagagcccagatagtgggaggactcggaccaaactgacagtggaagaattgaaggcctttgtccaacaactttttagtcttccgtgtgtcatcagccaagctcggcaagtaaagaatctgctagatgatgtggaagagtttcatgaacgtgctcaggaggccatgatggatgaaaccccagattcttccaaactccagatgttgatagatatgggctctagtctctatgtggaactccctgaattaccacgactgaagcaagagctacaacaggctcggtggttggacgaagtaagactgaccttatcagatccgcaacaagtcactttggatgtcatgaagaagctgatagactctggggtagggttggcaccccaccatgctgtggagaaagcaatggctgaactacaggagctccttacagtctctgaacgatgggaagaaaaggctaaggtctgcctacaggcaagaccgaggcacagtgtggcaagtttagaaagcattgtgaatgaagccaagaacattccagcctttctacccaatgtgttgtccttgaaagaagccttacaaaaggctcgagaatggaccgctaaagtggaagctattcagagtggcagcaattacgcttatttggagcagcttgagagcttgtctgcgaaaggacgccctattcctgtgcgtcttgaagcactgccgcaagtggaatcacaggtagcagcagcacgggcatggagagaacggactgggcggacgtttcttaagaagaattctagccatacattgttacaggtgctgagcccccggaccgacattggtgtatatgggagtggcaaaaataggaggaaaaaagtaaaagaactaatagaaaaagaaaaagaaaaggatctggacctggagcctctgagtgatctggaggaaggattggaggaaaccagagatacagccatggtggtggcagttttcaaagaacgggagcaaaaagagattgaagccatgcattctctcagagcagccaacctagccaagatgacaatggtggaccgcatagaagaagtaaaattttgcatttgccgcaagacagccagtgggtttatgctacagtgtgagctctgcaaagactggttccataacagctgtgttcctcttcctaaatcaagttcccaaaaaaaaggatccagctggcaagctaaagaagtaaaattcctttgccctctttgtatgcggtctcgaaggcccaggctagagactattctgtcactcctggtatcccttcagaagttgcccgtacggttgcctgaaggagaggccctgcagtgtttgacagaacgtgctatgagttggcaagatagagcgcggcaggctctagccacagatgaactatcctctgccctggccaaactatctgtgttgagccagcgtatggtggaacaggcggctcgagaaaaaactgaaaagatcatcagtgcagaactccaaaaagcagctgccaatccagacttacagggacacttacctagtttccagcagtctgcttttaaccgggtggtgagcagtgtgtcatcttctcctcgacaaacaatggactatgatgatgaagaaacagactctgatgaagacattcgagagacatatggctacgacatgaaggacacagccagtgtgaagtcctctagtagtcttgaacccaatcttttttgtgatgaagagattcccatcaaatccgaggaggtggtgacccacatgtggacagcaccttcattttgtgcagagcatgcttattcttctgcttctaagagttgttctcaagtattttttgggaaaggttctagcaccccaaggaaacaacctcggaagagccctttggtgccccgaagtttggaacctccagtgctggagttgtcacctggagctaaggcacaactggaagaacttatgatggttggagatctcctggaagtatctctggacgagactcaacacatatggcggattttgcaggccacacacccaccctctgaagacagattcttgcatatcatggaggatgacagcatggaagagaaacccactaaaagtgaaaggaaaggactcttcagagaagaaacggaaacggaagctagaaaaggtagagcaactttttggagaaggaaaacagaagtccaagggattaaaagaaaatggacaaacctaggaaaggaaggaaattaaaattaggtgcagacaattcaaaggagctgaataaactgggccaaggaacttggcaaaagaagaagagagaaagaaaaagaaggagaaggctgctgcagccaaagttgaacttgtgaaagagagcactgaaaagaaaagagagaaaaaggtgctggacatcccctcaaagtatgactggtcaggagcagaggagtctgatgatgagaatgctgtgtgcgcagaaccagactgccaaaggccctgcaaggacaagggagttgtatttgtaacggaagaagagaagaataaaaaatattagttttaaaagtggcctatgtgactgcttttctaaaaaggtagactgggtacaatgtgatggtggctgtgatgaagtggtttcatcaagttttgtgtgggtgtatctccaagaaatggctgaaaatgaagattacatctgtataaactgtgcaaagaagcaggggccagttagcccaggtccagcaccacctccttccttcataatgagctacaaactaccaatggaggatcttaaagagaccagttagcagatgcttgggttagtttgggacatggggggacatggaccacatttgagaccttagtcatcaagtaagagtggtttatatccacttgggaattgttgcttccaaagatgaatggccttcagagaaagtccccttagtgctggcttcctctttgccagggctctgtgggttacattgctctatcaacatatctatgcagagggtgtcttctttggtacaacagccaatatctcatgtctcctttgagtgtggtttactgcattaaggccagatgcttaattgagctctagggtggctggttagtattaatacattggtgtgctaacagggcatataggatgtggcttttgtccagctgatagtagttagaggcttacaacttaggagcagcaccaactgaaggtgctaattgcttggatctccttcattaggatagttggagagggattggagtaccactttccttccactgttacctggtacttaatgccctaaagatacaactaggagtaacagggccaaagttatttctgttagacgtcaaggaatggtatcacagtctattgacctcagcgatttgtgcttgtttgtgctagaagaacatcccaaataggagaacctctcacaagctggggcaggtcaccttatctttgtaagatgaggatatcatctagatcagaaatctgactagattggattctgaggagaagaacctactacaaggcaaggagccgttttttggctttgaaaagtcttgctgtcttgggtctacattttagggaagagcaggtacatggatccaggcttctgccaaaaaaaaaaagagaagaagatgacgatgatgaccagtcgtactatcttactgagccacagtgatgcatgcttttcggggaaaacttcattcacaagtattccagacaccaggcttcaggcatggccatgagcaagaccagcaaataacagctttttgccttgcagccctgaccccaatgtctgctgtttccaacactggtgatttctaactacggcccacagcagatgctgttgaataacaccatggcttcatcagaggatgtggggttgtagtacctctgggtgatgaagttgttttagtaaatccatcagaggatgtggggttgtagtacctctgggtgatgaagttgttttagtaaatccatttttaaaaaaaaaaaaggacttgtttttacttttttctaaatgtctctgactactgactgttctatacatagattatttttccttttttaatatacatatatgaatatataaatatatatatttactgttaccagcagcatatgacagagtttcaacatcaaaaatccatttgggggcttgctttttcttttttgctttaaaaaaaaaaatcccattccttctttgtagtacaaggagttagcactccctcctccatcccagcctgaccagatcttccattttgcttttgttcatatagataattatatgtcctttgtgtgttgggacttgtccctgtctgttgggaaacttggtctcactctagtctgtgctggctcttttttcttttgtgtgtgaatgtttgaaactatggtgctgtgtcctcttccctcctgttgtgttctctgttcttcttaaggtattaggtaagctgtatgtaaactcttattagaaggggactaatttttttttaaaggacaaaaaaaaaaaatgactaaaaatagtgttttgtcaaaaaaaaaaaaaaaaaa

SEQ ID NO: 21333 - DNA, 5774 bp, Homo sapiens
  SIMILAR (3828)..(5087): 991254mologous to Homo sapiens betaine/GABA transporter,accession number L42300,Smith-Waterman Score=2238.
atggaagagaaaccactaaaagtgaaaggaaaggactcttcagagaagaaacggaaacggaagctagaaaaggtagagcaactttttggagaaggaaaacagaagtccaaggagttaaagaaaatggacaaacctagaaagaagaaattaaaattaggtgcagacaaatcaaaggagctgaataaactggccaagaaactagcaaaagaagaagagagaaagaaaaagaaggagaaggctgctgcagccaaagttgaacttgtgaaagagagcactgaaaagaaaagagagaaaaaggtgctggacatcccctcaaagtatgactggtcaggagcagaggagtctgatgatgagaatgctgtgtgcgcagcacagaactgccaaaggccctgcaaggacaaggtagactgggtacaatgtgatggtggctgtgatgagtggtttcatcaagtttgtgtgggtgtatctccagaaatggctgaaaatgaagattacatctgtataaactgtgcaaagaagcaggggccagttagcccagggtctcacaaggctgtcatcacggtggtggttaaggctgtgtcatatctgaagtttgaggaagaatctacttctgagctcatgtggttgttggcagcctttagttccttttgggtcgtcggaataaaggccttagattttgtttggccactggccagagaggaaaaagaaattggggataacaaagatttggagaggaataaaataggagtcaacatggtaacatggcagcagttatgtaaaaacaaaagagttggtgggatggatagcagggtctcaggcacaaccagtaatggagagacaaaaccagtgtatccagtcatggaaaagaaggaggaagatggcaccctggagcgggggcactggaacaacaagatggagtttgtgctgtcagtggctggggagatcattggcttaggcaacgtctggaggtttccctatctctgctacaaaaatgggggagggcctgtagcccctccttgcaggtgtggactttgtccctcttggcaggctgccaaggagctcaacgaggcagaggaaggaggtgccttcttcatcccctacctcgtcttcctctttacctgtggcattcctgtcttccttctggagacagcactaggccagtacactagccagggaggcgtcacagcctggaggaagatctgccccatctttgaggcccaattctgcagtttccccgcaggcattggctatgcctcccagatgatcgtcatcctcctcaacgtctactacatcattgtgttggcctgggccctgttctacctcttcagcagcttcaccatcgacctgccctggggcggctgctaccatgagtggaacacagggaaccgggtggacgtggtagagccggtggctgaggggaatggtgtgggaatggatccaacacaccccacgtgtgcagggaacagggtggacgtggtagagccggtggctgaagggaatggtgtgggaatggatccaacacaacccatgtgtgcagggaacagggtggacgtggtagagcacgtggctgaaggggcagggaacagggtggacgtggtagagcatgtggctgagggaaatggtgtgggaatggatccaacacaccccacgtgtgcagggaacagggtggacgtggtagagcaggtggctgaggggaatgaacactgtatggagttccagaagaccaacggctccctgaatggtacctctgagaatgccacctctcctgtcatcgagttctgggagcggcgggtcttgaagatctctgatgggatccagcacctgggggccctgcgctgggagctggctctgtgcctcctgctggcctgggtcatctgctacttctgcatctggaagggggtgaagtccacaggcaaggtggtgtacttcacggccacatttccttacctcatgctggtggtcctgttaattcgaggggtgacgttgcctggggcagcccaaggaattcagttttacctgtacccaaacctcacgcgtctgtgggatccccagacagcatggagatacagattgctactgcctcatgtccacgcagggtacgagggcagcggtcaggctttggagccaaactgtagaagcacaaccagggtcctagaaggattccagtgcacgttcctcattgtgtggatggatgcaggcacccagatattcttctccttcgccatctgtcttgggtgcctgacagccctgggcagctacaacaagtaccacaacaactgctacagggactgcatcgccctctgcttcctcaacagcggcaccagctttgtggccggctttgccatcttctccatcctgggcttcatgtctcaggagcagggggtgcccatttctgaggtggccgagtcaggccctggcctggctttcatcgcttacccgcgggctgtggtgatgctgcccttctctcctctctgggcctgctgtttcttcttcatggtcgttctcctgggactggatagccagtttgtgtgtgtagaaagcctggtgacagcgctggtggacatgtaccctcacgtgttccgcaagaagaaccggagggaagtcctcatccttggagtatctgtcgtctccttccttgtggggctgatcatgctcacagagggcggaatgtacgtgttccagctctttgactactatgcggccagtggcatgtgcctcctgttcgtggccatcttcgagtccctctgtgtggcttgggtttacggagccaagcgcttctacgacaacatcgaagacatgattgggtacaggccatggcctcttatcaaatactgttggctcttcctcacaccagctgtgtgcacagccacctttctcttctccctgataaagtacactccgctgacctacaacaagaagtacacgtacccgtggtggggcgatgccctgggctggctcctggctctgtcctccatggtctgcattcctgcctggagcctctacagactcggaaccctcaagggccccttcagagaggttataatacctgtctccatccgtatgaccaaagttgccggaactgccggcctcagcgggaatgtgggacccagatgtgatctgagtcgcatcgaggagcttcctgatggtggaacacggttctcagtttatagcctggagtctctggctttggccctcgtcatcctgcccacccagcggggcttcccaacccaccacacagccatggacgggaaggtggcagtgcaagagtgtgggcctcctgcagtctcctgggtccccgaggagggagagaagttggaccaggaagacgaggaccaggtgaaggatcggggccaatggaccaacaagatggagtttgtgctgtcagtggccggggagatcattgggctgggcaatgtctggaggtttccctatctctgctacaaaaacggaggtggagccttcttcatcccctacttcatcttcttctttgtctgcggcatcccggtgttcttcctggaggtggcgttgggccaatacaccagccaagggagtgtcacagcctggaggaagatctgccccctcttccagggcattggtctggcatctgtggtcatcgagtcatatttgaatgtctactacatcatcatccttgcctgggctctcttctacctgttcagctccttcacttctgagctgccctggacgacctgcaacaacttttggaacacagagcattgcacggactttctgaaccactcaggagccggcacagtgaccccatttgagaattttaccttcccctgtcatggaattctgggagtagcagccgagttctgggcatcacctcgggcatccatgacctgggctccctgcgctgggagatggccctgtgcctcctgctcgcctgggtcatctgctatttctgcatctggaagggggtcaagtccacaggcaaggtggtttatttcacagccacgtttccgtacctgatgcttgtcattttggtgatcagaggtgtcacccttcccggagcctaccagggcatcatttactacttgaagccagatttgttccgcctcaaggaccctcaggtgtggatggatgcgggcacccagatcttcttctcctttgccatctgccaggggtgcctgacagccctgggcagctacaacaagtatcacaacaactgctacaaggactgcatcgccctctgcttcctgaacagtgccaccagctttgtggctgggtttgttgtcttctccatcctgggcttcatgtcccaagagcaaggggtgcccatttctgaagtggccgagtcaggtcctgggctggccttcatcgccttccccaaggctgtgactatgatgcccttatcccagctgtggtcctgcctgttctttatcatgctcatattcctagggctggacagccagtttgtctgtgtggagtgcctggtgacagcctccatagacatgttccccaggcagctccggaagagcgggcggcgcgagctcctcatcctcaccatcgccgtcatgtgctacctgatagggcttttcctggtcaccgagggcgggatgtacatcttccagctgtttgactactatgcttccagtggcatatgcctgctgttcctgtcattgtttgaagtggtctgcataagctgggtgtatggggcggaccgtttctatgacaacattgaggacatgattggctaccggccatggcccctggtgaagatctcctggctcttcctgacccctggactttgcctggccactttcctcttctccttgagcaagtacacccccctcaagtacaacaacgtctatgtgtacccgccctggggatactccattggctggttcctggctctgtcctccatggtctgtgtcccactcttcgtcgtcatcaccctcctgaagactcggggtcctttcaggaagcgtctgcgtcagctcatcacccctgactccagtctgccacagcccaagcaacatccctgcttggatggcagtgctggccggaactttgggccctccccaacaagggaaggactgatagccggggagaaggagacccatttggctcggaacctgcagctcgccatgcctgagcctccctccccctccatgggctcctgtgcggcccgagcctccccgaccagcgccgccccctgctccagggcacccagtcccatcgaccacccaagggctgagaagtgcgggcgcacggaaccggactgggaggcagctccacctgtggccccactcaaggtttgtaaacacaccaatcagcaccctgtgtctagctcagggtttgtgaatgcaccaatccacactctgtatctagcttctctggtggggacttggagaacctttgtgtctagctcaggcgttgtaaacacaccaatcaaaaccctgtcaaaacggaccaatcagcgctctgtaaaatggaccaatcggctctctgtaaaatggaccaatcagcaggatgtgggtggggccagtctggccacagcaggggcagatggcctgtcaggtctgaggaacctgctggcacgtgactgggaagtaacgggaggcgagtgcaagttgccagatgatgccacagacagagaggggagcttgctccctgccaaggctgagtccttgcaggctcgtgtccatccacagggctccgccctggacggagcgtccttcttgcctgggcgtcttcagaccttcatctgtgacaccgggggccatgtggctcaccccgaggaaggtgagtga

SEQ ID NO: 21334 - DNA, 1523 bp, Homo sapiens
  SIMILAR (137)..(211): 601254mologous to Homo sapiens Human CD14,accession number W41693,Smith-Waterman Score=58.
  misc_feature (1)...(1523): n = a,t,c or g
aagtgcggnnnnnattgcagccgaagagttcacaagtgtgaagcctggaagccggcgggtgccgctgtgtaggaaagaagctaaagcacttccagagctctgtccggagctcagaggttcggaagacttatcgaccatggagcgcgcgtccctgctttgttgctgctgctgctgccgctggatgcacgtctctgcgaccacgccagaacctcgtgatgctggacgatgaagatttccgctgcgtctgcaacttctccgaacctcagcccgactggtccgaagccttccagtgtgtttctgcaggtagaggtggagatccatgccgggcggtctcaacctaggagccgtttcttaaagcgcgtcgatgcggacgccgacccgcggcagtatgcttgacacggtcaagggttttccgcgttgcggcgggcttcacaagtgggagccgcacaggttcctgcttcagctactggtaggcgccctgcgtggtgctagcgtaattcccgcttcaaggaactgacgctcgaggacctaaagataaccgggcaccatgcctccgctgcctctggaagccacaggacttgcactttccaagcttgcgcctacgcaacgtgtcgtggggcgacagggcgttcttggcttcgccgagctggcagcagtggctcaagccagggcctcaaggtactgagcattgcccaagcacactcgcctgccttttcctgcgaacaggttcgctgctttcccggcccatcaccagcctaagacctgtctgacaatcctgggactggggcgaacgcggagctgatggcggctctctgtccccacaagttcccggcccatccagaatcttagcgctgcgcaacacagggaatgggagacgcccacagggcgtgtgcgccgcactggcggcggcaggtgtgcagccccacagcctagacgtcagccacaactcgctgcgcgccaaccgaaaccctagcggctccgagcatgcatgttggtccaacgcccctgaactcccctcaaatctgtcgtttcgctggggctggaacaggggtgcctaaaggacctgccccagccaagctccagagtgcttcgatcttcagcttgcaacagacttgaacagggctgccgcagccttggacgagcttgcccgaaggtggataaccttggacaactggacgggaatccctttcctgggtcccctggaactggcccctcccccacggagggctcaatgaactaccggcgtggtacccagcctgtgcaacgttcggacctgtcgggtgggggtgtcgggaaccctggtgctgctccaaggggcccggggctttgcctaagatccaaggggcccggggctttgcctaagatcctaagatccaagacagaataatgaatggactcaaactgccttggcttcaggggagtcccgtgcaggacgttgaggacttttcgaccaattcaaccctttgctcccacctttattaaaatcttaaaacaacgaaaaaaaaaaaaaaagggcggccgct

SEQ ID NO: 21335 - DNA, 7856 bp, Homo sapiens
  SIMILAR (1697)..(4054): 1001254mologous to Homo sapiens oncogene,accession number X63546,Smith-Waterman Score=4233.
ctaaaaataccattaagtaatagtattagcttttgtattctgagattcaacagcagcagtcacttccctccactcctatgtgtatcccaggaccaccctgggcggggagggctgaggtcagggaggtctgaagctggtcctgggctccgggggtgacagtgatgaggaactgggtgcacacatgagtggggcagccgggcctggccagagaagcaacacacacgtgcacagacatgtttatccacatacacatgtgcacgcatgtgcacaaacacattgcaggcaggcatgttgacgcctcaggcagcggaggaccctgactctgggccctgctgacccgggcaaggcccattgtgatgcgtgccatgacctcagaatgtcactggtgcttagcacctatccgctctccagactgcgtctgtgttctacggcagttacacacacgcagtggtattcacaagcggttttgtggactcaaaggttttctccctgagaggcataacccaggccagctgattcatcagaatcaggtgagtgtgacctgctctcttccctccaggctgacttggggacagtggctatggtatgggcggtgttggcctctgggcagctacagaggagggtcatccctgagcactcaccgggcgcccgttctacactgcccatgtagacgattttctctttcgtcttcatggtggcttcgtagagtgggtgctgttcccaaatgtacccattcgacaggtgagccgtctggggtcagagaggcagtaactggcctgggaatccagacaagaccctgggttttgctctcagccctgctgtgtgccatgctagacttcaggcctcaaccctgagacctccctgctctagatcccaaatctgcccagatttccgatccaatgggcagagcctggccctggcagagacactgggatggatccactgtgggtggggaggagggaagggtcctcagaacacacctggggcctaagctgggtcttgatggtcactgtgggacccactggacacacacagtcccttgtctgggagtggcatggggagccttctgcccttgggcagttgtggaaagtgaaggagccctggagagctggctgaggggagactatcttcccttgtgttcaaaggggtccaggcactggggctctccccaagtatttcttattctgtctggcctcgctttccttttgccctgagtattctcaggagggacggtccatctagatgtcctccaggagcaaggacccactgttcttcatcagtgacccaggaaaatgaagccccctcctgtggggacagctcagaatggtggagtccacagtccctccctgagagacatggtttccatgagcacagtggctgctttggagacagtaatcattttcatccccaaaaccaaacacactcctgctcaaatggtgttattgctaaagcagcttcactggttagactgaagggccatggtagcccaagtgatgagcggggtagaatggagcagtcaggagagatcttgttccccgtaggaaactgggcatctctgtggccctgaacatcccaggaggccgatcgtacagagacctctggtgcctgaccgcagttcacatccacatccctggaatagaccatcacaggctcttcacccttggcaggtggacaccattcaacctgccggggcaggatggacatggtagagaatgcagatagtttgcaggcacaggagcggaaggacatacttatgaagtatgacaagggacaccgagctgggctgccagaggacaaggggcctgagcccgttggaatcaacagcagcattgatcgttttggcattttgcatgagacggagctgcctcctgtgactgcacgggaggcgaagaaaattcggcgggagatgacacgaacgagcaagtggatggaaatgctgggagaatgggagacatataagcacagtagcaaactcatagatcgagtgtacaagggaattcccatgaacatccggggcccggtgtggtcagtcctcctgaacattcaggaaatcaagttgaaaaaccccggaagataccagatcatgaaggagaggggcaagaggtcatctgaacacatccaccacatcgacctggacgtgaggacgactctccggaaccatgtcttctttagggatcgatatggagccaagcagagggaactattctacatcctcctggcctattcggagtataacccggaggtgggctactgcagggacctgagccacatcaccgccttgttcctcctttatctgcctgaggaggacgcattctgggcactggtgcagctgctggccagtgagaggcactccctgccaggattccacagcccaaatggtgggacagtccaggggctccaagaccaacaggagcatgtggtacccaagtcacaacccaagaccatgtggcatcaggacaaggaaggtctatgcgggcagtgtgcctcgttaggctgccttctccggaacctgattgacgggatctctctcgggctcaccctgcgcctgtgggacgtgtatttggtggaaggagaacaggtgttgatgccaataaccagcattgctcttaaggttcagcagaagcgcctcatgaagacatccaggtgtggcctgtgggcacgtctgcggaaccaattcttcgatacctgggccatgaacgatgacaccgtgctcaagcatcttagggcctctacgaagaaactaacaaggaagcaaggggacctgccacccccagccaaacgcgagcaagggtccttggcacccaggcctgtgccggcttcacgtggtgggaagaccctctgcaaggggtataggcaggcccctccaggcccaccagcccagttccagcggcccatttgctcagcttccccgccatgggcatctcgtttttccacgccctgtcctggtggggctgtccgggaagacacgtaccctgtgggcactcagggtgtgcccagcctggccctggctcagggaggacctcagggttcctggagattcctggagtggaagtcaatgccccggctcccaacggacctggatatagggggcccttggttcccccattatgattttgaacggagctgctgggtccgtgccatatcccaggaggaccagctggccacctgctggcaggctgaacactgcggagaggttcacaacaaagatatgagttggcctgaggagatgtcttttacagcaaatagtagtaaaatagatagacaaaaggttcccacagaaaagggagccacaggtctaagcaacctgggaaacacatgcttcatgaactcaagcatccagtgcgttagtaacacacagccactgacacagtattttatctcagggagacatctttatgaactcaacaggacaaatcccattggtatgaaggggcatatggctaaatgctatggtgatttagtgcaggaactctggagtggaactcagaagagtgttgccccattaaagcttcggcggaccatagcaaaatatgctcccaagtttgatgggtttcagcaacaagactcccaagaacttctggcttttctcttggatggtcttcatgaagatctcaaccgagtccatgaaaagccatatgtggaactgaaggacagtgatggccgaccagactgggaagtagctgcagaggcctgggacaaccatctaagaagaaatagatcaattattgtggatttgttccatgggcagctaagatctcaagtcaaatgcaagacatgtgggcatataagtgtccgatttgaccctttcaattttttgtctttgccactaccaatggacagttacatggacttagaaataacagtgattaagttagatggtactacccctgtacggtatggactaagactgaatatggatgaaaagtacacaggtttaaaaaaacagctgagggatctctgtggacttaattcagaacaaatcctactagcagaagtacatgattccaacataaagatttctcctcttcaccatctacaaatggaatgttcaccctaactaccaatggggacctacccaaaccaatattcatccccaatggaatgccaaacactgttgtgccatgtggaactgagaagaacttcacaaatggaatggttaatggtcacatgccatctcttcctgacagcccctttacaggttacatcattgcagtccaccgaaaaatgatgaggacagaactgtatttcctgtcacctcaggagaatcgccccagcctctttggaatgccattgattgttccatgcactgtgcatacccagaagaaagacctatatgatgcggtttggattcaagtatcctggttagcaagaccactcccacctcaggaagctagtattcatgcccaggatcgtgataactgtatgggctatcaatatccattcactctacgagttgtgcagaaagatgggatctcctgtgcttggtgcccacagtatagattttgcagaggctgtaaaattgattgtggggaagacagagctttcattggaaatgcctatattgctgtggattggcaccccacagcccttcaccttcgctatcaaacatcccaggaaagggttgtagataagcatgagagtgtggagcagagtcggcgagcgcaagccgagcccatcaacctggacagctgtctccgtgctttcaccagtgaggaagagctaggggaaagtgagatgtactactgttccaagtgtaagacccactgcttagcaacaaagaagctggatctctggaggcttccacccttcctgattattcaccttaagcgatttcaatttgtaaatgatcagtggataaaatcacagaaaattgtcagatttcttcgggaaagttttgatccgagtgcttttttggtaccacgagacccggccctctgccagcataaaccactcacaccccagggggatgagctctccaagcccaggattctggcaagagaggtgaagaaagtggatgcgcagagttcggctggaaaagaggacatgctcctaagcaaaagcccatcttcactcagcgctaacatcagcagcagcccaaaaggttctccttcttcatcaagaaaaagtggaaccagctgtccctccagcaaaaacagcagccctaatagcagcccacggactttggggaggagcaaagggaggctccggctgccccagattggcagcaaaaataagccgtcaagtagtaagaagaacttggatgccagcaaagagaatggggctgggcagatctgtgagctggctgacgccttgagccgagggcatatgcgggggggcagccaaccagagctggtcactcctcaggaccatgaggtagctttggccaatggattcctttatgagcatgaagcatgtggcaatggctgtggcgatggctacagcaatggtcagcttggaaaccacagtgaagaagacagcactgatgaccaaagagaagacactcatattaagcctatttataatctatatgcaatttcatgccattcaggaattctgagtgggggccattacatcacttatgccaaaaacccaaactgcaagtggtactgttataatgacagcagctgtgaggaacttcaccctgatgaaattgacaccgactctgcctacattcttttctatgagcagcaggggatagactacgcacaatttctgccaaagattgatggcaaaaagatggcagacacaagcagtacggatgaagactctgagtctgattacgaaaagtactctatgttacagtaaagctaccactctggctgctagacagcttggtggcgagggagatgactccttgtagctgatacttggcaaaagtgtcactgaaagacaagctaaatgtagttattttatcctgttagaacaaaaattctaattaaaatagttaacttgaagagtagaaacaattgtattttgaagtctcatacaagctgtctgatagagaactttcaggcagatcccaccattagcctgtaaacaaaaggtgtggcaccagccacctgggaccaaataagaattgaattgtgcttgtccagatatgaacaaatatgtagtgagtatagagtttaccaataatcataacaaatattaaagatttccttggagtcagaggaaaaaacaaacaattataatgttgtctagggacgacatgatacgctacctcctttttcctgaagttttattccattatattgacaagatggagaaagcaagatcatgaaggtgtgcaaatgattcttacggcatggacaaggatttttcaatttattttttaaactgtttccataccctttctttttcttgctttttgtttttgccattgtgtttacgtttgagacacaaccagtcattggtggcaggggcatagagtggtcagtctgaaagggaggctctcttaagagctatgtgccttccaaccagagggagacccagtagaaagaaaaacatcctgggaaatccagctaccagggccctcccagtggaggcatcttacatttaggctacttcaagtatcctcagaaatgtattctgcacccccggccccgcccatgctgagggaaggggagcagttgccaatatttgcaccatcttcacatgcacatgttgcaacaagagcttctgggaaggtaagcggcatcggagctagatcacgtttcacaattagtggttattcttttctgtgtttgttttgcactttaaaaaagagagaacacatgcaaatgaacttgcttgtgtgtatttgatggctctaagggctataaattacaaacaaaacacatcccagacattaggagttcataagtatatttaatgaaattggtggttttaggaagtcaactttagttttgctttgtttgcatgtccactggtttttttattttgatatttgtctttttttaaattttacagtagtcattgaaagttatgtttctttgcttacttcattttttccctctaattatttaagattggaacaaaagtataaatattatttatttgaggtagaatttttttcatgtagtttcttaatatatacttgaaggaaatgtttcaccttatttttggtctttgtttattcatttagaccctgcaagttgattctcattgccagattccattaccctttcttcctcataggtagtaattaccaatgtaactaagcatttgtgttctgatatctgaggccagtaactattaatatctagttctcagagcatttggaaaggttatcttaaatggctacctaaattgaaatccttttcagaaaaaatataattgcaagtaggtaggagtggcctaaattgtctaatgtaataaagtcagacaaaatgcacactttatagtttcaagattttcagtaaataaaatctgtccattcctacctggacatgtcccattaaaaagtggaagattttaaataatttctttacagatgttttatttaaacaggtagcacaatctactaatgttgtgtgatttgtgttatactggttgtaattaatttttttaattcatgaactagcggaaaatttattaaattaactattaactacattcaccttgtaaattactgtataaaacttgttgacaatgcactgactttagaaagatgttaatgtacataaatagagtgtaaataaaatagtgttgatgtactgaaatatgaactgtatcaaaagtattggtaattgtatatggggtgtacctgtttatctgttaactattatccaaacaaattaaatactgtggttgcctctatgtgctgtttttcctcatacaagtaaacacagaaagtc

SEQ ID NO: 21336 - DNA, 963 bp, Homo sapiens
  SIMILAR (391)..(711): 981254mologous to Homo sapiens oncogene,accession number X63546,Smith-Waterman Score=580.
atgggctggcaaagacattttcagagcagcgccgtgtttatgtcctgtgcccagttgtttgcgctgatgcgttacaagcccctctggtggtcccccgctgactctttggtaaaagtctgctgcatctgccaattcttttacgagtttgccgtgagcattcctggatgtggcaacctcagtctcaagaagagcgacaggacgccagctcccatgcagagacagatccaggattccactgcaatgagctggtggaggaataatttctggatcatcttagctgtggccatcatcgttgtctctgtgggtctgggcctcatcctgtactgtgtctgcaagaaatgggaaattgccaagcccctgaaacacaagcaagtagatgaagaaaagatgtatgaattttgcagaggctgtaaaattgattgtggggaagacagagctttcattggaaatgcctatattgctgtggattggcaccccacagcccttcaccttcgctatcaaacatcccaggaaagggttgtagataagcatgagagtgtggagcagagtcggcgagcgcaagccgagcccatcaacctggacagctgtctccgtgctttcaccagtgaggaagagctaggggaaagtgagatgtactactgttccaagtgtaagacccactgcttagcaacaaagaagctggatctctggaggcttccacccttcctgctctccaagcccaggattctggcaagagaggtgaagaaagtggatgcgcagagttcggctggaaaagaggacatgctcctaagcaaaagcccatcctcactcagcgctaacagcagcagcagcccaaaaggttctccttcttcatcaagaaaaagtggaaccagctgtccctccagcaaaaacagcagccctaatagcagcccacggaccgaaaaaaggagggaaaaaaaaaaacacaaggccaaaagcttgtag

SEQ ID NO: 21337 - DNA, 1320 bp, Homo sapiens
  SIMILAR (478)..(1017): 961254mologous to Homo sapiens oncogene,accession number X63547,Smith-Waterman Score=906.
atgcgggggggcagccaaccagagctgttcactcctcaggaccatgaggtagctttggccaatggattcctttatgagcatgaagcatgtggcaatggctgtggcgatggctacagcaatggtcagcttggaaaccacagtgaagaagacagcactgatgaccaaagagaagacactcatattaagcctatttataatctatatgcaatttcatgccattcaggaattctgagtgggggccattacatcacttatgccaaaaacccaaactgcaagtggtactgttataatgacagcagctgtgagcggaccatagcaaaatatgctcccaagtttgatgggtttcagcaacaagactcccaagaacttctggcttttctcttggatggtcttcatgaagatctcaaccgagtccatgaaaagccatatgtggaactgaaggacagtgatggccgaccagactgggaagtagctgcagagctaagatctcaagtcaaatgcaagacatgtgggcatataagtgtccgatttgaccctttcaattttttgtctttgccactaccaatggacagttacatggacttagaaataacagtgattaagttagatggtactacccctgtacggtatggactaagactgaatatggatgaaaagtacacaggtttaaaaaaacagctgagggatctctgtggacttaattcagaacaaatcctactagcagaagtacatgattccaacataaagaactttcctcaggataaccaaaaagtacacctctcagtgagcggatttttgtgtgcatttgaaattcctgtcccttcatctccaatttcagcttctagtccaacacaaatagatttctcctcttcaccatctacaaatggaatgttcaccctaactaccaatggggacctacccaaaccaatattcatccccaatggaatgccaaacactgttgtgccatgtggaactgagaagaacttcacaaatggtgttcaagccttaacccccagtgaggctatatgtggccatagggatgaggccttgatccaacaggatcagtgtccttgtaagaggaaacaccagaaatctgactccctgatgctcttccccagcttgaatgcaccaaggaaaggccatttgtggggccatagcaagaaggcagctgtctgcaagccaggaggagaaccctcaccagaaacctcacagaaatcggccaacaccctcatctcgggcttccagcttcagaacaacgagaaaacaaatttctgttgtgtaagcaccccagtctatggtatttttgttacagcagcctga

SEQ ID NO: 21338 - DNA, 3396 bp, Homo sapiens
  SIMILAR (3167)..(3214): 871254mologous to Homo sapiens oncogene,accession number X63546,Smith-Waterman Score=78.
atggacactgtgcctggagtgaacctgagctggatcctgaatgagatgcatgaccaggacaagaaattggtggagaagagctacaaggatgccaagggctgtttcttcagcatgggtgagcccagccttatagacccctgcttggaggtgtgttacgggacccaactggcccagctgcaggggctcatcagaagcatggagcagcagctgtgcgagctctgctgcgacgcggagcaccaggaccatgagcaccaggtccttctggacgtgaagacacggctggagcaggagatcgccacctacagccgcttgctagaggttgaggacgctcagcaaggccccattgtgatgcgtgccatgacctcagaatgtcactggtgcttagcacctatccgctctccagactgcgtctgtgttctacggcagttacacacacgcagtggtattcacaagcggttttgtggactcaaaggttttctccctgagaggcataacccaggccagctgattcatcagaatcagagtgggtgctgttcccgaatgtacccattcgacaggaaactgggcatctctgtggccctgaacatcccaggaggccgatcgtacagagacctctggtgcctgaccgcagttcacatccacatccctggaatagaccatcacaggctcttcacccttggcaggatggacatggtagagaatgcagatagtttgcaggcacaggagcggaaggacatacttatgaagtatgacaagggacaccgagctgggctgccagaggacaaggggcctgagcccgttggaatcaacagcagcattgatcgttttggcattttgcatgagacggagctgcctcctgtgactgcacgggaggcgaagctcatagatcgagtgtacaagggaattcccatgaacatccggggcccggtgtggtcagtcctcctgaacattcaggaaatcaagttgaaaaaccccggaagataccagatcatgaaggagaggggcaagaggtcatctgaacacatccaccacatcgacctggacgtgaggacgactctccggaaccatgtcttctttagggatcgatatggagccaagcagagggaactattctacatcctcctggcctattcggagtataacccggaggtgggctactgcagggacctgagccacatcaccgccttgttcctcctttatctgcctgaggaggacgcattctgggcactggtgcagctgctggccagtgagaggcactccctgccagctgcctgggctcctgctgcccttggtgcccacaaatgggctgaccaagcccaggtggcagcatctcaccatcccgtgtcccctggcccgaccccacttccaggagatgaccaggaagctcagcacccaccctgttctggccgctctgttgtggcctcaaagtcaggcttgcccttttgcaccctggcccaggaggcttccaggggaacctccagccaggctccaggggatgttcctgtcccacctccccagggcaaaggccgcatgatctctctcgggctcaccctgcgcctgtgggacgtgtatttggtggaaggagaacaggtgttgatgccaataaccagcattgctcttaaggttcagcagaagcgcctcatgaagacatccaggtgtggcctgtgggcacgtctgcggaaccaattcttcgatacctgggccatgaacgatgacaccgtgctcaagcatcttagggcctctacgaagaaactaacaaggaagcaaggggacctgccacccccagccaaacgcgagcaagggtccttggcacccaggcctgtgccggcttcacgtggtgggaagaccctctgcaaggggtataggcaggcccctccaggcccaccagcccagttccagcggcccatttgctcagcttccccgccatgggcatctcgtttttccacgccctgtcctggtggggctgtccgggaagacacgtaccctgtgggcactcagggtgtgcccagcctggccctggctcagggaggacctcagggttcctggagattcctggagtggaagtcaatgccccggctcccaacggacctggatatagggggcccttggttcccccattatgattttgaatggagctgctgggtccgtgccatatcccaggaggaccagctggccacctgctggcaggctgaacactgcggagaggttcacaacaaagatatgagttggcctgaggagatgtcttttacagcaaatagtagtaaaatagatagacaaaaggttcccacagaaaagggagccacaggtctaagcaacctgggaaacacatgcttcatgaactcaagcatccagtgcgttagtaacacacagccactgacacagtattttatctcagggagacatctttatgaactcaacaggacaaatcccattggtatgaaggggcatatggctaaatgctatggtgatttagtgcaggaactctggagtggaactcagaagagtgttgccccattaaagcttcggcggaccatagcaaaatatgctcccaagtttgatgggtttcagcaacaagactcccaagaacttctggcttttctcttggatggtcttcatgaagatctcaaccgagtccatgaaaagccatatgtggaactgaaggacagtgatggccgaccagactgggaagtagctgcagagctaagatctcaagtcaaatgcaagacatgtgggcatataagtgtccgatttgaccctttcaattttttgtctttgccactaccaatggacagttacatggacttagaaataacagtgattaagttagatggtactacccctgtacggtatggactaagactgaatatggatgaaaagtacacaggtttaaaaaaacagctgagggatctctgtggacttaattcagaacaaatcctactagcagaagtacatgattccaacataaagaactttcctcaggataaccaaaaagtacaactctcagtgagcggatttttgtgtgcatttgaaattcctgtcccttcatctccaatttcagcttctagtccaacacaaatagagactacactgtctctcgtcctcaggatacttgagaaaagagcaaagatgaaaataccacaagcttatgatgctgtacttatctttgaatttgtagatttctcctcttcaccatctacaaatggaatgttcaccctaactaccaatggggacctacccaaaccaatattcatccccaatggaatgccaaacactgttgtgccatgtggaactgagaagaacttcacaaatggaatggttaatggtcacatgccatctcttcctgacagcccctttacaggttacatcattgcagtccaccgaaaaatggttagttaa

SEQ ID NO: 21339 - DNA, 8284 bp, Homo sapiens
  SIMILAR (4226)..(6103): 691254mologous to Homo sapiens oncogene,accession number X63547,Smith-Waterman Score=2083.
ctaaaaataccattaagtaatagtattagcttttgtattctgagattcaacagcagcagtcacttccctccactcctatgtgtatcccaggaccaccctgggcggggagggctgaggtcagggaggtctgaagctggtcctgggctccgggggtgacagtgatgaggaactgggtgcacacatgagtggggcagccgggcctggccagagaagcaacacacacgtgcacagacatgtttatccacatacacatgtgcacgcatgtgcacaaacacattgcaggcaggcatgttgacgcctcaggcagcggaggaccctgactctgggccctgctgacccgggcaaggcccattgtgatgcgtgccatgacctcagaatgtcactggtgcttagcacctatccgctctccagactgcgtctgtgttctacggcagttacacacacgcagtggtattcacaagcggttttgtggactcaaaggttttctccctgagaggcataacccaggccagctgattcatcagaatcaggtgagtgtgacctgctctcttccctccaggctgacttggggacagtggctatggtatgggcggtgttggcctctgggcagctacagaggagggtcatccctgagcactcaccgggcgcccgttctacactgcccatgtagacgattttctctttcgtcttcatggtggcttcgtagagtgggtgctgttcccaaatgtacccattcgacaggtgagccgtctggggtcagagaggcagtaactggcctgggaatccagacaagaccctgggttttgctctcagccctgctgtgtgccatgctagacttcaggcctcaaccctgagacctccctgctctagatcccaaatctgcccagatttccgatccaatgggcagagcctggccctggcagagacactgggatggatccactgtgggtggggaggagggaagggtcctcagaacacacctggggcctaagctgggtcttgatggtcactgtgggacccactggacacacacagtcccttgtctgggagtggcatggggagccttctgcccttgggcagttgtggaaagtgaaggagccctggagagctggctgaggggagactatcttcccttgtgttcaaaggggtccaggcactggggctctccccaagtatttcttattctgtctggcctcgctttccttttgccctgagtattctcaggagggacggtccatctagatgtcctccaggagcaaggacccactgttcttcatcagtgacccaggaaaatgaagccccctcctgtggggacagctcagaatggtggagtccacagtccctccctgagagacatggtttccatgagcacagtggctgctttggagacagtaatcattttcatccccaaaaccaaacacactcctgctcaaatggtgttattgctaaagcagcttcactggttagactgaagggccatggtagcccaagtgatgagcggggtagaatggagcagtcaggagagatcttgttccccgtaggaaactgggcatctctgtggccctgaacatcccaggaggccgatcgtacagagacctctggtgcctgaccgcagttcacatccacatccctggaatagaccatcacaggctcttcacccttggcaggtggacaccattcaacctgccggggcaggatggacatggtagagaatgcagatagtttgcaggcacaggagcggaaggacatacttatgaagtatgacaagggacaccgagctgggctgccagaggacaaggggcctgagcccgttggaatcaacagcagcattgatcgttttggcattttgcatgagacggagctgcctcctgtgactgcacgggaggcgaagaaaattcggcgggagatgacacgaacgagcaagtggatggaaatgctgggagaatgggagacatataagcacagtagcaaactcatagatcgagtgtacaagggaattcccatgaacatccggggcccggtgtggtcagtcctcctgaacattcaggaaatcaagttgaaaaaccccggaagataccagatcatgaaggagaggggcaagaggtcatctgaacacatccaccacatcgacctggacgtgaggacgactctccggaaccatgtcttctttagggatcgatatggagccaagcagagggaactattctacatcctcctggcctattcggagtataacccggaggtgggctactgcagggacctgagccacatcaccgccttgttcctcctttatctgcctgaggaggacgcattctgggcactggtgcagctgctggccagtgagaggcactccctgccaggattccacagcccaaatggtgggacagtccaggggctccaagaccaacaggagcatgtggtacccaagtcacaacccaagaccatgtggcatcaggacaaggaaggtctatgcgggcagtgtgcctcgttaggctgccttctccggaacctgattgacgggatctctctcgggctcaccctgcgcctgtgggacgtgtatttggtggaaggagaacaggtgttgatgccaataaccagcattgctcttaaggttcagcagaagcgcctcatgaagacatccaggtgtggcctgtgggcacgtctgcggaaccaattcttcgatacctgggccatgaacgatgacaccgtgctcaagcatcttagggcctctacgaagaaactaacaaggaagcaaggggacctgccacccccaggcccaacagccctgggacgaaggtgtgtggcaggaagcccccagccagtctgaaccctgggggcagtcccaggagccacccaccatgccccaacggcttccccatgccaggcagcacacacccctccctctgggatcagcagactacaggcgtgtcgtcagtgtcagaccacaggggccacacagagaccccaaggactccagagatgcagccaaacgcgagcaagggtccttggcacccaggcctgtgccggcttcacgtggtgggaagaccctctgcaaggggtataggcaggcccctccaggcccaccagcccagttccagcggcccatttgctcagcttccccgccatgggcatctcgtttttccacgccctgtcctggtggggctgtccgggaagacacgtaccctgtgggcactcagggtgtgcccagcctggccctggctcagggaggacctcagggttcctggagattcctggagtggaagtcaatgccccggctcccaacggacctggatatagggggcccttggttcccccattatgattttgaacggagctgctgggtccgtgccatatcccaggaggaccagctggccacctgctggcaggctgaacactgcggagaggttcacaacaaagatatgagttggcctgaggagatgtcttttacagcaaatagtagtaaaatagatagacaaaaggttcccacagaaaagggagccacaggtctaagcaacctgggaaacacatgcttcatgaactcaagcatccagtgcgttagtaacacacagccactgacacagtattttatctcagggagacatctttatgaactcaacaggacaaatcccattggtatgaaggggcatatggctaaatgctatggtgatttagtgcaggaactctggagtggaactcagaagagtgttgccccattaaagcttcggcggaccatagcaaaatatgctcccaagtttgatgggtttcagcaacaagactcccaagaacttctggcttttctcttggatggtcttcatgaagatctcaaccgagtccatgaaaagccatatgtggaactgaaggacagtgatggccgaccagactgggaagtagctgcagaggcctgggacaaccatctaagaagaaatagatcaattattgtggatttgttccatgggcagctaagatctcaagtcaaatgcaagacatgtgggcatataagtgtccgatttgaccctttcaattttttgtctttgccactaccaatggacagttacatggacttagaaataacagtgattaagttagatggtactacccctgtacgggtatggactaagactgaatatggatgaaaagtacacaggcttaaaaaaacagctgagtgatctctgtggacttaattcagaacaaatccttctagcagaagtacatggttccaacataaagaactttccttaggacaaccaaaaagttcgactctcagtgagtggatttttgttgtgcattagaaattcctgtccctgtgtctccaatttcagcttctagtccaacacagacagatttctccttttcgccatctacaaatgaaatgttcaccctaactaccaatggggacctaccccgaccaatattcatccccaatggaatgccaaacactgttgtgccatgtggaactgacaagaacttcacaaatggaatggttaatggtcacatgccatctcttcctgacagcccctttacaggttacatcattgcagtccaccgaaaaatgatgaggacagaactgtatttcctgtcatctcagaagaatcgccccagcctctttggaatgccattgattgttccatgtactgtgcatacccggaagaaagacctatatgatgcggtttggattcaagtatcccggttagcgagcccactcccacctcaggaagctagtaatcatgcccaggattgtgacgacagtatgggctatcaatatccattcactctacgagttgtgcagaaagatgggaactcctgtgcttggtgcccatggtatagattttgcagaggcttgtaaattgattgtggagaagacagagctttcattggaaatgcctatatcgctgtggattgggatcccacagcccttcaccttcgctatcaaacatcccaggaaagggttgtagatgagcatgagagtgtggagcagagtcggcgagcgcaagccgagcccatcaacctggacagctgtctccgtgctttcaccagtgaggaagagctaggggaaaatgagatgtactactgttccaaagtgtaagacccactgctttagcaacaaagaagctggatctctggaggcttccacccttcctgattattcaccttaagcgatttcaatttgtaaatgatcagtggataaaatcacagaaaattgtcaaatttcctcgggaaagttttgatccgagtgcttttttggtaccacgaaaacccggctctttggcagcattaaccactcacaccccagggggatgagctctccaagcccaggattctggcaagagaggtgaagaaagtggatgtgcagagtttggctggggaataggacatgctcctgagcaaaagcccatcctcactcagcgctaacatcagcagcagcccaaaaggttctccttctttcatcaagaaaaagtgggaaccagctgttccctccagcaaaaacagcagccctaattagcagcccacgggattttgggggaggagcaaagggaggctccggctgccccagattggcagcaaaaataagccgtcaagtagtaagaagaacttggatgccagcaaagagaatggggctgggcagatctgtgagctggctgacgcccttgagtcgagggcatatgcggggggtgggcagccaaccagagctggtcactcctcaggaccatgatgtatcatttggccaatggatttcctttgtgagcctgagccatgtggcaatggctgtggcgatggctccagcaattggtcagcttggaaacccccagtgaagaagcccgcactgatgaccaaagagaagacactcatatttagcctaatttataatctataagcaatttcatgccattcagaaattctgagtgggggccattacatcacttatgccaaaaacccaaacctgcaagttggtactgttataatgacagcagctgtgaggaactcacccgggatgaaattgacaccgactctgcctacattctttttctatgagcagcaggggatagactatgcacaatttctgccaaagactgatggcaaaaagatggcagacacaagcagtaccggatgaagactctgagtctggactctacaaaaagtgactgtgtgttacagcaaagctaccactctggctgctagacagcttggctggggagggaggatggactccttggtagctgacatttgggcaaaagcgtccactggaaagggcaagctaaatgtagttattttatcctgttagaatacaaattctaattaaaatagttaactttaagagtagtagtaattttattttgaagtctcatgcaagttgtctgatagagaactttcaggcagatcccaccattagcctgtaaacaaaaggtttggcaccagccacctgggaccaaataagaattcaattgtgcttgtccagatatgaacaaatatgtagtgagtatagagtttatcaataatcataacaaatattaaagatttccttggagtcaaagtaaaaaacaaacaattataatgttgtctagggacgacatgatatgctacctcctttttcctgaagttttattccattatattgacaagatggagaaaagcaagatcaccgagggtgtgccaaatgattccttaaggcatgggaccgaggatttttcaatttattttttaaacctgtttccataccctttcctttgtctttcttgctttttgtttttgccattgtgtttacagtttgagatacaaccaagtcattgggtggcaggggcatatagtgggtcagtctgaaagggagggcccctcttaagagctatgtgccttccacccagagccttgtgggagacccagtagaaagaaacagcatcctgggaaatccagctaccatggtccctcccagtggaggcatcttacatttaggatacttcaagtatcctcagaaatgtattctgcaccccccggccccgcccatgctgagggaaggggagcagttgccaatatttgcaccatcttcacatgcacatgttgcaacaacgagcttctgggaaggtaagtggcattggagctagatcacgtttcacaattagtggttgttcttttctgtgtttgtcttgcactttaaaaaagagagaacacatgcaaatgaacttgcttgtgtgtatttgaatggctctaagggctataaattacaaacaaaacacatcccaggacattaggagttcataaagtatatttaatgaaattggtggtttttaggaagtcaactttagttttgctttgtttgcatgtccactaattttttttattttgatattagtcttttttaaaaaattttacagtagtcattgaaagttatgtttctttgtttacttcattttttccctctaattatttaagattggaacaaaagtataaatattatttatttgaggtagaatttttttcatgtagtttcttaatatatacttgaaggaaatgtttcaccttatttttggtctttgtttattcatttagaccctgcaagttgattctcattaattgtcagattccactacactttcttcctcataggtagtaattaccagtgtaactaagcatttgtgttctgatatctgaggccagtaactattaatatctagttctcagaggcatttggaaaggttatcttaaatggctacctaaattgaaatccttttcagaaaaaatataattgcaagtaggtaggactggcctaaattgtctaatgtaataaagtcagacaaaatgcatactttatagtttcaagattttcagtatataaaatctgtccattcctacctggacatgtcccattaaaaagtggaagattttaaataatttctttcccaaaggtcttatttaaagcagggtagctcaatctactaatgttgtttgatctgtgtttgttatactggttgtaattaaatttttttaaattccatgaacctagcggaaaatttaattaaaattaacctattaacccacattcacccttgtaaatgactgtataaaacttgttgacaatgcactgactttagaaagatgttaatgtgcataaatagagtgtaaataaaatagtgttgatgtactgaaatatgaactgtataaaaagtattagtaattgtatatggggtgtacctgtttatctgtaactaggtatacaaacaaattaaatactgtggatgcctttatgtactgtttttcctcatacaagtaaacacagaaagtcaaattcttcagc

SEQ ID NO: 21340 - DNA, 379 bp, Homo sapiens
  SIMILAR (86)..(214): 931254mologous to Mus musculus transducin beta like 1,accession number F38006,Smith-Waterman Score=231.
aaagaggcttcttgattgtgctgttcattgttgtaaatccatggagctgtgcaacagtgagtaactccagatgtcctccctccctactgcagcccctgcccttgatgtggactggcagagcagcacgacctttgcctcctgtagcacagacatgtgtatccatgtgtgcaggctcggctgtgaccgcccagtcaaaaccttccagggacacacagtaagtgagagctcttgtcactggtctcgagtttgtgagaatgtgatgtgggagccgattcttgtgtgcctagaattaaaagctactgcagcagcagaccagctctaatgtgccccttggctatttgagctgtcatggttaccccatggtaaccatggtggatgg

SEQ ID NO: 21341 - DNA, 505 bp, Homo sapiens
  SIMILAR (3)..(503): 951254mologous to Homo sapiens transducin (beta) like 1 protein,accession number Y12781,Smith-Waterman Score=884.
caagaatatggacagaaaatggtaacctggccatcactttatgccaacataaaggccccatcttcgctctgaaatggaacaaaaaggggaattatgttttgagtgctggtgtagacaaaacaacaataatttgggatgctcacacaggagaagccaaacagcagtttccttttcattcagcccccgcccttgatgtggactggcagaacaacatgacctttgcctcctgtagcacagacatgtgtatccatgtgtgcaggctcggctgtgaccacccagtcaaaacctttcagggacacacaaacgaggtcaatgccatcaaatgggatccttctggaatgttgctggcggtctgctcggatgacatgacattgaagatctggagcatgaaacaggaggtgtgcatccatgatcttcaggctcacaataaagagatctacaccatcaagtggagccccactgggcccgccaccagcaacccaaactccaacatcatgttggcaag

SEQ ID NO: 21342 - DNA, 1887 bp, Homo sapiens
  SIMILAR (184)..(933): 861254mologous to Homo sapiens transducin (beta) like 1 protein,accession number Y12781,Smith-Waterman Score=1110.
atgccgctgtcattcggaactgtcgggcagctcattatgatctgcacgcgcgggataggcggtgcgattggcgcagtgggttttcggtcacaagctgccagtactctagctggacagccagatggcaatggagtctgtgtccatgcagggaattcaagaatttttgttcctctgcctgtgggtcttgaagtgaaaggtttttctcactcggctttcacgtttgggatcgagagccacatcagccagtccaacatcaatgggacactagtgccaccgtctgccctcatctccattctccagaagggactgcagtatgtagaggctgagataagcatcaacaaggatggcacagtgttcgacagccgccctatagagtccctgtccctgatagttgctgtgattcctgatgtggtgcagatgcggcagcaggcatttggagagaagctcactcagcagcaagccagtgcagcagccacagaggcatcagcaatggcaaaggcggcaaccatgaccccagctgctatttcccagcaaaatcctccaaagaaccgagaggccacagtgaacggggaagagaatggagcacatgaaatcaataatcactcaaagccaatggaaatagatggggatgttgagattccacccaacaaagccacagtccttcggggccacgagtctgaggtgttcatttgtgcctggaaccctgtcagtgatttgctagcctctggatctggagactcaactgcaaggatatggaacctgaatgagaatagcaacgggggctccacccagctcgtgttgagacattgtatacgagaaggggggcacgacgtcccaagtaataaagatgtcacctcactggactggaacagtgatggaacactattggctatgggttcatatgatggtttcgcaagaatatggacagaaaatgcccccgcccttgatgtggactggcagaacaacatgacctttgcctcctgtagcacagacatgtgtatccatgtgtgcaggctcggctgtgaccacccagtcaaaaccttccagggacacacattttgcacctgtatagaaagcatctgcttctggggaggactcaggaagcttacaaccatgacagaaggtaaaaggctgaggcctaagaccttctgcagcgacggtggcgcgctgctgccccctgctggaaggcgacctcatctactcacaggtcctgatatatttttcaagagactctccgctctgtttcagaacgaggtcaatgccatcaaatgggatccttctggaatgttgctggcgtcctgctcggatgacatgacattgaagatctggagtatgaagcaggatgcatgcgtccacgatcttcaggctcacagcaaagagatctacaccatcaagtggagccccaccgggcctgccaccagcaacccaaactccagcatcatgttggcaagtgcttcatttgattctacagtgcgactgtgggatgtggagcaaggtgtctgcacccacacactcatgaagcatcaagagcctgtctacagtgtagctttcagccccgatggaaagtacttggctagtggatcctttgacaagtatgttcatatctggaatactcagagtggaagtctcgtccacagctaccaaggcactggcggtatcttcgaggtgtgctggaacgcccgaggagataaagtgggcgccagcgcgtctgatggctcttgtgtgcatactttggcagctgtcaggaaagcagtgaaggaccacatgctctctagcctcaagggagtgttggcagaacaaaaaggtactgccgaagccctagaaactgacagcttggctggatttggcctgttggctacatctttgccacagccatgttatgagtga

SEQ ID NO: 21343 - DNA, 1650 bp, Homo sapiens
  SIMILAR (304)..(1587): 961254mologous to Homo sapiens neural cell adhesion molecule,accession number AF002246,Smith-Waterman Score=2166.
atggttattattcaacaggttccaacaatcataaaacagtcaaaagtccaagttgcctttcccttcgatgagtattttcaaattgaatgtgaagctaaaggaaatccagaaccaacattttcgtggactaaggatggcaaccctttttatttcactgaccatcggataattccatcgaacaattcaggaacattcaggatcccaaacgaggggcacatatctcactttcaagggaaataccgctgctttgcttcaaataaactgggaatcgctatgtcagaagaaatagaatttatagttccaaaattagaacacatcgaacaagatgaaagagtatacatgagccaaaagggagatctatacttcgcaaacgtggaagaaaaggacagtcgcaatgactactgttgctttgctgcatttccaagattaaggactattgtacagaaaatgccaatgaaactaacagttaacagtttaaagcatgctaatgactcaagttcatccacagaaattggttccaaggcaaattccatcaagcaaagaaaacccaaactgctgttgcctcccactgagagtggcagtgagtcttcaattaccatcctcaaaggggaaatcttgctgcttgagtgttttgctgaaggcttgccaactccacaggttgattggaacaaaattggtggtgacttaccaaaggggagagaaacaaaagaaaattatggcaagactttgaagatagagaatgtctcctaccaggacaaaggaaattatcgctgcacagccagcaatttcttgggaacagccactcacgattttcacgttatagtagaagataacatctctcatgagctcttcactttacatccagagcctcctcgctggacaaagaagcctcagagtgctgtgtatagcaccggaagcaatggcatcttgttatgtgaggctgaaggagaacctcaacccacaatcaagtggagagtcaatggctccccagttgacaatcatccatttgctggtgatgttgtcttccccagggaaatcagttttaccaaccttcaaccaaatcatactgctgtgtaccagtgtgaagcctcaaatgtccatggaactatccttgccaatgccaatattgatgttgtggatgtccgtccattgatacaaaccaaagatggagaaaattacgctacagtggttgggtacagtgctttcttacattgcgagttctttgcttcacctgaggcagtcgtgtcctggcagaaggtggaagaagtgaaacccctggagggcaggcggtatcatatctatgaaaatggcacattgcagatcaacagaaccaccgaagaagatgctgggtcttactcatgttgggtagaaaatgctataggaaaaactgcagtcacagccaatttggatattagaaatgctacaaaacttagagtttctcctaagaatcctcgtatccccaaattgcatatgcttgaattacattgtgaaagcaaatgtgactcacatttgaaacacagtttgaagttgtcctggagtaaagatggagaagcctttgaaattaatggcacagaagatggcagcatttgtgaatgggaattcattcatgatttggctctctgcttgcctactgttggtgtaaaggaatga

SEQ ID NO: 21344 - DNA, 458 bp, Homo sapiens
  SIMILAR (1)..(297): 911254mologous to Homo sapiens neural cell adhesion molecule,accession number AF002246,Smith-Waterman Score=476.
tccatggagcagaatggaccaggcctagagtacagagtgacctggaagccacagggagccccagtggagtgggaagaagaaacagtcacaaaccacacattgcgggtgatgacccctgctgtctatgccccttatgatgtcaaggtccaggctatcaatcaactaggatctgggcctgaccctcagtcagtgactctctattctggagaagactatcctgatacagctccagtgatccatggggtggacgttataaacacaacatatgtaagcaacgctactggttcaccccaaccttccatatttatctgttcaaaggagcaagaactttcatataggaatagaaacatgttggccgaagatttcatccagaagtcaacatcctgcaattatgttgaaaagagtagtactttcttcaaaatataaaatgccaagcacttcaaaaaaaaaaaaaaaaa

SEQ ID NO: 21345 - DNA, 2223 bp, Homo sapiens
  SIMILAR (688)..(1152): 771254mologous to Cloning vector pLS13 cI-GCN4IINI fusion protein,accession number AF169190,Smith-Waterman Score=572.
  misc_feature (1)...(2223): n = a,t,c or g
atgatgagactggatgccatagagcatggctggcaaaaaggcatcatggctcacagattgaagagtttggctacggagtctctaggcggtaacagacttcggagtgatttgggcaagaaaactgggacatctggagttcagaagtcgaggaaaatggggaagaaccaggaagatgaatacatgatcatcagctacacaaaagaacggagcaaaaagaagccgggatttgggcacaggcgtctggcaaggaggccggcagcagggctaatgaagcatttgcggcgtgggacatttgccaacgcaacaaagaagatgtgcttgggctctgcagatgtgccagggcccccagagcaaaataatgacataatcaccatcagtgtcacagaccagactgtacacaaggatggcaaccctttttatttcactgaccatcggataattccatcgaacaattcaggaacattcaggatcacaaacgaggggcacatatctcactttcaagggaaataccgctgctttgcttcaaataaactgggaatcgctatgtcagaagaaatagaatttatagttccaagtgtttctttagaaaaatgtgagaataaactgatacggaatattggtaccaagaagcagggcactgctataaggatacctgaaaatgtggaagcagctttggaattgagaaagcagcagaagttggaagagtgtggagggttcagaagaagagagaatgcaatttatgaaaaaaagaaaaatgaacttggcttatcccaggaatctgtcgcagacaagatggggatggggcagtcaggcgttggtgctttatttaatggcatcaatgcattaaatgcttataacgccgcattgcttgcaaaaattctcaaagttagcgttgaagaatttagcccttcaatcgccagagaaatctacgagatgtatgaagcggttagtatgcagccgtcacttagaagtgagtatgagtaccctgttttttctcatgttcaggcagggatgttctcacctgagcttagaacctttaccaaaggtgatgcggagagatgggctccaagccaagctagcttcacgctgccgcaagcactcagggcgcaagggctgctaaaggaagcggaacacgtagaaagccagtccgcagaaacggtgctgaccccggatgaatgtcagctactgggctatctggacaagggaaaacgcaagcgcaaagagaaagcagcaatggcaacaacgttgcccggatcgatccggtcgcgcgaattgatccgggaccaaagcggccatcgtgcctccccactcctgcagttcgggggcatggatgcgcggatagccgctgctggtttcctggatgccgacggatttgcactgccggtagaactccgcgaggtcgtccagcctcaggcagcagctgaaccaactcgcgaggggatcgagcccggggtgggcgaagaactccagcatgagatccccgcgctggaggatcatccagccggcgtcccggaaaacgattccgaagcccaacctttcatagaaggcggcggttgggcgtcgcttggtcggtcatttcgaaccccagagtcccgctcagaagaactcgtcaagaaggcgatagaaggcgatgcgctgcgaatcgggagcggcgataccgtaaagcacgaggaagcggtcagcccattcgccgccaagctcttcagcaatatcacgggtagccaacgctatgtcctgatagcggtccgccacacccagccggccacagtcgatgaatccagaaaagcggccattttccaccatgatattcggcaagcaggcatcgncatgggtctatgttctcataggccagcccagctcctaggaatagtcaggttgatcacagtattcagcgactgtggctacagaaaacaggggctagaatatcccagtggaatgtctaacaactggaaggagcatgttgacaagcaatcccaggagcaggcagacaagaaatttcaggaaggttcttccctgagctggtggcatgtggacttagtggaaattagaaacatggttggtgtcaagatacagtgtggcataaaaagggaagctttagcaggaaattcagttgaggtcaacaccaggaggctcagaagagcagccagcatcagagaagtgtgcaaggcagcacaaaccctcaaatggatagatgttggagtaccagttgcatttctgagatag

SEQ ID NO: 21346 - DNA, 543 bp, Homo sapiens
  SIMILAR (60)..(230): 891254mologous to Mus musculus L1-like protein,accession number X94310,Smith-Waterman Score=278.
gggttgagtcaagaccaaaatgttgtgtgtgaacctttgagggagccaataacttcgtaggagatccaattgtcctcccatgcaatcctcccaaaggcctcccacctttacacatttattggatgaatattgaattagaacacatcgaacaagatgaaagagtatacatgagccaaaagggagatctatacttcgcaaacgtgggaaggaaaagggacagtcgcaatgacttactgttgctttgctggcatttccaaggattaagggactattgtacaggaaaatgccaatggaaacttaacagttaacagttcaaattccatcaaggcaaaggaaaaccccaaactgctgttggcctccccactgaggagtggcagtgagtcttcaattaccatcctcaaaggggaaatcttgctgcttgagtgttttgctgaaggcttgccaactccacaggttgattggaacaaaattggtggtgacttaccaaaggggagagaagcaaaagaaaattatggcaagactttgaagatagagaatgtgtat

SEQ ID NO: 21347 - DNA, 1601 bp, Homo sapiens
  SIMILAR (127)..(237): 781254mologous to Mus musculus Pro-Pol-dUTPase polyprotein,accession number Y12713,Smith-Waterman Score=151.
ctaccctgtgtgaatgtgaggatgtagacatccatcagtgcaactcgagctccatcctcctccgatttctaaggttccagttttcttaatttgggtgggcacaatataatcagctgccagtgcagagtgagtccagtgggttaccggactcatgctgtggtcatttccccagtgccagaatgcagatttggcatagacatacttagcagctggcagaacccccacattggatccctggaaccaggaaagatgcacaatgcctagtgggtctatttggattttggagacaacacattcctcatttgggtgggttactgtggcccatttatcgagtgacccaaaaggctgccagttttgagtggggtccagaataggagaaggctctgcaacagatccagccttctgtgcaagctgctctgccacttggaccataagacctagcagatccaatggtgcttgaggtgtcaatggctgataggtgtgctggttggagcctttggcaggcccccataggtgaattacagcagaagcctctaggattttggagcaaggccctgccatcttctgcagataactattctccttttgagagacagttctttgcctgttactgggctttggtggaaactgaatgtttgcctacgggtcatcaactcaccatgcaacctgaactgcctatcatgaactgggtgctttcagacccatctagccataaatgggtccatggacaaagtggccatggtggcagagatagcggttactcatggactcagcaacatggacttccactcaccaagggtgacctatctatgaccactgctgagtgccaaattttccagcagcagagaccaatactgagccctcgatatggcaccattccttggggtgatcagccagctacttggcggcagaaatggcagaggtttgtcctcactggaatagacacttattccagatatgagtttgcctatcccgcatgccatgcttctaccaagactaccatccatggactcatggaattcctcatccaccatcatggtattccacacagcattgcctctgaccaaggcactcaccttatggctaaagaagtgcggcagtgggctcatgctcatggaattcactggtcttaccatgttccccatcatcctgaagtagctggattgatagaacggtggaatgaatggccttttgaagtcacaattacaacaccaactagtcaacaggctaagaagggagttacagtgttggctggggtgattgacccggactatcacaatgaaatcagtctactactccacaatggagaatccaagttcttcagttttggactggctctccttgctcctcagcctgcagatggcctattgcgggaccttgtgatcaggtgtttaaatcatgtgtccagcagccctattaatgaggaagtaggagagaagaactctttggttaccactagcagtttttgtcataagacagcaacaagctataaagaaagcaaattgagatatttgttaaaaactggaaccttagaaatcggaggaggatggagctcgagttgcactgatggatgtctacatcctcacattcacacagggtag

SEQ ID NO: 21348 - DNA, 1768 bp, Homo sapiens
  SIMILAR (755)..(1180): 771254mologous to Homo sapiens neural cell adhesion molecule,accession number AF002246,Smith-Waterman Score=582.
atgaatgttgcactgacacacatagatacgcatcatgcggaatttgaaatggctctacaagcagcattggtttggaacacactgagaactgctggggggaagaaatctgtacacctggcatctgccctgcttgtgcatgagataattattgatggagctaatttgaccatatctaatgtaactttagaggaccaaggtatttactgctgttcagctcatactgctctagacagtgctgccgatataactcaagtaactgttcttgatgttccggatccaccagaaaaccttcacttgtctgaaagacagaacaggagtgttcggctgacctgggaagctggagctgaccacaacagcaatattagcgagtatattgttgaatttgaaggaaacaaagaagagcctggaaggtgggaggaactgaccagagtccaaggaaagaaaaccacagttatcttacctttggctccatttgtgagataccagttcagggtcatagccgtgaacgaagtagggagaagtcagcctagccagccgtcagaccatcatgaaacaccaccagcagctccagataggaatccacaaaacataagggttcaagcctctcaacccaaggaaatgattataaagtgggagcctttgaaatccatggagcagaatggaccagagcctagagtacagagtgacctggaagccacagggagccccagtggagtgggaagaagaaacagtcacaaaccacacattgcgggtgatgacgcctgctgtctatgccccttatgatgtcaaggtccaggctatcaatcaactaggatctgggcctgaccctcagtcagtgactctctattctggagaagacttacctgaacagccaacttttctaaaggtcatcaaagttgataaagacactgccactttatcttggggactacctaagaaattaaatggaaacttaactggctatcttttgcaatatcagataataaatgacacctacgagattggagaattaaatgatattaacattacaactccatcaaagcccagctggcacctctcaaacctgaatgcaactaccaagtacaaattctacttgagggcttgcacttcacagggctgtggaaaaccgatcacggaggaaagctccaccttaggagaagggagtgtttctttagaaaaatgtgagaataaactgatacggaatattggtaccaagaagcagggcactgctataaggatacctgaaaatgtggaagcagctttggaattgagaaagcagcagaagttggaagagtgtggagggttcagaagaagagagaatgccaatgaacagcaaggagtcactgaagaatttaaacaacagaatgagaaactcagatttttattattgaaaattgtcattctggcagtagcacgtgaaatgacttggaatggggaaggcagggatctctctgaaccttccttaacagtggtctttgctgacctttcctctcctgcctattctttacataccaccatggcccaagagccaggccctggcctcttcttgtcactttctacaattccttggccaatctcatccattcccatgattcacgcatctgtacaagtgagctggatccctctcttgagaaatagtctgatggtacacattcacagcagcttggagcagaggaatctcaaagtccacatatccaaggaacagaagaagctcaactctgtggattcagatctgactgacaaccctccaactcataccgtgaactga

SEQ ID NO: 21349 - DNA, 1443 bp, Homo sapiens
  SIMILAR (13)..(1338): 941254mologous to Homo sapiens neural cell adhesion molecule,accession number AF002246,Smith-Waterman Score=2177.
atgaagcacagtaagggacaattgcccttttcaatggcaagatatctcttttcagaattagaacacatcgaacaagatgaaagagtatacatgagccaaaagggagatctatacttcgcaaacgtggaagaaaaggacagtcgcaatgactactgttgctttgctgcatttccaagattaaggactattgtacagaaaatgccaatgaaactaacagttaacagtttaaagcatgctaatgactcaagttcatccacagaaattggttccaaggcaaattccatcaagcaaagaaaacccaaactgctgttgcctcccactgagagtggcagtgagtcttcaattaccatcctcaaaggggaaatcttgctgcttgagtgttttgctgaaggcttgccaactccacaggttgattggaacaaaattggtggtgacttaccaaaggggagagaaacaaaagaaaattatggcaagactttgaagatagagaatgtctcctaccaggacaaaggaaattatcgctgcacagccagcaatttcttgggaacagccactcacgattttcacgttatagtagaagataacatctctcatgagctcttcactttacatccagagcctcctcgctggacaaagaagcctcagagtgctgtgtatagcaccggaagcaatggcatcttgttatgtgaggctgaaggagaacctcaacccacaatcaagtggagagtcaatggctccccagttgacaatcatccatttgctggtgatgttgtcttccccagggaaatcagttttaccaaccttcaaccaaatcatactgctgtgtaccagtgtgaagcctcaaatgtccatggaactatccttgccaatgccaatattgatgttgtggatgtccgtccattgatacaaaccaaagatggagaaaattacgctacagtggttgggtacagtgctttcttacattgcgagttctttgcttcacctgaggcagtcgtgtcctggcagaaggtggaagaagtgaaacccctggagggcaggcggtatcatatctatgaaaatggcacattgcagatcaacagaaccaccgaagaagatgctgggtcttactcatgttgggtagaaaatgctataggaaaaactgcagtcacagccaatttggatattagaaatgctacaaaacttagagtttctcctaagaatcctcgtatccccaaattgcatatgcttgaattacattgtgaaagcaaatgtgactcacatttgaaacacagtttgaagttgtcctggagtaaagatggagaagcctttgaaattaatggcacagaagatggcaggataaaatctgggaagactttagaagaagctgtgattatagaactgagccttgaagtatttcaacagaaggagcgggaagaaccttctagcagaagagaagtaatatga

SEQ ID NO: 21350 - DNA, 7722 bp, Homo sapiens
  SIMILAR (2602)..(3270): 991254mologous to Homo sapiens neural cell adhesion molecule,accession number AF002246,Smith-Waterman Score=1174.
cggaccctgcgcgcccccgtcccggctcccggccggctcgggggagaaggcgcccgaggggaggcgccggacagatcgcgtttcggaggcggcgcaggtgctgtaaactgcaaaccataatcctgtcttaatactgcaaacaaatcatagtggaactaaggggaacttaatttactgtttccaggttaactaaggtctcagctgtaaaccaaaagtgagaggagacattaagattttcattcttaccgggttgtcttcttcctgaagagcaatggagccgcttttacttggaagaggactaatcgtatatctaatgttcctcctgttaaaattctcaaaagcaattgaaataccatcttcagttcaacaggttccaacaatcataaaacagtcaaaagtccaagttgcctttcccttcgatgagtattttcaaattgaatgtgaagctaaaggaaatccagaaccaacattttcgtggactaaggatggcaaccctttttatttcactgaccatcggataattccatcgaacaattcaggaacattcaggatcccaaacgaggggcacatatctcactttcaagggaaataccgctgctttgcttcaaataaactgggaatcgctatgtcagaagaaatagaatttatagttccaagtgttccaaaattcccaaaagaaaaaattgaccctcttgaagtggaggagggagatccaattgtcctcccatgcaatcctcccaaaggcctcccacctttacacatttattggatgaatattgaattagaacacatcgaacaagatgaaagagtatacatgagccaaaagggagatctatacttcgcaaacgtggaagaaaaggacagtcgcaatgactactgttgctttgctgcatttccaagattaaggactattgtacagaaaatgccaatgaaactaacagttaacagtttaaagcatgctaatgactcaagttcatccacagaaattggttccaaggcaaattccatcaagcaaagaaaacccaaactgctgttgcctcccactgagagtggcagtgagtcttcaattaccatcctcaaaggggaaatcttgctgcttgagtgttttttgctaaaggcttgccaactcccacaggttgattggaccaaaattggtggtgacttcccaaaggggagagaagcaaaagaaaattatggcaagactttgaagatagagaatgtctcctaccaggacaaaggaaattatcgctgcacagccagcaatttcttgggaacagccactcacgattttcacgttatagtagaagagcctcctcgccggacaaagaagcctcagagtgctgtgtatagcaccggaagcaatggcatcttgttatgtgaggctgaaggagaacctcaacccacaatcaagtggagagtcaatggctccccagttgacaatcatccatttgctggtgatgttgtcttcaacagggaaatcagttttaccaaccttcaaccaaatcatactgctgtgtaccagtgtgaagcctcaaatgtccatggaactatccttgccaatgcccaatattgatgttgtggatgtcccgtcccattgatacaaaccaaagatggagaaaattacgcctaacagtggttgggtacagtgcctttccttaacattgccgaagttcctttgccttccaccctgaggcagtcgtgtccctggcagaaggtggaaagaagtgaaaacccccggagggcaggcggtatccatatcctatgaaaatggcacattgccagatcaacagaaccaccgaagaagatgcctgggtccttactcatgttgggtagaaaatgctataggaaaaactgcagtcacagccaatttggatattagaaatgctacaaaacttagagtttctcctaagaatcctcgtatccccaaattgcatatgcttgaattacattgtgaaagcaaatgtgactcacatttgaaacacagtttgaagttgtcctggagtaaagatggagaagcctttgaaattaatggcacagaagatggcaggataattattgatggagctaatttgaccatatctaatgtaactttagaggaccaaggtatttactgctgttcagctcatactgctctagacagtgctgccgatataactcaagtaactgttcttgatgttccggatccaccagaaaaccttcacttgtctgaaagacagaacaggagtgttcggctgacctgggaagctggagctgaccacaacagcaatattagcgagtatattgttgaatttgaaggaaacaaagaagagcctggaaggtgggaggaactgaccagagtccaaggaaagaaaaccacagttatcttacctttggctccatttgtgagataccagttcagggtcatagccgtgaacgaagtagggagaagtcagcctagccagccgtcagaccatcatgaaacaccaccagcagctccagataggaatccacaaaacataagggttcaagcctctcaacccaaggaaatgattataaagtgggagcctttgaaatccatggagcagaatggaccaggcctagagtacagagtgacctggaagcccacagggagccccagtggagtgggaagaagaaacagtcacaaaccacacattgcgggtgatgacgcctgctgtctatgccccttatgatgtcaaggtccaggctatcaatcaactaggatctgggcctgaccctcagtcagtgactctctattctggagaagactatcctgatacagctccagtgatccatggggtggacgttataaacagtacattagttaaagttacctggtcaacagttccaaaggacagagtacatggacgtctgaaaggctatcagataaattggtggaaaacaaaaagtctgttggatggaagaacacatcccaaagaagtgaacattctaagattttcaggacaaagaaactctggaatggttccttccttagatgcctttagtgaatttcatttaacagtcttagcctataactctaaaggagctggtcctgaaagtgagccttatatatttcaaacaccagaaggagtacctgaacagccaacttttctaaaggtcatcaaagttgataaagacactgccactttatcttggggactacctaagaaattaaatggaaacttaactggctatcttttgcaatatcagataataaatgacacctacgagattggagaattaaatgatattaacattacaacttccatcaaagcccagctggcacctctcaaacctgaatgcaactaccaagtacaaattctacttgagggcttgcacttcacagggctgtggaaaaccgatcacggaggaaagctccaccttaggagaagggagtaaaggtatcgggaagatatcaggagtaaatcttactcaaaagactcacccagtagaggtatttgagccgggagctgaacatatagttcgcctaatgactaagaattggggcgataacgatagcatttttcaagatgtaattgagacaagagggagagaatatgctggtttatatgatgacatctccactcaaggctggtttattggactgatgtgtgcgattgctcttctcacactactattattaactgttttgctttgtgaagagggatagaggtggaaagtactcagttaaagaaaaggaagatttgcatccagacccagaaattcagtcagtaaaagatgaaacctttggtgaatacagtgacagtgatgaaaagcctctcaaaggaagccttcggtcccttaatagggatatgcagcctactgaaagtgctgacagcttagtcgaatacggagagggagaccatggtctcttcagtgaagatggatcatttattggtgcctacgctggatctaaggagaagggatctgttgaaagcaatggaagttctacagcaacttttccccttcgggcataaacacaacatatgtaagcaacgctactggttcaccccaaccttccatatttatctgttcaaaggagcaagaactttcatataggaatagaaacatgctggccgaagatttcatccagaagtcaacatcctgcaattatgttgaaaagagtagtactttcttcaaaatataaaatgccaagcacttcaggcctatgttttgcttatattgttttcaggtgctcaaaatgcaaaacacaaaacaaatcctgcatttagatacacctcaactaaatccaaagtccccattcagtatattccatatttgcctgattttactattcggtgtgtttgcatagatgttgctacttggtgggtttttctccgtatgcacattggtatacagtctctgagaactggcttggtgactttgcttcactacaggttaaaagaccataagcaaactggttatttaaaatgtaaaaaggaatatgaaagtcttattaaaacacttcattgaaaatatacagtctaaatttattatttaaattttactagcaaaagtcttaggtgaacaatcaactagtatttgttgagctcctatttgcccagagatgggtcatatttaaacagaagtatacgtttttcagtttcaacatgaatttttttatttctgtcagttatgacatccacgagcatcactttttgtgtctgttttttttttttttcttggactaaattcaactgcatggaagcggtggtcagaaggttgttttatacgagaacaggcagaaagtgccccattgttccaggattctaatagctacatctacttaatatcttcatttctaaattgactgcttttacctttttctcatgtttatataatggtatgcttgcatatatttcatgaatacattgtacatattatgttaatatttacacaatttaaaatatagatgtgttttattttgaagtgagaaaatgaacattaacaggcatgtttgtacagctagaatatattagtaagatactgtttttcgtcattccagagctacaactaataacacgaggttccaaagctgaagactttgtataaagtatttgggttttgttcttgtattgctttctttcaacagtttcaaaataaaatatcatacaaatattgagggaaatgttttcatatttttcaaaataggtttttattgttgaatgtacatctaccccagcccctcaaaagaaaaactgtttacatagaaattcctacacatacgtttgcgtatatgttattttaaacatctttgtggtgagaattttttccccgatattctccttctgtcaaagtcagaacaaattcccggaatttaattttttggcagaggggctccaatcctttaaaaattgcacatgaacatgttttagaaacaatatggaggatgatgcatacatgtcggtcaagttcagcgctcgacattttatggaaagatttttttaaccttaccacgaaatacttaactactgtttaagtgaattgacttatttcactttagtttttgaactgtgattattggtatactgttatatcctcaacttggatttatggtaaccccttttagttcatggagaccaaaatttggggtatttataatagtcagcgcaggaatgcacatgggaatatctacttgtccttttgaacctcacgagtcatccagaatgtataggacagggaaaagcatgtcttatttaaaactgtaatttatggggctcagggtctgacccgcagtcccggggagtaaggcattttcaaagggggggaagggcagtgtgggtcccctacccctgtgtgaatgtgaggatgtagacatccatcagtgcaactcgagctccatcctcctccgatttctaaggttccagttttctggagggacagtcatcatggtttgatgtatctgggagaaaactgtggcgctcaacttgtgaggagggcaaggttgtgacgttcgagcttagttctggtgttattctgtctcctcttctttgtcatcagccaaaacgtggtttttaaagagagtcatgcaggttagaaataatgtcaaaaatatttaggaatttaataacctttaagtcagaaactaaaacaaatactgaaatattagctcttcctacacttcgtgttcccctttagctgcctgaaaatcaagattgctcctactcagatcttctgagtggctaaaacttatggatatgaaaaatgagattgaatgatgactatgctttgctatcattgttacctttcctcaatactatttggcaactactgggactcttcagcacaaaaggaatagatctatgattgaccctgattttaattgtgaaattatatgattcatatattttatgaatcagaataaccttcaaataaaataaatctaagtcggttaaaatgggatttcatggattttccctcaggaaaatgagtaacggagtcccacgggcgtgcaatgggtaattattaaattgggtgatgcttgtttgcaaattgcccactcgtgataaggtcaacagccaatatttaaaactttgttcgttactggctttaccctaactttctctagtctactgtcaatatcattttaatgtaattgattgtatatagtctcaagaatggttggtgggcatgagttcctagagaactgtccaagggttgggaaaatccaaattctcttcctggctccagcactgattttgtacataaacattaagcaggttgcttaacctttttatttcaaactctctcaactctaaagtgctaataataatctcagttaccttatctttgtcacagggtgttcttttttatgaagaaaaatttgaaaatgataaaagctaagatgccttctaacttcataagcaaacctttaactaattatgtatctgaaagtcacccccacataccaactcaacttttttcctgtgaacacataaatatatttttatagaaaaacaaatctacataaaataaatctactgtttagtgagcagtatgacttgtacatgccattgaaaattattaatcagaagaaaattaagcagggtctttgctatacaaaagtgttttccactaattttgcatgcgtatttataagaaaaatgtgaatttggtggttttattctatcggtataaaggcatcgatattttagatgcacccgtgtttgtaaaaatgtagagcacaatggaattatgctggaagtctcaaataatatttttttcctattttatactcatggaagagataagctaaagaggggacaataatgagaaatgttggtgtgcttttctaagcatttaaaacataattgcccattggaacccttaaataggtttccataccattaagatatgattcatgtaacaatgttaaaactaattaataatgggattgggtttggttacctgtggtagtatatatcctagtgttcctatagtgaaataagtagggttcagcccaaagctttctttgttttgtaccttaaattgttcgattacgtccatccaaaagagatgaaaggtatgtagaacaggttcacgtgattacctttttcttttggcttggattaatattcatagtagaactttataaaacgtgtttgtattgtaggtggtgtttgtattatgcttatgactatgtatggtttgaaaatattttcattatacatgaaattcaactttccaaataaaagttctacttcatgtaatccaaaaaaaaaaaaa

SEQ ID NO: 21351 - DNA, 2489 bp, Homo sapiens
  SIMILAR (1)..(801): 951254mologous to Homo sapiens tyrosine kinase,accession number M16029,Smith-Waterman Score=1346.
caggccggcgccatggcctccgggagtgtggccgagtgcctgcagcaggagaccacctgccccgtgtgcctgcagtacttcgcagagcccatgatgctcgactgcggccataacatctgttgcgcgtgcctcgcccgctgctggggcacggcagagactaacgtgtcgtgcccgcagtgccgggagaccttcccgcagaggcacatgcggcccaaccggcacctggccaacgtgacccaactggtaaagcagctgcgcaccgagcggccgtcggggcccggcggcgagatgggcgtgtgcgagaagcaccgcgagcccctgaagctgtactgcgaggaggaccagatgcccatctgcgtggtgtgcgaccgctcccgcgagcaccgcggccacagcgtgctgccgctcgaggaggcggtggagggcttcaaggagcaaatccagaaccagctcgaccatttaaaaagagtgacaagacttaaatttacagactttttggcccagggggaacaggcacgagctgaactcttgagcctaacccacatggagagggagaagattgtttgggagtttgagcagctgtatcactccttaaaggagcatgagtatcgcctcctggcccgccttgaggagctagacttggccatctacaatagcatcaatggtgccatcacccagttctcttgcaacatctcccacctcagcagcctgatcgctcagctagaagagaagcaccagcagcccaccagggagctcctgcaggacattggggacacattgagcaaggctgaaagaatcaaggattcctgaaccttggatcacacctccagatttgcaagagaaaatccacatttttgccccaaaatgtctattcttgacggagagtctaaagcagttcacagaaaaaatgcagtcagatatggagaaaatccaagaattaagagaggctcagttatactcagggggcagcattgttgggggacacgagcctggggagccccgggggattaaagctggctatggcacctgcaactgcttccctgaggaggagaagtgcttctgcgagcccgaagacatccaggatccactgtgcgacgagctgtgccgcacggtgatcgcagccgctgtcctcttctccttcgtcgtctcggtgctgctgtctgccttctgcatccactgctaccacaagtttgcccacaagccacccatctcctcagctgagatgaccttccggaggcccgcccaggccttcccggtcagctactcctcttccggtgcccgccggccctcgctggactccatggagaaccaggtctccgtggatgccttcaagatcctggaggatccaaagtgggaattccctcggaagaacttggttcttggaaaaactctaggagaaggcgaatttggaaaagtggtcaaggcaacggccttccatctgaaaggcagagcagggtacaccacggtggccgtgaagatgctgaaagagaacgcctccccgagtgagcttcgagacctgctgtcagagttcaacgtcctgaagcaggtcaaccacccacatgtcatcaaattgtatggggcctgcagccaggatggcccgctcctcctcatcgtggagtacgccaaatacggctccctgcggggcttcctccgcgagagccgcaaagtggggcctggctacctgggcagtggaggcagccgcaactccagctccctggaccacccggatgagcgggccctcaccatgggcgacctcatctcatttgcctggcagatctcacaggggatgcagtatctggccgagatgaagctcgttcatcgggacttggcagccagaaacatcctggtagctgaggggcggaagatgaagatttcggatttcggcttgtcccgagatgtttatgaagaggatccctacgtgaagaggagccagggtcggattccagttaaatggatggcaattgaatccctttttgatcatatctacaccacgcaaagtgatgtatggtcttttggtgtcctgctgtgggagatcgtgaccctagggggaaacccctatcctgggattcctcctgagcggctcttcaaccttctgaagaccggccaccggatggagaggccagacaactgcagcgaggagatgtaccgcctgatgctgcaatgctggaagcaggagccggacaaaaggccggtgtttgcggacatcagcaaagacctggagaagatgatggttaagaggagagactacttggaccttgcggcgtccactccatctgactccctgatttatgacgacggcctctcagaggaggagacaccgctggtggactgtaataatgcccccctccctcgagccctcccttccacatggattgaaaacaaactctatggtagaatttcccatgcatttactagattctagcaccgctgtcccctctgcactatccttcctctctgtgatgctttttaaaaatgtttctggtctgaac

SEQ ID NO: 21352 - DNA, 3078 bp, Homo sapiens
  SIMILAR (328)..(654): 581254mologous to Mus musculus ret finger protein,accession number L46855,Smith-Waterman Score=293.
  misc_feature (1)...(3078): n = a,t,c or g
gtttacgctgccgccgcatccgctcggacgcggccacgttgtcttgcgcgctttgcccgcctggccctgggactctgaccctcggctaccctttcctgccccactagcgtggccgcgagcctcggtgagccggccgtattcccgctctcgcttagggggcacaggcgcaggcatcggcccggccactccaagccttcggtgcgcgggcgcgtctgggatacgggcccgggaggcgccgccctccgtccgcccggtgcctctcaggaacagcgaaccggagagagcgccggagagttgggctcagtgcagagctcggcgccggggcccatgcccgtgcgcccccgcaggcccggcgccatggcctccgggagtgtggccgagtgcctgcagcaagagaccacctgccccgtgtgcctgcagtacttcgcagagcccatgatgctcgactgcggccataacatctgttgcgcgtgcctcgcccgctgcttggggcacggaagaaacttaacgtgtcgtggcccgcagtgccgggaggaccttcccgcagaggcacatgcggcccaaccggcacctggccaacgtgacccaactggtaaagcagctgcgcaccgagcggccggtcggggcccggcggcgagatgggctgtgtgcgagaatgcaccgcgagcccctgaagctgtactgcgaggaggaccagatgcccatctgcgtggtgtgcgaccgctcccgcgagcaccgcggccacagcgtgctgccgctcgaggaggcggtggagggcttcaaggagcaaatccagaaccagctcgaccatttaaaaagagtgaaagatttaaagaagagacgtcgggcccagggggaacaggcacgagctgaactcttgagccttaacccagattggagagggagaagattgtttgggaagtttgagcagctgtatcactccttaaaggagcatgagtatcgcctcctggcccgccttgaggagctagacttggccatctacaatagcatcaatggtgccatcacccagttctcttgcaacatctcccacctcagcagcctgatcgctcagctagaagagaagcagcagcagcccaccaagggagctcctgcaggacattggggacacattgagcagggctgaaagaatcaggattcctgaaccttggatcacacctccagatttgcaagagaaaatccacattttttgcccaaaaagtgtctattcttgacggagagtctaaagcagttcacagaaaaaatgcagtcagatatggagaaaatccaagaattaagagaggctcagttatactcagtggacgtgactctggacccagacacggcctaccccagcctgatcctctctgataatctgcggcaagtgcggtacagttacctccaacaggacctgcctgacaaccccgagaggttcaatctagtttccctgtgtcttgggctctccatagcttcatcgccggggagaccattatttgggagggtagaggttggggagataaagccaagtggaccataggttgtctgttgaagactcagttgtcaagaaaagggtggagtaacctcagccccccagaatggattctggggcagtgtctttgtggtatgggaaaagaatattggggctcttacctccccaatgactgccctacccctgcggaccccgttccaagcgggtggggattttcctggaactatgatgcctggtgaggtctccttcttacaaccgtgacagagaggtgtcaacacccttcactttctcctcatgcctaccttttgggggcctggtccggcccctactttccagtctgagttactcggggagggaaaaggtgcagctccctctgatcaatctgcccccatgaagtgggatagatgggggttttctggcccatgttgggaaatcatgggtcattcccatggaagaccttcccctttgagggaagggtgaattcagggccaaaagggctgttggctgtaatcctacgcccaggcacaaggcatcttgtttgccttgccaacgtcctgtcaaagctgggtatccttaaccatgttccacgcccttgcagtgggagacatggatgtccatgttctctaccatcctttttccttcccatgcagattgtgaaatgtaatgagatgtatcaagatatcctagaaataaaaaccagatgtccacctccagtgtttcatacttttctggttttacacatcgctgggagggataaagagtatggataatctttgcgatttggagagccgtttcaaggttantttccagcttcttcggctcagcctggcttcctctggttcagccccacataatgattatggctatttgctgtcatttctgggctagggctcctttctaacaacctagactggaataaggccctgtcagcatggctcccttttatcccagttttccgtctgggaacagtacctctgcccctgattcccaatgtgccatagttttattaactccattaaagaagcctgtatgtgttttggttagttacagttattttacaataatgggtggggtaatgggccccacctctgttatgagataatgttctaatcaatgtctctgcctttgtatcttttctgagggctttgtctgttctcttcattctaatgaaaagttgtattcttagtgctgggtgcatatcatccaggataatattctggcccaactcccatcctctgttactagatccccttacccagtcacatttgtggactggtggccagtcgtataccatccctgggaaggatttctgggacaaatattccagggattcattgacttcattggctccttttctccatttcctttgggggaagggggaatttgaccatgcttaagtgcatcctattcaaggggcagctccgtccccatgggcccattgggatccatgagacactctggaagtcagaagggctgggggcagatccactttcaagcaagcccccatgatggttctcagtcctgcttctctgtgtggtacgtgcccctctgtttaaaaataaactgaatatggatgtttaaaaaaaaaaaaa

SEQ ID NO: 21353 - DNA, 1071 bp, Homo sapiens
  SIMILAR (388)..(675): 981254mologous to Mus musculus nemo-like kinase,accession number AF036332,Smith-Waterman Score=510.
atggtggcggcaagagaaaatgaggaagataaaaaagcagaatcccctgataaaaccatcagatctcatgagacttattcactaccacgagaacagtatgggggaaactgccctcatgattcaaattacctcccaccgggtccctcccacaacataatgttgcctgcatactatatggtaacttgtcaccatatgactgtagcttgtccagaaatcacatcgatattcaaagcaagaaaatggaggaaagaaggtgcattagcagtatctgttcccttaatcgggaaagcaaaagctttcctagaagcctgcttagcaaactcctgctcatatgtcatcatccagaactgtgtcatatgtgacctcctagctgcaaaacaggctaataaaccatctcttcctgtactctataccctgtctagccaggctacacatgaagctgttcatctcctttgcaggatgttggtctttgatccatccaaaagaatatccgctaaggatgccttagcccacccctacctagatgaagggcgactacgatatcacacatgtatgtgtaaatgttgcttttccacctccactggaagagtttataccagtgactttgagcctgtcaccaatcccaaatttgatgacactttcgagaagaacctcagttctgtccgacaggttaaaggccattttactcttcccactgatggggttgcagtctgtgtaatgccaccagtaggtttcttatatttagcaacagctgtcattttagttttaggaagttcagctgaattcctagtaggtggaggctgcgttgttacatctttaaccacagcattttcctctggcaaatgtgaactgcagacaaaaaggtcagtaacagatccaagagatggaaagagagtagcgctcaaaaagatgcccaacgtcttccagaatctggtctcttgcaaaagggtcttccgggaattgaagatgttgtgtttttttaagcatgataatgtactctctgcccttgacatactccaacctccacacattgactattttgaagaaatgtatcctaaccagggaatgtga

SEQ ID NO: 21354 - DNA, 4330 bp, Homo sapiens
  SIMILAR (955)..(1713): 981254mologous to Homo sapiens Amino acid sequence of a human phosphorylation effector PHSP-20,accession number Y68788,Smith- Waterman Score=1345.
  misc_feature (1)...(4330): n = a,t,c or g
gcgggtggccacccgatctcccccccaaccctcctcaagcgagaagcagccggggggagaggcaggagtcagcccggttgcgaccgtagcgcgcccgcctcccggggctcctgttctttggccccgggaccctacccttctcccggggcggttccctccgtctgggcgtccgagcgctgcccacatctttcattcctccctgcacctccttcccttcacttttgccccggctctctttctcctctctgtcctgctgtcgcctcctctcctcactccagcctccttcccttggcttattctgcccaaggaaagtttggaacccccgccccccctccccaatcaggtcaaccttganttaggagtagggggagatgtaggaaaggcctgagagttcgggggggggggaagctggaagctggtttcccagaaaatttccccccatcttctccatttagggtggtgggaattttttttaatcctgtttttgacggacggtggtaggtgtttaggaaaacggatgtgggaatggaaggggtagatgagtcaaccctctttcaagattccaacgggtggtgtgttacctgatccttttcgtgtgtggagttcagggggtcgggaggtttggcctttattcccacattcaaagttggaacctcccccaaattaagaatggagttttagtacccacttgtggcaggaaatcctggggggaaggggtccttttttcctttttcttttcttttttcccttttttttccttttggcaacccacacccttccacacacgctcaccccaaaattaaacaccaagatcctctaacttgtttggattgactgatgaagacataaagctctatgttttttgaggtggagtgagtggtttttcttcatttttaaatggccaaatgacagcttgacccagtttgctttccaatcaaagggcatttattttgaatgtctctttgtggcgcaagagccaacgcaaaaatgatggcggcttacaatggcggtacatctgcagcagcagcaggtcaccaccaccaccatcaccaccaccttccacacctccctcctcctcacctgcaccaccaccaccaccctcaacaccatcttcatccggggtcggctgccgctgtacaccctgtacagcagcacacctcttcggcagctgcggcagccgcagcagcggctgcagctgcagccatgttaaaccctgggcaacaacagccatatttcccatcaccggcaccggggcaggctcctggaccagctgcagcagccccagctcaggtacaggctgccgcagctgctacagttaaggcgcaccatcatcagcactcgcatcatccacagcagcagctggatattgagccggatagacctattggatatggagcctttggtgttgtctggtcagtaacagatccaagagatggaaagagagtagcgctcaaaaagatgcccaacgtcttccagaatctggtctcttgcaaaagggtcttccgggaattgaagatgttgtgtttttttaagcatgataatgtactctctgcccttgacatactctaacctccacacattgactattttgaagaaatatatgttgtcacagaattgatgcagagtgacctacataaaattatcgtctctcctcaaccactcagctcagatcatgtcaaagtttttctttatcagattttgcgaggtttggaaatatctccatttcaggctgggcattttacattcgagacattaagccagggaatctccttgtgaacagcaactgtgttctaaagatttgtgattttggattggccagagtggaagaattagatgaatcccgtcatatgactcaggaagttgttactcagtattatcgggctccagaaatcctgatgggcagccgtcattacagcaatgctattgacatctggtctgtgggatgtatctttgcagaactactaggacgaagaatattgtttcaggcacagagtcccattcagcagttggatttgatcacggatctgttgggcacaccatcactggaagcaatgaggacagcttgtgaaggcgctaaggcacatatactcaggggtcctcataaacagccatctcttcctgtactctataccctgtctagccaggctacaccattgaactggtcatctcctttttgcagaatgtggctttgatccatccaaaagaatatccgctaaggatgccttatcccacccctacctagatgaagggcgactacgatatcacacatgtatgtgtaaatgttgcctttccccctcccactggaagagttaatacccagtgacttggagcctgtcacccaatcccaaatttgatgacactttcgagaagaacctcagtcctgtccgacaggttaaagaaattattcatcagttcattttggaacaggcagaaaggaaacagagtggcctttatggatcaaccctcagtctgctgtctttaagagctttattagttccactgttgctcagccatctgagatgcccccaatctcctctggtgtgggagtgatggtggaagataaatgtaccactgaaagatgtaaatgtagctttcccactgggagtctgtgatttgcaattctgggaggttaattcatgcttgtactgtaattttactaatggaagttttaaattaacaaccactacttgtatggatatggaataatatttaggaaatgttactaggacttttaatcttgtaaagtggttgtgcttttagaagaaaaatattttacccagagttgcacatgtttttatggaatttaagtgcagctgtttattggctcacctcagaacaaaagagaattgaaccaaatttgggagtttggggttttatgttttgtttttcttttctaaaatgaagtgagattggttcacacacacacacacacacacacacacacacaaacacaaaggacagtcatacattttgatatttgagccattcctaaagatttggggttttctaaaactaaagaatctaggataccttgccttgcgaccaatcattggagccacgtgagctggatcgtgggctgcacctggggggagggtagggaggaggggcatgccacctaatgatcaagccctataattagcttctcattagagccgtgatggtgatgtgtgctgtctaaaatccaattgttgtgggtagagaagaatgagtttgtgactaaggagagactaaacttttgttttccttacccagtataaatatatatatatatatttaatctatttttattagaagtttttctgctctttcttacataaaagacccccaagcatgcatctttcatgtgtgtaaataattcatttctgggctaatttcaaaagaatcccaatattgctgtatagaaagagacctagcttgcacattttaggtctgtgaaattttgtgagactttttcctgcactggacagtaaaaaaataataaaagacaaaaacaaatttaaaaaaaaatttaagccacaaaaaaaggcacatagggaattatgtcaaatgtgtttgtgtccttaggcaaagctgtgggagtcttgaaatgtcacagtagtaaataacttattactttttgacaagttcttttttttctgttggaacactgaattcttctgtgcatatgtacatatgaatacaaatcgaaggcctctacctcctgggagttatacaacttgggcttgtttacctccacatgctgatgatgactattttttttttttttgagttcagtgtggagacttgaaacttgaatgtcccttccaacttttatattaaaaataaaaagacaagggaaattgaagatcatttttcacctgtacaaggaatactaatggatcgtcttaaaattggtctaggaaaaaaccttggtgtgtgttatggacaattaactgttaaagttattgtaagttatctgtatttagcagagtattttcaacttgagtgatctgagctgaatttgaagactattaataagttatgtttggaagttttaacttcaatgaagtaattatttgctgtgaaagaaacaaacattgaattactaaacaaagatggtgcaatatctttgtttttttttttatgaggctcctgagaatcaacccaactgaagcatttcaattcacttgaatgagaaacgtgtttagtatcaaaagagcccaagaagacactggtgtgaaaggtacaatctcagaggttggtcaattaccgtggcacactttctggtcactttgtacaatgtagatttaaagtacactggtgaaaacattaaatgtgacatttgaaaaaa

SEQ ID NO: 21355 - DNA, 1090 bp, Homo sapiens
  SIMILAR (160)..(519): 411254mologous to Triticum aestivum histone H3,accession number U38423,Smith-Waterman Score=161.
  misc_feature (1)...(1090): n = a,t,c or g
gtgttcgcagccgccgccgcgccgcgntacgctctccaacgccagacgccgcctctcgctcgcagtgctccagccgaagagcaaggggggtaagtaaggaggtctctgtaacatatgatcgtacaaaagcagactggcccgcaaatcggaccggtggtaaagccccccaggaagcaactggcttacaaaaagccggcttcgcaagagtgcggccctctaactggaggggtgaagaaacctcatcgttacagggcctggtactgtggcggctccgtgaaatttagacggttatcagaagtccactgaacgtcatgattcgcaaacattcgcttccagcgatctagtgcgagaaattgctcaaggacttttaaaacagatctgcgcttccagagcgcagtaatcaggtggctttgcaggatggcaagtggaggcctatctggtttggccttttttgaaagacaccaacctagtgtgcttatccatgcccaaacgtgtaacaatttatgccaaaaagacattccagctaagcacgccggcatcacgtggagaacgtgctttaaggatccactcatggatggggaaacatttcattctcaaaaaaaaaaaaaaaaaatttctcttcttcctgttattggtagttctgaacgttagatatttttttttccatggggtcaaaaggtacctaagtatatgattgcgagtggaaaaataggggacagaaatacaggtattggcagtttttccattttcatttgtgtgtgaatttttaatataaatgcggagacgtaaagcattaatgcaagttaaaatgtttcagtgaacaagtttcagcggttcaactttataataattataaataaacctgttaaacttttctggacaatgccagcatttggaatttttttaaaacaagtaaatttcttattgatggcaactaaatggtgtttgtagcatttttatcatacagtagattccatccattcactatacttttctaactgagttgtcctacatgcaagtacatgtttttaatgttgtctgtcttctgtgctgttcctgtaagtttgctattaaaatacattaaactata

SEQ ID NO: 21356 - DNA, 529 bp, Homo sapiens; identical to SEQ ID NO: 3741
  SIMILAR (12)..(359): 871254mologous to Homo sapiens p40,accession number U93566,Smith-Waterman Score=510.

SEQ ID NO: 21357 - DNA, 2622 bp, Homo sapiens
  SIMILAR (1255)..(2619): 761254mologous to Homo sapiens putative p150,accession number U93574,Smith-Waterman Score=1770.
atgagaaacctaaggaatattcagaaggcaaaagcaactataaacttgggaatatcctttgatgaaggcttgaaggggtttatgtggtccagaatagaggcagctcctcttccaaacaccaggtggtgtctgccacatggctactcaggtcctgcgaactctggtggctgctactacatcactacagggatgtcctgctggctctcagatctctatccaagacatgatggtgtccatgttggactccaaggcaaggacctggagcatgacattccagtggacctagggtccaggcccacctctgtggacccagtttccaggtctgccccagggccccagggccccaaggctccagtggactcagggtccaggaccactccagcaaaccctggtgctggaccatcccctgtagacccaagctcccggccagcccctgtggcttcaggctttagactcatcatgatagaccaaaacaccaagctaattccagtgccaggttggcccctgcgactcaggctcaagatctacctcagcagtaggtcagcctctttggactcaggctccaggtttgcccctgtggacacaaattttatacctgtccccacagaccgaggccatagccatgcccctgaagacccagttgacaggctaacctcagtggacccaacaaaggaaaaaaactggatggagaatgagtttgacaagttgacagaagtaggcttcagaaggtcggtaataacaaacttctctgagctaaaggagcatgttctaacccatcgcaaggaagctaaaaaccttgaaaaaaggttagatgaatggctaagtagaataacttgtgcagagaagagcttaaatgacctgatggagctgaaaaccacagtacgagaactgcgtgaagcatacacaagcttcatgagtcaattcgatcaagcggaagaaaggatatcagtgattgaagaccaaattaatgaaataaagcttaaatctcttcaagctcaggaggatgcccgccacagaaacacagatcagaggagctcagagaataggcggtcagagccttggagcttggaggagcggaagcgtgagcagtggaactcactcaagcagaatgcagaccagcaggacacagaagccatgtccgattataagaaacagctccgaaacctgaaggaggagatagctgttctgtctgctgagaaaagtgcactccaaggaaggaccctgaaagaaggatcagagagaaacaagaaatcagaaaggactgggtttcttaagggacagaccccagtgggtctcagggaaaatgaagcaagagtgtttacaacttggaacgccatggccataaataatcatcgggcagtggcaatatttcccaagagacggcatgggcgtgaggacggacttttgtcgaatcttccaacgtttggctcgtatgcgcctttgcgaagggtgtctaatgaattcatagcttctgccgtccaacgaattctccttgagagacgggcgcttcctcatggaaactgtaaacttggaggtttgaccccccaatttatgaaccggaaaaatgctctagtgttggaagttctggccagggcgatcaggcaggagaaggaaataaagggtattcaattaggaaaagaggaagtcaaattgtccctgtttgcagacgacatgattgtttatctagaaaaccccatcgtctcagcccaaaatctccttaagctgataagcaacttcagcaaagtctcaggatacaaaatcaatgtacaaaaatcacaagcattcttatacaccaacaacagacaaacagagagccaaatcatgagtgaactcccattcacaattgcttcaaagagaataaaatacctaggaatccaacttacaagggatgtgaaggacctcttcaaggagaactacaaaccactgctcaatgaaataaaagaggatacaaacaaatggaagaacattccatgctcatgggtaggaagaatcaatatcgtgaaaatggccatactgcccaaggtaatttacagattcaatgccatccccatcaagctaccaatgactttcttcacagaattggaaaaaactactttaaagttcatatggaaccaaaaaagagcccgcatcgccaagtcaatcctaagccaaaagaacaaagctggaggcatcacactacctgacttcaaactacactacaaggctacagtaaccaaaacagcatggtactggttccaaaacacagatatagatcaatggaacagaacagagccctcagaaataatgccgcatatctacaactatctgatctttgacaatcctgaaaaaaacaagcaatggggaacggatttcctatttaataaatggtgctgggaaaactggctagccatatgtagaaagctgaaactggatcccttccttacaccttatacaaaaattaagtcaagatggattaaagacataaatgttagacctaaaaccataaaagccctagaagaaaacctaggcaataccatccaggacataggcatgggcaaggacttcatgtctgaaacaccaaaagcaatgacaacaaaagtgaaaattgacaaatgggatctcattaaactgaagagcttctga

SEQ ID NO: 21358 - DNA, 2883 bp, Homo sapiens
  SIMILAR (1826)..(2566): 481254mologous to Homo sapiens p40,accession number U93567,Smith-Waterman Score=503.
atgagccctgtgacactttgggtgagaacctccagcagaggtgaggaccggtgtggaatgtgcacccctggccgtgacacaggatttgcacccataagtggaatgtgtagtaaatatcgcagctgcacgattaatgaagatacaggtcttggactggccttcaccatgcccatgagtctggacacaaagcacatccccaactttggaaaggtgcacgggtacatcatgcgacatcataaaaacgaagatacaattccttggaggaggaacaccaaaaaggaggaagctagaggaacacagcccctggaggctgatgatcaaaatcctggctgggaagatgggaagccaggatccctagagaatgaaggaagacgcagccataggggcaatccagccccagacatgccccagcctcccaaggaagacctcttcatcttgccagatgagtataagtcttgcttacggcataagcgctctcttctgaggtcccatagaaatgaagaactgaacgtggagaccttggtggtggtcgacaaaaagatgatgcaaaaccatggccatgaaaatatcaccacctacgtgctcacgatactcaacatggaaagaattcttaaaaagacatcatttaccattatccatccatctgccatggagagatgtcccgtgctgaacttacagataagggactctctctggaatcattgcttcagtttagcaacgacagtccatagatttcaccccgtgggcagacatgctttgaagaaaatgtacaagcttccatcagcttacataaatgtcagcatcactaaatacacacaaagattcgcccttacatacatttcttgcgtcttccacagaaatgctgcttttgtggcagtcccaggcgaaggtcgctgctgtgcaggggttgatgtgccagctcccatgtccttgaggtcaccaggacctcactggccccaggagcatggggctctgtggatctcttgtacagtacgtgggatggcgagctgccttgggcagctctgccgagtttccatgagagtgagagcgaacattggaaaggttcaaaaaccccggctgagaattagcaatgggaaaggcctccacacacagtctgagctctctggctctgcatacctggagaaaggctggcgtggagctgctccaggactggactccaggaatgagaaagggacagagggggcccgggactcgggaacacccgggcgccagtcccagacgctccaaaggggcccaccgggaccggtgcctggaagcagtaagattgctccacaaaccctcactagacaaggctcaatgacagcttccaggaaactggtcctgcttctgcctgaattttgtgaaagaaccggagagcagagcggacaactctacccaccctccccactcctagttgaatgggtcatgcctgctgggacttccagcacagtggacccacttctgcctgaactctgcagacgttgggaaagacaggcactaagtctgtgcagactttaccgccagaggacttctgtttctatcaaggctctttgcgatcacacagaaactcgctcagtggccctttcaacctgccaaggcttggaatgcaactcctcaccagcaaggaaacaaaactggatggagaatgagtttgaagagttgacagaagtaggcttcagaaagtcagtaataacaaaattctccaagctaaaggagcatattctaacccatcgcaaggaagctaaaaaccttgaaaaaaggttagacgaatggctaactagaataaccagtgtagagaagagcttaaatgacctgatggagctgaaaaccacagtacgaaaaacttcatgaagcatacacaagcttcaatagccgatttgatcaagtggaagaaagaatattagtgattgaacatcaaattaatgaaataaagcaagaagataaagttagagaaaaaagagtaaaaagaaatgaacaaagcctccaagaaatatgggactgtgtgaaaagaccaaatctatgtttgattggtgtacctgaaagtgatggggagaatggaaccaagttggaaaacactccttcaggatattatccaggagaacttccccaacctagcaaggcaggccaacattcaaattcaggaaataccagagaacgccacaaagatactccttgagaagagcaactccaagcacacctaattgtcagattcaccaaagttgaaatgaaggaaaaaaatgttaagggcagccagagagaaaggtcggggttacctacccacaaaggggaagcccttcagactaacaacagctgatctctcagcagaaactctacaagccagaagacagagtgggggccaatattcaacattcttaaagaaaagaatttttcaacccagaaatttcatatccagcccaaactaagcttcataagcgaaggagaaataaaatactttatagacaagccaaatgctgagagatttttgtcaccaccagggcctgcccttaaaagagctccctgaaggaagaagcacttaaacatgggaaagggaacaaccgggtacccagccacttgcaaaaattcattgcttaaatttgttaaaggccatttgagggcttggggaggaaacttgcatcaacttaatgggccaaaattaccagctaacattcttaattgacaggatccaaattcacatattaccattatttaccttaaatgtaaatggggctaaatgctcccatttaaaagacacagactgggcaaattggataaagagtcaagacccatcagtgtgctgtatttaggagacccatctcatgtgcagagacacatataggctcaaaataaagggatggaggagatcacaagcaatggaagacaaaa

SEQ ID NO: 21359 - DNA, 1478 bp, Homo sapiens
  SIMILAR (1156)..(1263): 1001254mologous to Homo sapiens hypothetical protein,accession number AL035369,Smith-Waterman Score=185.
aaaaatgtcggggcaggacggacggcagttcccggcggcatagctcctctggccagctacttaattcttccaggggaaccgcgctagctgggaccgcaccttcctgagacatactttcgtcaaacaggagagcttcaaaccagacccgccaaagcccagaccggaaactcgcagtcccgccaacccttgcgcgctctccgccggctccaaaaccatagagaggagggcggctggtttcttggtgagaatctgaatttaaagattgtgtgcatttaataagaggatgacctttcagtttaatttcactatagaagaccatctggaaaatgaattaacacccattagagatggagctttgaccctggattcctcaaaagagctgtcagtctcagaaagtcaaaaaggagaagagagggacagaaaatgttctgcagaacaatttgacttgcctcaggatcacttgtgggaacataagtcaatggaaaatgcagctccctctcaagacacagacagtccactcagtgcagccagcagttcaaggaacttggagccacatggaaaacagccctccttgagagctgccaaagagcatgctatgcctaaagatttaaagaagatgttagaaaataaagtcatagaaacattaccaggtttccagcatgttaagttatcagtagtgaaaaccatcttgttgaaagagaacttccctggagaaaacatagtttcaaaaagcttttcttctcactctgatctgattacaggtgtttatgagggaggcttaaaaatctgggaatgtacctttgacctcctggcttatttcacaaaggccaaagtgaaatttgctgggaaaaaagtcttggatcttggttgtggatcaggtttactaggtataactgcattcaagggagggtccaaagaaattcactttcaagattataacagtatggtgattgatgaagtaacctttacctaatgtagtagctaactccactttggaagatgaagaaaatgatgtaaatgagccagatgtgaaaagatgcaggaaaccaaaagtaacacaactatataaatgccgatttttttctggtgagtggtctgagttttgtaagcttgtactaagtagtgaaaaactttttgtaaaatatgatctcatttctcacctcagaaaccatttacaacccagattattatagtaatttgcaccagactttccttagactgttaagtaaaaatggacgtgtacttttggccagcaaagcacacgtccaaagaaattcactttcaagattataacagtatggtgattgatgaagtaaccttacctaatgtagtagctaactccactttggaagatgaagaaaatgatgtaaatgagccagatgtgaaaagatgcaggaaaccaaaagtaacacaactatataaatgccgatttttttctggtgagtggtctgagttttgtaagcttgtactaagtagtg

SEQ ID NO: 21360 - DNA, 1526 bp, Homo sapiens
  SIMILAR (1081)..(1464): 601254mologous to Homo sapiens hypothetical protein,accession number AL035369,Smith-Waterman Score=301.
  misc_feature (1)...(1526): n = a,t,c or g
cgatttaagtccggaggaggcgttgtgaggtgagctttttcagaagcgcgtccccaggacacgtcgggaagcaagcatccccagagctgcttggaaagaggaccaaagacgtctaaaaagtcatttggaaatatctctaaatatttgttaccatgtataagctgctaaagagaaattgggcccaacaaaactaattgaataattgaggcagatttgtgtgtatcatcaaattctatccagaagttgaagaatctgaatttaaagattgtgtgcatttaataagaggatgacctttcagtttaatttcactatagaagaccatctgggaaaatgaattaacacccattagagatgggagctttgaccctgggattcctcaaaagagctgttcagtctcagaaagtcaaaaagggaggaaggaggagggacagaaaatgttctgcagaacaattttgacttgcctcaggatcacttgtgggggaacataagttcaatgggaaaatggcaggctccctcttcaaggacacaggaccagttccacttcagtggcagccagcagttcaaggaacttgggagccacatgggaaaacagccctccttgnaggagctggccaaaggagcatggctatgcctaaaaggttttaaagaagatgtttagaaaattaaagtccattagaaacatttaccaggtttccagcatgttaagttatcagtagtgaaaaccatcttgttgaaagagaacttccctggagaaaacatagtttcaaaaagcttttcttctcactctgatctgattacaggtgtttatgagggaggcttaaaaatctgggaatgtacctttgacctcctggcttatttcacaaaggccaaagtgaaatttgctgggaaaaaagtcttggatcttggttgtggatcaggtttactaggtataactgcattcaagggagcgtccaaagaaattcactttccaggattataacagtatggtgattgatgaagtaaccttacctaatgtagtagcctaactcccactttggaagatggaggaaaaatggatgtaaaatggagcccagatgtggaaaagatgccaggaaacccaaaagtaacacaacctatataaatgcccgatttttttcctggtgagtggtcctgagttttgtaagccttgtacctaagtagtgaaaaacctttttgtaaaatatgatcctcattcctcaccctcagaaacccatttacaaccccagattattatagtaatttgcgaccagactttccttagactgttaagtaaaaatggaccgtgtacttttggccagcaaagcacattattttggtgtaggtggaggtgttcatctctttcagaagtttgtagaagaaagagatgtttttaagaccagaatactcaaaataattgatgaaggattgaagaggttcataattgaaataacttttaagtttcctggttaattaacattcactgagcatccaaaatgaaataaacagaaggaacaaaaaaaaaaaaaaaa

SEQ ID NO: 21361 - DNA, 369 bp, Homo sapiens; identical to SEQ ID NO: 7968
  SIMILAR (2)..(364): 911254mologous to Homo sapiens p40,accession number U93569,Smith-Waterman Score=577.

SEQ ID NO: 21362 - DNA, 394 bp, Homo sapiens; identical to SEQ ID NO: 6145
  SIMILAR (76)..(372): 871254mologous to Homo sapiens p40,accession number U93569,Smith-Waterman Score=438.

SEQ ID NO: 21363 - DNA, 693 bp, Homo sapiens
  SIMILAR (151)..(690): 771254mologous to Homo sapiens p40,accession number U93569,Smith-Waterman Score=694.
atgtgcccctctgagatgaagcttccagaggaacgatcaggcagcaacatttgctgttctgcaatatttgctgttctgcagcccctgctggtgatacccaggcaaacatggtctggagtggacctccagcaaactccaacagacctgcagctgagggtcctgtttgttagaaggaaaactaacaaacagaaaggacatccacaccaaaaccccatctgtatgtcacaatcatcaaagaccaaagcaaggcaggccagcattcaaattcaggaaatacagagaatgccacaaagatactcctcgagcagagcaactccaagacacataattgtcagattcaccaaagttcgaatgaaggaaaaaatgttaagggcagccagagagaaaggtcgggttacccacaaagggaagcccatcagactaacagtggatctctcggcagaaactctacaagccagaagagagtgggggccaatattcaacattcttaaagaaaagaattttcaacccagaatttcatatccagccaaactaagcttcataagtgaaggagaaataaaatcctttacaaacaagcaaatgctgagagattttgtcaccaccaggcctgccttacaagagctcctgaaggaagcactaaacatggaaaggaacaaccagtaccagccacttcaaaaacatgcaaaattgtaa

SEQ ID NO: 21364 - DNA, 717 bp, Homo sapiens; identical to SEQ ID NO: 12154
  SIMILAR (97)..(714): 781254mologous to Homo sapiens p40,accession number U93569,Smith-Waterman Score=814.

SEQ ID NO: 21365 - DNA, 1539 bp, Homo sapiens; identical to SEQ ID NO: 3746
  SIMILAR (658)..(1536): 951254mologous to Homo sapiens putative p150,accession number U93568,Smith-Waterman Score=1457.

SEQ ID NO: 21366 - DNA, 768 bp, Homo sapiens
  SIMILAR (67)..(765): 691254mologous to Homo sapiens p40,accession number U93569,Smith-Waterman Score=801.
atggacaatgactttgacgagttgaaagaagaaggcttcagacgattggtaataacaaacttctctgagctaaagaaggatgttcgaacccatcgcaaagaagctgaaaaccttgaaaaaagattagacgaatggctaactagaataaacagtgtagagaagaccttaaataaccttatgaaactgaaaaccatggcacaagaactacatgacgcatgcacaagcttcagtagccgatttgatcaaggtgatggggagaatggaaccaaattggaaaacattcttcaggatattatccagggaaatttccccaaactagcaaggcaggccaacattcaaattcaggaaatacagagaatgccacaaagatactcctcgagaagagcaactccaagacacataattgtcagattcaccaaagttgaaatgaaggaaaaaatgttaagggcagccagagagaaaggtcgggttacccacaaagggaatcccatcagactaacagcagatctctcggcagaaactctacaagccagaatagagtggggtccaatattcaacattcttaaagaaaagaattttcaacccagaatttcatatccagccaaactaagcttcataagtgaaggagaaataaaatcctttacagacaaacaaatgctgagagattttgtcaccaccaggcctgccttacaagagctcctgaaggaagcactaaccaaggaaaggaacaactggtaccagccactgcagaaacgtgccaaattgtaa

SEQ ID NO: 21367 - DNA, 975 bp, Homo sapiens
  SIMILAR (1)..(972): 921254mologous to Homo sapiens p40,accession number U93564,Smith-Waterman Score=1550.
atggggaaaaaacagaacagaaaaactggaaactctaaaacgcagagcgcctctcctcctccaaaggaacgcagttccttaccagcaacggaacaaagctggatggagaatgattttgacgagctgagagaggaaggcttcagacgatcaaattattctgagctacgggaggacattcaaaccaaaggcaaagaagttgaaaactttgaaaaaaatttagaagaatgtataactagaataaccaatacagagaagtgcttaaaggagctgatggagctgaaaaccaaggctcgagaactacaaagggtatcagcaatggaagatgaaatgaatgaaatgaagcaagaagggaagtttagagaaaaaagaataaaaagaaatgagcaaagcctccaagaaatatgggactatgtgaaaagaccaaatctacgtctgattggtgtacctgaaagtgatggggagaatgcaaccaagttgggaaacactctgcaggatattatccaggagaacttccccaatctagcaaggcaggccaacaacgttcagattcaggaaatacagagaacgccacaaagatactcctcgagaagagcaactccaagacacataattgtcagattcaccaaagttgaaatgaaggaaaaaatgttaagggcagccagagagaaaggtcgagttaccctcaaagggaagcccatcagactaacagtggatctctcggcagaaaccctacaagccagaagagagtgggggccaatattcaacattcttaaaggaaagaattttcagcccagaatttcatatccagccaaactaagcttcataagtgaaggagaaataaaatactttacagacaagcaaatgctgagagattttgtcaccaccaggcctgccctaaaagagctcctgaaggaagcgctaaacatggaaaggaacaaccagtaccagccgctgcaaaatcatgccaaaatgtaa

SEQ ID NO: 21368 - DNA, 2673 bp, Homo sapiens; identical to SEQ ID NO: 3747
  SIMILAR (97)..(1842): 901254mologous to Homo sapiens human homolog of Drosophila lethal discs large 1; Method: conceptual translation supplied by author,accession number U37707,Smith-Waterman Score=2629.

SEQ ID NO: 21369 - DNA, 1180 bp, Homo sapiens; identical to SEQ ID NO: 6149
  SIMILAR (479)..(1177): 931254mologous to Homo sapiens p40,accession number U93567,Smith-Waterman Score=1110.

SEQ ID NO: 21370 - DNA, 829 bp, Homo sapiens; identical to SEQ ID NO: 15422
  SIMILAR (251)..(826): 1001254mologous to Homo sapiens p40,accession number U93564,Smith-Waterman Score=981.

SEQ ID NO: 21371 - DNA, 780 bp, Homo sapiens; identical to SEQ ID NO: 11686
  SIMILAR (223)..(777): 931254mologous to Homo sapiens p40,accession number U93569,Smith-Waterman Score=870.

SEQ ID NO: 21372 - DNA, 1058 bp, Homo sapiens
  SIMILAR (237)..(1055): 491254mologous to Homo sapiens p40,accession number U93569,Smith-Waterman Score=568.
ccgctgaggaattcggacgagggcggcggcgaggatgcgccccagggcgggagcgggacgctccactttaccctggctgcccgcaacgggccaggcctgccgtctctacctctctacctgttgtatccacgagtaccagcagagtgcctgacacatagtagacataaatcaggctgaagaatgaccatgatggagaattgagaaacaagaccatctgcatcaacaggaatttggcagaaatcaagaagttctctgaaaattatgagaacaaagagacaatgtacctcaatctctgggacgtggcgaaagcagtgttacgagggcaatttatagcactgaatgcccgtatcaaaaagctagaaaaatctcaagtttacaacctaatatctcaactaaaagagctagagaaccaagagcaaacaaaccccaaagccagcagaagacaagaaataaccaagatcagggctgaattgaaggaggtagagacatgtaaaacccttaaaaaaattaatgaatccgggagaggtgtggattgcagctccatgccagcaatggaacaaagccggatggagaatgactttgatgagttgacaaaagtaggcttcagaagcaaggcaggccaacattcatattcaggaaatacacggaacaccacaaagataatccttgagaagagcaactccaagacacatattgtcagattcaccaaagttgaaatgaaggaaaaaatgctaagggcagccagaaagaaaggttgggttacccacaaagggaagcccatcagactaacagcagatctgttggcagaaaccctacaagccagaagagagtggggaccaatattcaacattcttaaagaaaagaattttcagctcagaatttcatatccagccaaactaagcttcatacgtgaaggagaaataaaagcctttacagaaaagcaaatactgagagattttgtcaccaccaggcctgccttacaagagctcctgaaggaagcactaaacatggaaaggaacgaccgataccagccgctgcaaaaacatgccaaattgtaa

SEQ ID NO: 21373 - DNA, 1266 bp, Homo sapiens; identical to SEQ ID NO: 12888
  SIMILAR (727)..(1263): 971254mologous to Homo sapiens p40,accession number U93569,Smith-Waterman Score=873.

SEQ ID NO: 21374 - DNA, 3344 bp, Homo sapiens
  SIMILAR (1311)..(1526): 941254mologous to Homo sapiens p40,accession number U93566,Smith-Waterman Score=327.
  misc_feature (1)...(3344): n = a,t,c or g
atgcgcgtcgagccgcactgggaccacctacagacgctggaccagagcccacgtccctgcggctttggagcgccgcgtctgcagcggccagcgcgcctcacatggcggctccggtcacgtcacacaatgcggctgctccgggcgcccactgcccagcaccgcaggcctcctctggccgcccctcaagcaggccccgccctttgcggcccagcccagacccggaggcaccggagtcctctccccaccctagggcgtaagaccaaaaaaacgccaatgccagaaagaagacactgcacatgcgcagaacgtttccctagccctactccagaactacgcttcccagaaggcccggctgcgactccatcttggatgacgtcgatcagaatggccagcaggaggccatatgcacctaaaccagatggaagaaaatggcccggggtgaccagctggctctctttatcaagctcagactcctcaagtccccgcttggaagaacagtcacagattccatatacaggaattcaagatctccaagcagcagggagggggttcagaatacatattcaagttgttgcagctcaaaacactgatgtagacatggctggcaccaacgtggctctaggacatactccagaaggaaaactaacaaacacaaaggacatccacaccaaaaacccatctgtacatcaccatcatcaaagaccaaaagtagataaaaccacaaagatggggaaaaaacagaacagaaaaactggaaactctacaaagcagagcgcctctcctcctccaaaggaatgcagttcctcaccagcaacggaacaaagctggatggagaatgactttgacgagctgagagaagaaggcttcagacgatcaaattactctgagctatggcaggacattcaaaccaaaggcaaagaagttgaaaactttgaaaaaaatttagaagaatgtataactagaataaccaatacagagaagtgcttaaaggagctaatggagctgaaaaccaaggctcgagaactatgggaagaatgcagaagcctcaggagccgatgcgatcagctggaagaaaaggtatcagcaatggaagatgaaatgaatgaaatgaagcgagaagggaagtttagagaaaaaagaataaaaagaaatgagcaaagcttccaaagaaataggggactatgtgaaaagaccaaatctacgtctgattggtgtacctgaaagtgatgtggagaatggaaccaagttggaaaacactctgcaggatattatccaggagaacttccccaatctagcaaggcaggccaaccgttcagattcaggaaatacagagaacgccacaaagatactcctcgagaagagcaactccaagacacataattgtcagattcaccaaagttgaaatgaaggaaaaaatgttaagggcagccagagagaaaggtcgggttaccctcaaaggaaagcccatcagactaacaacagctgatctctcagcagaaactctacaagccagaagacagagtgggggccaatattcaacattcttttttttttttttttttttttttttgagacggagtctcgctctgtcgcccaggctggagtgcagtggcgggatctcagctcactgcaagctccgcctcccgggttcacgccattctcctgcctcagcctcccaagtagctgggactacaggcgcccgccactacgcccggctaattttttgtatttttagtagagacggggtttcaccgttttagccgggatggtctcgatctcctgacctcgtgatccgcccgcctcggcctcccaaagtgctgggattacaggcgtcacgaccgcgcccggcccagtctgtgtctcctaaaatgggggcatttagcccatttacatttaaggttaatattgttatgtgtgaaattgaacctgtcaattaagaatgttagccggtgattttgccccgttagatgatgcagtttcttcctagtctcgaatggtctttacagtttggcttgttttttgcagcgggctggtacccggttgttccttacccatgtttagcgcttccttcaggagctcttttaagggcaggcctggcgcctcataaaaatctctcagcatttgcttgtctgtaaaggattttatttctccttcacttatggagcttagtttgggctggatatgaaattctggtttgaaaaattcttttctttagagaatgttgaatattggcccccactttcttctggcttgtagagtttctgccgagagatctgcttgttagtctgatgggcttccctttgagggtaacccgacctttctctctggctgcccttaacatttttttccttcatttcaactttggtgaatctgacaattaggtgtgcttggagttgctcttctcgaggagtatctttgtggcgttctctgtatttcctgaatctgaacgttggcctgccttgctagattggggaagttctcctggataatatcctgcagagtgttttccaacttggttccattctccacatcatgcccgctttccagtcgggaaacctgtcgtgccagctgcattaatgaatcggccaacgcgcggggagaggcggtttgcgtattgggcgccagggtggtttttcttttcaccagtgagacgggcaacagctgattgcccttcaccgcctggccctgagagagttgcagcaagcggtccacgctggtttgccccagcaggcgaaaatcctgtttgatggtggttccgaaatcggcaaaatccattaattgcgttgcgctcactgcccgctttccagtcgggaaacctgtcgtgccagctgcattaatgaatcggccaacgcgcggggagaggcggtttgcgtattgggcgccagggtggtttttcttttcaccagtgagacgggcaacagctgattgcccttcaccgcctggccctgagagagttgcagcaagcggtccacgctggtttgccccagcaggcgaaaatcctgtttgatggtggttccgaaatcggcaaaatcccagttcattgccggcgaactcttcctgctggccctggccgacagcaaggccgacatcggcaagaccgccaaggagaagggtaccgagctcgaattcgtaatcatggtcatagctgtttccnnggaagccatcacaaacggcatgatgaacctgaatcgccagcggcatcagcaccttgtcgccttgcgtataatatttgcccatggtgaaaacgggggcgaagaagttgtccatattggccacgtttaaatcaaaactggtgaaactcacccagggattggctgtgacgaaaaacatattctcaataaacc

SEQ ID NO: 21375 - DNA, 484 bp, Homo sapiens
  SIMILAR (29)..(484): 981254mologous to Cricetulus griseus ribosomal protein S2,accession number L22552,Smith-Waterman Score=761.
acgatcgtctttggagaatcgacgagatcagttgggccgcctggtcaaggacatgaagatcaagtccctggaggagatctatctcttctccctgcccattaaggaatcagagatcattgatttcttcctgggggcctctctcaaggatgaggttttgaagattatgccagtgcagaagcagacccgtgccggccagcgcaccaggttcaaggcatttgttgctatcggggactacaatggccacgtcggtctgggtgttaagtgctccaaggaggtggccaccgccatccgtggggccatcatcctggccaagctctccatcgtgcccgtgcgcagaggctactgggggaacaagatcggcaagccccacactgtcccttgcaaggtgacaggccgctgcggctctgtgctgggacgcctcatccctgcacccaggggcactggcatcgtctccgcacctgtgcctaagaagctgctcatgatg

SEQ ID NO: 21376 - DNA, 904 bp, Homo sapiens
  SIMILAR (462)..(647): 821254mologous to Bos taurus ribosomal protein S2,accession number AF013215,Smith-Waterman Score=270.
agcttctttcttctccaagaaaacatccggttttgggggatggggggctggaggccctggggaccctgggatggggaaccacggtggcttccgtggaggcttcagcaggggcatccggggctggggtcatagccgcggacagggcccgggccaaggccgaggagctcacagaggcaagaccaaggacaaggagtggacgtctatccccaagctgggccacctggtcaaggacatgaagatcaagttcctggaggagatctatctcttcttcctggccatcaaagagtttgagatcattgactttttcctgggggcttctctcaaggatgaggttttgaagatcatgccagtacaaaagcagacccacgccagccagcgcaccaggctcaagggatttattgtcatcggtgactataatggtatgtcggtctgggtgttaagtgctccaaggaggtggccacgccatccgcggggccatcatcctgggctagctctccattgtccccatgtgcagaggctactgggggagcaagatcggcaagccccacaccgtcccttgtaaggtgacaggccactgtggctctgtgctggtgcacttcatccctgcacccaggggcactggcatcgtctcagtccccatgcccaaaagctgctgctgatggcgggtatctatgactgctacgccgcagctgcactgccaccctgggaaacttcaccaaggccacctttgatgctatctctaagacctacagctacccgacccccaacctctggaaggagactgtattcaccaagtctccctagaattcaggaattcaggtcaggaattcactgactaccttgtcaagaccccatcagagtctctgtgcagaggactcaggctccagctgtggctacaacgtag

SEQ ID NO: 21377 - DNA, 407 bp, Homo sapiens
  SIMILAR (11)..(361): 981254mologous to Homo sapiens PMS2L13,accession number AB017004,Smith-Waterman Score=583.
gtcgacgatttcgtgtggagggaactttcccattccccgaggcggatccggtgttgcatccttggagcgagctgagagctcgagtacagaacctgctaaggccatcaaacctattgatcggaagtcagtccatcagatttgctctgggccggtggtaccgagtctaagcactgcggtgaaggagttagtagaaaacagtctggatgctggtgccactaatattgatctaaagcttaaggactatggagtggatctcattgaagtttcaggcaatggatgtggggtagaagaagaaaacttcgaaggcttaactctgaaacatcacacatctaagattcaagagtttgccgacctacctcagtgatgtcaccatttctacctgccatgtatcggcgaaggttgggact

SEQ ID NO: 21378 - DNA, 490 bp, Homo sapiens
  SIMILAR (374)..(192): 851254mologous to Homo sapiens stromal antigen 3, (STAG3),accession number AJ007798,Smith-Waterman Score=268.
  misc_feature (1)...(490): n = a,t,c or g
tctctaccccancatcaccagaggaaaggttaggttagaaaacaatgcnnccactctttcccctcagagcccagggctgaagcctgggggaatgcttcattttgctccttttctctttgccttttccaaatggtcacattcttgaggtagggagtggagctggggaggggcccagagtcctgtcagaaatcctgcatgtcacttttggcagctttcgcagcattgaaaagatcattggctggtggctctgactgtttccagctatgacgatgtaccacttgggaccctttctttggatgttttgccaccggcattgttttcagtggtcgttttgttgctttcttcttcacaccgcgattgaagctgtcctcaaatcattttcttgtcttcttgtctggtacatcggggtggcgcgtgccagacaccaacggtcggaaaccgccagacaccaacgctcggaatccacgccaggccacgacggagggcgact

SEQ ID NO: 21379 - DNA, 4205 bp, Homo sapiens; identical to SEQ ID NO: 15891
  SIMILAR (213)..(3887): 981254mologous to Homo sapiens stromal antigen 3, (STAG3),accession number AJ007798,Smith-Waterman Score=6245.
  misc_feature (1)...(4205): n = a,t,c or g

SEQ ID NO: 21380 - DNA, 712 bp, Homo sapiens
  SIMILAR (99)..(332): 341254mologous to Pseudorabies virus glycoprotein gX,accession number U27488,Smith-Waterman Score=89.
ctagatgatctgcacaaatggttcctctcctctttcctgttgactgccattagcattggaattaagttcctgctgaaaatccacatctcccgtgggtccggtgttctcctccaactcctcccgggaaacccaagccctgccgctcatggaacagaagaactggaaccgaagtttctggaacagggctatctgagagcggttcttcctggccctcgggttcatgcaacggcataactggaaccgacggttacggaccaagggtatgcgagagcgggtcttcccatacaggaagtagaagatgttttgtttggggtcctcgtcgtcctcctccatgtcattggccaggtagctgaggacagaaatcaggttgctgctcaggggcaccaccaggagagcgtccggctcagtgttggggtgactgtactcatttggaaattgcaggatggaggggtattcgaaggtcagatgcaaatccgagaagccagaggaagggttttgggtgatgctcccaggatggtgggctccgatgggatctttggagggggtgtgtctaggtcggctggtgtcaggagggtcttttgtgtgccaggcagagaactgtcccgaagagctgagagtagaggggctaggagcttcagggctgcggccagactgtggcccagagctcagatcccaaaggacccataggagaggcaggggccactcattcact

SEQ ID NO: 21381 - DNA, 1104 bp, Homo sapiens; identical to SEQ ID NO: 489
  SIMILAR (478)..(909): 441254mologous to Xenopus laevis p33 ringo,accession number AJ249978,Smith-Waterman Score=260.

SEQ ID NO: 21382 - DNA, 1096 bp, Homo sapiens; identical to SEQ ID NO: 490
  SIMILAR (2)..(70): 911254mologous to Homo sapiens PMS2L14,accession number AB017005,Smith-Waterman Score=123.

SEQ ID NO: 21383 - DNA, 795 bp, Homo sapiens
  SIMILAR (410)..(613): 751254mologous to Homo sapiens Human secreted protein,accession number Y02781,Smith-Waterman Score=237.
atggggctaccctgggggcagcctcacctagggctgcagatgctcctcctggcgttgaactgtctccggcccagcctgagcctggagctggtgccctacacaccacagataacagcttgggacctggaagggaaggtcacagccaccaccttctccctggagcagccgcgctgtgtcttcgatgggcttgccagcgccagcgataccgtctggctcgtggtggccttcagcaatgcctccaggggcttccagaacccggagacactggctgacattccggcctccccacagctgctgaccgatggccactacatgacgctgcccctgtctccggaccagctgccctgtggcgaccccatggcgggcagcggaggcgcccccgtgctgcgggtgggccatgaccacggctgccaccagcagcccttctgcaacgcgcccctccctggccctggaccctatcgggaagacccccggatccatcgacacctggccagggcggcgaagtggcagcatgatcgtcattacctccatcctctcttctctggccggcctcctactcttggccttcttggcagcctctaccatgcgcttctccagcctgtggtggccggagaggccccggagcagctgcggatcggctccttcatgggcaagcgctacatgacccaccacatcccacccagagaggccgccacactgccgaaacgtgcctgcttccccttcgccttctgccgtgattgtcagtttcttgagggctccccagccatgcttcctgtacagcctgcaaaactgtga

SEQ ID NO: 21384 - DNA, 3885 bp, Homo sapiens
  SIMILAR (211)..(3885): 991254mologous to Homo sapiens stromal antigen 3, (STAG3),accession number AJ007798,Smith-Waterman Score=6285.
  misc_feature (1)...(3885): n = a,t,c or g
aggacgcctgagagcttgaggccacacgaggctgtggagcggcgtgactcaaacgtggcgcgcatcagctcgcacacttccaaacctcgcgatagctactggccctgggcgagccgttgggattgcgcttgcgcacagcgtgtcttctggatcgccatacctaccctgtggtcctcatcttcctggcctcatagctcctcctcgccaagcatgtccaccccgttgcaaagagctgtgggagataccaagagggccttgtctgcatcttctagttcctctgccagtctaccctttgatgacagggactcaaaccatacctcagaggggaatggcgactctttgttagctgatgaagacactgactttgaagacagcttgaatcgcaatgtgaagaagagagcagcaaaacgaccaccgaaaacaacaccggtggcaaaacatccaaagaaagggtcccgagtggtacatcgtcatagccggaaacagtcagagccaccagccaatgatcttttcaatgctgtgaaagccgccaaaagtgacatgcagtctttggtagatgagtggctggatagctacaagcaagaccaggatgcaggatttctggagcttgttaactttttcatccaatcttgcggatgtaaaggcattgtgacccctgagatgttcaagaagatgtccaactcagagatcatccagcacctaacagagcagtttaatgaggactcgggggactaccctctcatagctccaggtccatcctggaagaagttccagggcagcttctgtgaatttgtgaggacattggtctgtcagtgccagtacagcctcctctatgatggcttccctatggacgacctcatctccctgctcactggcctctcagactcacaagtccgcgccttccgtcacactagcaccctggctgctatgaaactgatgacctccctggtaaaagttgccctccaactgagtgtgcaccaagataacaatcagcgtcagtatgaggctgaaagaaacaaggggccagggcagagggcacctgagcggctggagagcctgttggagaaacgcaaagagctccaagagcatcaagaggagattgaggggatgatgaatgccctcttcaggggtgtctttgttcatcggtacagggatgtccttcctgagatccgtgctatctgcattgaggaaattgggtgttggatgcaaagctacagcacgtctttcctcaccgacagctatttaaaatatattggttggactctgcatgataagcaccgagaagtccgcctgaagtgtgtgaaggccctgaaagggctgtacggtaaccgggacctgaccacacgcctggagctcttcaccagccgcttcaaggaccggatggtttccatggtcatggacagagagtacagtgtggcagtggaggccgtcagattactgatacttatacttaagaacatggaagggttgctgacggacgcggattgtgagagcgtctaccccgttgtgtatccttntaatngaggcntggcttctgccgcaggcgaatttctgtactggaaacttttctaccctgagtgcgagataagaacgatgggtggaagagagcaacgccagagcccaggcgcccagaggactttcttccagcttctgctgtccttctttgtggagagcgagctccatgaccacgctgcttacttagtanacagtctgtgggactgtgcaggggctcggctgaaggactgggagggtctgacaagcctgctgctggagaaggaccagaacctgggtgatgtgcaggagagcacactgatagaaatccttgtgtccagtgcccggcaagcttcagaggggcacccgcctgtgggccgggtcactgggaggaagggcttaacctctaaggagcgcaagacccaagccgatgacagggtgaagttgactgagcacctcatccccctgctgccccagctcctggccaagttctcagctgatgcagagaaggtcactcccctgctccagcttctcagctgctttgacctccacatctactgcactgggcgcttggagaagcacctggagctgttcctgcagcaactccaggaggtggtggtgaagcatgcagagccagcggtgcttgaggctggggcgcatgccctctacctgctctgtaatcccgaattcactttcttcagccgggcggactttgcccgcagccagctagtagatttgctgactgaccgcttccagcaggagcttgaagagctgttacagtcgtccttcctagatgaggatgaggtatataatctggcagccactctgaaacgcctctctgccttctacaacactcatgacctgactcgctgggagctctatgagccatgttgccaactcctgcagaaggctgtggacacaggagaggttcctcaccaggttatcctgccagccttgactcttgtctatttttccattctctggacactaacccacatttctaaatcagatgcttcccagaagcagctgtcgagtttgagggacagaatggtggccttctgtgaactctgccagagttgcctctcagatgtggatactgagatccaggagcaggcttttgtcttattaagtgatctacttctcatctttagccctcagatgatagttgggggccgtgatttccttaggccacttgtcttttttcctgaagctactctccagtctgagctagccagcttcctcatggaccacgtcttcatccagccgggagacctgggcagtggtgattcccaggaggatcatttacagatagagcggctacaccagcggcgccgcctcctagccgggttctgcaagctgttgctttatggggtgctggagatggatgcagcctcagatgtttctaaacactacaacaagttctacaatgactatggtgacattatcaaggaaacantaactagagcaaggcagattgaccgaagtcattgttcccgaatcctgctgntgagcctnaagcagctgtacacagaactgctgcaggagcatgggccccagggcctgaatgagcttcctgccttcatcgagatgagggacctggcccggaggtttgccttgagttttggaccccagcagctgcagaaccgtgacctcgtggtcatgctacacaaggaaggcatccagttctccttgtctgagcttcctccagctggctcctccaatcagcctccaaatctggcattcctggagctcctttcagagttttccccccgactcttccatcaggacaagcagcttttgctgtcctatctagaaaagtgcctgcagcatgtctcccaggcacctggccatccctggggcccagtcaccacctactgccactccctcagccctgtggagaacacagcagagaccagccctcaggtcctccccagctccaagaggaagcgcgttgaagggcctgccaagcctaacagagaggacgtctcctcgtcccaggaagaaagtctgcagctgaacagcatcccgcccacgcccaccctcacctccacagctgtgaagagcaggcagcccctgtgggggttgaaagagatggaggaagaagatggctcagagttggattttgcccaggggcagcccgtcgcaggcaccgagaggtcaaggttcttgggtccacaatatttccagactccacacaacccttcaggtcctggcctgggcaaccagctgatgcgactcagccttatggaagaggacgaggaagaagagttagaaatccaggatgagtcaaatgaagaacggcaggatacagacatgcaagcaagtagctactcttccaccagtgagcgcgggctggacctcttagattctacagagctggatattgaggatttc

SEQ ID NO: 21385 - DNA, 2172 bp, Homo sapiens
  SIMILAR (1905)..(1486): 901254mologous to synthetic construct InsB peptide,accession number Z37515,Smith-Waterman Score=652.
ctagatgatctgcacaaatggttcctctccttcttcctggtgtctgccattagcattggaataaagttcctgctgaaaatccacatctcccctgggtccggtgttctcctccaactcctccggggaaacccaagccctgcagctcatggaacagaagaactggaaccgaagtttctggaacaggactatctgagagcggttcttcctggccctcgggttcatgcaacggcataactggaaccgacgcttacggagcaagggtatgcgagagcgggtcttcccatacaggaagtagaagatgttttgtttggggtcctcgtcgtcctcctccatgtcattggccaggtagctcagtgttggggtgactgtactcatttggaaattgcgggatggaggggtattcgaaggtcggatgcaaatccgagaagccagaggaagggttttgggtgatgctcccaggatggtgggctccgatgggatcttgtccgacaccctcagacctttgtcccaggccaggaatcttttaatgacaggatcctcaagcagcctgttgaaggcctcgtggtgctcagggagcacgagcgacactcgccgtcgcttcagcttcatcttgaggccacacagcatctccgccacccagatctcctcaggctcaggggcgagcaccttccgtggctcctcctccaacgactcctcagatttgtcccaccactccatcttccttttccagcaaaaggacctatgcggggggctgggatctaccccaggggcaagctgactgttgaagtccttgtggtgctcagggaggatgggtgacactcgctgttgcttcagcttcatcttgagcccacacagcgtctccactacccaggtctcctcaggctcaggggcgagctcccggcccccttccttcgtcttagtcaatcctatcccacctcttcttccaccagtcccctcatctgatggtcccaacacttcatcatccaccacctcctggagggggtaccccgaggtgctccgctggggactctgctcattctgggggtgcggttgacggctggtcgtgatctttcccgtaatctgtcccctcttacggaacctagtctccgttctgtccatggccttcttctggacactggaggccatggagtggaacttccagatgaactcatggtggtcctcatttccgaactgttccagcacacactcggcttgggccagccgctcccgggttccctgggcctgctccagctgcatgtccagggaggccaccaggccacgggtgtgaccccctatcccctccaggcagcgggccttctcctcgtccaccgggtggcgcagctcctggaactcgcggcggatcacccagctgaagacatccgactcattgacgattcgggtccggtttttcaccagtttggcgatgagctcatccaccttcttctgctcctgcttcagctcagagaagagggctgcgagctcctctttgtcatgcagctccaccgattttgagaacgacagcgacttccgtcccagccgtgccaggtgctgcctcagattcaggttatgccgctcaattcgctgcgtatatcgcttgctgattacgtgcagctttcccttcaggcgggattcatacagcggccagccatccgtcatccatatcaccacgtcaaagggtgacagcaggctcataagacgccccagcgtcgccatagtgcgttcaccgaatacgtgcgcaacaaccgtcttccggagactgtcatacgcgtaaaacagccagcgctggcgcgatttagccccgacatagccccactgttcgtccatttccgcgcagacgatgacgtcactgcccggcgggttgagaagcggtgtaagtgaactgcagttgccatgttttacggcagtgagagcagagatagcgctgatgtccggcggtgcttttgccgttacgcaccaccccgtcagtagataataccagtccccagcagccgctcttctctgtatagggccataataggattccgaagaaaccttttctttcttcacgtgatccataattttgcccaaatcttcaacatcaacaatggaatttaggctctgatggtcctcaccaccaaactcttcttcactggagctctcgaagggttcttcctccaaaagacacagcagcat

SEQ ID NO: 21386 - DNA, 580 bp, Homo sapiens
  SIMILAR (163)..(44): 921254mologous to Homo sapiens stromal antigen 3, (STAG3),accession number AJ007798,Smith-Waterman Score=197.
tgtaggtcctatgcacaacagccagagttatctctgtgtatgtcaccttgctctccacaaagaaggacagcagaagctggaagaaagtcctctgggcacctgggctctggcgttgctctcttccacccatcgttcttatctcgcactcagggtagaaaagtctggtggaatggacacaaggaaagggctcagcacaggaggaaacaaggaggtgtaatcatgaccacagacggaggagatggcccaaggagatgataaaggaaaaggaggtgcagagctaaggaaagccccaaggagctgagagaggaaaagagacaccagagagacttccacggagatggggaggccttaagtagggcagcagcacatgtgggagagaaaccgagagggtggtgttaaagaaacgtaaaaggagccccactcacttccagtacagaaattcacccacagcagaggccaggcctcaattagaggcctacacaatggggtagacgctctcacagtccacgtccatcagcaccccttccatgttcctgcccacagaaaagcagaaagagtgtgtgaatagggacattgtctt

SEQ ID NO: 21387 - DNA, 1338 bp, Homo sapiens; identical to SEQ ID NO: 493
  SIMILAR (1219)..(935): 361254mologous to Haliotis rufescens lustrin A,accession number AF023459,Smith-Waterman Score=89.

SEQ ID NO: 21388 - DNA, 1488 bp, Homo sapiens
  SIMILAR (1)..(540): 1001254mologous to Homo sapiens hPMSR3,accession number U38979,Smith-Waterman Score=976.
atgtgtccttggcggcctagactaggccgtcgctgtatggtgagccccagggaggcggatctgggcccccagaaggacacccgcctggatttgccccgtagcccggcccgggcccctcgggagcagaacagccttggtgaggtggacaggaggggacctcgcgagcagacgcgcgcgccagcgacagcagccccgccccggcctctcgggagccggggggcagaggctgcggagccccaggagggtctatcagccacagtctctgcatgtttccaagagcaacaggaaatgaacacattgcaggggccagtgtcattcaaagatgtggctgtggatttcacccaggaggagtggcggcaactggaccctgatgagaagatagcatacggggatgtgatgttggagaactacagccatctagtttctgtggggtatgattatcaccaagccaaacatcatcatggagtggaggtgaaggaagtggagcagggagaggagccgtggataatggaaggtgaatttccatgtcaacatagtccagtacagaacctgctaaggccatcaaacctattgatcggaagtcagtccatcagatttgctctgggccagtggtactgagtctaagcactgcagtgaaggagttagtagaaaacagtctggatgctggtgccactaatattgatctaaagcttaaggactatggagtggatctcattgaagtttcagacaatggatgtggggtagaagaagaaaactttgaaggcttaatctctttcagctctgaaacatcacacatgtaagattcaagagtttgccgacctaactgaagttgaaactttcggttttcagggggaagctctgagctcactgtgtgcactgagcgatgtcaccatttctacctgccacgcgtcggtgaaggttgggactcgactggtgtttgatcacgatgggaaaatcatccaggaaaccccctaccccccaccccagagggaccacagtcagcgtgaagcagttattttctacactacctgtgcgccataaggaatttcaaaggaatattaagaagacgtgcctgtttccccttcgccttctgccgtgattgtcagtttcctgaggcctcccccagccatgcttcctgtacagcctgcagaactgatggccgtataagaaaataaacaacttgctaaaactgctgaaactccctctgcttgtgagatttaaaaaaactggctgaaattggttggaaccaacatgtccaatggagtctgaatagaaagagcttgctgacatcacagcccgaatttccaccacatttcatactaactccccctgaatttgcatatgcaaaccacaagcaagcatgatcaaacagacaactgcgcgtgtccgaggactttccagatctcccctttccttccaccaatcacttactaatctgagaatccatcccctaataaaatcactaccttaaagcctgcacaggaagac

SEQ ID NO: 21389 - DNA, 906 bp, Homo sapiens
  SIMILAR (412)..(702): 731254mologous to Homo sapiens PMS2L13,accession number AB017004,Smith-Waterman Score=362.
atgccggggtggggccgcgaatcggttgggacgcactctatccggcctaggggcacccgggccagcacccggccgccgcgcgtgcgcagtgggcggggtgccccgcgctcctacctgcaagtggccagtgccaagtgctgggccgccgctcctgccgtgcatgttggggagccagtacatgcaggtgggctccacacggagaggggcgcagacccggtgatagggctttacctggtacatcggcatggcgcaaccaaagcaagagagggtggcgcgtgccagacaccaacggtcggaaaccgccagacaccaacggtcggaaaccgccaagacaccaacgctcggaaaccgccagacaccaacgctcggaaaccgccagacaccaaggctcggaatacacgccagaccacgacggagggcgaccacctcccttctgaccctgctgcgggcgttcggaaaaaaaacgcagtccgtacagaacctgctaaggccatcaaacctattgatcggaagtcagtccatcagatttgctctgggccggtggtactgagtctaagcactgcggtgaagaagatagtaggaaacagtctggatgctggtgccactaatattgatctaaagcttaaggactatggaatggatctcattgaagtttcaggcaatggatgtggggtagaagaagaaaacttcgaaggcttaagttgggactcaactggtgtttttgatcacgatgggaaaatcatccagaaaaccccctacccccaccccagagggaccacagtcagcgtgaagcagttattttctacgctacctgtgcgccataaggaatttcaaaggaatattaagaagccagttggtgagaagtacatgcggtctgtggacacccaagcttgcagctgcatctga

SEQ ID NO: 21390 - DNA, 1322 bp, Homo sapiens; identical to SEQ ID NO: 496
  SIMILAR (546)..(977): 451254mologous to Xenopus laevis p33 ringo,accession number AJ249978,Smith-Waterman Score=251.

SEQ ID NO: 21391 - DNA, 2656 bp, Homo sapiens
  SIMILAR (77)..(2656): 991254mologous to Homo sapiens 23-AUG-1994 Human DNA repair protein hMLH3 coding sequence,accession number Q97527_cd1,Smith- Waterman Score=4429.
cggagcgcctgtgggagccctgcgtggaactttcccagtccccgaggcggatcgggtgttgcatccatggagctgagctgagagctcgagtacagaacctgctaaggccatcaaacctattgatcagaagtcagtccatcagatttgctctgggcaggtggtactgagtctaagcactgcggtaaaggagttagtagaaaacagtctggatgctggtgccactaatattgatctaaagcttaaggactatggagtggatcttattgaagtttcagacaatggatgtggggtagaagaagaaaacttcgaaggcttaactctgaaacatcacacatctaagattcatgagtttgccgacctaactcaggttgaaacttttggctttcggggggaagctctgagctcactttgtgcactgagcgatgtcaccatttttacctgccacgcatcggcgaaggttggaactcgactgatgtttgatcacaatgggaaaattatccagaaaaccccctacccccgccccagagggaccacagtcagcgtgcagcagttattttccacactacctgtgcgccataaggaatttcaaaggaatattaagaaggagtatgccaaaatggtccaggtcttacatgcatactgtatcatttcagcaggcatccgtgtaagttgcaccaatcagcttggacaaggaaaacgacagcctgtggtatgcacaggtggaagccccagcataaaggaaaatatcggctctgtgtttgggcagaagcagttgcaaagcctcattccttttgttcagctgccccctagtgactccgtgtgtgaagagtacggtttgagctgttcggatgctctgcataatcttttttacatctcaggtttcatttcacaatgcacgcatggagttggaaggagttcaacagacagacagtttttctttatcaaccggcggccttgtgacccagcaaaggtctgcagactcgtgaatgaggtctaccacatgtataatcgacaccagtatccatttgttgttcttaacatttctgttgattcagaatgcgttgatatcaatgttactccagataaaaggcaaattttgctacaagaggaaaagcttttgttggcagttttaaagacctctttgataggaatgtttgatagtgatgtcaacaagctaaatgtcagtcagcagccactgctggatgttgaaggtaacttaataaaaatgcatgcagcggatttggaaaagcccatggtagaaaagcaggatcaatccccttcattaaggactggagaagaaaaaaaagacgtgtccatttccagactgcgagaggccttttctcttcgtcacacaacagagaacaagcctcacagcccaaagactccagaaccaagaaggagccctctaggacagaaaaggggtatgctgtcttctagcacttcaggtgccatctctgacaaaggcgtcctgagacctcagaaagaggcagtgagttccagtcacggacccagtgaccctacggacagagcggaggtggagaaggactcggggcacggcagcacttccgtggattctgaggggttcagcatcccagacacgggcagtcactgcagcagcgagtatgcggccagctccccaggggacaggggctcgcaggaacatgtggactctcaggagaaagcgcctgaaactgacgactctttttcagatgtggactgccattcaaaccaggaagataccggatgtaaatttcgagttttgcctcagccaactaatctcgcaaccccaaacacaaagcgttttaaaaaagaagaaattctttccagttctgacatttgtcaaaagttagtaaatactcaggacatgtcagcctctcaggttgatgtagctgtgaaaattaataagaaagttgtgcccctggacttttctatgagttctttagctaaacgaataaagcagttacatcatgaagcacagcaaagtgaaggggaacagaattacaggaagtttagggcaaagatttgtcctggagaaaatcaagcagccgaagatgaactaagaaaagagataagtaaaacgatgtttgcagaaatggaaatcattggtcagtttaacctgggatttataataaccaaactgaatgaggatatcttcatagtggaccagcatgccacggacgagaagtataacttcgagatgctgcagcagcacaccgtgctccaggggcagaggctcatagcacctcagactctcaacttaactgctgttaatgaagctgttctgatagaaaatctggaaatatttagaaagaatggctttgattttgttatcgatgaaaatgctccagtcactgaaagggctaaactgatttccttgccaactagtaaaaactggaccttcggaccccaggacgtcgatgaactgatcttcatgctgagcgacagccctggggtcatgtgccggccttcccgagtcaagcagatgtttgcctccagagcctgccggaagtcggtgatgattgggactgctcttaacacaagcgagatgaagaaactgatcacccacatgggggagatggaccacccctggaactgtccccatggaaggccaaccatgagacacatcgccaacctgggtgtcatttctcagaactga

SEQ ID NO: 21392 - DNA, 461 bp, Homo sapiens
  SIMILAR (323)..(442): 921254mologous to Homo sapiens Human secreted protein encoded by gene 75,accession number Y76198,Smith-Waterman Score=187.
tgagccgagattgtgccactgcactccagcctaggtaacagagcaggactccatctcagtcaatcaatcaatcaatcaatctcagcggttgaactacccttgacatggttcagctctgtatccacaacccaaaatgtcatgtcaaattgtaattcccagtgttgtggcagggaccctggtgggaggtgattggctcatgggggccgacttccccccttgctgttctcgtgacagtgagtgagccctcgtgggatctgcttgttgaaaagtgtgcagcacctcccgcttcactctctctgtctctcctgctccaacatggccagacgtgcctgcttccccttcgccttctgccgtgattgtcagtttcctgaggcctccccagccacgcttcctgtacagcctgcagaactgtgagtcaattaaacctcttttcttcataaattaaaaaaaaaaaaaaaaaa

SEQ ID NO: 21393 - DNA, 498 bp, Homo sapiens; identical to SEQ ID NO: 2841
  SIMILAR (322)..(492): 981254mologous to Homo sapiens Human secreted protein encoded by gene 75,accession number Y76198,Smith-Waterman Score=295.

SEQ ID NO: 21394 - DNA, 3421 bp, Homo sapiens
  SIMILAR (175)..(405): 1001254mologous to Homo sapiens PMS2L13,accession number AB017004,Smith-Waterman Score=403.
atggatgttggctgggacctcggtgaggactgctggcaagaacacctacacacggccttttcctttgactgctggccttgctcacagaatggtgaccgggttcccagtgtgaacccagtgggcgggggggccccgcgctcctacctgcaagtggccagtgccgagtgctgggccgccgctcctgccgtgcatgttggggagccagtacatgcaggtgggctccacacggagaggggcgccgaccccgtgatagggctttacctggtacatcggggtggcgcgtgccagacaccaacggtcggaaaccgccagacaccaacgctcggaatccacgccaggccacgacggagggcgactacctcccttctgaccctgctgctggcgttcggaaaaaacgcagtccgtacagaacctgctaaggccatcaaacctattgatcggaagtcagtccatcagatttgctctgggccggtggtaccgagtctaagcactgcggtgaaggagttagtagaaaacagtctggatgctggtgccactaatattgatctaaagcttaaggataaagaaagtggtctcaattaaggttcaagccaatgaatggggggtaaaagaagaaacctcgaaaggtttacttctgaaacatcacacatctaagattcaagagtttgccgacctacctcaggttgaaacttttggctttcggggggaagctctgagctcactttgtgcactgagtgatgtcaccatttctacctgccatgtatcggcgaaggttgggactcgactggtgtttgatcactatgggaaaatcatccagaaaaccccctacccccaccccagagggatgacagtcagtgtgaagcagttattttctacgctacctgtgcaccataaagaatttcaaaggaatattaagaagaaacgtgcctgcttccccttcgccttctgccgtgattgtcagtttcctgaggcctccccagccatgcttcctgtacagcctgcagaactggcccctctcctgcctggacggctctgctggtctccccgtcccctggagaagaacaaggccatgggtcggcccctgctgctgcccctactgcccttgctgctgccgccagcatttctgcagcctagtggctccacaggatctggtccaagctacctttatggggtcactcaaccaaaacacctctcagcctccatgggtggctctgtggaaatccccttctccttctattacccctgggagttagccacagctcccgacgtgagaatatcctggagacggggccacttccacaggcagtccttctacagcacaaggccgccttccattcacaaggattatgtgaaccggctctttctgaactggacagagggtcagaagagcggcttcctcaggatctccaacctgcagaagcaggaccagtctgtgtatttctgccgagttgagctggacacacggagctcagggaggcagcagtggcagtccatcgaggggaccaaactctccatcacccagggctccagcgcggcccaagcctccacgaggagcgccgccccctgctccacggcgcccggtcccatcgaccgcccaagggccgaggagtgcgggagcaaggcgcagaactggcaggcagctctacctgctgcctggtcccttggctgcaaaaggaagagggagtgtttggatgaatctgatgatgagccagagaaggagctcgcccctgagcctgaggagacctgggtggcagagacgctgtgtggcctcaagatgaaggcgaagcgacggcgagtgtcgctcgtgctccctgagtactacgaggccttcaacaggctgcttgcccctggggtagatcccagccccccacgtaggtcccttggctgcaaaaggaagagggagtgtttggatgaatctgatgatgagccagagaaggagctcgcccctgagcctgaggagacctgggtggcagagacgctgtgtggcctcaagatgaaggcgaagcgacggcgagtgtcgctcgtgctccctgagtactacgaggccttcaacaggctgcttgcccctggggtagatcccagccccccacgtaggtcccttggctgcaaaaggaagagggagtgtttggatgaatctgatgatgagccagagaaggagctcgcccctgagcctgaggagacctgggtggcagagacgctgtgtggcctcaagatgaaggcgaagcgacggcgagtgtcgctcgtgctccctgagtactacgaggccttcaacaggctgcttgcccctggggtagatcccagccccccgcgtaggtcccttggctgcaaaaggaagagggagtgtttggatgaatctgatgatgagccagagaaggagctcgcccctgagcctgaggagacctgggtggcggagacgctgtgtggcctcaagatgaaggcgaagcgacggcgagtgtcgctcgtgctccctgagtactacgaggccttcaacaggctgcttgaggatcctgtcattaaaagattcctggcctgggacaaagatctgagggtgtcagacaagatcccatcggagcccaccatcctgggagcatcacctaaaacccttcctccggcttctcggatttgcatccgaccttcgaatacccctccaccccgcaatttccacatgagcacagtcaccccaatgctgagctatctggccaatgacatggaggaggacgacgaggcccccaaacaaaagatcttctacttcctgtacgggaagacccactctcacatacccttgcgccctaagcattggttccagttatgccgtcccatgaacccgagggccaggaagaactgctctcagatagccttgttccagaagcgtcggttccagttcttctgttccatgcgctgcagggcttgggtttccccggaggagttggaggagaacaccggacccaggggagatgtggattttcagcaggaactttattccagtgctaatggcagacatcaggaaggaggagaggagccatttgtgcagatcatctagaagaacctggaccattcttgacagagctgaatacagtgatcacgttgtcctccaaggagcaggggtggggtggggtacttctaggagtcagttctgcaggcttttaaagggtataaaattttatagcatgaaagatgatattttagtcatacattaatggcccaaaaataatgtcccatctttttactcatcatccctactgtggactaagaattaagtacaagtgggtattatatccaggaaaaatgtcaaaaagcaacctcatcataatcttctaattcacacacaaaggcaacagccagaacaagaattacgctaagtatctgaaacttggtggagccaaagcctctgaagcacaaaacagtcccgtgcttttctgag

SEQ ID NO: 21395 - DNA, 1066 bp, Homo sapiens
  SIMILAR (931)..(1065): 681254mologous to Homo sapiens PRO1902,accession number AF118082,Smith-Waterman Score=156.
gccttcaaatcctcctggactgcaagtccgtaagaaacaggacctccaggttccgccccagggaggttggaattcaccaatataaaaagggtggtggtgccgcaagaaagggtggaactggaaacgctcctggtttcttacttttctccaaggactcctagaaggaccccaccccccttcccccacccctgctcctaggaggacaacgtgatcactgtattcagctccatcaagaatggtccaggttcttctagatgatctgcacaaatggttcctctactcctgcctggtgtctgccattagcattggaataaagttcccgctgaaaatccacatctcccctgggtccggtgttctggaagcgagagagacaatgtcacacttcaaggaggcagctctctagacaggaaagttattcacgtcccatgtcaagtctagagttcagagcaattgagaaatgcaattttatctgctgcctttcattctataccctgcttctgaaccatcgtgttcaactgtgaaactcacactttggtgaccatgactccaaaactcacttaatacacccaaggtcagcccccagtgatctgcttcatagcagggactttgggtgggtctgcccagggagtagggcaccctcagagaatgtggctttggactttatcacagctggggccttttgtgtcacttaagatctaaacttgtaaccatgctagatgtgttttctaatgtgacaacatcacgaaccacgagtccagaagcctaatccttaatcctacctcctcatgatgaagtctcatgctctgtgctcaacgtggttagctgcacaagatgtaaaccaaagcttcactgaaccctcgacccaaatcagtaactcaagtgcgtcaatcataatgaacctccccaaactcagtatttatgattatttttgaggcagggtctcactctgtcgcccagactggagtgcagtggcaggatcagggctccgtgcagccccaaccttccaggctccagcaatcctcccgcctcagcctcctgagtagttgggattacaggtgcccgccac

SEQ ID NO: 21396 - DNA, 3321 bp, Homo sapiens
  SIMILAR (969)..(1178): 671254mologous to Homo sapiens hPMSR2,accession number U38964,Smith-Waterman Score=220.
tcagtccagggggacttccacgggaaaccagcactgggtgtccagggccagtggcagaaccatgggcccttccttcatcgaaccaatacgtttgggtgggggcgagctcctctcgcctgatttttcaattgctccctgcacaatggcagaaattcctggagattctcctaggaggtggaaggtccctggccctggctccatgtggcacgtgctctggtccttctccagcagcaggcttgtcagaccctcccagtccttcagctgagtccctgcacagtcccacaggttgtctactaagtaagcagcgtggtcgtggagcttgctctccacaaagaaggacagcagaagctggaagaaagtcctctgggcacctgggctctggcgttgctctcttccacccatcgttcttatctcgcactcagggtagaaaagtacaatggggtagacgctctcacagtccacgtccatcagcaccccttccatgttcttaaggataagtatcagtaatctgacggcctccactgccacactgtactctctgtccatgatcatggaaaccatccagtccttgaagcagccagtgaagagctccaggcgtgcggtcaggtcccggttaccgtacagccctttcagagccttcacgcacttcacgcggacttctcggtgctgcatgtcacttttggcagctttcgcagcattgaaaagatcattggctggtggctctgacatgtttccggctatgacgatgtaccgcttgggaccctttctttggatatttggccaccggcgttgttttcagtggtcagttttgctgctttcttcttcacaccgccgattgaagctgtcctcaaatcattttcttgtcttcttgtctggtacatcggcatggcgcaaccaaagcaagagagggtggcgcgtgccagacaccaacggtcggaaaccgccagacaccaacggtcggaaaccgccagacaccaacgctcggaaaccgccagacaccaacgctcggaaaccgccagacaccaaggctcggaatacacgccagaccacgacggagggcgaccacctcccttctgaccctgctgcgggcgttcggaaaaaaaacgcagtccgtacagaacctgctaaggccatcaaacctattgatcggaagtcagtccatcagatttgctctgggcaggtggtactgagtctaagcactgcggtgaagaagatagtagaaaacagtctggatgctggtgccactaatattgatctaaagcttaaggactatggaatggatctcattgaagtttcaggcaatggatgtggggtagaagaagaaaactttaaaggcttaactctgaaacatcacacatctaagattcaagagtttgccgacctaactcgggttgaaacttttggctttcggggggaagctctgagctcactttgtgcactgagtgatgtcaccatttctacctgccacgtatcggcgaaggttgggactcgactggtgtttgatcacgatgggaaaatcatccagaaaaccccctacccccaccccagagggaccacagtcagcgtgaagcagttattttctacgctacctgtgcgccataaggaatttcaaaggaatattaagaaggctcagaggctcaggcaagagctacagatgctcatgaccgaatgtctcacctgggcccggaatggcagcagcaagcaccctctcagcctagcccagaagccagagttcctatttcatcagttgcaaagcagagacaatgccatctgcccgatagcagagcaaaaggcagaggggaagttctcttcaaggtacagaaaccacgactccgcagagaaccgcagagatggcagcatgaccagaccacggacagactggactctgaaacgggcatgtacagagaagaggagaccccaacacgcttcaagctttgagtggagaggacacagcctctgctgggacagggaacagagggatgcggagaccctgaagatgcttttggacagtggtctgagtgtccagaagaagaccaaggacagaacagagactaggtttggtgagatgggacagattttgggaaagatcatgatgagccatcaaccgcagccccaggaagagcagagcccccagcggagcacctcagggtaccccctccaggaggtggtggatgatgaagtgtcgggaccatcagcccctggggtagatcccagccccccacgtaggtcccttggctggaaaaggaagagggaatgtttggatgaatctgatgatgagccagagaaggagctcgcccctgagcctgaggagacctgggtggcggagacgctgtgtggcctcaagatgaaggcgaagcgacggcgagtgtcgctcgtgctccctgagtactacgaggccttcaacaggctgcttgaggatcctgtcattaaaagactcctggcctgggacaaagatctgagggtgtcggacaagatcccatcggagcccaccatcctgggagcatcaccgaaaacccttcctccggcttctcggatttgcatccgaccttcgaatacccctccaccccgcaatttccacatgagcacagtcaccccaatgctgagctatctggccaatgacatggaggaggacgatgaggcccccaaacaaaacatcttctacttcctgtacgaggagacccgctctcatatacccttgctccgtgagctttggttccagttatgccgttacatgaacccgagggccaggaagaactgctctcagatagccttgttccggaagtatcggttccacttcttttgttccatgcgctgcagggcttgggtttccctggaggagttggaagagaacaccggacccaggggagatgtggattttcagcaggaactttattccagtgctaatggcagacatcaggaaggaggagaggagccatttgtgcagatcatctagaagaacctggaccattcttgacagagctgaatacagtgatcacgttgtcctccaaggagcaggggtggggtgggggtacttctaggagtcagttttgcaggctgtacaggaagcatggctggggagccctcaagaagctgacaatcacggcagaaggcgaaggggaagcaggcacgtttctggccatggtggagcaggagagacagagagagtgaagcaggaggtgctgcatgcttctaaacaaccagatcccatgagcgctcactcacttcttaatattcctttgaaattccttatggcgcacaagtaggcgttaaaaaatacctggtttacgctgactggtggtcctctggtggtatagtggggct

SEQ ID NO: 21397 - DNA, 3045 bp, Homo sapiens
  SIMILAR (1241)..(1546): 961254mologous to Homo sapiens hPMSR2,accession number U38964,Smith-Waterman Score=512.
aagagcgggatgcttttaaaaaaagaaaaaagaagagaacaaaaaagtcctccagtaaatttaaaatatggtagtcaaggccgggcacgggggcccacacctgtaatcccagcactttgggaggccgaggcgggcggatcacccgaggtcaggagctcgagaccagcccggccaacacgggaaaaccccgtttttacgaaaaaaatacataaatcagccaggtgtgggggggtgcacccgcaatcccagctactcgggaggctgagacatgaaaattgcctgagcccgggaggcaaaggtttcggtgagccgagaactgcccactgcctccaccctgggtgacaaaatgagacttgctctccacaaagaaggacagcaaaagctggaagaaagtcctctgggcacctgggctttggcgttgctctcttccacccatcgttcttatctcgcactcagggtagaaaagtttccagtacagaaattcacccacagcagaggccaggcctcaattagaggcctacacaaatggggtagacgctctcacagtccacgtccatcagcaccccttccatgttctttaaggataagtatcagtaatcttgacggcctccactgccacactgtactctctgtccacgatcatggaaacccatccagtccttgaagcggccagtgaagagctccaggcgtgcggtcaggtcccggttaccgtacagccctttcagagccttcacgcacttcacgcggacttctcggtgcttatcatgcagagtccaaccaatatattttaaatagctgtcggtgaggaaagacgtgctgtagctttgcatccaacacccaatttcctcaatgcagatagcacggatctcaggaaggacatccctgcatgtcacttttggcagctttcgcagcattgaaaagatcattggctgggtggctctaactgtttccagctatgacgatgtaccacttgggaccctttctttggatgttttgccaccggcattgttttcagtggtcgttttgttgctttcttcttcacaccgcgattgaagctgtcctcaaatcattttcttgtcttcttgtctgcaagtggccagtgccgagtgctgggccgccgctcctgccgtgcatgttggggagccagtacatgcaggtgggctccacacggagaggggcgccgaccccgtgatagggctttacctggtacatcggggtggcgcgtgccagacaccaacgagtcggaagccgccagacaccaacgctcggaatccacgccaggccacgacggagggcgactacctcccttctgaccctgctgctggcgttcggaaaaaacgcagtccggtgtgctctgattggtccaggctctttgacgtcacggactcgacctttgacagagccactaggcgaaaaggagagacgggaagtattttttccgccccgcccggaaagggtggagcacaacgtcgaaagcagccgttgggagcccaggaggcggggcgcctgtgggagccgtggagggaactttcccaggtccccgaggcgggatccggtgttgcatccttggagcgagctgagagctcgagtacagaacctgctaaggccatcaaacctattgatcggaagtcagtccatcagatttgctctgggccggtggtaccgagtctaaggccgaatgcggtgaaggagttagtagaaaacagtctggatgctggtgcccactaatgttgatctaaagcttaaggactatggagtggatctcattgaagtttcaggcaaatggatgtggggtagaagaagaaaacttcgaaggccttaatctctttcagctctgaaacatcacacatctaagattcgagagtttgccgacctaactcgggttgaaacttttggctttcggggggaagcctctgagcctcactttgtgcactgagtgatgttaccatttctacctgccacgtatcggcgaagggttgggactctgactggtgtttttgatcacgatgggaaaatcatcccagaaaacccccctaacccccaccccagagggaccacagtcagcgtgaagcagttattttctacgctacctgtggcgccataaggaatttcaaaggaatattaagaagaaacgtgccttgcttccccttcgccttctgccgtgattgtcagtttcctgaggcctccccagccatgcttcctgtacagcctgcagaactgactcctagaaagtaccccaaccccacccctgctccttggaggacaacgtgatcactgtattcagctcttgtcaagaatggtccaggttcttctaagatgatctgcacaaatggttcctctccttcttcctgatgtctgccattagcattggaataaagttcctgctgaaaatccacatctcccctgggtccggtgttctggaagtgagagagacaatgtcacacctcaaggagacagctctctagacaggaaggttattcacgtcccatgtcaagtctagctagagttcagagcaattgagaagtgcgattttatctcctgcctttcattctataccctgcttctgaaccatcgtgttcaactgtgaaactcacgctttggtgaccctgactccaaaacttaatacacccaaggtcagccccagtgatctgcttcatagcaaggactttgggtgggtcttcccagggagtagggcacccttcagagaatgtggctttggacttcatcacagctggggccttttgtgtcacttcagatctaaacttgtaaccgtgctagatctgtttctaacgtgacaacatcacgaaccacgagtccagaagcctaatccataatcctccctcctcatgacaaagtctcatgctctgtgctcaacatggttagctgcacaagatgtaaaccaaagcttcactgaaccctcgacccagatcggtaactcaagtgcatcaatcataatgaacctccccgaactcagtatttatgattatttttgaggcagggtctcaatctgtcggccgggctgggagtgcagtggcaggatcaggg

SEQ ID NO: 21398 - DNA, 393 bp, Homo sapiens; identical to SEQ ID NO: 20309
  SIMILAR (14)..(391): 851254mologous to Homo sapiens bridging integrator- 2,accession number AF146531,Smith-Waterman Score=545.

SEQ ID NO: 21399 - DNA, 326 bp, Homo sapiens; identical to SEQ ID NO: 12993
  SIMILAR (11)..(118): 971254mologous to Homo sapiens bridging integrator- 2,accession number AF146531,Smith-Waterman Score=171.
  misc_feature (1)...(326): n = a,t,c or g

SEQ ID NO: 21400 - DNA, 197 bp, Homo sapiens
  SIMILAR (33)..(128): 1001254mologous to Homo sapiens bridging integrator- 2,accession number AF146531,Smith-Waterman Score=165.
gtttcctaactctcctaagtatccttggaaagaataatgatctcctttgggaagactacgaggagaaactggctgaccaggctgtaaggaccatggaaatctatgttgcccagttcagtgaaattaaggtactcaatgtacagaatcaaggctgggttgtggatgacccatccaggttagagaacatattgggttaa

SEQ ID NO: 21401 - DNA, 513 bp, Homo sapiens
  SIMILAR (88)..(399): 1001254mologous to Homo sapiens bridging integrator- 2,accession number AF146531,Smith-Waterman Score=527.
atgccgggagcccgcacttcctcctcgggggcctcagaaaaccacagggcgcggggccagggcggcggcccccagggagttggcaggatggcagagggcaaggcaggcggcgcggccggcctcttcgccaagcaggtgcagaagaagtttagcagggcccaggagaaggtgctgcagaaattggggaaagctgtagaaaccaaagatgaacgatttgaacaaagcgctagcaacttctaccaacaacaggcagaaggccacaagctgtacaaggacctgaagaacttccttagtgcagtcaaagtgatgcatgaaagttcaaaaagagtgtcagaaaccctgcaggagatctacagcagcgagtgggacggtcatgaggagctgaaggccatcgtatgggtaagagtggcttgagttttacaacttattggcacttactcctgtttgcatctcaacctcagcttagcttctctatccaagaaaataggaaaacaaaggagccagttcacactg

SEQ ID NO: 21402 - DNA, 2193 bp, Homo sapiens
  SIMILAR (1224)..(1724): 831254mologous to Homo sapiens breast cancer associated protein BRAP1,accession number AB032698,Smith-Waterman Score=686.
ggcccccagggagttggcaggatggcagagggcaaggcaggcggcgcggccggcctcttcgccaagcaggtgcagaagaagtttagcagggcccaggagaaggtgctgcagaaattggggaaagctgtagaaaccaaagatgaacgatttgaacaaagcgctagcaacttctaccaacaacaggcagaaggccacaagctgtacaaggacctgaagaacttccttagtgcagtcaaagtgatgcatgaaagttcaaaaagagtgtcagaaaccctgcagtttatctactattagcgagtggtacggccatgaggagctgaaggccatcgtatggaataatgatctcctttgggaagactacgaggagaaacttgtctgaccaggctgtaaggaccatggaaatctatgttgcccagttcagtgaaattaaggagaagaattgccaagcggggtcggaaactcgtggactatgacagtgcccgacaccacctggaggcagtgcagaatgccaagaagaaagatgaggccaagactgccaaggcagaggaagagttcaacaaagcccagactgtgtttgaagatctgaaccaagaactactagaggagctgcctattctttataatagtcgtattggctgctatgtgaccatcttccaaaacatttccaacttgagggatgtcttctacagggaaatgagcaagctgaaccacaatctctacgaggtgatgagcaaactggagaagcaacattccaataaagtctttgtggtgaagggactgtcaagcagcagcaggcgctctttagtcatttctccgggagttcgaacagctacagtctccagtcctcttacctcacctactagtccctctacactttccttgaagagtgagagtgaatctgtctcagcaactgaagatctggcacctgatgcagcccaaggggaagacaattctgagatcaaggagctcttagaagaggaggaaatagagaaagaaggatctgaagcaggctcctctgaggaagatgaccctttaccagcctgcaatggccccgcccaggcccagccctctcctaccactgagagggccaagttcccaggaggaagttctccccagctccacaactccatcaccaggcggagccctgagcccttcagggcagctttcatcatctgccacagaagtagtcctccgaacccgcaccgcaagtgaaggatctgaggcgaccaaaaaagacagcctctatccagaggacctcagcaccccctaggaggcctcctccacccagagccactgcaagccccaggccctgctcagggaacataccttccagccctacagcctctggaggggggtcagcgcaccagccctagggcctccttggggactgggactgcaagtcctaggacctccctagagatctatacctaatccagaacgcaccagagaagccagtaagaactcctgaggccaaagaaaatgaaaacatccacaatcagaaccctgaagaactttgtacttcccccaccttaatgacatctcaggttgcttcagagcctggagaggcaaagaagatggaagacaaggaaaaggataataagcttatctcagctgactcctcggagggccaagaccagcttcaagtctccatggtaccagaaaacaacaacctcacagcacctgaacctcaagaagaggtatccacaagtgaaaatccacaactctgaagagaaactaccaagactcctcctgccccaaacctcgccagagaagctcttcaaccagaggggtataggtcagagggatataagagccagcatccatccctgggttctcagtaggaatgctggtgctgtctaaagacctggcattaatggaggccggaggagcagccttacgggagggatggagggaggcaggctggggagaagagaacattagacctcagggaaatatttaattctggttttagcattattagaataagactttatacattaactaaagtggagctttaatcactataaaaagcaaaagtatctatagacacagacacttgcctatacagagacataacccacacacactcagaggatagtgaacaaatctgtctttgacttacgaccccattttgcaagacttaaagccggaagaacacattttcagattgttaaataaagtctgattctgact

SEQ ID NO: 21403 - DNA, 1533 bp, Homo sapiens
  SIMILAR (1)..(855): 1001254mologous to Homo sapiens dJ726C3.2 (novel protein),accession number AL121756,Smith-Waterman Score=1414.
atggcttgggcaagtaggctgggcctgctgctggcactgctgctgcccgtggtcggtgcctccacgccaggcaccgtggtccgactcaacaaggcagcattgagctacgtgtctgaaattgggaaagcccctctccagcgggccctgcaggtcactgtccctcatttcctggactggagtggagaggcgcttcagcccaccaggatccggattctgaatgtccatgtgccccgcctccacctgaaattcattgctggtttcggagtgcgcctgctggcagcagctaattttactttcaaggtctttcgcgccccagagcccctggagctgacgctgcctgtggaactgctggctgacacccgcgtgacccagagctccatcaggacccctgtggtcagcatctctgcctgctctttattctcgggccacgccaacgagtttgatggcagtaacagcacctcccacgcgctgctggtcctggtgcagaagcacattaaagctgtcttgagtaacaagctgtgcctgagcatctccaacctggtgcagggtgtcaatgtccacctgggcaccttaattggcctcaaccccgtgggtcctgagtcccagatccgctattccatggtcagtgtgcccactgtcaccagtgactacatttccctggaagtcaatgctgttctcttcctgctgggcaagcccatcatcctgcccacggatgccaccccttttgtgttgccaaggcatgtgggtaccgagggctccatggccaccgtgggcctctcccagcagctgtttgactctgcgctcctgctgctgcagaaggccggtgccctcaacctggacatcacagggcagctggtggcccgccagtttcccgagcccatgcctgtggtgctcaaggtgcggctgggtgccacacctgtggccatgctccacacaaacaacgccaccctgcggctgcagcccttcgtggaggtcctggccacagcctccaactcggctttccagtccctcttctccctggatgtggtagtgaacttgagactccagctctctgtgtccaaggtgaagcttcaggggaccacgtctgtgctgggggatgtccagctcacggtggcctcctccaacgtgggcttcattgatccctcaccccaaaagtccattggtcagttggacaaagaatgtcagctgtcccttcagccaggtgatgtgattgggtcatcggccaccatacatccacttgtcagccggcatgccatcaacatgccccccttctacccagccgtcagtctgtctgtctgtcggtcatctgcgtcaggcagtctgctggccagtccacctgttggtcacacaacagatcaggtgcgcacactgatgggcaccgtttttgagaagcccctgctggaccatctcaatgctctcttggccatgggaattgccctccctggtgtggtcaacctccactatgtcgcccctgagatctttgtctatgagggctacgtggtgatatccagtggactcttctaccagagctga

SEQ ID NO: 21404 - DNA, 1898 bp, Homo sapiens
  SIMILAR (1280)..(1543): 741254mologous to Homo sapiens dJ726C3.2 (novel protein),accession number AL121756,Smith-Waterman Score=283.
gtagatcacgcgatccgactaaagagcctctgcatctgcctgcctggggcatttgagggctaccctggggctgagagttcaccggtctcaggaaccacctgagcccacagagggctgtggggagcggccagggcggccatggcttgagcaagtaagctgggcctgctgctgacactgctgctgcccgtggtcggtgcctccacgccaggcaccgtggtccgactcaacaaggcagcattgagctacgtgtctgaaattgggaaagcccctctccagcgggccctgcagggcactgtccctcatttcctggactggagtggagaggctgcttcagcccaccaggatccggattctgaatgtgcatgtgccccgcctccacctgaaattcctttgtgggtttcggaagggcgcctgctggcagcagctaattttactttcaaggtctttcgcgccccagagcccctggagctgacgctgcctgtggaactgctggcgtgacacccgcgtgacccagaggctccatcaggacccctgtggtcagcatctctgcctgctctttattctcagggccacgccaacgagtttgatggcagtaacagcacctcccacgcggtgctggtcctggtgcagaagcacattaaagctgtcttgagtaacaagctgtgcctgagcacctccagcctggtgcagggtgtcaatgcccacctgggcaccttaatctggcctcaaccccgtgggtacctgagtcccagatccgctattccatggttcagtgtgcccactgtcaccagtggactacattttccctgggaagttcaatgactgtttcttctttcctgctggggcaaagcccatcaatccctgccccaacggatgccaccccttttgtgttgccaaggcatgtgggtaccggagggctccatggccaccgtgggcctctcccagcagctgtttgactctgcgctcctgctgctgcagaaggccggtgccctcaacctggacatcacagggcagctgaggtcggatgacaacctgctgaacacctctgctctgggccggctcatcccggaggtggcccgccagtttcccgagcccatgcctgtggtgctcaaggtgcggctgggtgccacacctgtggcccatggctccacacaaacaacggccaccctgcggcctgccagccccttcgtgggagggtcctgggccacaggccctccaaactcggcttttcccagtccctcttctcccttcttgtggtagtgaacttgaggactccagcctctctgtgtccaaaggtgaagctttaagggaacacgtctgtgcttggtggatgtcccaactcacggtggcctcctccaacgtgggcttcattgatacagatcaggtgcgcacactgatgggcaccgtttttgagaagcccctgctggaccatctcaatggctctcttggccatggggaattgccctccctggtgtgggtcaacctccactatgtcgcccctgagatctttgtctatgagggctacgtggtgatatccagtggaactcttctaccagagcctgaggcaaagaccactgggaggccctgagagtggggccaagcttcgctgtcttcaggcgaaattttctcatttcaagccactggggaaactgaggcaaaaccatacttagtcatcaccaacaagctggactgcttagctgggctgttttatcttccctgagtgcctgggtctcccctccctcacttttgccctttcccttcctcctcctcttctcctccctcttccctcatctcccccctccttcctctgccccaccccagcggggagcagactgctcctccaggctgtatagacctgccctcttgcattaaacaacttctcttgagctgcaactttc

SEQ ID NO: 21405 - DNA, 5184 bp, Homo sapiens
  SIMILAR (1618)..(2412): 621254mologous to Oryctolagus cuniculus Cytochrome P-450 aromatase,accession number Z68271,Smith-Waterman Score=785.
ttaaaattgccttgcaatgatggcctgttttgtcagacttgatgacttggtgtcagatcctctcctttcatggtttatttcaatctggataatagccagaagtcctctctcatttgtcacttggctttggaaccccttgccggccttccactttaaagaaatcaaacagatggacaagtcaaggccccgccactcccttcctctctctgtgaggtggctgatctccagaactctatgctcagccttgcaggatatgtttttaaatgttttctgcatcctccactggcatctccggtgggtgtttccataaccagagagtcctttgtgctgcaggagtgatggtttgggcacacaggcagaaacaggagcttctgggaaggaggggttgctcaggaccaggcagctgttggaggcatcaagtgcctggccttgggcccttctctctgaattatcctcatgggaccttctggccagcgtgcccttgtgttcctggaacccacatcctcttagctttgcctctaagtgaatcaatgttgagtaatttctgctgctgagttcttcctcctccatgtttccctgctcatccagttctgccccactggtttcccaagacaagcctgcttcttcttctccttgcctgagccatctcttacctggtataaatactcctcctctttttctctccgacatgggtcttggactactactgcttttgactgccaaggcactatataaatcagagccttggagggtttcattaaataaacatttattaggaagcttgtctgagcagggtactacattcagacattcagttttctttctggccccagagtagataaggtagtggaattttccagccaaaactgggcttttaacctgtctagcaaaatgatcatcaacctgggctttaggacttcctggtggtccccctacattcccactttctgtccagcttagaatttcaggcaataggtacatatcgtacacctctgttagttcttccagagactggcgcaggggttggagatgggatgggaatagatgggggaaggaatgtggagcagggggcctggactccactccaagctctgctgaaggagggccttttccaaagtggatcctcctgaaggcagaggctcttcagcagcaacgagggcagtattgatgctgctgatttctcaggaccgctgataacagctttcatgtggaacttgggattaatatcaagcaagccatggattttgtctccactgaacttgggcatcatggacagtttccattccagcagttaagggcttcctgactttcaacagtggtgctgatcccagttctgaagagtggaacatcagagagcctcccctcctcagccacttgactctaaattgccccctctgaggtcaaggaacacaagatggttttggaaatgctgaacccgatacattataacatcaccagcatcgtgcctgaagccatgcctgctgccaccatgccagtcctgctcctcactggcctttttctcttggtgtggaattatgagggcacatcctcaataccaggtcctggctactgcatgggaattggacccctcatctcccacggcagattcctgtgggatggggatcgggcagtgcctgcaactactacaaccgggtgtatggagaattcatgcgagtctggatctctggagaggaaacactcattatcagcaagtcctcaagtatgttccacataatgaagcacaatcattacagctctcgattcggcagcaaacttgggctgcagtgcatcggtatgcatgagaaaggcatcatatttacacaacaatccagagctctggaaaacaactcgacccttcttatatgaaagdctctgtcacgccccggcctctgttcgtatggtcacagtctgtgctgaatccctcaaaacacatctggacaggttgggaggaggtgaccactgtaatcggggctatgtgggacgtgtttgacccttctgcgtcgtgttcatggctgggacacctctaacacggtcttccttgaggatccctttgggaggaaagtgctatcgtggttaaaatccaagggttattttgatgcatggcaagctctcctcatcaaaccagacatcttctttaagatttcttggctatacaaaaagtatgaggaagtctgtcaaggatttggaaagatgcccatagaagttctgatagcagaaaaaagacgcaggatttccacagaagagaaactggaagaatgtatggactttgccactgagttgattttagcagagaaacgtggtgacctgacaagagagaatgtgaaccagtgcatattggaaatgctgatcgcagctcctgacaccatgtctgtctctttgttcttcatgctatttctcattgcaaagcacccctaatgttgaagaggcaataataaaggaaatcccagactgttattggtgagagagacataaagattgatgatatacaaaaattaaaagtgatggaaaacttcatttatgagagcatgcggtaccagcctgtcgtggacttggtcatggcgcaaagcctttaggaaggatgatgttaatcgatgggctacccagtggaaaaaggggacaaacatttattcctggaatattgggaagggtgcacagactctagtttttccccaaacccaatgaatttactcttgaaaattttgcaaagaatgttccttataggtactttcagccatttggctttgggccccgtggctgtgcaggaaagtaccatcggccatggtgatgatgaaagccatcctcggttacacttctgaggacggattccacgtgaaggacattgccagggaccagtgtgtttgagagcatacaggaaggatacacgacttgtccttggcacccagatggagactaaaaacatgctgggaaatggatctttaccccaaggaaacttcagacaggtgtctgggaacacttaggaggaaggctggtcagtaccttactctgggagcattttctccatcagtttgttcacctacaaatcatcccatcctttgcccattagtgttcatccttcacagtggaacactcagtgggcccatggcatttttatagggcatacctcctatggggttgtcaaccaagcttaggtgctattgggtcatctgctcctggttcacaccagaggaaccaggggtacaagaggaaaaaggcaggagggccaaggagtttgaggggaggaaatagttcgggtggaaggaaaccgtattccattaaaggaccccgatttcccacccaaatgttgctttttgaggaagggatagggcctttcatttaacaaaatggtatgttctgggtttccccagtaggaggctctaactggccttcaacccaagggggatttttatggtcttgggggcaggaaacattcaagtttgatttagggaaaggaccaggggccaatgttcaggggtacccggggggccaaaccccacctgcctagtggtgaattaaaggtactttttaattttgttttctgtgggaggtgggaaaagcaacattcccatagtccttgggagaaaatgccctagaaaattccagcatttggaccccttgcctgtgaattaaagcccccaattaattccctgtttggccctacatatggatctgtctgtgggcaaaagtttaattcagagggaaatttcttttcccagtctgttcgatttatggcctcagcccacttggcctgtgcctacaattcattgtgttaccctgtaggattcagggtaatacaaactattatatgattcattcaaggtaatacaaacctaatttaggtaatagcctggggttaaggtattattaggggccctgtgtctgcatgtagaaaaaaaaaattcacatggatgcactttcaaatcacaataaaaatccttttgggcatgttccccattttttgcttagctccaattagtgtgggcctaacccaaggggataactgtaaaatgtgacattgatttgccccttactaccagcttccagtgaattgggggggagggaaaagtcccccaaccccaatggggcctcaaacctccctaagggggacccccctcctcatccccccttattccttcttcccttcggacatttttcttcccctcttttctttccccatggacccccaaaagccaaggggcaacaggatcagtaaaagaacgtgggtcaggagtagggaccccctgaaagtattttttaaacccccaccctcaaaatttaaccagttacccctgagagatttaaacattatcctagttccattgaatccattgtatgtgggtcatggggttaaatttgcacaccttgggaattcgcttttctaaaagggaaattcaaatggatgggagggaacttttccaaacaccactttacttgtgttatatagtccaatataactatctctactgaatgtcattgaaaaactaaaaaattaaacttatttacaaataggtaaatatttgtcattgaatccattgccatcccatttgactgttcttttcatccctactgtctaggtaattaaggctggagtataaggtgacagtgtaatctccctggaaagccgggagctactttctttcttttgtaatctatttccatccccatttccctgtcctgtctccctgtattcactcccaagctcagttctgaatagacattcctgctcagaggatactcccaactgatgcaggaaaccaaataaagaggtaggtatttccaaggaattccaaggaatgggacattagttaaaggattaaaacatttatttgagccttggaattatttggatcatctatatggccctaaaaatatatggactatgccctgtgtacctgaatacgtatgtagtcaggtcaagacaatcatcccaaataacttagacccctaaaagcaaggcccaggatttgcaatttaatgtgtcccaattaattcacttgaaaattagtaacactctgtttacgttgcctctggctggagctgcatggtggaagaagcccaactttggatccatgtacttcacccatccaatactcttgggacatttatgtgtatttaatctgtatatatgaagccaatgtctatgtctacacagtcaaagtgaaatgcatgtttgatatagctgtacat

SEQ ID NO: 21406 - DNA, 378 bp, Homo sapiens
  SIMILAR (249)..(208): 351254mologous to Takifugu rubripes WNT2 protein,accession number AJ271361,Smith-Waterman Score=37.
cctcggagacgggtggcatggggagcagctagaacaatgcagattcatccataatccctttctgctgttcaccaccacccatgatccatctgtgtagtttctgaacagtcagcgattccaggttttaaatagtttgtaaattttcagtttctacacacaaaaatataagagctaagaaaccagacgagagattacctgaatgtggcacacagataagaaaagacacattgaaaagggtaagaaggacagttttacattacttgtgtcacacctccctcagtccctgagatcccagcatggagagagagactgttcacctgggggaaggaggggaagtgtacaccagacttaaaccctaacattgagcttcgcccagta

SEQ ID NO: 21407 - DNA, 477 bp, Homo sapiens
  SIMILAR (300)..(410): 431254mologous to Mus musculus SPR2A protein,accession number AJ005559,Smith-Waterman Score=59.
atgcagaagcaaataatttcagtcactgaggtagaatggtatccaaaatacaatagtaacatgaaggagtactggagtacccagaaccatcaatttgaacaactgtctacacacaaaaatataagagctaagaaaccagacgagagattacctgaatgtggcacacagataagaaaagacacattgaaaaggccctgccctctagatcggcccctgtggcctcacatcactgcagaacaagggtccaaacccagtacttggccagccccttgtgatccaaattctaggccaacatccacctacccagccttcacactggtccttgcagatccaaggttcaggctcactctagtagaccaggatgccaggccagcagcacctgtgtaccaaggctccaggacctaccctgctgacccagactccaggccagccccggtagactcaggctgcataatctctggacaggctgactggtga

SEQ ID NO: 21408 - DNA, 555 bp, Homo sapiens
  SIMILAR (14)..(187): 961254mologous to Sus scrofa myoglobin,accession number M14433,Smith-Waterman Score=304.
  misc_feature (1)...(555): n = a,t,c or g
agaagactgcgccatggggctcagcgacggggaatggcagttggtgctgaacgtctgggggaaggtggaggctgacatcncaggccatgggcaggaagtcctcatcaggctctttaagggtcacccagagactctggagaagtttgacaagttcaagcacctgaagtcagaggacgagatgaaggcgcctccctgtgggatgtcatcaccctgggaaccgggagtggcccttggctcactgtgttctgcatggtttggatctgaattaattgtcctttcttctaaatcccaaccgaacttcttccaacctccaaactggctgtaaccccaaatccaagccattaactacacctgacagtagcaattgtctgattaatcactggccccttgaagacagcagaatgtccctttgcaatgaggaggagatctgggctgggcgggccagctggggaagcatttgactatctggaacttgtgtgtgcctcctcaggtatggcagtgactcacctggttttaataaaacaacctgcaacaaaaaaaaaaaaaaaaaacact

SEQ ID NO: 21409 - DNA, 1689 bp, Homo sapiens
  SIMILAR (425)..(877): 411254mologous to Homo sapiens myoglobin,accession number X00371,Smith-Waterman Score=138.
  misc_feature (1)...(1689): n = a,t,c or g
gtgggctttttccataacagaaagaagagaatttcaagtctattacaattcatgtccttctagttcctggattggagatgcaagagcattttccccaccagatccaactgggctttaccccatctactcccaggatactcagaccttcagactctggctgaattataacactgactttcctgggtctccagcttgcaaatggcaggctatggaacttctcagcccacaatcacccttcagggtagaccgaggagagcacctccccttcctggtgaagggagcccgatacacgctggtgccggctggccaagaaggagccctggccgcttggctggaggctctgcgaggacagctggggagaaggggagctgtggtcagtatgatggatgctgaggggctggagaggagcagccctgactgcgccatggggctcagcgacggggaatggcagttggtgctgaacagtctgggggaaggtggaggctgacatcccaggccatgggcatggaagtcctcatcaggctctttaagggtcacccagagactctgggagaagtttgacaagttacaaggcacctgaagtcagaggacagagatgaaggcgtctgaggactttaaagaagcatatgtgccacactgtgctcacacccccttggtgtgcatatcttaagagagagaggggcatcattgaaggcagagatttaagccccttggcacaagttcgcattgccacccaagcaccaagattcccccgttgaaagttaccttggagtttcatcttccgggaattgcattcatccaggttcttgcagagcaagcaatcccgggggactttgggtgctgaatgcccaggggcgcaattgaaacaaaggccctgggagctgtttccggaagaacaatggccttccaacttacaaggaagctggggctttccaaggggctagggccctggccggcttccccacccccacccatcttgggcccccgggtttcaagaagagagcgggggtctgatctccgtgtagcccatataggagttttgctttctgaagtgtcctgcttttgtttagttagaggttgggcaggaaggaggctgaaggggctgggggctgagggtgttgaagtttggcttttgcatgcccccagcgatggcgccctcccctgtggggatgtcattcacccctgggaaaccgggaagtggcccttgggctcacttgtgttcttgcatgggtttggattttgaattaatatgtcctttcttcctaaatccccaaccgactttctttccaacctccaaacatggcatgtaaccccaaaatccaagccaattaactacacctgacaagtagcacattgtctgaattaatcacatggccccattgaagacagcagaattgtccctttgccaatgagggagggagatctgggcttgggcggggccagctgggggaaggcatttggactatcttggaacttgtgttgtgcctcctcgaggtatgggcagtgactcacctggttttaataaaacaacctgcaacataaaaaacaaaaacaaaaaaaaataannnnnnnnnnnnnnncctttaaaaaagatccctgggggggccaaactttccgggggggtggaagagtannnnnnnnnnnnnnagggggggcgaattcaaaccctggggggatttttttggaaaa

SEQ ID NO: 21410 - DNA, 484 bp, Homo sapiens
  SIMILAR (74)..(448): 301254mologous to Caenorhabditis elegans homology with glucose induced repressor, GRR1; putative,accession number L14745,Smith-Waterman Score=175.
  misc_feature (1)...(484): n = a,t,c or g
cgccccccccgcccaccnatcgagaccctnatcgagatctctagncagngncgnggaattcccggnggtcctgtgtctcaatctgtctaacacaactatcaccaacaggacgatgcgactcctgccgaggcacttccacaacttacagaatcttagtttggcttattgcagacggttcacagacaaagccttacagtacctgaacttggggaatggatgccacaagctcatctatctggacctctctggctgcacccagatttcagtccaaggcttcaggtacattgcaaacagctgcactggaattatgcatcttaccattaatgacatgccaactctgacggacaactgtgtaaaagctttagttgaaaaatgctctcgtattacatcgctggttttcactggtgcaccgcatatctccgattgtactttcagagctctttctgcttgtaaactcagaaagatccgatttgaaggaaataaa

SEQ ID NO: 21411 - DNA, 975 bp, Homo sapiens
  SIMILAR (16)..(327): 911254mologous to Homo sapiens ADP-ribosylation factor-like protein 2,accession number L13687,Smith-Waterman Score=485.
atgtcaccacctggcagagaacagggacttctccttaacctgctgcgccccagtggcctggacaatgctggaaagacaaccatcctgaagaagttcaatggggaggacatcgacaccatctccccaacgctgggcttcaacatcaagaccctggagcaccgaggattcaagctgaacatctgggatgtgggtggccagaagtccctgcggtcctactggcggaactactttgagagcaccgatggcctcatctgggtagtggacagcgcagaccgccagcgcatgcaggactgccagcgggagctccagagcctgctggtggaggaggtgggcagctcctaccctttgtgtacatggcggtttttctcctatctcagaattgaacaaatgtacaatctggttttataccgagacattcagttcccagatttttgcttcaattctaacactgactggagcaaaggtctcaaaacccatgccaggtttgggaacaccagtctccacgtggcccacactgacagtaccaataccaccaattttgtggacgtctggaggggcagaaccaagagcttggcctgcttgctccagctctcaagtctgacttgcatctacactgcgggcaagatgcggctgcaagaccgcatcgccacgttcttcttcccaaaaggcatgatgctcaccacggctgcgctgatgctcttcttcttacacctgggcatcttcatcagagacgtgcacaacttctgcatcacctaccactatgaccacatgagctttcactacacggtcgtcctgatgttctcccaggtgatcagcatctgctgggctgccatggggtcactctatgctgagatgacagaaaacaagtacgtctgcttctccgccctgaccatcctgatgctcaacggagccatgttcttcaaccgcctgtccttggagtttctggccatcgagtaccgggaggagcaccactga

SEQ ID NO: 21412 - DNA, 2124 bp, Homo sapiens
  SIMILAR (1724)..(789): 901254mologous to Homo sapiens Human cell proliferation protein APOP-2,accession number B13513,Smith-Waterman Score=1460.
taaacatgaaccaagttttttttctttattttctaaaagcagtaaaaacatttatacaggacattatgaaagtctaatgccatcattaggacccaactgctgcaggttaccagtgtggaattgcatatcaccagatgctgttccacaaatggacaggcaagcaggatgatagcattctcttgattactataatagtcacaataatacttataattaaagaaagcttcctttagctggattaccctgcataaataggcaacacagttaatcaaatgtaaacatatgttttctaacaccagtatagaaaatacaaaactaattacaatcagaacaatttctaccttatcctactatagtaattattacgctttgcttctttgcggtgtgatctctatgttttttttcccattcatcatcttctgtgtcttggtcaaatgactcaggatatgctggtaacttgtctttggggcattcttcatagtaacttctaatatattttcccacagaccatcctttgtattcttcaggcgttttgcattccaggccattaaaatggacattgtagtggtgctttaaccagtagtagaggtagtgaatgttgtagtcacatctccaagggttatctctgagccacaagagtttcaaaaaatacaagtcttctaatacgccatagtcaaagttttgcagactgttgtttgataaatctaattcttctaaatgtgtgagccctaaaaaagcggcacagcaaaaatcattcacgtaagtctacttgcagggtttcatctcaaagacccaggatcgatgaattcaatgccattgctgctgaggtttaatttcttcagctcatgaacatcttcaaattccttgggtcgaagttggttgattttattgtatgacaagtcaagtttaacaatatctggagggatgttgtttggcacttttttcaactctttccttttgcagtccagtgtttgtatgggaaacacataattgtggcaaaaagttgagtccacctcaggcttgatgactgggggtctccctgacacttggggtttcgggtccaattgttccttttcttcttcattacacaactgttcagattttatctgccgcagttttttatttttttgttcttgtggactttcacacttggcgtagttcgccaaattccggttcctgggaatctgcaacattgaaataagcgtttctatctcacaagtacagtgccaggggttgtcataaagacgcaggtagctcaagagaggtgtgtaaatgaacacttcctccgtcaagactttgatctggttgtgctgcagtaagagggtggtgagtttgtttaaaccaaagaacgcctcactctcaattttagagatctcattctgctgcagatccaggcttttcagctttttaaacttggaaaacatgttgttcttcaatgtgcggatcttgtttcttgctagcagcatgtgcagcaaatcctgaggccaaccaggcagcacataaactaattttctttcttgacaatctaagtatttctcatggagatatgtgtacacgtcacacgggaagccctggtgcgtagcgtttgaaccgggttggagcctctccggcctccacccgcccggccatgattcactcggcttctcacactgccctgggcttgctttgcgcagctcagccgctttgcaaaagcagagcaagattacaatggtaaccacacgcatcctgacatccagctggccccaattacttcgtgttacagacggaacaatgaaaagtattcctttgaaatccaagtctgggtaatcttaactaatgcagttctggaacaatgagacccagctggggtacgtggagtccctaggctgaacttggggaatggatgccacaagctcatctatctggacctctctggctgcacccaggtttgtctttcagtcttctctttgctgcggtgtgtgaggaagttctccagagaatgggctgcattcagccctcacgttatactaatgctgtgcacggaccgcagcacacttttcagaggttttaaattacatggccccagctgctgaaattttccccaggatcgctattataggctcttggcttccttccactggagtg

SEQ ID NO: 21413 - DNA, 933 bp, Homo sapiens
  SIMILAR (334)..(468): 681254mologous to Human endogenous retrovirus K env protein,accession number Y17832,Smith-Waterman Score=140.
  misc_feature (1)...(933): n = a,t,c or g
gagctttccttctgtcccccagcctttggactgtcaccaaacaagccattcgttcaccaaatacttattaagcgcctaccatgtgcctgacaagggagatgtaacgatagagtctctctctctgccacccaggccagagtgcagttgacgcagggcaggggagccccgaagtggagcatagnnnnnnnnnnnnnnnnnnnnnnnnnnnnnnnnnnnnnnnnnnnnnnnnnnnnnnnnnnnnnnggaaactcctggagggcagaggcatgcctgctatcttcatcattgcattaccaccacccaacactatcgggggacctgccctgataatcagtctacaggtgtatccagcagctccagagagacagcgaccagcgagaaggggccatgatgatggaggtggttttgtcaaaacgaaaatggggatatgtagggaaaagaaagagagatcagactcttacagactcttactgtgtctacataggaaagggaagacataagagactccatttgggaaaaagacctgtactttaaacaattgctttgctgagatgttgttaaatctgtagctttgccccagccactttgccccaaccactttgacccagtctgggagctcacaaaaacatgtgttgtatgaaatcaaggtttaaggcatgtagggctgtgcaggaccgtgccttgttaaccaaatgtttggcaagcagtattacttgggtaaaagtcatcaccctttctcttgtctcattaaaccggggggcacattgcactgtgggaaagccgcagggaccttctggcccttgaaagctggggtattatttcaaagttttccccccatgtggatagttctggaaatatgggccttcgtgggggatggaggaaagggcctggacgggttcccccttaggccccggaccaccccttaaaaaggtt

SEQ ID NO: 21414 - DNA, 2541 bp, Homo sapiens
  SIMILAR (440)..(1030): 561254mologous to Homo sapiens cytochrome c-like polypeptide,accession number S80864,Smith-Waterman Score=445.
  misc_feature (1)...(2541): n = a,t,c or g
cctggcgagactgagcttattggactgcttcactaaggtgtgtttttgtttgataacttattcccagtgcctgtgttgaccaggaggctttgggaataaaggtacataaaggtcttggagcctggatgagcctgtggtcaagagatggcaggcagtgtccttgaatttggaatgtgactcacactctgcctgtaggggaagaaaagnnnnnnnnnnnnnnnnnnnnnnnnnnnnnnnnnnggaagacagaatagactgcgttttgaaaaagacctgcactttaaacaattgctttgctgagatgttgttaatttgtagctttgccccagccactttgccccagccactttgacccaacctggagctcacaaaaacatgtgttgtatgaaatcaaggtttaaggaatctagggctgtgcaggacgtgccttgttaacaaaatgtttacaagtagtatacttggtaaaagtcatcgccattctctagtctcaataaaccaggggaacaatgcactgtggaaagccgcagggacctctgcccttgaaagcgggatattgtccaaggtttctccccatgtcatagcctgaaatatgggctcctgggatgagaaagacctgaccgtcccccagcctgacacccttaaagggtctgtgctgaggtggattagtaaaagaggaaagcctcttgcagttgagatagaggaagggcactgtctcctgtctgcccctgggaactgaatgtctcggtataaaaccccgattgtacatttgttcaattctgagataggagaaaaaccggccctatggtgggaggtgagacatgttttgcagcaatggctgccttggttaattcctttaactcccactgagatgtttggggtggagagaaacataaatctgggcttacgtgcacatcccagtcatagtacctccccttgaacttaattatgacatagattcttttgctcacatgtttttttgttgacctttccccttattatcaccctgctctcctgctacattcctttttgctgaaataatgaaaataataatcaataaaaactgagggaactcagaggccggtgccagtgcaggtccttggtgtgctgtgtgtcggtgcccctgggcccaactatcgtttctctatactttgtctctgtgtcttatttcttttctcagtctctcgtcccacctgaattccatcatcagtgattctataacattcagatacagaaagttccttcaattttttatgtctggaaagcacattcaaaccctgaaagtagaccaacttgccttgagactgtttgcctcctacttgatggaggtagagaggagagtcatgctgccaaagatccatcttgagggaagtgacaggctcaagttggtcgcttctgtttgcagtgtttttagtaggcactttgctagaaacaggagacaatggaccataacctctgtgagaaggaaccactatcactagcttgatgggaccaacatagtcatgtaaggccactggctggagagaagggccatgttgatcttgctttataaatggctggatgtctgtttggcccatcagttccctgtcttccattgggatcttcatttctaattccaattgagaaccaccagatccttctaagaagcatttcagcaaataaagcaggacaggagtttccaccattgcaatcctaagaggcagtttcacaacagctcttacacaatttgccaaattcaacacagtcagttgcttcaaaggtgaaagggatctgaggctgctgtctgttattcccttgcagtcagccatataaatgtgactgagatttggataattcttgtctataaatttgaaggatgcatcagtaacccttttatttccttcaaatcggatctttctgagtttacaagcagaaagagctctgaaagtacaatcggagatatgcggtgcaccagtgaaaaccagcgatgtaatacgagagcatttttcaactaaagcttttacacagttgtccgtcagagttggcatgtcattaatggtaagatgcataattccagtgcagctgtttgcaatgtacctgaagccttggactgaaattaattcttctgtttgatcagttctgctattaaaggactctgatgcattcttcaatataccaattgcatttttcagctccagaatttgtttctttttaattatttcaatctctttgttaaatttatctgatagaattctgaatttcttctctgtgttatcttgaattaatttgaatttcctcaacatagctattttgaattctctgtctgaaagattacatatctctgtttctccaggattgccccttggtgccttatttagttcatttggtaaggtcatgttttcctggatggtattgatgccagtattcttcggtgtctgggtgcagccagagaggtccagatagatgagcttgtggcatccattccccaagttcaggtactgtaagcctttgtctgtgaaccgtctgcaataagccaaactaagattctgtaagttgtggaagtgc

SEQ ID NO: 21415 - DNA, 385 bp, Homo sapiens
  SIMILAR (186)..(136): 581254mologous to Arabidopsis thaliana F24O1.6,accession number AC003113,Smith-Waterman Score=56.
ccacaaaagccagggagggttggaacaggctctggaacaaacgaggtccctgtcccacatctccaccgggcttcaacatgacagtccccagccccattcccgtcaaatccattcgtgacgatctctgcccagggctggccatgctggaggaggccttggcggtgagctgtgttcaaattagccgggtaaggggcacagaatttcactgtaattggacgtgtttgttccaaggatgacgactacagcacatttctcatgttaatgtcatccaactacccatgtactgcaattactctgcatcgattttaaagccgacctagcacaatagcggcttctaatttgtaagcaaaaccgcagtggcataaatcaaactgatagaggcaac

SEQ ID NO: 21416 - DNA, 589 bp, Homo sapiens
  SIMILAR (5)..(94): 361254mologous to Hordeum vulgare C-hordein storage protein,accession number M35611,Smith-Waterman Score=50.
atgacagtccccagccccattcccgtcaaatccattcgtgacgatctctgcccagggctggccatgctggaggaggccttggcgccaatggcccgggtgcagcagaatcgacgaagcttcacctctgcctgctccaaagaagcatctcggccaatatttgtgagctatgctgtgccgcagactatgcaggcaccgctggagagtcaggaaggtgacggtcctacttttatcttttactccatctctgccaaggccctcaggaaggcagccaggcccgctcctaccgccatcacccctggcccacccaggcttgcctgagaaggccaggtgagaagtcctggccatcatagccccaaccagatccctagctagtgtggccactgcaggccccaaaggtctcctcctggcggtccttttgagagctcagtaagaggtttcaaatctagcttaaacatgcagtctcaagggagcatcctaaaagcagagaacacgcctcctcctctttcctccctgacctcagctgcgatctcaaagcactcagagctgtgagctcactccccatctgtcctttgctccccccacgcgtccg

SEQ ID NO: 21417 - DNA, 1381 bp, Homo sapiens
  SIMILAR (870)..(1082): 781254mologous to Homo sapiens Human cathepsin (LCAP),accession number W94300,Smith-Waterman Score=284.
cggacgtctgtaatctcagaggcttgtttgctgagggtgcctgcgcagctgcgacggctgctggttttgaaacatgaatctttcgctcgtcctggctgccttttgcttgggaatagcctccgctgttccaaaatttgaccaaaatttggatacaaagtggtaccagtggaaggcaacacacagaagattatatggcgcgaatgaagaaggatggaggagagcagtgtgggaaaagaatatgaaaatgattgaactgcacaatgggggaaatacagccaagggaaacattggcttcacaatggccatgaatgcttttggtgacatgaccaatgaagaattcaggcagatgatgggttgctttcgaaaccagaaattcaggaaggggaaagtgttccgtgagcctctgtttcttgatcttcccaaatctgtggattggagaaagaaaggctacgtgacgccagtgaagaatcagaaacagtgtggttcttgttgggcttttagtgcgactggtgctcttgaaggacagatgttccggaaaactgggaaacttgtctcactgagcgagcagaatctggtggactgttcgcgtcctcaaggcaatcagggctgcaatggtggcttcatggctagggccttccagtatgtcaaggagaacggaggcctggactctgaggaatcctatccatatgtagcagtggatgaaatctgtaagtacagacctgagaattctgttgctaatgacactggcttcacagtggtcgcacctggaaaggagaaggccctgatgaaagcagtcgcaactgtggggcccatctccgttgctatggatgcaggccattcgtccttccagttctacaaatcaggcattttatttttaaccagactgcatcagcaaaaacctggatcagggtgttctggtggttggctacgtctttgaaggagcaaattcgaataacagcaagtattggctcgtcaaaaacagctggggtccaggaatggggctcgaaatggctatgtaaaaatagccaaagaccaagaacaaccactgtggaatcgccacagcagccagctaccccaatgtgtgagctgatggatggtgaggaggaaggacttaaggacagcatgtctggggaaatttttatcttgaaactgaccaaacgcttattgtgtaagataaaccagttgaatcattgaggatccaagttgagattttaattctgtgacatttttacaagggtagaaatgttaccactactttaattattgttatacgcagctttatgatatcaaagactcattggttaattctaagacttttgaattttcattttttaaaaagatgtacaaaacagtttgaaataaattttaattcgtatataaa

SEQ ID NO: 21418 - DNA, 412 bp, Homo sapiens
  SIMILAR (196)..(2): 1001254mologous to Homo sapiens dJ473B4.1 (novel protein similar to predicted human and worm genes),accession number Z83826,Smith-Waterman Score=345.
cagcatcaacgacaacatacttatttggagtagtacacaaaactttgaactttaaggcaaactcatagggattgtacagtgtcaacacttgcttatgtgttgactgatcatctgcataaaatatgagctccgtggggaacacgaaaacaggaagatttccttccactaactctggttgtcttttttgttgatgcattggcactgaatcccccttgctgcagtttctgtttttacagtctcaaatctattttggacttttcttagattcagttaaaaactccaaagcattttggcaatctcggcaacaccggcttcctcggaaagcagctgcgactgctcctccgctccttagtcagcgtctctaggctgcactgcctgctgggataccggaggactcaaatgccaccactcg

SEQ ID NO: 21419 - DNA, 756 bp, Homo sapiens; identical to SEQ ID NO: 3067
  SIMILAR (73)..(144): 911254mologous to Homo sapiens calbindin D28K,accession number S46006,Smith-Waterman Score=122.

SEQ ID NO: 21420 - DNA, 464 bp, Homo sapiens
  SIMILAR (211)..(420): 641254mologous to Homo sapiens calbindin D28K,accession number S46006,Smith-Waterman Score=213.
atggccccaactaactgcaagggctctaggaaatgtggcagaccacatgaacagatgccccacccttatctccctttgctgactctcttttcggactcagcccgcctgcacccaggtgaaataaacagccgtgttcctcacacaaagcctgtttggtggtctcttcacacggacgcgtatgaaatttggtaccatgactcggattggggggacctcccttgggagatcaatcccctgtcctcctgctctttgctccatgagaaagatccacctacgacctcaggtcctcagaccaaccagcccaagaaacatctcaccaatttcaaatccagaaaagtagaacggactaaaggtcttttaaaaacacacctcaccaagctcagccaccaacttaaaaaggcctggacaatacttttaccactttcccttctcagaattcaggcctgtcctcggaatgctacaag

SEQ ID NO: 21421 - DNA, 756 bp, Homo sapiens; identical to SEQ ID NO: 3068
  SIMILAR (67)..(186): 971254mologous to Homo sapiens calbindin D28K,accession number S46006,Smith-Waterman Score=213.

SEQ ID NO: 21422 - DNA, 1332 bp, Homo sapiens
  SIMILAR (1054)..(1001): 771254mologous to Homo sapiens Human secreted protein, SEQ ID NO: 7340,accession number G03259,Smith-Waterman Score=81.
ttaattgataggtcgattccgcacaatcccctgcccttgagacgtttcgcgatcggtttcgggggtatcttcgatccgcagatccttggcggcatgaaaacgcaacgctttcatcagggctctccttcgtgtgagttgatcacgagggttggcaagctcgcgtgccaatcgctgcgattttggatctcgcatgcgcacaagcatgttgctgctgagcgaggctatagcaagacagcttcgtcgtccccggtacaagactgaagtgcggtcataacccgaatacaggatgagtagtatgccccaacggcactcattccggatcgcgccccgttccggccgggacgcatcgatcgtctgacctgatgctgatatactcgcataactatggccagttgcttcatggtcaatatcattgctccggcattggccgatcggcaccgccacgggtgccgtatcgacaatggcgttacccgcggcgtcgtcacggtgccgacgagttgggtgatgggatggctttcggccaagggcatctatgcagtcggtctggataccgactgggaatttccgatcgtgggctgcatctatttcttcctcgccttcttttcgttcgccggcgagaactgggtcgtcgccgggcatgccgccgcagcgccaattcttcctcctgctgaccctcatcgccttcctgaccgtgtcaggcctatctaaaagttgtaccataactatagactccatgggctttctttgctcttctatgagagagacatcagggatgccttcgcacagagaaaaagccatgtggagacgcagcaagaagacagccacctgctcgaggtcatagaacgtatatagaactttcatttcttccttcatttctgtgcttttctctgaagtaattttcctcctgctttcatgggtgttaatcgtctgaaaattgtatgatactaatttatagcattttgatcctgtagatttatcaggatctatcaaggggcatgttgtaatctgcacccaggtgaaataaacagccatgttgctcacacaaagcctgtttggtggtctcttcacacggacacgcatgaaaattgccatctcaatacagctgttttcttctaccactggctcgctcttgaattctttcttaacccactgaggaggtgtcctgctgacactccctcccaggtcagtttcctgtgtctctctgtctgagggtgttgtctgtggactgtgctcatccatggggcaaaccagaagcacccgggagttaacaccctggaccatggcaattttcctcacttcccagtcccctctggccactgtaccagcatccat

SEQ ID NO: 21423 - DNA, 635 bp, Homo sapiens
  SIMILAR (64)..(102): 611254mologous to Homo sapiens calbindin D28K,accession number S46006,Smith-Waterman Score=38.
gtgaaataaacagctttattgctcacacaaagcctgtttggtggtctcttcacacggacgcgcatgaaatttggtgccatgactcggatcgggggacctcccttgggagatcaatcccctgtcctcctgctctttgctctgtgagaaacatccgcctacgacctcaggtcctcagaccgaccagcccaagaaacatctcaccaatttcaaatccgagacaaaagagacatgttttatccatgaacccaaaactctggcgccggtcacggactgggaaggcagccttcccttggtgtttaatcattgcagggacggcctctctgatcattcagccacatttcaagggtgtcagaccatgcagggatgcctgccttggtccttcacccttagcggcaagtcccgctttcctggggcaggggcaagtacccctcaaccccttctccttcacccttagcggcaagtcccgctttcctggggcaggggcaacggcaagtcccgctttcctggggcaggggcaagtacccctcaaccctttctccttcaccctcagcggcaagtcccgctttcctggggcaggggcatgtacccctcaaccccttctccttcaccctcagcggcaagtcccgctttcctag

SEQ ID NO: 21424 - DNA, 1392 bp, Homo sapiens
  SIMILAR (787)..(945): 831254mologous to Homo sapiens Human secreted protein, SEQ ID NO: 5210,accession number G01129,Smith-Waterman Score=233.
atgggttgggttgctcgctggggcaaccggctaggctggaggaagggcgaggacggtgtcaccccaaacggggagtcaacttccctcccccagccgtcctcggtgcatccaccgaagagttgtcccgcgagccgcatccccggggcaaccgaactccgtcgggcaggcaccgagaggctcccgagcctgcctttgcccgggcaggagcgagctacacaccagctggccagaccctggggccgggcgccgcgggcggcggagccaccgccagtcacacacgggacaggaaaggatcccctccgtctcctccccgccgcccacccgcatcccggcgccgcggagccccgctgtcaatcacagagccaagctccggctgtgcggatgggtcattctttggcggggggctctcagccacgtaacttccacattttcccgaagtcagaggaagtgggtgacgggacggtgggggactctcacctcggcaacaccggcttcctcggaaagcagctgcgactgctcctccgctcctttgtcagcgtctctaggctgcactgcctgctgggataccggaggactcaaatgccacctctctccgccctagaggatgagccgcggctcgggggtgggaggcgagaggaagaagagctctctgtccatttctgtgactggctgctggatttgatccagcagcacagaaaccagcaacccagtgaagcccgcctgcacccaggtgaaataaacagccatgttgctcaaacaaagcctgtttggttgtctgttcacacggacgcgcatgaaatttggtgctgtgactcggatcgggggacctcccttaggagaccaatcccctgtcctcctgctctttgctccgtgacaaagatccacctacgacctcaagtcctcagacccaccagcccaagaaacatctcaccaatttcaaatccggctgctcctcaccaggccgagctaggtcccaatccttcctcagcctctgctcctccaccctataatctttttatcacctcccctcctcacacctggtctggcttaccgtttcgttccgtgactagccctccccctcctgcccagcaatttactcttaaaaaggtggctggagctaaaggcacagtcaagaccatcacggacatcgagcttcaggtaactctcacagtggaagcccgcctgcgcccaggtgaaataaacagccatgttgctcacacaaagcctgtttggtggtctcttcacacggacgcgcatgaaaatactgttactttccagaacaatcttaaggacaacacaggagcccttacatttccactgggatcctgcttatattgtaacaaggaggtgctggatatagctacgctcccatctccctacggcaaccactga

SEQ ID NO: 21425 - DNA, 1619 bp, Homo sapiens
  SIMILAR (1107)..(1616): 791254mologous to Homo sapiens NAG13,accession number AF194537,Smith-Waterman Score=664.
gaccattcccgccagcatcaggttggtgtccctttgggacagagcttccagaagaaggagcaggcagccatctttgatattctgctgcctccactggtgacatcgtcagcccgcctacacccaggtgaaataaacagccatgttgctcacacaaagcctgtttggtggtctcttcacacggacacgcatgaaatttggtgctgtgattcggatcgggggacctcctttgggagatcaatcccctgtcctcctgttctttgctccatgagaaagatccacctacgacctcaggtcctcagaccgaccagcccaagaaacatctcaccaatttcaaatccagctgctcctcgccaggctgagctaggtcccaattcttcctcagcctctgctcctccaccctataatccttttatcacctcccctccctcacacctggtccggcttacagtttcgttccgtgacttagccctcccccacctgcccagcaatttactcttaaaaaggtggctggagctaaaggcatagtcaagaccgtcacggacgccgagcttcgggtaactctcacagtggaagcacgctttaaaaagattaaagcctgttatcacttgcctgctacagcatggctttttaaagcctataaactctccttacaattccctcattttacctgtcctaaaaccagacaagccttacaagttagttcaggatctgcgccttatcaaccaaattgttttgcctatccaccccatggtgagccaggcgtgaagcagcaaagagtgtgtgagcaagtggacgtggggaccagccatagcacacagccaggagcaccagcacaggcgcgagcaatgtgggaggctgtggctggaccaggtgtgcctcaagtggcttccgccttgggcgccagcatctggatgaggggcagactgacacctcacacggccagatactcctctgagacaaaacttccagaggaacgatcaggcagcaacattggctgttcagcaatactcgctgttctgcagcctctgcagctgatacccaggcaaacagggtctggagtggacctccggcaaactccaacaaacctgcagctgagggtcatgactgttagaaggaaaactaacaaacagaaaggacatccacaccaaaaccccatctgtacgtcaccatcatcaaagaccaaagaaatacaaactaccatcagagaatactataaacacctctatgcaaataaactagaaaatctaggagaaatggataaattcctcgacacatacaccctcccaagactaaaccaggaagaagttgaatctctgaatagaccaataacaggctctgaaattgaggcaataattaatagcttaccaaccaaaaaaagtccaggaccagacagattcacagccgaattctaccagaggtacaaggaggagctggtaccattccttctgaaactattccaatcaatacaaaaagagggaatcctctctaactcattttatgaggccagcatcaacctgataccaaagcctggcagagacacagcaaaaaaagagaattgtagaccaatatccccgatgaacatcaatgcaaaaatcctcaataaaatactggcaaactga

SEQ ID NO: 21426 - DNA, 2075 bp, Homo sapiens
  SIMILAR (407)..(571): 761254mologous to Homo sapiens calbindin D28K,accession number S46006,Smith-Waterman Score=207.
actgaagatccaacacaagaagtaaaaatagccttaactgatgacattccaccattgtgatttgttttgccccaccctaactcttcaatgtacttttgtaatctcccccacccttaagaaggtactttgtaatctccccaacccttaagaaggttctttgtaattctccccacccttgagaatgtactttgtgagatccacccgctgccagcaaaacattgctcctaacttcaatgcctatcccaaaacctaaaagaactaatgataatcccaccaccctttgctgactccttttttggactcagcccgcctgcacccaggtgaaataaacggccttgttgctcacacaaagcctgtttggtggtctcttcacacggacgcgtatgcatgaaatttggtgccgcgcatgaaatttggtgccgtgactcggatcgggggagacctcccttgggagaatcaatcccctgtactcctgtgttctttgctccgtgagaaagatccacctacgacctcaggtcctcagaccgaccagcccaaggaacatctcaccaattttaaatcagacaaaggagacatgttttatccgtggacccaaaactccagtgccggtcacggactgggaaggcagccttcccttggtgtttaataactgcagggacacctctctgattatacacccacgtttcaagggtgtcagaccacgcagggatgcctgccttggtccttcacccttagcggcaagtcccgcttttctggggaaggggcaagctgctcctcgccaggccgagctaggtcccaattcttcctcagcctctgctcctccaccctataatctttttatcacctcccctcctcacacctggtccggcttacagtttcgttctgtgactagccctcccccacctgcccagcaatttactcttaaaaaggtggctggagccaaaggcatagtcaagcggctgaagactgacactgcccgatcgccttggaagacccctagaccatcacggacgccgagcttcagaaaagcagaacggactaaaggtcttttaaaaatacacctcaccaagctcagccaccaacttaaaaaggactggacaatacttttaccactttcccttctcagaattcaggcctgtcctcggaatgctacaagactggctactggccaattgggatatccttttatcagtcaaagctatgtcctggtcaatggatttcaaactgttgaggatctatgtgaagctgcagaccttcgagtgagtgttgcagaccttcgagtgagtgttacagctcttaaggtggcgcgtctggagttgttcgttcctcccggtgggctcgtggtctcgctggcttcagcagtgaagctgcagaccttcgcggtgttacagctcataaaagcaaaaagatgggactggggcaccttggagcagggggcggcgctcatcggggaggctcgggacgcacaggagcccacggagggggtgggaggctcaggcatggcgggctgcaggtccagagacctgccccgcgggaaggcagctaaggcccggcgagaaatcgagcgcagcgccgggctgacgatcaagaaggaaagatgcatacgaaatggatacagcaaagaaaaaatgaaactcatagttgtttctcatggcctccatgtaaatgacttgcagcataaactgacgcttttcaccaaggaaacatacacatacctagccagggattcagagaagcagaagcaggggtatctagcaggacttgaaggagcccatgccaacagggtgaaccagcagatcagtgacaacttagccatagtctttggacaaaagattcaaggccatctctccactactggacagctgcttatggcaggtcaagaaggaaagctgggccagcttcttttcctgggaatttcgggttggacaattcaactgaatgatgtttattgtctacagacacaatcaacaattgtccacataagatcagaagcagggaattccaatccacgagaatggctgccgcttttacaaggaatcagcagtaaagatgaaacacagccctttatgccttag

SEQ ID NO: 21427 - DNA, 1901 bp, Homo sapiens
  SIMILAR (514)..(711): 681254mologous to Homo sapiens putative p150,accession number U93563,Smith-Waterman Score=241.
atgcaaaatgctctggaaagtctcagcaatagaattgaacaagtagaagaaagaaattcagagcttgaagacaagttcttcgaattaacccaatccaacaaagacaaagaaaaaagaataagaaaatataaacaaagcctcaaagaagtatgggattatgttaaaggaccaaacctaagaataatcagtgttcctgaggaagaagagaattctaaaagcttggaaaacatatttggggaaataatcgaggaaaacttgcccagccttgctagacacctagacaaccaaatacaagaagcacaaagaacactttggaaattaattgcaaaaagatcattgcctaggcacattgtcatcaggttatccaaagttaagacgaaggaaagaatcttaagagctgtgagacagaagcaccaggtgactcacctaacatgtaaggagtcatataaacttaaagtaaaagggtggaaaaggcattttatgcaaatggacaccaaaaatgagcagggaattaaaaatgaaaatcacttgatcatctcaatagatgtagaaaaagcatctgacaaaatccagcaacgctttatgattaaaactctgagcaaaattggcatacaagggaaataccttaatgtaataaaagccatctatgacaaacccacagcaaacataacactgaatagggaaaagttgaaagcattccctctgagaagctgaaagcattccctctgagaactggaacaagacaaggatgcccactctcaccactcttcttcaacacagtactggaagtcctagccagagcaatcagacaagagaaagagataaaaggaatccaaattggtaaagaggaagtcaaactgtcactgtttgctgatgatatgattatgtaccttgaaaaccctaaagactcctccagaaagctcctagaatggataaaagaatccaacaaagtttctggatacaagactcatgtacacaaatcagtagccctgctgtataccaaacagtgaccaagctgagaatcaaatcaagaaccgaaacccttttgcaatagctgcaaaaaaaaaaaagaagaagaagaagaagaagaaaagaaactcaagaatatacctaaccaaggagtcaaaagacctctacaaagaaaactacaaaacactgctgaaagaaatcatagacaacatgaacaaatggaaacacatcccatgctcatggatgggtagaatcagcatcgtgaaaaaattgtagactgcaaaaagcgatctacaaattaaatgcaattctcatcaaaataccaccattattgttcacagaactagagaaaacaatcctaaaattcatatggaaatcaaacaagagcctgcatagccaaagtaatactaagcaaaaagaacaaatctggaggcatcacactacctgatttcaaactatactatactataagaaaaatcaactcaaaatggattaaggacttaaacctaagacctgaaactatacaaattctggaagataacattggaaaaacccttctggaaattggcttagggaaggatttcatgaccaagaacccaaaagcaaatgcaaaaaaaaaaacaaagataaatcgctgggacctaattaaactaaaaagcttttgcacagcaaaaggaacagtcagcagagtaaagagaacccacagagtaggagaaaatcttccccactatacatctatacatccaacaatctatacaatctatacatccgacaaaggactaatatccagaatctataatgaattcaaacaaatcgtaacacgaacaacctgcgttttcctacatccgccccaccctaaggcaaagacaacctcctacggggaccagcttcttggtgggaataggatgtttccacctcccattgtatattga

SEQ ID NO: 21428 - DNA, 484 bp, Homo sapiens
  SIMILAR (415)..(320): 901254mologous to Homo sapiens Human serine protease 67 (SP67),accession number W22987,Smith-Waterman Score=162.
  misc_feature (1)...(484): n = a,t,c or g
aggcaagatatgcacaaacgcgcctcgggcccagcttggggctggcgggggaaggctntgtcttcaaaacctttgcccccagttgggtcagtagaaccaccagtgtcctccccttctacctcccaagctccactttggaaggctgangaagcgagaaggttttctanggcagatttggagccctggagattgagttcacagtgtatgttctgggggcgctggtgcagtcagcggtccagtctccagnctgcaggcgtgcacactggggtggacnatgggtggccccgcangtgtacacatttgggtgccccggcccctataccccagtgttctctttgatccagtcccgaaacagagggagccttgtgtacacgcctggcttgttcctctgagngcagccgtctcccgcagtcacgcacatcatgcgcggcgtanttctgctgcggcaggaggttcntcgccgccgctgaggaagcccnacnac

SEQ ID NO: 21429 - DNA, 1458 bp, Homo sapiens
  SIMILAR (790)..(1341): 971254mologous to Homo sapiens prostamin,accession number AB030036,Smith-Waterman Score=907.
atggaccgttttggtcaagtgttcaggaaacgcttgtgggactttaggtgtctgccagcctctccaagacacaacaacttctcttttaaaagagacatgagccaccagccttggcagaaccacagaccagagaaggagcagacatcagggaacttgagggccacagtgttccgagggacagaagccactggccacagcagtaggcagtctggtagtctggttcccagggagcagagtgagggtcagaaccatttcccaactgggggcagccattgtgaggcttcccaccaggtgcctcggcctgtgtctccaaaaacacggatgctgtcccacactgagaaatggcggcattgctttgtgctgcgagctgacctggagaaaccggcagagtacagctccatggtgcggcccatctgctgccggacgcctcccatgtcttccctgccgcaaggccatctgggtcacgggctgggacacacccagtatggaggcactggcgcgctgatcctgcaaaagggtgagatccgcgtcatcaaccagaccacctgcgagaacctcctgccgcagcagatcacgccgcgcatgatgtgcgtgggcttcctcagcggcggcgtggactcctgccaggtgcccccggggcaggagggcggcagacagttccctctcaaagaaaccaacaacagaaaagggaggttgcctaagcgtttaaggccacacacttggtgttgctacagcttagaatgcagcagctattctctacggtgcacagaggacacctggactgaagatcagaaagtgaatggcttggaggaaggcgtggagttcctgccagtcaacaacgtcaagaaggtggaaaagcatggcccggggcgctgggtggtgctggcagccgtgctgatcggcctcctcttggtcttgctggggatcggcttcctggtgtggcatttgcagtaccgggacgtgcgtgtccagaaggtcttcaatggctacatgaggatcacaaatgagaattttgtggatgcctacgagaactccaactccactgagtttgtaagcctggccagcaaggtgaaggacgcgctgaagctgctgtacagcggagtcccattcctgggcccctaccacaaggagtcggctgtgacggccttcagcgagggcagcgtcatcgcctactactggtctgagttcagcatcccgcagcacctggtggaggaggccgagcgcgtcatggccgaggagcgcgtagtcatgctgccccgcggcgcgcccctgaagtcctttgtggtcacctcagtggtggctttccccacggactccaaaacagtacagaggacccaggacacccctaccccgctcatgcccgctgccagtgctgcgggggacgccgactcagtgctgagcctcaccttccgcagctttgaccttgcgtcctgcgacgagccggcagcgacctggtga

SEQ ID NO: 21430 - DNA, 387 bp, Homo sapiens
  SIMILAR (1)..(387): 901254mologous to Homo sapiens prostamin,accession number AB030036,Smith-Waterman Score=630.
  misc_feature (1)...(387): n = a,t,c or g
ccggcagagtacagctccatggtgcggcccatctgcctgccggacgcctcccatgtcttccctgccggcaaggccatctgggtcacgggctggggacacacccagtatggaggcactggcgcgctgatcctgcaaaagggtgagatccgcgtcatcaaccagaccacctgcgagaacctcctgccgcagcagatcacgccgcgcatgatgtgcgtgggcttcctcagcggcggcgtggacnnnnnnnnnnnnnnnnnnnnnnnnnnnnngtccagcgtggaggcggatgggcggatcttccangccggtgtggtgagctggggagacggctgcgctcagaggaacaagccaggcgtgtacacaaggctccctctgtttcaggactgg

SEQ ID NO: 21431 - DNA, 604 bp, Homo sapiens
  SIMILAR (375)..(602): 971254mologous to Homo sapiens Human peptidase, HPEP-1 protein sequence,accession number Y90284,Smith-Waterman Score=393.
agggcagcgtcatcgcctactactggtctgagttcagcatcccgcagcacctggtggaggaggccgagcgcgtcatggccgaggagcgcgtattcatgctgcccccgcgggcgcgctccctgaagtcctttgtggtcacctcagtggtggctttccgtgagtccgagggccaggggtgggcgtgggactggccacccttccatggagtggggctgggccctggaccattgcaggggaccggcactcccagggcccagtgccccagagagaagactacgtgctggccgggcacctccctttagataataaggaagcaggaataaggaaatggattgtatcaggaaatgctttattctccttcttattcttcagccacggactccaaaacagtacagaggacccaggacaacagctgcagctttggcctgcacgcccgcggtgtggagctgatgcgcttcaccacgcccggcttccctgacagcccctaccccgctcatgcccgctgccagtgggccctgcggggggacgccgactcagtgctgagcctcaccttccgcagctttgaccttgcgtcctgcgacgaagcgcggagcgacctggtgac

SEQ ID NO: 21432 - DNA, 2086 bp, Homo sapiens
  SIMILAR (1622)..(2083): 951254mologous to Homo sapiens serine protease TADG15,accession number AF057145,Smith-Waterman Score=759.
gctcagtagatgaaggcgtttctgagggcttgcctacacttcaaagcacgtctagcactaatgctcctccggatgatgatgatcgattggaaaatgttcagtatccctaccaactctacattgctccttccaccagcagtacagagcgaccaagtccaaatggtcccgacagaccttttcagtgtccaacctgcggggtgcgattcacccgtattcagaacctaaagcagcacatgctcatccactcaggaattaaaccatttcagtgtgaccgctgtgggaaaaagttcaccagggcttactcgctaaagatgcatcgcctaaagcatgaaggtaaacgctgtttccggtgccagatatgtagtgccactttcacttccttcggggaatataaacaccacatgagggtttcccggcacattatccgcaagcctcggatttacgagtgcaaaacatgtggcgccatgttcaccaactctggaaatttaatcgtgcacctgaggagtctgaaccatgaagcatcagagctagcaaactacttccagagcaggtactcagaccccacgcagtggacggccttcctgggcttgcacgaccagagccagcgcagcgcccctggggtgcaggagcgcaggctcaagcgcatcatctcccaccccttcttcaatgacttcaccttcgactatgacatcgcgctgctggagctggagaaaccggcagagtacagctccatggtgcggcccatctgcctgccaggacgcctcccatgtcttccctgccggcaaggccatctgggtcacgggctggggacacacccagtatggaggcactggcgcgctgatcctgcaaaagggtgagatccgcgtcatcaaccagaccacctgcgagaacctcctgccgcagcagattcaccgccgcgcattgatgtgcgtgggcttcctcagcggcggcgtggactcctgccaggtggcccccggggcaaggagggcggcagggtgattccgggggacccctgtccagcgtggaggcggatgggcggatcttccaggccggtgtggtgagctggggagacggctgcgctcagaggaacaagccaggcgtgtacacaaggctccctctgtttcgggactggatcaaagagaacactgggaaagtgaatggcttggaggaaggcgtggagttcctgccagtcaacaacgtcaagaaggtggaaaagcatggcccggggcgctgggtggtgctggcagccgtgctgatcggcctcctcttggtcttgctggggatcggcttcctggtgtggcatttgcagtaccgggacgtgcgtgtccagaaggtcttcaatggctacatgaggatcacaaatgagaattttgtggatgcctacgagaactccaactccactgagtttgtaagcctggccagcaaggtgaaggacgcgctgctgtacagcggagtcccattcctgggcccctaccacaaggagtcggctgtgacagccttcatgtgggtgtggagagaaggctcagtgggatgcaccccagactggctgggagtaggatcggggtacagtgtgtggggcacgaaacgagagatggtgctggaggtcctggactggagagccaaggagggtcctcgctgtgtcctcctcgagggcagcgtcatcgcctactactggtctgagttcagcatcccgcagcacctggtggaggaggccgagcgcgtcatggccgaggagcgcgtagtcatgctgcccccgcgggcgcgctccctgaagtcctttgtggtcacctcagtggtggctttccccacggactccaaaacagtacagaggacccaggacaacagctgcagctttggcctgcacgcccgcggtgtggagctgatgcgcttcaccacgcccggcttccctgacagcccctaccccgctcatgcccgctgccagtgggccctgcggggggacgccgactcagtgctgagcctcaccttccgcagctttgaccttgcgtcctgcgacgagcgcggcagcgacctggtgacggtgtacaacaccctgagccccatggagccccacgccctggtgcagtga

SEQ ID NO: 21433 - DNA, 3413 bp, Homo sapiens
  SIMILAR (1817)..(2818): 561254mologous to Homo sapiens membrane-type serine protease 1,accession number AF133086,Smith-Waterman Score=842.
  misc_feature (1)...(3413): n = a,t,c or g
gcactggcgcgctgatcctgcaaaagggtgagatccgcgtcatcaaccagaccacctgcgagaacctcctgccgcagcagatcacgccgcgcatgatgtgcgtgggcttcctcagcggcggcgtggactcctgccaggtgcccccggggcaggagggcggcagacagttccctctcaaagaaaccaacaacagaaaagggaggttgcctaagcgtttaaggccacacacttggtgttgctacagcttagaatgcagcagctattctctacggtgcacagaggacacctggactgaagatcagaaagtgaatggcttggaggaaggcgtggagttcctgccagtcaacaacgtcaagaaggtggaaaagcatggcccggggcgctgggtggtgctggcagccgtgctgatcggcctcctcttggtcttgctggggatcggcttcctggtgtggcatttgcagtaccgggacgtgcgtgtccagaaggtcttcaatggctacatgaggatcacaaatgagaattttgtggatgcctacgagaactccaactccactgagtttgtaagcctggccagcaaggtgaaggacgcgctgaagctgctgtacagcggagtcccattcctgggcccctaccacaaggagtcggctgtgacggccttcagcgagggcagcgtcatcgcctactactggtctgagttcagcatcccgcagcacctggtggaggaggccgagcgcgtcatggccgaggagcgcgtagtcatgctgcccccgcgggcgcgctccctgaagtcctttgtggtcacctcagtggtggctttccccacggactccaaaacagtacagaggacccaggacaacagttgcagctttggcctgcacgcccgcggtgtggagctgatgcgcttcaccacgcccgggttccctgacaggccctaccccgctcatgcccgctgccagagggccctgcggggggacgccgactcagtgctgagcctcaccttccgcagctttgaccttgcgtcctgcgacgagcgcggcagacacctggttgacggtgtacaacacccatgagccccatggagccccacgcccctggtgcagttgtgtggcacctaccctccctcctacaacctgaccttccactccctcccacgaacgtcctgctcatcacactgataaccaacactgagcggcggcatcccgggctttgaggccaccttcttccagctgcctaggatgagcagctgtggaggccgcttacgtaaagcccaggggacattcaacagcccctactacccaggccactacccaccccaacattgaacttncacatggaacattgaggtgcccaacaaccagcatgtgaaggtgcgcttcaaattcttctacctgctggagcccggcgtgcctgcgggcacgtgccccaaggactacgtggagatcaatggggagaaatactgcggagagaggtcccagttcgtcgtcaccagcaacagcaacaagatcacagttcgcttccactcagatcagtcctacaccgacaccggcttcttagctgaatacctctcctacgactccagtgacccatgcccggggcagttcacgtgcccgcacggggcggttgtaatccggaaggagctgcgctgtgaatggctgggccgactgcaccgaccacagcgatgagctcaactgcagttgcgacgccggccaccagttcacgtgcaagaacaagttctgcaagcccctcttctgggtctgcgacagtgtgaacgagtgcggagacaacagcgacgagcagggttgcatttgtccggacccagaccttcaggtgttccaatgggaagtgcctctcgaaaagccagcagtgcaatgggaaggacgactgtggggacgggtccgacgaggcctcctgccccaaggtgaacgtcgtcacttgtaccaaacacacctaccgctgcctcaatgggctctgcttgagcaagggcaaccctgagtgtgacgggaaggaggactgtagcgacggctcagatgagaaggactgcgactgtgggctgcggtcattcacgagacaggctcgtgttgttgggggcacggatgcggatgagggcgagtggccctgggcaggtaaagcctgcatgctctggggccagggccacatctggcggtgcttccctcatctctcccaactggctggtctctgccgcacactgcttcatcgatgacagaagattcatgtacctccaaccccacgcagtgaaccgggccttcctgggctttgcacgaccagaagccagcgcaggcccccttggggttgcaggaagcgcaggctcaaagcgcatcatcttcccaccccttcttcaatgacttcaccttcgactatgacatcgcgctgctggagctggagaaaccggcagagtacagctccatggtgcggcccatctgcctgccggacgcctcccatgtcttccctgccggcaaggccattctgggtcacgggctggggacacacccagtatggaggcactggcgcgctgatcctgcaaaagggtgagatccgcgtcatcaaccagaccacctgcgagaacctcctggccgcagcagatcacgccgcgcatgatgtgcgtgggcttcctcagcggcggcgtggactcctgccagggtgattccgggggacccctgtccagcgtggaggcggatgggcggatcttccaggccgggtgtggtgagctgggaagccggctgcgttcagaggaacaagccagggcgtgtacacaaggctccctctgtttcgggactggatcaaagagaacactggggtataggggccggggccacccaagatgtgtacacctgcggggccacccagtcgtccaccccagtgtgcacgccgtgcaggctggagactcgcgcaccgctgacctgcaccagcgcccccagaacatacactgtgaactcaatctcccaggggctccaaatctgcccttagaaaaaccctcttcgcttcctcaagcctcccaaaagtggaagctggggaggttagaaggggaggacaactggtgggttctacttgacccaactgggggcaaaggtttgaagacaccagcctccccgcgccagcccccaagcttgggcccgaggcggcgttttgtgcatatctgccttcccctgtcttttaaggagcagcgggaacggagttttgggagcttcttcagtgaaggtggtggggctgcccggatctgggctgtggggcccttgggccacgcttcttgaggaagcccaggctcggaggaccctggaaaacagacgggtctgagactgaaattgttttaccagctcccagggtggacttcagtgtgtgtatttgtgtaaatgagtaaaacattttatttctttttaaaaaaaaaaaaaaaaaaa

SEQ ID NO: 21434 - DNA, 465 bp, Homo sapiens
  SIMILAR (138)..(434): 541254mologous to Homo sapiens phospholysine phosphohistidine inorganic pyrophosphate phosphatase,accession number AB049629,Smith-Waterman Score=257.
ttcccgggtcgacgatttcgtgtcgggcagcagcggggctgtctatcccggctgaggacccgcggccagtgcgggtggctggctttgccattagcgggggcctttcctgaggacggcgtacggagtgtgggttactcctggatggagcacctctgatagcaatccacaaagccaggtattacaagaggaaagatggcttagccctggggcctggaccatttgtgactgctttagagtatgccacagataccaaagccacagtcgtggggaaaccagagaagacgttctttttggaagcattgcggggcactggctgtgaacctgaggaggctgtcatgataggagatgattgcagggatgatgttggtggggctcaagatgtcggcatgctgggcatcttagtaaagactgggaaatatcgagcatcagatgaagaaaaaattaatccacctccttacttaactt

SEQ ID NO: 21435 - DNA, 197 bp, Homo sapiens
  SIMILAR (17)..(133): 511254mologous to Caenorhabditis elegans similar to Schizosaccharomyces pombe 4-nitrophenylphosphatase (PNPPASE) (GB:X62722, NID:g5005),accession number U97001,Smith-Waterman Score =105.
gttactcctggatggagcacctctgatagcaatccacaaagccaggtattacaagaggaaagatggcttagccctggggcctggaccatttgtgactgctttagagtatgccacagataccaaagccacagtcgattgcagggatgatgttggtggggctcaagatgtcggcatgctgggcatcttagtaaagactg

SEQ ID NO: 21436 - DNA, 408 bp, Homo sapiens
  SIMILAR (280)..(402): 411254mologous to Bacteriophage T7 gene 5.7,accession number V01146,Smith-Waterman Score=61.
  misc_feature (1)...(408): n = a,t,c or g
cccacgcgtccggtatcctgtgatttttgtagcccttgatatatccataatgttccctccttgcttctctctcccagccctccacatacataacccaacctttctctgagcgggacacaattcacaattctttataggtattactttctttaatcctcttatcaaccattagagttgtgttattatttctacattagcannnnnnnnnnnnnnnnnnnnnnnnnnnnnnnnnnnnnnnnnnnnnnnnnnnnnnnnnnnnnagatgtatacccaggctataaatttatacaactcctttgttcttgtccttaaccactgcactgttgcattgtaaggaataatttagggctggtaataggagatgcaaagtagagaggacaattaagaagttgtttaaatagtctagag

SEQ ID NO: 21437 - DNA, 370 bp, Homo sapiens
  misc_feature (1)...(370): n = a,t,c or g
ctaagtatgcaagttntgaataatatgccataatatatatttagatgtgttttctcaaatcctcaagttatactaatgctttagaactttgcatcatgtgtatcctgtgatttttgtagcccttgatatatccataatgttccctccttgcttctctctcccagccctccacatacataacccaacctttctctgagcgggacacaattcacaattctttataggtattactttctttaatcctcttatcaaccattagagttgtgttattatttctacattagcannnnnnnnnnnnnnnnnnnnnnnnnnnnnnnnnnnnnnnnnnnnnnnnnnnnnnnnnnnnnagatgtatacccaggcatgtatt

SEQ ID NO: 21438 - DNA, 443 bp, Homo sapiens
  SIMILAR (159)..(284): 501254mologous to Caenorhabditis elegans similar to Schizosaccharomyces pombe 4-nitrophenylphosphatase (PNPPASE) (GB:X62722, NID:g5005),accession number U97001,Smith-Waterman Score =96.
  misc_feature (1)...(443): n = a,t,c or g
cgcccacgcgtccgcccacgcgtccggcagcagcggggctgtctatcccggctgaggacccgcggccagggcgggtggctggctttgccattagcgggggcctttcctgaggacggcgtacggagtgtggggaatgaaggatggcagcatgccgtgcattaaaagctgttttggtagatctcagtggcacacttcacattgaagatgcagctgtgccaggcgcacaggaagctcttaaaaggcaagctatcctccaggttcagctgacaaatatgtttgttacgtggtgcttctgtaatcattaggtttgtgaccaatacaaccaaagagagcaagcaagacctgttagaaaggttgagaaaattggaatttgatatctctgaagatgaaatattcacatctctgactgcagccagaagtttactagagcgganacaagtcag

SEQ ID NO: 21439 - DNA, 2311 bp, Homo sapiens
  SIMILAR (191)..(802): 291254mologous to Caenorhabditis elegans similar to Schizosaccharomyces pombe 4-nitrophenylphosphatase (PNPPASE) (GB:X62722, NID:g5005),accession number U97001,Smith-Waterman Score =167.
  misc_feature (1)...(2311): n = a,t,c or g
agcagcggggctgtctatcccggctgaggacccgcgtccagtgcgggtggctggctttgccattagcgggggcctttcctgaggacggcgtacggagtgtggccctccacatacataacgcaacctttctctgagcgggacacaattcacaattctttatagggaatgaaggatggcagcatgccgtgcattaaaagctgttttggtagatctcagtggcacacttcacattgaagatgcagctgtgccagggcgcacaggaagctcttaaaaggttacgtggtgcttctgtaatcattaggtttgtgaccaatacaaccaaagagagcaagcaagacctgtttagaaaggttgagaaaattgggaatttgatatctctgaagatgaaatattcacatctcttgactgcagccagaagtttactataagcggaaacaagttacacccatgctgctagttgattgatcggggcactacctgattttcaaaggaatacaaacaagtgatcctaattgctgtggtcatggggattggcaccagaacattttcattatccaaattctggaatcaagcattccggttacttctggggtggagcacctctgatagcaattcacaaagccagggttttcaagagtttaagatgggcttagccctggggccttggaccattttgtgactgctttagaagtatgccacagataccaaagccacagtcgtggggaaaccagagaagacgttctttttgggaagcattgcagggcactggctgttgaaccttgaggaggctgtcatgatagggagatgattgcaggggttgatgttggtggggctcaagatgtcggcatgctgggcatcttagtaaagactgggaaatatcgagcatcagatgaagaaaaaattaatccacctccttacttaacttgtgagagtttccctcatgctgtggaccacattctgcagcacctattgtgaagcaatgtgtgcatctgaagcaacttgaaatgcagcttcttattgtctggaatgaatcccttaccaactcagtgccagcatcggtagacaccagtcagtgctgatcgctttttaaccctcttttgttgtgcattaattagaaagaaaggtattgaattgcgggctagcccagtaagccttgcttaatctcttttattttgtaactgaaagatgagacccaaaagaaagggaaagctgagattttgtgccattccttttaaaatattcatcaggttaggtggggctgtggggcgaaaagctactacagggaagagtgttctctgctgtctcttcactggaaaacagggaggggggatttcagactgtgaagaaagttgaatggtggtttttaaattataaagtaatgtattaaaaggtgcattaggctgtagttctaatattgagttcaactgtgaaatccatcagatgtgcccaaatggagaagacacgaaagcaacaaagtgaattgttctttagcccaagtggtacacgtgaatttgctttaacagatgttgaaaactaaattttctactgtattcccagcacgggtgacttctttttctcttcattagaccagagatgactaatttaaatttagaaccagattttaatttaaattaatatttccattaataacctattcattgcagatacctattatactgtgtaacagttgttttggaaattttatgtaaaattaaaactatcagtattttacagatgttttaattagacattgttattaacaggaacagtgcagaaactaagattcaagccttataatatcttatagaccatgcatttttgaagttagtgtcccactagggtcctattaactgtacatttgcaagatttcattatttttgcctctgacactatgggaaaaattttttagaagctattgggacagattcaagcttttatgcacttggttactacagctgtaaaatgaaatctcgtcttgtagcatggattattcttctcatggttaaaccccccaaaataaagggggactaaataggtaatgattttcccttnaagggttggcatttgcatactgtgataatcctgggccttgcaatagttctacagggctcttgggcattgaattattaggatgtaattgtacatcattgtagtgttcaccttattgaagctcactctgatgttaatgagcttcgggttttgatgcttgtttagagatcagcagtcttggatgggagggaacaaagctaaacccaatgttagtttggtgaaaaaaaaaaaaaaaaaaaccgaggggggcccggacccaggg

SEQ ID NO: 21440 - DNA, 296 bp, Homo sapiens
  SIMILAR (45)..(131): 891254mologous to Homo sapiens B-myb protein (AA 1- 700),accession number X13293,Smith-Waterman Score=126.
  misc_feature (1)...(296): n = a,t,c or g
nnnnnnnnnnnnnnnnnnnnnnnnnnnnnnnnnnnnnnngaattttgaaggaggggctgcgttctgaggctggcatcgaactcatcatcgaggaccacatcaggccccaaaagcaaaaaaggaagcctggttccctccccaaggccacagggagctccgtcagtttttcccaagcccacgtcaggcctggcctcatttcaaaccctgcttaggatgggggatggggccaggggggctcctgggctcaccctcttttggggcatttttttggaagaataaaattgcctctctcttaa

SEQ ID NO: 21441 - DNA, 452 bp, Homo sapiens
  SIMILAR (374)..(195): 1001254mologous to Homo sapiens chromatin remodelling factor SWI1Lalpha,accession number AF219114,Smith-Waterman Score=321.
tttttaagagagaggcaattgggttcttccaaaaaaatgcaccaagagagggtgagcacaggagcacccctggccacatcccccatcctaagcagggtctgagatgaggccaggcctgacgtgggcttgctcgcttgctcgcttgctcctcagtcctagcttcatcaaacactggttcctggaatcctgtctgctgtcttgctctcgaagtgggtctggatatgctcagtggtgtcccccccaccaatccgccagtgcagcaggccactgtcaaactcctgcacacgcccaagcttatctgagcagtccaccacaaatggatcattcttctgtacgatctttactggaagcttgtcaaacttactgatcagcttccttcaccaaatcgcactggctcctggactcttttcctatcttcaccacgaactgctgcttgctccttcctggaatcc

SEQ ID NO: 21442 - DNA, 837 bp, Homo sapiens
  SIMILAR (1)..(504): 661254mologous to Homo sapiens B-myb protein (AA 1- 700),accession number X13293,Smith-Waterman Score=563.
gacgagcagctgagggccctggtgaggcagtttggacagcaggactggaagttcctggccagccacttccctaaccgcactgaccagcaatgccagtacaggtggctgagagttttgaatccagaccttgtcaaggggccatggaccaaagaggaagaccaaaaagtaactgctgggacagtgccttgcacacagtgggtcttcacccaccagtgtacctggggactggcacagatgccttcttttgatcgccacagcagtcctgtgagtgccccacttcccgctttgtctctgactcacccctgtcctggagcagagcccagcacgttgaagggcaaaaggacagacaatgctgtgaagaatcactggaactctaccatcaaaaggaaggtggacacaggaggcttcttgagcgagtccaaagactgcaagcccccagtgtacttgctgctggagctcgaggacaaggacggcctccagagtgcccagcccacggaaggccagaaccaaggtgggaagctggcagtgcttggttcatgtcacatgttcagtgatcaatatttggacaaagaagaaaacagcaaaatcatggatgttgttttccagtggctcacgacaggagacatccacctaaaccagattgatgctgaggacccagagatttctgactacatgatgctgccctacacagccaccctatcaaagcggaatcgagagtgtctccaggagagtgatgagatcccaagggactttaccaccctcttcgacctgtccatcttccagctggataccacctccttccacagcgtcatcgagtcagtacctgtgggcctctga

SEQ ID NO: 21443 - DNA, 836 bp, Homo sapiens
  SIMILAR (396)..(755): 911254mologous to Homo sapiens B-myb protein (AA 1- 700),accession number X13293,Smith-Waterman Score=548.
gtactgaagaagacctggaattttatgtcaggaagtgtggtgatattcttggagtaaccagtaaactaccaaaggaccaacaggatgccaaacatatccttgagcacgtcttcttccaagtggtggagttcaagaaattgaaccagagcccggagcgggagccgggccggggtcaggacccgggctgctccggccgctccgggccccgggccgcgctcgaaggcgtcagcgtgtcagcagcccctgacttggacctgcagggtggggagagggatgggacgagaacctgtgctggggccaaaggtcgcactgggggaaggtggagccagggcagcagagtgcctggcgtcggcccctatcctgtcactagttcccccgttctggcccctggcaggtttgtaaccccagatcagaagtactccatggacaacactccccacacgccaaccccgttcaagaacgccctggagaagtacggacccctgaagcccctgccacagaccccgcacctggaggaggacttgaaggaggtgctgcgttctgaggctggcatcgaactcatcatcgaggacgacatcaggcccgagaagcagaagaggaagcctgggctgcggcggagccccatcaagaaagtccggaagtctctggctcttgacattgtggatgaggatgtgaagctgatgatgtccacactgcccaagtctctatccttggtacacctggagccgggctgcgacggctctggggctctaaccagccccgcgccccagaggcttcttctcggtggcgtggtctcgttcgtgtggaggacgggtgaaagaaagtcgcagggatga

SEQ ID NO: 21444 - DNA, 1651 bp, Homo sapiens
  SIMILAR (1)..(801): 1001254mologous to Tn10 delivery vector pHV1248 transposase,accession number AF307747,Smith-Waterman Score=1406.
atgcccattgtacttgttgactggtctgatattcgtgagcaaaaacgacttatggtattgcgagcttcagtcgcactacacggtcgttctgttactctttatgagaaagcgttcccgctttcagagcaatgttcaaagaaagctcatgaccaatttctagccgaccttgcgagcattctaccgagtaacaccacaccgctcattgtcagtgatgctggctttaaagtgccatggtataaatccgttgagaagctgggttggtactggttaagtcgagtaagaggaaaagtacaatatgcagacctaggagcggaaaactggaaacctatcagcaacttacatgatatgtcatctagtcactcaaagactttaggctataagaggctgactaaaagcaatccaatctcatgccaaattctattgtataaatctcgctctaaaggccgaaaaaatcagcgctcgacacggactcattgtcaccacccgtcacctaaaatctactcagcgtcggcaaaggagccatgggttctagcaactaacttacctgttgaaattcgaacacccaaacaacttgttaatatctattcgaagcgaatgcagattgaagaaaccttccgagacttgaaaagtcctgcctacggactaggcctacgccatagccgaacgagcagctcagagcgttttgatatcatgctgctaatcgccctgatgcttcaactaacatgttggcttgcgggcgttcatgctcagaaacaaggttgggacaagcacttccaggctaacacagtcagaaatcgaaacggaagtcttctgaccaactggccctccgtccctcctaccataaaggaggaggaaaacagtgaggaggaacttgcagcagccaccacatcgaaggaacaggagcccatcggtacagatctggacgcagtgcgaacaccagagcccttggaggaattcccgaagcgtgaggaccaggaaggctccccaccagaaacgagcctgccttacaagtgggtggtggaggcagctaacctcctcatccctgctgtgggttctagcctctctgaagccctggacttgatcgagtcggaccctgatgcttggtgtgacctgagtaaatttgacctccctgaggaaccatctgcagaggacagtatcaacaacagcctagtgcagctgcaagcgtcacatcagcagcaagtcctgccaccccgccagccttccgcccgtggtgcccagtgtgaccgagtaccgcctggatggccacaccatctcagacctgagccggagcagccggggcgatgctgatccccatctcccccagcactgaagtcgggggctctggcattggcacaccgccctctgtgctcaagcggcagaggaagaggcgtgtggctctgtcccctgtcactgagaatagcaccagtctgtccttcctggattcctgtaacagcctcacgcccaagagcacacctgttaagaccctgcgcttctcggccctcccaggtttctgaacttctggaacaaacaggacacattggagctggagagcccctcgctgacatccaccccagtgtgcagccagaaggtggtggtcaccacaccactgcaccgggacaagacacccctgcaccagaaacatgctgcgtga

SEQ ID NO: 21445 - DNA, 2735 bp, Homo sapiens
  SIMILAR (1552)..(2274): 551254mologous to Homo sapiens B-myb protein (AA 1- 700),accession number X13293,Smith-Waterman Score=505.
gctgacgccttcgagcgcggcccggggcccggagcggccggagcagcccgggtcctgaccccggcccggctcccgctccgggctctgccggcgggcgggcgagcgcggcgcggtccgggccggggggatgtctcggcggacgcgctgcgaggatctggatgagctgcactaccaggacacagattcagatgtgccggagcagagggatagcaagtgcaaggtcaaatggacccatgaggaggacgagcagctgagggccctggtgaggcagtttggacagcaggactggaagttcctggccagccacttccctaaccgcactgaccagcaatgccagtacaggtggctgagagttttgaatccagaccttgtcaaggggccatggaccaaagaggaagaccaaaaagtcatcgagctggttaagaagtatggcacaaagcagtggacactgattgccaagcacctgaagggccggctggggaagcagtgccgtgaacgctggcacaaccacctcaaccctgaggtgaataagtcttgctggaccgaggaggaggaccgcatcatctgcgaggcccacaaggtgctgggcaaccgctgggccgagatcgccaagatgttgccagggaggacagacaatgctgggaaaaatcactggaactttaccattcaaaagggaagggggacacaggaggcttcttgagggagtacaaagactgaaagcccccagtgtacttgccgctgggagctcgaggacaaggacggcctccagagtgcccagcccacggaaggccagagaagtcttctgaccaactggccctccgtccctcctaccataaaggaggaggaaaacaagtgaggaggaacttgcagcagccaccacatcgaaggaacaggagcccatcggtacagatctggacgcagtgcgagacaccaagagcccttggaggaattccccgaagcgtgaggaccaggaaggctccccaccagaaacagatgcctgccttacaagtgggtggtggaggcagttaacctcctcatccccgctgtggtttcttagcctctatgaagccctggacttgatcggttccggaccctgatgcttggtgtgacctgagtagatttgacctccctgaggaaccgtctatagaggacagtatcaacaacagccgtagtgcagctgcaagcgtcacagtcagcaacaaatcctgccaccccgccagccttccgcccgtggtgcccagtgtgaccgagtaccgcctggatggccacaccatctcagacctgagccggagcagccggggcgagctgatccccatctcccccagcactgaagtcggggggctctggcattggcacaccgccctctgtgctcaagcggcagaggaagaggcgtgtggctctgtcccctgtcactgagaatagcaccagtctgtccttcctggattcctgtaacagcctcacgcccaagagcacacctgttaagaccctgcccttctcgccctcccagtttctgaacttctggaacaaacatggacacattggagctggagagccccctcgctgactatccaccccaagtgtgcagccagaaggtggtggtcaccacaccactgcaccggggacaagacacccctgcaccagaaacatgctggcgtttgtaaccccagatcagaagtactccatggacaacactccccacacggccaaccccgttcaagaacgccctggagaagtacggacccctgaagcccctgccacagaccccgcaccttggaggaggacttgaaggaggtgctgcgttctgaggctggcatcgaactcatcatcgaggacgacatcaggcccgagaagcagaagaggaagcctgggctgcggcggagccccatcaagaaagtccggaagtctctggctcttgacattgtggatgaggatgtgaagctgatgatgtccacactgcccaagtctctatcctgccggacgactgccccttccaacttcttccacccctcaccctgtcaggtatcaaagaagacaacagcttggctcaaccaggggcttcttgcagggccaagcccgaggaaggcagcatgtgtcccagaaggccccgaaagccactttcacggacaacttgccccttatgttccagtgccggggaagaccggtgggcctgcgggggggaccaggggaccaggcttttcatggcaggagaaagcccggcaggttcctggggccgccctgaagcccaagccacacattctcgggaccctcatcttggtcctggagagtgttggagggggtgtcaacgagcccatttctcatggttttacagggggtttgtggggggcagaggggggtcttgtgaatctgaggagtcattcaaggtgaccctcctgcagggagccttctgcccaccagcccctcccccagactctacaggtggaaggcaaccagggccatgtgctgccctgttgccgaagcccagctgtgggcggctccctggtgctaacaacaaagtttccacttcccaggtctgccctggttccctccccaagggccacagggagctccgtcagcttctcccaagcccacgtcaggccatggcctcatttaacaccctgcttaggatgggggatgtggccaggggtgctcctgtgctcaccctctcttggggcattttttttggaagaataaaagttgcctctctctttgaaaaaaaaaaaaaaagggcggccgct

SEQ ID NO: 21446 - DNA, 925 bp, Homo sapiens
  SIMILAR (264)..(674): 601254mologous to Homo sapiens Human secreted protein clone yd109_1 protein sequence SEQ ID NO:160,accession number Y73469,Smith-Waterman Score=294.
caagaacgtcccagtgcccttggctcctttcggagtgtgaccccgtgcttgcacgggacacgttacccagctcgggtgagaagggtatcttccgggaacctcgcctttaatagcacaacgagcgcagagtccactggatctgcgagaagaaaccgcgctaactagtttgtccctacggccgcctcgtagtcactgccgcggcgccttgagtctccgggccgccttgccatggctgcccgtggtgtcatcgctccagttggcgagagttttgtcgctacgctgaggtaccttgcagcccctcggccaaacggccagacgccgacgtcgaccagcagagactggtaagaagtttgatagctgtaggtcagggtgttgcagctcttgcatttgcagggtcgctacgcattaacggatctggaaacctctagaaacaagttatcacagaaactgccaaaggaagatttcaaactcctaggttttcatcctactgataaggaggatccttaacataatatgacttaggcgagaagctgcgtcttattttaggtgtaagcccagtctgctggcaaggctaagattagaacaagctcataggagcagtcatgattttggaatcaccccagataaagggtggatctccttacgtagcagccaaaataaatgaagcaaaagactttgctagaaacaaccaccaaacgattgatgcttaaggaccacactgaaggaaaaaaaaacgaggggacttcaaaaaaaaaaaaaagccctgcaaaatattctaaaacatggtccttcttaattttctatatgggatttgaccacagtcttatcttccgaccattaagctgtataacgaataaaatgttaatagtcttgctttttattatcttttaaagatctccttaaattctaaaaaaaaaaaaaaaaa

SEQ ID NO: 21447 - DNA, 652 bp, Homo sapiens
  SIMILAR (1)..(114): 711254mologous to Homo sapiens enoyl-CoA hydratase/3- hydroxyacyl-CoA dehydrogenase alpha-subunit of trifunctional protein,accession number D16480,Smith-Waterman Score=125.
  misc_feature (1)...(652): n = a,t,c or g
cgagggttatatatgcagcattttacagggtcttctgctntgctgaccagaaccnatattanctatggagtcatagngaatgtggcagttgttcgaattaactctcccaattcanagcatgttagccgcttgcaagacccttcaagaagtaacacagctatcacaagaagcacagagaatagttgagaaacttgaaaagtccacaaagcctattgtggctgccatcaatggatcctgcctgggaggaggacttgaggttgccatttcatgccaatacagaatagcaacaaaagacagaaaaacagtattaggtacccctgaagttttgctgggggccttaccaggagcaggaggcacacaaaggctgcccaaaatggtgggtgtgcctgctgctttggacatgatgctgactggtagaagcattcgtgcagacagggcaaagaaaatgggactggttgaccaactggtggaacccctgggaccaggactaaaacctccagaggaacggacaatagaatacctagaagaagttgcaattacttttgccaaaggactagctgataagaagatctctccaaagagagacaagggattggtggaaaaattgacagcgtatgccatgactattccatttgtcaggcaacaggtttac

SEQ ID NO: 21448 - DNA, 449 bp, Homo sapiens
  SIMILAR (3)..(53): 821254mologous to Homo sapiens 78 kDa gastrin-binding protein,accession number U04627,Smith-Waterman Score=69.
  misc_feature (1)...(449): n = a,t,c or g
cagaagttatgaatgaaatntgggctagtgatcaaatcagaagtccggncttatctcatcaaagccaggctgctttattgcaggtnctgatatcaacatgttagccgcttgcaagacccttcaagaagtaacacagctatcacaagaagcacagagaatagttgagaaacttgaaaagtccacaaagcctattgtggctgccatcaatggatcctgcctgggaggaggacttgaggttgccatttcatgccaatacagaatagcaacaaaagacagaaggatgttaagcatctggctattcttggtgcagggctgatggggagcaggcatcgcccaagtctccgtgggatnaaggggcttaaagactattactttaaagntgccaccctcactngcgctaggaccgagggacagccaacaagtgtttcaaagggtttgattgacaagtt

SEQ ID NO: 21449 - DNA, 501 bp, Homo sapiens
  SIMILAR (107)..(244): 951254mologous to Homo sapiens 78 kDa gastrin-binding protein,accession number U04627,Smith-Waterman Score=216.
tagttgtgcctgcattagttggtttattgaataacttaggcaatcttccactttgactgaaatgattaagatcagtttaccgaaagtcatttcatccttgccttgcaggcatctggctattcttggtgcagggctgatgggagcaggcatcgccaacgtctccgtggataaggggctaaagactatacttaaagatgccaccctcactgcgctagaccgaggacagcaacaagtgttcaaagggtaagcctgctctctctctttgcaagagttagaatgtcctttgtttcttggttagttgttttttgtggtggcttggtgggtttttttgtttgtttgttcttgccatcacggattcctttttcctgaacataatgagttctagatactccgtagtgaagccaagtttcttttgatttttagaaatgccaattccttctttgacttcgttttgttatagatatcatagacaattaacatccttggagtctgtagtctttg

SEQ ID NO: 21450 - DNA, 3130 bp, Homo sapiens
  SIMILAR (13)..(1326): 651254mologous to Homo sapiens 78 kDa gastrin-binding protein,accession number U04627,Smith-Waterman Score=1190.
  misc_feature (1)...(3130): n = a,t,c or g
cttcagctcaagatggtggcctgccgggcgattggcatcctcagccgcttttctgccttcaggatcctccgctcccgaggttatatatgccgcaattttacagggtcttctgctttgctgaccagaacccatattaactatggagtcaaaggggatgtggcagctgatcgaattaactctcccaattcaaaaggtaaatacactgagtaaagagctacattcagagttctcagaagttatgaatgaaatctgggctagtgatcaaatcagaagtgccgtccttatctcatcaaagccagggctgctttattgcagggtgctgatatcacgatgttagccgcttgcaaagacccttcaatgaagtaacacagctatcacaagaaagcacagagaaatagttgagaaaccttgaaaaagtccacaaagccttattgtgggctgcccatccaatggatcctgcctgggacggaggactttgaggttgcccatttcatcccccnaatacagaatagctactaaacgacagcaaaacagtaatttaggtaccccctgaaagtttttcttggggggcctttaccagggaggcagggagggcacacaaagggctgccccaaaatgggtggggtgtgcctgcctgcctttggacatgaatgcttgactggtagaagcattcgtgtcagacagggcaaaggaaaatgggactggttgacccaactggtgggaacccctgggacccagggactaaaacctccagaggaacggacaatagaatacctagaagaagttgcaatttacttttgccaaaggactagctgataagaagatctctccaaagagagacaaggggattggtggaaaaattgacagcgttatgccatgactattccatttgtcaggcaacaggtttacaaaaaagtggaagaaaaagtgcgaaagcagactaaaggcctttatcctgcacctctgaaaataattgatgtggtaaagactggaattgagcaagggagtgatgccggttatctctgtgaatctcagaaatttggagagcttgtaatgaccaaagaatcaaaggccttgatgggactctaccatggtcaggtcctgtgcaagaagaataaatttggagctccacagaaggatgttaagcatctggctattcttggtgcagggctgatgggagcaggcatcgcccaagtctccgtggataaggggctaaagactatacttaaagatgccaccctcactgcgctagaccgaggacagcaacaagtgttcaaaggattgaatgacaaagtgaagaagaaagctctaacatcatttgacaagggattccatcttcagcaacttgactgggcagcttgattaccaagggttttgaaaaaggcccgacatgggtgaattgaaagctgtgttttgaggacccttagtccttaagccacagagtcttaaaagggaaggtaggaagccggtgattcccagatcactggtattctttgcccagtaacacatctgctctcccaatcagtgaaatcgctgctgttcagcaaaagacctgagaagggtgattgggcatgcactactttctctcccgtggacaagatgcagctgctgggagattatcacgaccgagaaaacttccaaagacactcagtgcttcagctgtagcaggttggtctcaagcaggggaagggtcatcattgtgggttaaggatgggacctgggcttcttatnacttaccagggtgtctttgcgcccatgatgtcttgaagtcatccgaatcctccaggaaggaagtttgacccgaagaagctgggatttccctggaccacaagctttgggttttcctgttgggtgccgccacactggtgggatgaagttgggtgtgggatgttagcgaaacatgttggcggaagatctgggcaaagtctttgggggagcggtttggaggtggaaacccagaacttgctgacacagatggtgtccaagggcttcctaggtccgtaaatctggggaagggcttttaacttcatcagggagggtggtaaaaagaaagattttgaattctaccatggataggtatttaagcgagtctaaagcggccctcttaagtttgaagtctcatcaagaggaaggcattcaagttcggccctggtggcaagaatttgggaatgaggcaagtcatgtgcctgcaagaggggatcttgcccacactgccagagggaagacatcggagcccgtctttggggcttggcttcccgccttgtctggggagggccttttccgctttgtgggatctgtatgggcgcccagaaggatagtgggaccgggctcaagaaaatatgaagctgccctatgggaaaacagtttcaccccccatgccgagctgctaagctgacccatggctnaacagcccttaaccaagaagttcctacccagtggagccaggccctccatggccttcgcctccagtcaagtgcaacttaacccccaggttggccggccagtgcctggttcctcccaaccagagtggttgtcctagatttattcagagtcaacgagaaagacaaactccgggcactggggtttgctccctgatttaaagtggcctttcagccaagaccatctctcccgtccgtggtgaaggtgtgactttcgaattaagtttgccacttcctattgggaaggtaggagcccacttgcttcattgttattaagccccgaggccttaggagtgggccagccaaggagccatcttggaaggccaccttttcttgcctgtttccttccccaagaggccagggtgcgccagcggctgggtgaagggcagttctgcaccccagccaaacacataacaacaataaaaaccgaaactctgttgtcagcatctttgcccttctggtttaaacgcctccttcaaaaaagcaatctggaagaaagccctgtgctttgggggagtaagaatgtgtgtgcagaattctaggcagcaccttagggagggactgggatgagagaaagtgggacctggtgggctcaaccacacacacctgtctgtgcagatgctttgcccaggcttctcaccacggtgtaccgggatattaaacctctttccccagcctggaaaaaaaaaaaa

SEQ ID NO: 21451 - DNA, 920 bp, Homo sapiens
  SIMILAR (504)..(355): 581254mologous to Homo sapiens PRO1722,accession number AF119851,Smith-Waterman Score=115.
attagggatttgtaagaaaactttaattaaaaattaaagactatatataattaaactactctgccctggacactctctgagaaacagatctactgggccctttttcatgagccattaggtggaagacagcaaagagatcttctcaagtgcttaggattacctctcaacacacagcaagcatgtccctgcctcccatgaatcttaccatgtaaatccaaatctctgcaatcctgtggcaccaaccagtggtgctcattctattgtttaaaaatggccttcttggctgggcacggtggctcactcctgtaatcccagcaacttcgggaggccgaggcgggcggactgcctgagctccaggagttcgagaccagcctggccaacaaggtgaaaccctgtctctactaaaaatacaaaaaattagccaggtgtggccaggcgcggtggctcacacctgtaatcccagcactttgggaggctgaggtgggcggatcacttgaggtcaggagtttgagaccagcctggccaacatggtgaaaccccaactctactaaaaatgcaaaaaactagccaggcgtggtggtgcacacctgttaatcccagctacttcagaaggctgaggcaggagaatcgctggagcctggggaggcggaggttgcagtgagctgagatcacaggccactgcactccagcctgggcaacagagtgagacttgtctcaaaaaaaaaaaagctaactgagcagaaagtgatgttaccaattatctggtcatgttgactgcctcagtcaccagttacatttacagatgaagggcctgaggagtcatttgactaggaagagaacactagggtgatttgaagctgacttgaaacagtcagcttttctagctgtgtgctcttaggtgagttacttaagttttctgg

SEQ ID NO: 21452 - DNA, 3287 bp, Homo sapiens
  SIMILAR (1225)..(3261): 921254mologous to Homo sapiens p170 epidermal growth factor receptor,accession number AF288738,Smith-Waterman Score=3436.
  misc_feature (1)...(3287): n = a,t,c or g
atggcctcagaatcaggcctggtgtggccaggggctgatctcacagtagacaggaagtgtggcccgagggccatggctgccccctcagaaggccctgtggagtggctggccgagcctcagcagcctcctgtgaagcgaggaagggtcttcctgccggcctctggagatcagtatgggaatgcacaagatggtggttttggttcctccatctttgatgtgtacaagtgtgatgttttccccccacagacaacagccctggagcctgctgggggctttgagcagctgctgccaagccaggcctcacccgacactctgatgggcacggccatggtggcaggggcttggacgctgccaggaaggtcccctgcccccaactcttccccacatgtggcggggccccgcttgtccttagaagcccagctgaactgcttcctgaaggaacccctccagaacctctcagaccaggagtcaggactcagcaaggcccaccccagccacacacagatacagttccaggactcagaactcagcgaggcccaccccagccacatgcaggtccagttccaggattcaggacacagtgaggcccacccgagccacatccaggtccagttccaggactcaggattcagtgaggcccaccccagccacacacaggtccagttccaggactcaggactcagcgaggcccaccccagccacatgcaggtccagttccaggattcaggacacagtgaggcccaccccagccatatccaggttcagttccagaccatccaggaggtggctggttatgtcctcattgccctcaacacagtggagcgaattcctttggaaaacctgcagatcatcagaggaaatatgtactacgaaaattcctatgccttagcagtcttatctaactatgatgcaaataaaaccggactgaaggagctgcccatgagaaatttacagggtctttggtctgttgtccgagctgccacagcagcctggacatccctgttggtgtttccagccctgtcctctcctgagttccatccacctgtgcatggctttttcatgagtgttttcacggatggttctgctgtcatctccaacctgataaacaaagcaccacgattcagcccttatgaccccaagcttccttcctcagttccttgcttctgtgcatccactgaagaagcctgttccactgtttccctgcactggttccattctcccgcagaaatcctgcatggcgccgtgcggttcagcaacaaccctgccctgtgcaacgtggagagcatccagtggcgggacatagtcagcagtgactttctcagcaacatgtcgatggacttccagaaccacctgggcagctgccaaaagtgtgatccaagctgtcccaatgggagctgctggggtgcaggagaggagaactgccagaaactgaccaaaatcatctgtgcccagcagtgctccgggcgctgccgtggcaagtcccccagtgactgctgccacaaccagtgtgctgcaggctgcacaggcccccgggagagcgactgcctggtctgccgcaaattccgagacgaagccacgtgcaaggacacctgccccccactcatgctctacaaccccaccacgtaccagatggatgtgaaccccgagggcaaatacagctttggtgccacctgcgtgaagaagtgtccccgtaattatgtggtgacagatcacggctcgtgcgtccgagcctgtggggccgacagctatgagatggaggaagacggcgtccgcaagtgtaagaagtgcgaagggccttgccgcaaagtgtgtaacggaataggtattggtgaatttaaagactcactctccataaatgctacgaatattaaacacttcaaaaactgcacctccatcagtggcgatctccacatcctgccggtggcatttaggggtgactccttcacacatactcctcctctggatccacaggaactggatattctgaaaaccgtaaaggaaatcacagggtttttgctgattcaggcttggcctgaaaacaggacggacctccatgcctttgagaacctagaaatcatacgcggcaggaccaagcaacatggtcagttttctcttgcagtcgtcagcctgaacataacatccttgggattacgctccctcaaggagataagtgatggagatgtgataatttcaggaaacaaaaatttgtgctatgcaaatacaataaactggaaaaaactgtttgggacctccggtcagaaaaccaaaattataagcaacagaggtgaaaacagctgcaaggccacaggccaggtctgccatgccttgtgctcccccgagggctgctggggcccggagcccagggactgcgtctcttgccggaatgtcagccgaggcagggaatgcgtggacaagtgcaaccttctggagggtgagccaagggagtttgtggagaactctgagtgcatacagtgccacccagagtgcctgcctcaggccatgaacatcacctgcacaggacggggaccagacaactgtatccagtgtgcccactacattgacggcccccactgcgtcaagacctgcccggcaggagtcatgggagaaaacaacaccctggtctggaagtacgcagacgccggccatgtgtgccacctgtgccatccaaactgcacctacgggcctaagatcccgtccatcgccactgggatggtgggggccctcctcttgctgctggtggtggccctggggatcggcctcttcatgcgaaggcgccacatcgttcggaagcgcacgctgcggaggctgctgcaggagagggagcttgtggagcctcttacacccagtggagaagctcccaaccaagctctcttgaggatcttgaaggaaactgaattcaaaaagatcaaagtgctgggctccggtgcgttcggcacggtgtataagggactctggatcccagaaggtgagaaagttaaaattcccgtcgctatcaaggaattaagagaagcaacatctccgaaagccaacaaggaaatcctcgatgaagcctacgtgatggccagcgtggacaacccccacgtgtgccgcctgctgggcatctgccttcacctccaccgtgcagctcatcacggcagcttcatgccctttcggctgcctcctgggacttatgtccgggtaacacaaaggacaatattggcttcccagttaccttgcttcaactggtgtgttgcagattcgtaaaggggcttgaatnatttgggaggnaccgtcgnttggtgncaccg

SEQ ID NO: 21453 - DNA, 5429 bp, Homo sapiens
  SIMILAR (2358)..(5054): 811254mologous to Rattus norvegicus epidermal growth factor receptor,accession number M37394,Smith-Waterman Score=3802.
  misc_feature (1)...(5429): n = a,t,c or g
tggtgttggctctcaacgtgacccgcagtctgatcccctgtgaagagccggacatcccaggcacacgtgtcgccaccttcagcaggcattcgggtgctgggctggtggctcatcaggcctgggcccacactgacaagcgccagatacgccacaaataccactgtgtcaaatgctttcaagatatatttttggggaaactattttttaaacactgtggaatacactggaaatcttcagggaaaaacacatttaaacacttttttttttaaaggaaaagaattggtatatttattatgttctggtttttctaaataaccctgtggacaagggaagccccactgatttactccctctcttccccactccctgtgaggctgggctgaggcacggatccctgggccacagagcaagtctccaaatcagacagctgcctcagcccctgggatgtgtgatttcagctcctgtcacctcatgcaagggcgtggagaccagtagaggtgtggaggccaggcagagagaggagcctgctctgccggggggcccaactcattgggcactgccccttcagctagcctgcctccgtcccctgagtccaacagtgggagccctagctgggaagttctgatccccaaagccacagcaggggactgatggctatagcagaatgaggtcgggtcaggaccctcaaacaccatctggggaacaccaagcaccctgaattcggaggctgcaggagccctgcggggatgagactgtgtcagagatacactgctggccacaagtgtccccttctcagtccccacctttttcgggctgtcccatgtctatctcagggggcccgttaccttttctgcaagcaagtccccccatcccagcccacaccagggtctgtccggccaaccctcttcccccagggaaaggagaaaagagaaaacaggcttgggcccggtggctcactcctgtaatcccagcactttgggaggttgaggtgggcggatcacctgaggtcaggagtttgagaccagccggcgggagtggccttgggtccccgctgctggttctcctccctcctcctcgcattctcctcctcctctgctcctcccgatccctcctccgccgcctggtccctcctcctcccgccctgcctccccgcgcctcggcccgcgcgagctagacgtccgggcagcccccggcgcaccgcggccgcagcagcctcctccccccgcacggtgtgagcgcccgccgcggccgaggcggccggagtcccgagctagccccggcggccgccgccgcccagaccggacgacaggccacctcgtcggcgtccgcccgagtccccgcctcgccgccaacgccacaaccaccgcgcacgggccccttgactccgtccagtattgatcgggagagccggagcgagctcttcggggagcagcgatgcgaccctccgggacggccggggcagcgctcctggcgctgctggctgcgctctgcccggcgagtcgggctctggaggaaaagaaagtttgccaaggcacgagtaacaagctcacgccagttgggcacttttgaaagatcattttcctcagccctcccagaggatgttccaataactgtgaggtggtcccttgggaatttggaaattaccctatgtgagaggaattatgatctttccttcttaaagaccatcccaggaggtggctggttatgtcctcattgccctcaacacagtggagcgaattcctttggaaaacctgcagatcatcagaggaaatatgtactacgaaaattcctatgccttagctgtctgtatttaattatgatgcaaataaaaccggactgaaggagctgcccatgagaaatttacaggaaatcctgcatggcgccgtgcggttcagcaacaaccctgccctgtgcaatgtggagagcatccagtggcgggacatagtcagcagtgactttctcagcaacatgtcgatggacttccagaaccacctgggcagctgccaaaagtgtgatccaagctgtcccaatgggagctggctggggtgcaggagaggagaactgccagaaactgaccaaaatcatctgtgcccagcagtgctccgggcgctgccgtggcaagtcccccagtgactgctgccacaaccagtgtgctgcaggctgcacaggcccccgggagagcgactgcctggtctgccgcaaattccgagacgaagccacgtgcaaggacacctgccccccactcatgctctacaaccccaccacgtaccagatggatgtgaaccccgagggcaaatacagctttggtgccacctgcgtgaagaagtgtccccgtaattatgtggtgacagatcacgggctcgtgcgtccgagcctgtggggccgacagctatgagatggaggaagacggcgtccgcaagtgtaagaagtgcgaagggccttgccgcaaagtgtgtaacggaataggtattggtgaatttaaagactcactctccataaatgctacgaatattaaacacttcaaaaactgcacctccatcagtggcgatctccacatcctgccggtggcatttaggggtgactccttcacacatactcctcctctggatccacaggaactggatattctgaaaaccgtaaaggaaatcacagggtttttgctgattcaggcttggcctgaaaacaggacggacctccatgcctttgagaacctagaaatcatacgcggcaggaccaagcaacatggtcagttttctcttgcagtcgtcagcctgaacataacatccttgggattacgctccctcaaggagataagtgatggagatgtgataatttcaggaaacaaaaatttgtgctatgcaaatacaataaactggaaaaaactgtttgggacctccggtcagaaaaccaaaattataagcaacagaggtgaaaacagctgcaaggccacaggccaggtctgccatgccttgtgctcccccgagggctgctggggcccggagcccagggactgcgtctcttgccggaatgtcagccgaggcagggaatgcgtggacaagtgcaaccttctggagggtgagccaagggagtttgtggagaactctgagtgcatacagtgccacccagagtgcctgcctcaggccatgaacatcacctgcacaggacggggaccagacaactgtatccagtgtgcccactacattgacggcccccactgcgtcaagacctgcccggcaggagtcatgggagaaaacaacaccctggtctggaagtacgcagacgccggccatgtgtgccacctgtgccatccaaactgcacctacggatgcactgggccaggtcttgaaggctgtccaacgaatgggcctaagatcccgtccatcgccactgggatggtgggggccctcctcttgctgctggtggtggccctggggatcggcctcttcatgcgaaggcgccacatcgttcggaagcgcacgctgcggaggctgctgcaggagagggagcttgtggagcctcttacacccagtggagaagctcccaaccaagctctcttgaggatcttgaaggaaactgaattcaaaaagatcaaagtgctgggctccggtgcgttcggcacggtgtataagggactctggatcccagaaggtgagaaagttaaaattcccgtcgctatcaaggaattaagagaagcaacatctccgaaagccaacaaggaaatcctcgatgaagcctacgtgatggccagcgtggacaacccccacgtgtgccgcctgctgggcatctgcctcacctccaccgtgcaactcatcacgcagctcatgcccttcggctgcctcctggactatgtccgggaacacaaagacaatattggctcccagtacctgctcaactggtgtgtgcagatcgcaaagggcatgaactacttggaggaccgtcgcttggtgcaccgcgacctggcagccaggaacgtactggtgaaaacaccgcagcatgtcaagatcacagattttgggctggccaaactgctgggtgcggaagagaaagaataccatgcagaaggaggcaaagtgcctatcaagtggatggcattggaatcaattttacacagaatctatacccaccagagtgatgtctggagctacggggtgaccgtttgggagttgatgacctttggatccaagccatatgacggaatccctgccagcgagatctcctccatcctggagaaaggagaacgcctccctcagccacccatatgtaccatcgatgactacatgatcatggtcaagtgctggatgatagacgcagatagtcgcccaaagttccgtgaggtgatcatcgaattctccaaaatggcccgagacccccagcgctaccttgtcattcagggggatgaaagaatgcatttgccaagtcctacagactccaacttctaccgtgccctgatggatgaagaagacatggacgacgtggtggatgccgacgagatacctcatcccacagcagggcttcttcagcagcccctccacgtcacgggactcccctcctgagctctctgagtggcaaccagcaacaattccaccgtggcttgtcattgatagaaatggggctgcaaatgctgtcccattcaaggaagacagcttctttgcagcgattacagctcagaccccacaggcgccttgactgaggacagcatagacgacaccttcctcccagtgcctgaatacataaaccagtccgttcccaaaaggcccgctggcttctgtgcagaatcctgttctattcacaattcagccttttgaaccccggcggcccagcaggaggacccacacttaccaggggacccccacaggcattgcagtgggggcaaccccgagtttttttcaacattgttccagcccacctgtgttcaacaggcacatttcggacagcccctgcccactggggcccaggaaagggcaggccaccaatttagctggacaaccctgactacccagcgggacttctttcccccanggaaggcccaagcccaaatgggcatcttttaagggctccccanagcttgaaaatgcaggaataccctaagggtcgcggcccacaaagccagtgaatttattgggagcatgacccacgggnggatagtatgagcccttaaaaatcccagactctttcgataccccgggacccaagccacagcagggtcctcccatccccaacagccatgcccgcattagctcttagacccacagactggttttgcaacgtttacaccgactagcccaggaagtacttccacctcgggcacattttgggaagttgcattcctttgtcttcaaactgtgaagcatttacagaaacgcatccagcaagaatattgtccctttgagcagaaatttatctttaaaaaggggtatatttgaaaaaaa

SEQ ID NO: 21454 - DNA, 414 bp, Homo sapiens
  SIMILAR (271)..(387): 971254mologous to Homo sapiens dJ995J12.1 (similar to ganglioside-induced differentiation associated protein 1),accession number AL035462,Smith-Waterman Score=196.
  misc_feature (1)...(414): n = a,t,c or g
aattcggaacgagngtcctgcctctgattccgggctgtcatggcgacccccaacaatctgaccccccccgacgctcccgaggcggccagcccgcccattggcccagggagagcctggttctgtaccactggacccagtccttcagctcgcagaaggtgcggctggtgatcgccgagaagggcctggtgtgcgaggagcgggacgtgagcctgccacagagcgagcacaaggagccctggttcatgcggctcaacctgggcgaggaggtgcccgtgcatcatccaccgcgacaacatcatcagtgactatgaccagatcattgactatgtggagcgcaccttcacaggagagcacgtngtggccctgatgcccgaggttggcagccttgcagcangcacgggtgctgcagttact

SEQ ID NO: 21455 - DNA, 554 bp, Homo sapiens
ttttacagtggaatgctatcctattgttcaaggaaacaacgcacatgggggtgtgacagggaagaacctctcggttaaattaagtgaaaacggtacagctgaagaactgtgtagttgctgatatgcgaaacggatatatgatgtatattatgtacacaccgcgtatacgtgtacattccacgcatagaaaattcgtggaatgacacaataaaattggtgacaggtttgtttctgaggagggaaattcaagagaatgttttatcttttggggacacattttggattttttaaaagttgggtgccttttataaacctgttcaaatcacacacccgcacagaacttggtctctggaatccagcagacctcggggtctagttgtgactctgtcacaccggctaaacatcaacgtgcctcttgctttctttctgaagtggagacaggactaggatgtgtcttaagatcatggtggatgccgtggggaacaaggatgtaaagcccttgataccacgtgcattgcaaagacacaatcaacatttatgtcatcaattgctga

SEQ ID NO: 21456 - DNA, 1228 bp, Homo sapiens
  SIMILAR (590)..(778): 631254mologous to Mus musculus ganglioside-induced differentiation associated protein 1,accession number Y17850,Smith- Waterman Score=189.
atgcgcggtgactcggcagcgcggcagccgacgactgcgcagacgcagggcggcggccgcgcctctccaacgccccgcacccgcccccctcagaagcacgtgcgccttacaatttggaagcaaaatcttctgggtactccttacgggctgaaagatgttccccaccccgaccctacccatatctgtggccatttcagcatccgctacatggaggcagagatgagtgggcatcagccggtcaagcactctactcttgtcccacctctgggcctgtgtctctacctggagcatgcatcctttccaccttcttctccccagctggctatgtccccctcatcccacaagcctctgcttcaagtccctgagcagatgctgatgatgactgcctggagcctgacactgagggctggcggcttttctggcgcgggccagggggaggaggagaaaggagctcccgggatcccctcgccccctcccccaactgcccgctggtggcccatctccgcgctggagagcgatgcggccaagccagcggaggcccccgacgctcccgatggcggccagccccgcccattggcccagggagagcctggttctgtaccactggacccagtccttcagctcgcaaaaggtgcggctggtgatcgccgagaagggcctggtgtgcgaggagcgggacgtgagcctgccacagagcgagcacaatggatgccctggttcatgcggctcaacctgggcgaggaggtgcccgtcaatcatccaccgcgacaacatcattcagtgactatggaccagattcatttgactatgtgggagcgcacctttcacagggagaggcacgtgggggccctgatgcccgaggtgggcagccgtgcagcacgcacgggtgctgcagtacccgggagctgctggacgcactgcccatggatgcctacacgcatggctgcatcctgcatcccgagctcaccaccgactccatgatccccaagtacgccacggccgagatccgcagacatttagccaatgccaccacggacctcatgaaactggaccatgaagaggagccccagctctccgagccctacctttctaaacaaaagaagctcatggccaagatcttgggagcatgatgatgtgagctacctgaagaagattctcggggaactggccatggtgctggaccagattgaaggcggagctggaagaaagaggaagctggagaacgagg

SEQ ID NO: 21457 - DNA, 1543 bp, Homo sapiens
  SIMILAR (539)..(841): 731254mologous to Homo sapiens dJ995J12.1 (similar to ganglioside-induced differentiation associated protein 1),accession number AL035462,Smith-Waterman Score=339.
ggaagaacctctcagttaaattaagtgaaaacggtacactgaagaactgtgtagttgctgatagcgaaacggatatagatgtatatatgtacacacgcgtatacgtgtacattccacgcatagaaaattcgtggaatgacacaataaaattggtgacaggagccaccatctcagctgtgggtggagacattgatgctcaaggggaatgggcctttcctcttttggggataccctccctctcccctggaccagagtggaaggtgcgggtggtgatccccgataagggcctggtgtgcgaggagcgggacgtgagcctgccacagagcgagcccaaggagccctggttcatgcggatcaacctgggcgaggaggtgcccgtcatcatccaccgcgacaacatcatcagtgactatgaccagatcattgactatgtggagcgcaccttcacaggagagcacgtggtggccctgatgcccgaggtgggcagcctgcagcacgcacgggtgctgcagtaccgggagctgctggacgcactgcccatggatgcctacacgcatggctgcatcctgcatcccgagctcaccaccgactccatgatccccaagtacgccacggccgagatccgcaggacatttagcccaatgccaccacggacctcatgaaactggaccatgaagaggagccccagctctccgagccctacctttctaaacaaaagaagctcatggccaagatcttggagcatgatgatgtgagctacctgaagaagatcctcggggaactggccatggtgctggaccagattgaggcggagctggagaagaggaagctggagaacgaggggcagaaatgcgagctgtggctctgtggctgtgccttcaccctcgctgatgtcctccctgggagccaccctgcaccgcctcaagttcctgggactgtccaagaaatactgggaagatggcagccggcccaaacctgcagtccttctttgagagggtccagagacgctttgccttccggaaagtcctgggtgacatccacaccaccctgctgtcggccgtcatccccaatggctttccggctggtcaagaggaaacccccatccttctttcgggcgtcctttctcatgggctcccttgggtgggatgggctactttgccctacatggtacctcaagaaaaaaatacatctagggccaggcctggggcttggtgtctgactgtcggtgtctctgtgctgtgtgattccccgtgagctctcagtaactcactgtctcatgaacacttggacagccctccccgcccttcgttctgagtaataataccgtcagtgtgaaaacattccgtagtttagaagtagacgttgcaaatgctgtgactcaaggccacgggctcttgctaaaagagagagaggaagcgagagagagagagaaaaaacaaaaaaccagaaaaccacgaattgcctttttctatccgatttcaaagggtcctccaagatgggaacttgtggaagacttggtttaaggaatcttgaaggggaactc

SEQ ID NO: 21458 - DNA, 1155 bp, Homo sapiens
  SIMILAR (478)..(1152): 1001254mologous to Homo sapiens elongation factor-1- beta,accession number X60489,Smith-Waterman Score=1162.
atggatccatccatttacttcttgccttccaagagggaaggtcacctgcaagcctacattcgtgacagcgttcccgaggaccccctgatcctcatcttcttttctgcttcatcagaccagagaccgtggctaaaagccccccatctgccggctctcaggggcttccgaggcggcggggcgggaggcggcgcccagtcaaggacaacagaagactacgtcgcgtgggccaaaggaaacagtcccacctcaccttctccccggagccgcggaggctgttctgctaaactgtctggaccacgacgaccccctaggaggccgggtcgcttattcaatatggcggcctcggctaactctgtcagccgggcctggagaacggaaagcccggagggactagaatccttgcattcgacaagtttgtcggcaatttccgtcagccgaccagagggcggagctgagctctcggatacagccgacaccatgggtttcggagacctgaaaagccctgccggcctccaggtgctcaacgattacctggcggacaagagctacatcgaggggtatgtgccatcacaagcagatgtggcagtatttgaagccgtgtccagcccaccgcctgccgacttgtgtcatgccctacgttggtataatcacatcaagtcttacgaaaaggaaaaggccagcctgccaggagtgaagaaagctttgggcaaatatggtcctgccgatgtggaagacactacaggaagtggagctacagatagtaaagatgatgatgacattgacctctttggatctgatgatgaggaggaaagtgaagaagcaaagaggctaagggaagaacgtcttgcacaatatgaatcaaagaaagccaaaaaacctgcacttgttgccaagtcttccatcttactagatgtgaaaccttgggatgatgagacagatatggcgaaattagaggagtgcgtcagaagcattcaagcagacggcttagtctggggctcatctaaactagttccagtgggatacggaattaagaaacttcaaatacagtgtgtagttgaagatgataaagttggaacagatatgctggaggagcagatcactgcttttgaggactatgtgcagtccatggatgtggctgctttcaacaagatctaa

SEQ ID NO: 21459 - DNA, 2529 bp, Homo sapiens
  SIMILAR (121)..(774): 891254mologous to Homo sapiens 75 kDa subunit NADH dehydrogenase precursor,accession number X61100,Smith-Waterman Score=994.
atggcgctgcgagtggtgcggagcgtgcgggccgtgctctgcagcctgcacgtggcttgtgagaaggttggcatgcagatccctcgattctgttatcatgaaaggttgtctgttgctggaaactgcaggatgtgccttgttgaaattgagaaagcccctaaggaccagtccatgatgtttggaaatgataggagccgatttttagaggggaagcgtgctgtggaagacaagaacattgggccattggtaaagaccatcatgacaagatgtatacagtgtactcgctgcatcaggtttgcaagtgagattgcaggagtagatgatttgggaacaacaggcagaggaaatgatatgcaagttggcacatacattgaaaagatgttcatgtctgaactgtctgggaatatcattgatatctgccctgtaggtgccctaacctctaagccctatgcctttactgcccggccttgggaaacaagaaagacagaatccattgatgtaatggatgcggttggaagtaatattgtggttagcacaagaactggagaagtgatgaggattttgccacgtatgcatgaggacatcaatgaagagtggatctctgataaaaccagatttgcctatgatgggctaaaacgtcaaagacttaccgagccaatggtcagaaatgaaaaagggcttttaacctatacttcttgggaggatgcgctctctcgcgtagctggaatgccgcctgccttggccctgcaaagtgcggagattgcagcctctgcccggccgccaccccgtctgggaagtgaggagcctctctgcctggctgcccatcgtctgggatgtgaggagcccctctgcctggctgccagtctggaaagtgaggagcgtctctgcccggccgccatcccacctgggaatctcaggtatgtctttatcagcagcgcgaaaacagacaaatacagcaaattggcaccagtagagtgggtcactgttgaaaaggtacctgaaaatgtggaagtgacattggaactgggtaacaggcagagtagagacagggtttcacgaattccaggaaatgccatcgtcatttggttcacggggttcaagtggaagaagacagtcaccactctgtggttcctcaatctagccattgcggatttcatttttcttctctttctgcccctgtacatctcctatgtggccatgaatttccactggccctttggcatctggctgtgcaaagccaattccttcactgcccagttgaacatgtttgccagtgtttttttcctgacagtgatcagcctggaccactatatccacttgatccatcctgtcttatctcatcggcatcgaaccctcaagaactctctgattgtcattatattcatctggcttttggcttctctaattggcggtcctgccctgtacttccgggacactgtggagttcaataatcatactctttgctataacaattttcagaagcatgatcctgacctcactttgatcaggcaccatgttctgacttgggtgaaatttatcattggctatctcttccctttgctaacaatgagtatttgctacttgtgtctcatcttcaaggtgaagaagcgaagcatcctgatctccagtaggcatttctggacaattctggttgtggttgtggcctttgtggtttgctggactccttatcacctgtttagcatttgggagctcaccattcaccacaatagctattcccaccatgtgatgcaggctggaatccccctctccactggtttggcattcctcaatagttgcttgaaccccatcctttatgtcctaattagtaagaagttccaagctcgcttccggtcctcagttgctgagatactcaagtacacactgtgggaagtcagctgttctggcacagtcctaaaggaagctaaaaaaccaatggtggttttaggcagttctgcactccaaagaaatgatggagcagcaattcttgcagctgtttctagcattgcacaaaagattcggatgactagtggtgttactggtgattggaaagttatgaatatccttcataggattgcaagtcaagtagctgctttggaccttggctataagcctggggtggaagcaattcggaagaaccctcccaaggtgctgtttctcctgggagcagatggaggttgtatcacacgacaggatttgccaaaggattgtttcattatttatcaagaccttgtttcgggagctgccctgcccacttcctctccctcctcccaatcccggaggcttccaagccatctgacaaccacgtctcccccttgggatctgttccggtgttggttttaccggacagtgaccaaaaaggaggggaaactcctacatctggggactgctccagaaaccctgcctgatcctgcccctctcactgacagtctcctcgctgctccctacatcttcctctccgccggagctgtccagaagggggattttggacccaaaggaatcgggatgaaagggggtgggtactcaagctga

SEQ ID NO: 21460 - DNA, 2066 bp, Homo sapiens
  SIMILAR (223)..(1440): 721254mologous to Homo sapiens 75 kDa subunit NADH dehydrogenase precursor,accession number X61100,Smith-Waterman Score=1350.
atgttaaggatacctgtaagaaaggccttagtaggcctttctaagtctcctaaaggatgtgttcgaacaactgccacagcagcaagcaacttgcattcgagtattcgttgatggtcagtctctcatggctggaaccgggcacgaccgttctccaagcttgtgagacggattggcatgcagatccctcgattctgttatcatgaaaggttgtctgttgctggaaactgcaggatgtgccttgttgaaattgagaaagcccctaaggaccagtccatgatgtttggaaatgataggagccgatttttagaggggaagcgtgctgtggaagacaagaacattgggccattggtaaagaccatcatgacaagatgtatacagtgtactcgctgcatcaggtttgcaagtgagattgcaggagtagatgatttgggaacaacaggcagaggaaatgatatgcaagttggcacatacattgaaaagatgttcatgtctgaactgtctgggaatatcattgatatctgccctgtaggtgccctaacctctaagccctatgcctttactgcccggccttgggaaacaagaaagacagaatccattgatgtaatggatgcggttggaagtaatattgtggttagcacaagaactggagaagtgatgaggattttgccacgtatgcatgaggacatcaatgaagagtggatctctgataaaaccagatttgcctatgatgggctaaaacgtcaaagacttaccgagccaatggtcagaaatgaaaaagggcttttaacctatacttcttgggaggatgcgctctctcgcgtagctggaatgttgcagagttttcaaggcaaagatgtggcagcaattgcaggtggcttggtggatgctgaagccctggtagctctcaaagatttgcttaatagagtggactctgacaccttatgcactgaagaggtcttcccccactgcaggagctggcacagatttgcgttccaattatcttcttaatactacaattgctggtgtgggaagaggcagatgttgttcttctggttggtacaaacccacgtttttgaggcaccactgttttaatgctaggaatttcgaaagagctgggctgcataatgactttaaaagtggcccttattagggcagttccagtggaccttcacttacacatatgaccacctggggagactcccccaaaattcttcaaggacattgcttccgggaagcccatccatttagccaggtcctaaaggaagctaaaaaaccaatggtggtttttaggcagttctgcactccaaagaaatgatggagcagcaattcttgcagctgtttctagcattgcacaaaagattccggatgactagtggtgttactggtgattggaaagttatgaatatccttcataggattgcaagtcaagtagctgttttgggaccttggctataagcctggggtggaagcaattcggaagaaccctcccaaggtgctgtttctcctgggagcagatggaggttgtatcacacgacaggatttgccaaaggattgtttcattatttatctaaggacatcatggtgatgttggggctcccatagctgatgttattctcccaggagctgcttacacagagaagtctgctacatatgtcaacactgagggtagagctcagcagactaaggtagcagtgacacctcctggcttggcaagagaagactggaaaattataagagcactctctgagattgctggaatgactcttccatatgatactctggatcaagtaaggaacagattggaagaagtctctcctaatcttgttcgatatgatgatattgaaggggctaattacttccagcaagcaaatgagctctcaaagctagtgaaccagcagcttcttgctgacccacttgttccacctcagctaactataaaagacttctacatgacaggagaagtaaccgaaattaatgaagctcttgcagaaaatccaggacttgtaaacaaatctcgttatgaagatggttggctgatcaagatgacactgagtaacccttcataa

SEQ ID NO: 21461 - DNA, 2842 bp, Homo sapiens
  SIMILAR (783)..(2264): 771254mologous to Homo sapiens 75 kDa subunit NADH dehydrogenase precursor,accession number X61100,Smith-Waterman Score=1762.
  misc_feature (1)...(2842): n = a,t,c or g
tttccgttctcttggcccggctgacagagttagccgaggccgccatattgaataagcgacccggcctcctagggggtcgtcgtggtgcagacagtttagcagaacagcctccgcggctccggggagaagcaatatgttaaggatacctgtaagaagggccttagtaggcctttctaagtctcctaaaggatgtgttcgaacaactgccacagcagcaagcaacttgattgaagtatttgttgatggtcagtctgtcatggtggaaccgggaacgaccgtcctccaagcttgtgagaaggttggcatgcagatccctcgattctgttatcatgaaaggttgtctgttgctggaaactgcaggatgtgccttgttgaaattgagaaagcccctaaggttgtagctgcttgtgccatgccagtaatgaagggttggaatatcctaacaaactcagaaaaatccaaaaaggccagggaaggtgtgatggagttcttattagcaaatcacccattggactgtcctatttgtgaccagggaggtgaatgtgatctgcaggaccagtccatgatgtttggaaatgataggagccgatttttagaggggaagcgtgctgtggaagacaagaacattgggccattggtaaagaccatcatgacaagatgtatacagtgtactcgctgcatcaggtttgcaagtgagattgcaggagtagatgatttgggaacaacaggcagaggaaatgatatgcaagttggcacatacattgaaaagatgttcatgtctgaactgtctgggaatatcattgatatctgccctgtaggtgccctaaacctctaagccctatgcctttactgcccggccttgggaaacaagaaagacagaatccattgatgtaatggatgcggttggaagtaatattgtggttagcacaagaactggagaagtgatgaggattttgccacgtatgcatgaggacatcaatgaagagtggatctctgataaaaccagatttgcctatgatgggctaaaacgtcaaagacttaccgagccaatggtcagaaatgaaaaagggcttttaacctatacttcttgggaggatgctctctctcgcgtagctggaatgttgcagagttttcaaggcaaagatgtggcagcaattgcaggtggcttggtggatgctgaagccctggtagctctcaaagatttgcttaatagagtggactctgacaccttatgcactgaagaggtcttccccactgcaggagctggcacagatttgcgttccaattatcttcttaatactacaattgctggtgtggaagaggcagatgttgttcttctggttggtacaaacccacgttttgaggcaccactgtttaatgcatggattcgaaagagctggctgcataatgacttaaaagtggcccttataggcagtccagtggacctcacttacacatatgaccacctgggagactcccccaaaattcttcaagacattgcttcgggaagccatccatttagccaggtcctaaaggaagctaaaaaaccaatggtggttttaggcagttctgcactccaaagaaatgatggagcagcaattcttgcagctgtttctagcattgcacaaaagattcggatgactagtggtgttactggtgattggaaagttatgaatatccttcataggattgcaagtcaagtagctgctttggaccttggctataagcctggggtggaagcaattcggaagaaccctcccaaggtgctgtttctcctgggagcagatggaggttgtatcacacgacagngatttgccaaaggattgtttcattatttatcaaggacatcatggtgatgttggggctccccatagctgatgttattctcccaggagctgcttacacagancaagtctgctacatatgtcaacactgagggttaagcttcagccagcattatgttagcggtgaccactctctggcttgtcaagagaggactggtaaaattataagagcactctctgagattgctggaatgactccttcccatatgatactctggaatccaagtaaggaaccagattggaaagaagtcttctcctaatcttgttccgatatgatgatattgaagggggctaattacttccgacaagcaaatgaggctctcaaagctagtgaaccaggcagcttcttgctgacccacttgttcccacctcagctaactataaaagactttctacatgacagattcaattagcagagccctcacaggacaatgggcccaaatgtggtccaaagcctgtccacacagggtgcccccggcagtaggaggaacccatcccatatgctgaagccttcctacctagggatccccagttttgcccgcagataattaatgggccaactgtagtgcagtgatccctttacaaggtttatttcctttgtaaaaaaaaaataataataatttgaatcatgtaatatttaaggtcatactatgcctattctgaaaatgatatctagttatcaactttgcagtttgaaaaacatgtattgtgtgtaaaggttaaataacaaaactatgcagatgctcttaaaagcattgataacctttgtgaccgaacataaagagatccttaaattatgagttgttggcttatcttcataaataatttgtctgtaaaatggatgaaatgaaaagaggttcaattaaaacctacttttttctagtgctaaaggaaaagatttaagcaccttgtcaagctgggtaaataggaaaaatacataatcatgctcagatatgtatctaggataattataattaaaaataatcatagtaacaatg

SEQ ID NO: 21462 - DNA, 835 bp, Homo sapiens
  SIMILAR (246)..(464): 631254mologous to Homo sapiens dJ34B21.1 (novel BZRP (benzodiazapine receptor (peripheral) (MBR, PBR, PBKS, IBP, Isoquinoline-binding protein)) LIKE protein),accession number AL031778,Smith-Waterman Score=250.
atcagcttaggtagaacagttctcggtgagggccagctacatacctggctaagcgctgcccactgcagaaaagctcatcacccgggacctgatctccaggactcagaagcacttggaggaaggcctattcacttagaagcagttaccagtgctgggcagtgtcctccaagtgccagaggagtgctgtggagaaaagaagtccatggaagccaggagatgggcaagattttgcctcttcaaggtgaatgcggcttcaaggggctatctttgtgctcctgccccacctggggcccatcctggtctggctgttcactcgtgatcacatgtctggttggtgtgagggcccgaggatgctgtcctgggtgcccatttttacaaagtcttatttgcttgttacagacagccatctaattctgtcgtggggtgagtacttgtttctcacacatggccctggtacccaatggggtgggaacaagtcctctatatctgaattacctatgctgttcagctcaccatcagctggactgtcctggttctctttttcacagtccacaaccctggtctggtaaggcacacagtgctcagtagcagaagtaatgtgggagagggtgaaaccacctggctccagaagcacatactggctgccctgttactgctgccctacctagcctggctcaccgtgacttcagccctcacctaccacctgtggagggacagcctttgtccagtgcaccagcctcagcccacggagaagagtgactgaggccctagggcatgggagaggagggacgcccagggtggggaggaagagtctgcaagcagggctgtggagtta

SEQ ID NO: 21463 - DNA, 1497 bp, Homo sapiens
  SIMILAR (215)..(274): 451254mologous to Homo sapiens thyroid hormone receptor- associated protein complex component TRAP240,accession number AF117754,Smith-Waterman Score=41.
atgagcccctgcagcggcagcactctggcccttctgtccctgccagcctctgacctgggagacgtaggtggtgtaagcgtaaccgaagacatagcaggatctcttgtggaagcaggcacttggtggacacccaagcaagaagatgaacaactgttgagcaagggtgatatgctcttcactgagaaggtatacaggttgatgttggttaatttccacactggtacaaacattgctgtctccatgcaagaaaaaggtgaaggagcaggacaaattattccttgtcagtacctgttgcaacctgtgaagcatgaagatagagaaatctatccccagcatttaaaatccctggctttttcggcctttacccagtgtcggaggccacttccaacatcaaccaatgtgaaaacattgactggctttggtccaggtttagccatggaaactgcccttagaagtcctgatagaccagagtgtattcgactttatgcacctccttttattctggctccagtgaaggacaaacagacagagctaggagaaacatttggagaagctggacagaaatataatgttctttttgtgggatactgtttatcacatgatcaaaggtggattcttgcatcttgcacagatctatatggagaacttttagaaacttgtatcattaacatcgatgttccaaatagggctcgtcggaaaaaaagttctgctagaaaatttggtctacagaaactttgggagtggtgcttaggacttgtacaaatgagttcattgccatggagagttgtaattggtcgtctaggaaggattggtcatggagaattgaaagattggagctgtttgctgagtcgtcgaaacttgcagtctctaagtaaaaggctcaaagacatgtgtagaatgtgtggtatatctgctgcagactcccctagcattctcagtgcttgcttggtggcaatggagccgcaaggctcttttgttattatgccagattctgtgtcaactggttctgtatttggaagaagcacgactctaaatatgcagacatctcagctaaataccccacaggatacatcatgtactcatatacttgtgtttcctacttctgcttctgtgcaagtagcttcagctacttataccactgaaaatttggatttagctttcaatcccaacaatgatggagcagatggaatgggtatctttgatttgttagacacaggagatgatcttgaccctgatatcattaatatccttcctgcttctccaactggttctcctgtacattctccaggatctcattacccccatggaggtgatgcgggcaagggtcagagtactgatcggctactatcaacagaacctcatgaggaagtacctaatattcttcagcaaccattggcccttggttactttgtatcaactgccaaagcaggtccattacctgactggttctggtcagcatgtcctcaagcacaatatcagtgtcccctttttcttaag

SEQ ID NO: 21464 - DNA, 1734 bp, Homo sapiens
  SIMILAR (25)..(1119): 991254mologous to Homo sapiens thyroid hormone receptor- associated protein complex component TRAP240,accession number AF117754,Smith-Waterman Score=1853.
atgccggaggtggagcttgccagaactgatgaatccccagaaccactgccaatccccacatttttgttgggttatgattatgattatctggtgctttctccatttgctcttccttattgggagagacttatgctggaaccctatggatctcaaagagatatagcctatgttgtactgtgtccagaaaatgaagccttgttaaatggagcaaaaagcttttttagagatcttactgcaatatatgagtcctgtcgattaggtcaacatagacctgtttctcgactgttaacagatgggatcatgagagttggatctactgcatcaaagaaactatcagaaaagttggtagcagaatggttttctcaggcagctgatggtaacaatgaagcattttctaaactcaagctttatgcacaagtctgcagatatgacctaggtccttatcttgcttccctgccattggacagctctctactttcccagccaaatttagttgcccctacaagtcagtctttgattactccacctcagatgacaaatactggaaatgctaatactccatctgccaccttagcatctgcagcgagcagcactatgacagtgacttcaggtgttgccatatctacttcagttgccacagctaattcaactttgaccacagcttcaacttcatcttcatcatcctccaacttgaatagtggagtatcatcaaataaactaccttcgtttccaccctttggcagtatgaacagtaatgctgcaggatccatgtctacacaagcaaatacagttcagagtggtcagctaggagggcaacagacatcagctctacagacagctgggatttctggagaatcatcttcacttcccactcagccgcatcctgatgtgtctgaaagcacgatggatcgggataaagtgggaatccccacagatggtgattcacatgcagtcacgtatccacctgcaattgttgtttatataattgatccttttacatacgaaaatacagacgagagcactaactcttctagtgtgtggacattggggctacttcgatgctttctagaaatgggccagactcttcctcctcatatcaagagtactgtttctgtacagaccagtacggtggccgacgggagtcagacgctggggatgaatgaaggtgctgggtgcaggttgaaaaagtctcccgcttttccgttcctacagtcccggttctgcctttgtgtggtgcccccatccttcccactttgtatcgacaacccggatcaacaaacagtaataatgactgaatgtacaagtcttcagtttgtcagcccttttgcttttgaggcaatgcagaaggtggatgttgtttgcctggcatctttaagtgatccagaattaagacttcttctgccctgtttggtacggatggcactttgtgcacctgctgaccagagccaaagctgggctcaggataagaaactcatccttcgccttctttctggagtggaagctgtcaactccattgttgcattgttgtccgtggactttcatgctttagaacaagatgccagcaaagaacagcagcttaggcataaacttggaggaggcagtggagagagcatcctggtatcacagcttcagcatggactgacgttagagtttgaacacagtgattcacctcgtcgattgcgtcttgtgcttagtgaactgttggcaattatgaacaaggtgcatttcttttaa

SEQ ID NO: 21465 - DNA, 8785 bp, Homo sapiens
  SIMILAR (3068)..(6625): 601254mologous to Homo sapiens Human glycophosphatidylinositol-anchored protein GPI-122,accession number Y50125,Smith-Waterman Score=3656.
ccccggagtctgtgtttctctctctgggcggaggcggcggtactggcggatggtgggttgaggcgccggcggcggctgctgcgagggacgatgagtgcctccttcgtgccgaacggggccagcctggaagattgtcactgtaacctcttctgcctggctgacttgacaggaattaagtggtaaaaatatgtatggggaggcccaacttctgcccctattctgtttcctgtgacagaagaacaccccattttgagcagttctagtcgctgccttacggcacatgtacttggtgttcggcggcgagatcaaagacctgaaagaagagaaattgtgaatattttggtggggtgaagaccccagttttgctgaccttattcaccatgacttatcagaagaagaagatggagtgtgggagaatggactttcctatgaatgccgtactctgcttttccaaagcagttcacaatctattggaacggtgtttaatgaacaggaattttgtacgtattggcaagtggtttgtaaagccttatgaaaaagatgaaaaacctataaataaaagtgaacacttgtcctgctccttcacctttttcttgcatggagacagcaatgtttgtaccagtgtggaaattaaccaacatcaacctgtataccttctcagtgaagagcatatcacccttgctcaacagtctaatagcccatttcaagttatcttatgcccatttggactaaatggcactctcacaggacaggcattcaagatgtctgattcagctacaaaaaaattaattggtgaatggaaacagttctatcctatctcatgttgcttgaaggagatgtctgaagaaaaacaggaagatatggattgggaagatgattctttagctgcagtagaagttcttgttgctggtgtccgaatgatctacccagcatgctttgttctagtccctcagtcagacattcctactcctagccctgtgggatccactcactgttcatcttcttgcttgggtgtccaccaagtgcctgcttccacaagagatcctgctatgtcttcggttacgcttacaccacctacgtctcctgaggaagtccaaacagttgatcctcagtctgtccagaagtgggtcaaattttcttcagtatctgatggcttcaactccgatagtactagccaccatggtgggaaaatacccagaaaattagcaaatcatgtggtggatagagtttggcaagaatgcaatattgaacagagcacagaacaagaggaagtattctgcttcatcaggtggtctatgcgaagaagcgacagctgctaaagtggcatcctgggattttgttgaagccacacaaagaacaaattgcagttgtttgaggcacaaaaaatctcaagtcaagaaatgctggacaacaaggacaggcaccatctttaggtcagcaacaacaaatacttcctaagcacaagaccaatgagaagcaagaaaagagtgaaaagccacagaaacgccccttgactccttttcaccatcgtgtggtctgttagtgatgatgttggcatggaccgcagattccagccagccaaagacttgtgactctctgctcccagacagtcaaagtgagattttcaaatatccggaactaatgatgtagcaaaagactcctcagatgcatggcaccgaaatggcaaattcacctcaaccacccccacttagtccctcacccttgtgatgtggttgatgaaggagtgactaaaacaccttcaactcctcagagtcaacatttttatcaaatgccaacaccagatcccttggttccttctaaaccaatggaagataggatagacagtttgtcccagtctttcccacctcaatatcaggaagctgtagaacctacagtatatgttggtacagcagtaaacttggaagaagatgaagccaatatagcctggaagtattacaagttcccaaagaaaaaagatgtagagtttttaccacctcaacttccaagtgataaattcaaggatgatccagttggaccttttggacaggaaagtgtaacatcagttacagagttaatggtgcaatgtaagaaacctttaaaagtttctgatgaattagtgcagcaatatcaaattaaaaaccagtgtctttcagcaatagcatctgatgcagaacaagaacctaaaattgatccatatgcatttgttgaaggagatgaggaattcctttttcctgataaaaaagatagacaaaatagtgagagagaagctggaaaaaaacacaaggtagaagatgggacatctagtgtaacagtgttatcacatgaagaagatgctatgtcattatttagtccctctatcaagcaagatgctccacgccctactagtcatgcccgtcctccatcaacaagtttgatttatgactcagacctggctgtctcttatactgaccttgataatctcttcaattctgatgaagatgaactaacacctggatctaaaaaatcagcaaatggatcagatgataaagccagctgcaaggaatcaaagacaggaaatctggacccgttatcttgcataagcactgcagatcttcataaaatgtatcctacaccaccatcattggaacaacatattatgggattttccccaatgaatatgaataataaagaatatggtagtatggatacaacacctggaggaactgttctagaaggaaatagttctagtataggagcgcagttcaaaattgaggttgatgagggattctgtagccccaaaccttctgaaattaaagatttttcttatgtctataagcctgaaaattgtcaaattctagtgggatgttccatgtttgcacctctaaaaactctaccaagccaatatctgccccctatcaaattgccagaagagtgtatttaccgtcagagttggactgttggaaaattggaattgctttcttcagggccttcaatgccattcatcaaagagggtgatggaagtaatatggatcaagaatatggcactgcttatacacctcaaactcatacttcttttgggatgcctcctagcagtgcacctcctagtaacagcggagcaggaattcttccttctccatccacccctcggtttccaactccaaggactccaaggactcctcggactcctcgtggagctggtggacctgctagtgctcaaggttcagtcaaatatgaaaattcagacttgtattcaccagcttctaccccatctacatgcagaccccttaattctgttgaacctgcaactgtcccttccatccctgaagcacacagtctttatgtaaacctcatcctttcagaatcagttatgaatttgtttaaagactgtaactctgatagttgttgcatctgtgtttgcaacatgaacatcaagggtgccgatgttggagtttacattccagatccaacgcaggaagcacaatataggtgtacctgtggcttcagtgctgtcatgaacagaaaatttggaaacaattcaggattatttcttgaagatgaactagatatcataggacgcaatacagactgtggcaaagaagcagaaaaacgttttgaagctctcagggctacctctgctgaacatgttaatggaggactaaaggaatctgaaaaattatctgatgatttgatattattgctacaagatcagtgcactaatttattttcaccctttggagcagcagaccaagatccttttcctaaaagtggtgtaattagcaattgggtacgtgttgaagagcgtgactgttgcaatgactgctaccttgcattagaacatgggcgtcagttcatggataacatgtcaggaggaaaagttgatgaagcacttgtgaaaagttcatgcttacacccctggtccaaaagaaacgatgtgagtatgcagtgctcacaggatatacttcgaatgctcctctctcttcagccagttcttcaggatgccattcagaaaaaaagaacagtaagaccttggggtgttcagggtcctctcacttggcaacaatttcataaaatggctggccgaggctcttatggaactgatgaatccccagaaccactgccaatccccacatttttgttgggttatgattatgattatctggtgctttctccatttgctcttccttattgggagagacttatgctggaaccctatggatctcaaagagatatagcctatgttgtactgtgtccagaaaatgaagccttgttaaatggagcaaaaagcttttttagagatcttactgcaatatatgagtcctgtcgattaggtcaacatagacctgtttctcgactgttaacagatgggatcatgagagttggatctactgcatcaaagaaactatcagaaaagttggtagcagaatggttttctcaggcagctgatggtaacaatgaagcattttctaaactcaagctttatgcacaagtctgcagatatgacctaggtccttatcttgcttccctgccattggacagctctctactttcccagccaaatttagttgcccctacaagtcagtctttgattactccacctcagatgacaaatactggaaatgctaatactccatctgccaccttagcatctgcagcgagcagcactatgacagtgacttcaggtgttgccatatctacttcagttgccacagctaattcaactttgaccacagcttcaacttcatcttcatcatcctccaacttgaatagtggagtatcatcaaataaactaccttcgtttccaccctttggcagtatgaacagtaatgctgcaggatccatgtctacacaagcaaatacagttcagagtggtcagctaggagggcaacagacatcagctctacagacagctgggatttctggagaatcatcttcacttcccactcagccgcatcctgatgtgtctgaaagcacgatggatcgggataaagtgggaatccccacagatggtgattcacatgcagtcacgtatccacctgcaattgttgtttatataattgatccttttacatacgaaaatacagacgagagcactaactcttctagtgtgtggacattggggctacttcgatgctttctagaaatggtccagactcttcctcctcatatcaagagtactgtttctgtacagattattccttgtcagtacctgttgcaacctgtgaagcatgaagatagagaaatctatccccagcatttaaaatccctggctttttcggcctttacccagtgtcggaggccacttccaacatcaaccaatgtgaaaacattgactggctttggtccaggtttagccatggaaactgcccttagaagtcctgatagaccagagtgtattcgactttatgcacctccttttattctggctccagtgaaggacaaacagacagagctaggagaaacatttggagaagctggacagaaatataatgttctttttgtgggatactgtttatcacatgatcaaaggtggattcttgcatcttgcacagatctatatggagaacttttagaaacttgtatcattaacatcgatgttccaaatagggctcgtcggaaaaaaagttctgctagaaaatttggtctacagaaactttgggagtggtgcttaggacttgtacaaatgagttcattgccatggagagttgtaattggtcgtctaggaaggattggtcatggagaattgaaagattggagctgtttgctgagtcgtcgaaacttgcagtctctaagtaaaaggctcaaagacatgtgtagaatgtgtggtatatctgctgcagactcccctagcattctcagtgcttgcttggtggcaatggagccgcaaggctcttttgttattatgccagattctgtgtcaactggttctgtatttggaagaagcacgactctaaatatgcagacatctcagctaaataccccacaggatacatcatgtactcatatacttgtgtttcctacttctgcttctgtgcaagtagcttcagctacttataccactgaaaatttggatttagctttcaatcccaacaatgatggagcagatggaatgggtatctttgatttgttagacacaggagatgatcttgaccctgatatcattaatatccttcctgcttctccaactggttctcctgtacattctccaggatctcattacccccatggaggtgatgcgggcaagggtcagagtactgatcggctactatcaacagaacctcatgaggaagtacctaatattcttcagcaaccattggcccttggttactttgtatcaactgccaaagcaggtccattacctgactggttctggtcagcatgtcctcaagcacaatatcagtgtcccctttttcttaaggcctctttgcacctccacgtgccttcagtgcaatctgacgagctgcttcacagtaaacactcccacccacttgactcaaatcagacttcagatgtcctcaggtttgttttggaacagtacaatgcactctcctggctaacctgtgaccctgcaacccaggacagacgctcatgtctcccaattcattttgtggtgctgaatcagttatataactttattatgaatatgctgtgatcttcatttgatggaactgtgcaagaaaagaacaaggaaaaatggatgtttcgctgcaggattaagttacaattatcttctcagtgaaggtcatttgtgatggggtctaattcttattacttcaacaaatattgttttgacttggggggaggggctataaccctgctatttttcattgactctattgaactctttaggatgatgactgatcatacaaaacgtattataacattttcgtagcaaaattaaccttttttttttccagtcacagtatttgtgaaaagtaatgagccatagtacccagtcatgttaaatgaatattaaaagcatggagaaggaaacatgaggagcaatgaatttcaacatatggcttcagaacatcaagatgttcttgtattggattatagtatctagtattcaaaaatgcctgcatctcttctcttatttattgtaagtttttaaatgtataaattgtcttatatttcttaacctcttttataaaaattttcctagaaggtttatactgccttcttgctttaaagcctattggtctaaaatatatgtaatcgtcttaattaaaaagttgcagtagggtcgcttttagagtattatttttttgtaagggggtgggtgggacagtaaatttgtattgtctcgatgtacagtttaacggggatagagggggaataatgtccataccattgtgtgtggaggatttacagctaagctgtagttgcagagtacatgtacagtaatgaagttcactgtgtttataaattgaaaaggtaccaggtcttacagcattttatatatcacatctttacagaataacatgatggcaatatacaagtggtattgttaggtggtttaacttagaataaaatgagaattcttcagttatattttgtactatggtttagggctatgactaatatttcaggccatttccggtgaaagaaacttagttttacaagaaaaaccatttgctactgaattgcttaaactaattttagtgtttaatgttacatgcttaaatttttttcagttttaacagtgggcatattttaggcatgggaaatattattatggaatttattttccagggatctgctataaggttgaaatttagcccagctctaggcattttacaaattatttttccaaggcagtccattcttgattgtttgacttttttttttaaaatttaaagattggggaatgtatgtgagagtatgccatatgtatgggtgtgtgtgtgtgcgcgccaatccaaactgtgggtggtaaaataggatccccagtgaattcctgggtattcaggactctattcccactaggtggaaaggaacccttttttttaaacttcccttgccttttttatttatttaattttcttgggtttgggagatgtccagtccccaaacaccaggagtctggtacctttctataacacagctcagattaggggtagggcatatgcccaagggggttctcaccctcccctaaagaaggggacttggaattttaggggactttaattcacccctcccttcaataccaactttcccccttccttggtttgcacatgccaagataacggcttttatgcaggctgtacccccttgaaaaatcctttctacagtgctgctcgcaaagagagcccacggtcgcctccctacccggcattgccgacctggaattcacagtcgcccggagtctacctagcttttcttgggaaggcagtctaggccaaaatttcctatttggtaccgttcacctaattatctaccagggacaaaatccagttgtatttaccaaaaactctacttccaggtgtttgttttagttttttttttttactgaaacttgtttttggtgaatacctctgtgccttagaattaaatatcactttccttatgaacaacataaccttccttcagattgtgtatatgaaaacattagcaagtcttgttttttcctatgaagcaaacacgaattggtgacaaaggttgtcaatcatttcttcaaaattataatgcagttctaatggtcagcatattttgatattaaatttaaagatcacctctctgcatttgtttttaaattatgctaatacaccacacattatgttggtatgttttgttctgtactttcttt

SEQ ID NO: 21466 - DNA, 1936 bp, Homo sapiens
  SIMILAR (1577)..(1524): 941254mologous to Escherichia coli similar to E. coli YjhH,accession number U70214,Smith-Waterman Score=92.
tactctggctttgtctgggtttatgactttttaaaaatcatcatgttcttatttatctatttatgagacagggtctttttctgtcgcccaggctggaatgcaatggcgagatgatggctcactgcagcctcaacctcccgggctcaagtgatcctcccaccttggcctcccaagcagctgggactataggccccagtagtcactacacctggctaacttatcatgtttatttaatgtgatacaatgaaaccctgatttgatggccacctacatgtatttcagtcctaaaatcccagccaaaaacttatgcagtacatcctaaatggcactgccacttacagaagcgattcagaaaggggtaaacttccaaaaagtccagaaatccattcttagtcctgcttcactgcacaaagacatgggaatttaacacatcactcactggaaagatgctgcccctgcaaatgcgcaaccctgttaactacttagattcaacccacactaggccccacttagggatctccaggcacagacaggatgcgctgagtagggaacatgtccccacactactagggacacccatagagggacggtcttcaccaactgcctgatcaaacctgagttacaaacgggaaagcacagtgtccaagaaacgactagaggctacactggatacacaagtgaacatcaagatgaaccaggtaccaatgatggaagcaccgaagctgcaataccttttacttacaatgggagatctagtattgcagtcagagatcagtagtgaacagggtgatgtccttattgtccgtgtcactgacaccacgtcactggtcgtgctggtcggtcggtgtattgcgccccccttttccttccttcctatatcaaaacccgagctcaccagtgtacgcaacgcgtttgcggcatacatgtttccattcccacggaagagggcgcgccgtggctgcttgcagttccgcaagcggctacatcacagagctcagcgggcgggtagctacgcgtttacggctaagcgtttgatcggcggccggcgtaggcggctacttgcaaatcctgcccaagccgtggcccacgcaaaatcggcgctatacggcggatggcagcgtcaccgccaaaaggaaatggcccttaaaatccatctgccagaggcggttcggcgcgtcgtgttcgaccggcccgtggcgggaatgcccgcgttcatgacggtcatgggccatacgcagcagggccgtgatgtcgtcagatgagcggttcggggaatggtgcggaatgcgcgggcggtcctgaagaccggcggcaccttcctgagcccagcgctggagccacttgtagccggtggcagcggtggcagttctcccagctcggcgccgaagagcgtaaagccattgcccgctttgcatcgatcatgtcgatcgtcgcgtgccggtgctgatcggcaccggcggcacaacgcccgggaaaccatcgaactcagccagcacgcgcagcaggcgggccggacggcatcaaccatcgactccgtcgcccacctgcgcagcatgatccataccgtcaaagtgcccatccgcacttcaccgtgctctgcggctacgacgatcatctgttcataccctgctgctcggcggcgacggggcgatatcggcgagcggcaactttgccccgcaggtgtcggtgaatcttctgaaagcctggcgcgacggggacgtggcgaaagcggccgggtatcatcagactgcatcaattccggaccagctcattcatccgtacgagtcgaggctcttcaaatgtcagcatgtcctcacacgcgggatcacatccttttaattactgtgtcctcctggctctctacgtcgccagggcatttctacttaccattcgctacttcataattagttccttcgttgtatttcggtatcactaa

SEQ ID NO: 21467 - DNA, 514 bp, Homo sapiens
  SIMILAR (203)..(316): 811254mologous to Homo sapiens ferritin heavy subunit,accession number M12937,Smith-Waterman Score=149.
  misc_feature (1)...(514): n = a,t,c or g
tcgtcggggttncntgcttcaacagtgcttggacggaacccggcgctcgttccccaccccggccggccgcccatagccagccctccgtcacctcttcgccgcctctccttagtcgccgccatgacgaccgcgtccacctcgcaggtgcgccagaactaccaccaggactcagaggccgccatcaaccgccagatcaacctgggagctctacgcctcctacgtttacctgtccatgtcttactactttgaccgcgatgatgtggctttgaagaattttgccaaataatttctttcaccaatnttcatggagggagaggggaacatgcttgaggaaattgatggaagcttgcagaaaccaangaggttggcccgantctttcnttcagggttanttcaaggaaaaccaggatttttgatggatttggggnagaagnggggttgaantgcanttgggattgttgcatttaacaattttgggaaaaaantgttggantcagttcaattatttgggaat

SEQ ID NO: 21468 - DNA, 1652 bp, Homo sapiens
  SIMILAR (458)..(1219): 701254mologous to Rattus norvegicus proteasomal ATPase (S4),accession number D50696,Smith-Waterman Score=789.
aattccggcggaagtggtggaggaacttccggcagcggcagctcaagtggccaaggcaagatgggtcaaagtcagagtggtggtcatggtcctggaggtggcaagaaggatgacaaggacaagaaaaagaaatatgaacctcctgtaccaactagagtggggaaaaagaagaagaaaacaaagggaccagatgctgccagcaaactgccactggtgacacctcacactcagtgccggttaaaattactgaagttagagagaattaaagactatcttctcatggaggaagaattcattagaaatcaggaacaaatgaaaccattagaagaaaagcaagaggaggaaagatcaaaagtggatgatctgagggggaccccgatgtcagtaggaaccttggaagagattattgatgacaatcatgccatcgtgtctacatctgtgggctcagaacactaccgtcagcattctttcatttgtagacaaggatctgctggaacctggctgctcggtcctgctcaaccacaaggtgcatgccgtgataggggtgctgatggatgacacggatcccctggtcacagtgatgaaggtagaaaaggccccccaggagacctatgcagatattggggggttggacaaccaaattcaggaaattaaggaatctgtggagcttcctctcacccatcctgaatattatgaagagatgggtataaagcctcctaagggggtccatccttttggtcccacctggccacgggtaaaacctttttgcccaaggcagtagcaaaccaaaccctcagccactttcttgagagtggttggctctgaacttattcagaagtacctaggtgatgggcccaaaacccctcccgggaattgttccggagtttctgaagaactggccccgtccctccggtttattgatagaattttgcccccattgggacacaacagatatgacctccaattcctggtgtgagaagagaattacagcgaacaatgtttggaactgctgaacccagttgggatggatttgattcttaggggagattgtgaaagttatcatggccacaaaccgaataggaaacttggatcccagcacttatccagacaaggccgcattgacaggaagattgagttccccctgcctgatgaaaagacgaagaagcgcatctttcagattcacacaagcaggatgacgctggctgatgatgtaaccctgggacgacctgatccatgggctaaagattgacctctctggtgcttgacattcaagggcaatctgtacagaagctggtcttgatgggcctttaaggagaacgtagaatgaaagtaacaaatgaagacttcaaaaaatctaaagaaaatgttctttataagaaacaggaaggcacccctgagggggtggtatctctaatgaaccatggcttgtcatcaggaaaatggttgggagatttctcaatccctgaaagggatgaggttggggggagttgcccagaggaatccctgttcccactgattttttattagcaaaacatcctgtgtcttttggagtacgatgtgtaagtgcccattgggtggcctgttggtcactgtgcatcagtctgctttcccaataaagggtgctttttcccaaacaaaaaaaaaaaaaaaaa

SEQ ID NO: 21469 - DNA, 1279 bp, Homo sapiens
  SIMILAR (236)..(817): 401254mologous to Homo sapiens ferritin heavy subunit,accession number M12937,Smith-Waterman Score=168.
agcgatagaacactgtcagagtggtgacaaccccgagagtcgtcggggtttcctgcttcaacagtggcttggacggaacccggcgctcgttccccaccccggccggaccggccatagccagcctcccgtcacttttcaccggcacccctcggattgccaaaggtcccccgccggccgcttcaagggcgggccaagccaccgcggccagccgccgccttttcataagtcgccgcccatgacgacggcgtcccacctcgcaaggtgcgccagaacgtaccaccagggactcagaggccgccatcaaccgcacagatcaacctggaggctctacgcctcctacgtttaccctgtccatgtcttactactttgaccgcgatgaatgtggctttgaagaacttttgccaaatactttcttcaccaatctcatgaggagaggggaacattgctgagaaaacttgatgaaagcttgcagaaccaacgaaggttggccgaatctttcctttcaggatattaaagaaaccaagacttgtgatgacttgggagagcgggctgaatgccaatggaagtgtgcattacatttcgaaaaaaaatgttgaatcaagtcactactggaacttgcacaaactgggccactgacaagaactgacccccaatttgtgtggacttcatttgagacacatttaccttgaatgagcagggtgaaaggccatcaaaagaatttggggtgaccacggtgacccaaactttggcgcaagatgggaagcgccccgaatcttggctttggcgaatatctcttttgacaaagcacaccctggggagacagtgataatgaaagctaagcctcgggctaatttccccaatagccgtggggtgactttcctggtcaccaaggcagtgcatgcatgttggggtttcctttaccttttctataagttgtaccaaaacatccacttaagttctttgatttgtaccattccttcaaataaagaaatttggtacccaggtgttgtctttgaggtcttggatgaatcagaaatctatccaggctatcttccagattccttaagtgccgttgttcagttctaatcacactaatcaaaaagaaacgagtatttgtatttattaaactcattagtttgggcagtatactaaggtgtggctgtcttggattcagatagaactaagggttcccgactctgaatccagagtctgagttaaatgtttccaatggttcagtctagctttcacagtttttatgaataaaaggcattaaaggctg

SEQ ID NO: 21470 - DNA, 390 bp, Homo sapiens
  SIMILAR (30)..(389): 951254mologous to Homo sapiens inter-alpha-trypsin inhibitor C-terminal,accession number X16260,Smith-Waterman Score=598.
ggcctacctcaccatccaagagctgctggccaagcgattctccgcctttggagatgctgggacccagaaggacgttcgtgctgtcagccttgcagccttctcctactcattccagctccaatacccagcggctgccagaccgagtgaccggcgtggacacagaccctcacttcatcatccacgtgccccagaaagaggacaccctgtgcttcaacatcaatgaggagcctggaggtatcctgagcctggtacaggaccccaacacaggcttctcagagaatggacagctcattggcaacaaggccatgagccctgggctgcatgacggcacgtacttcgggcgggtgggaatcgcaaaccctgccacggactttcagttggaagtgactg

SEQ ID NO: 21471 - DNA, 638 bp, Homo sapiens
  SIMILAR (1)..(372): 961254mologous to Homo sapiens inter-alpha-trypsin inhibitor C-terminal,accession number X16260,Smith-Waterman Score=633.
tttcagttggaagtgactcctcagaacattacgctgaaccccggctttggtgggcctgtgttttcctggagggaccaagctgtgctgcggcaggacggggtggtggtgaccatcaacaagaagaggaacctggtggtgtctgtggacgacggtggcacctttgaggttgttttgcaccgagtgtggaaggggagctcggtccaccaggacttcctgggcttctatgtgctggacagtcatcggatgtcagcccggacgcacgggctgctggggcaatttttccaccccatcggttttgaagtgtctgacatccacccaggctctgaccccacaaagccagatgccacgatggtggggtttgcaaaaagactacagcaaggacccgtggcatggggccgaggtgtcctgctggttcattcacaacaatggggctggactcatcgatggtgcctacactgattatatcgtccccgacatcttctgagccctctggccagcacgcctgtcctcccccggggccaaggcagaggaggaggacgacatcctgacctgctgctgaggctgtacctccttgactaagctggttccttgtgtcaaagcacctcatgccttccattaaagagaggccgtgtccaaaa

SEQ ID NO: 21472 - DNA, 1524 bp, Homo sapiens
  SIMILAR (811)..(993): 931254mologous to Homo sapiens inter-alpha-trypsin inhibitor C-terminal,accession number X16260,Smith-Waterman Score=287.
acaaaggaggcccttctcagaatcctggaagatatgaaagaggaagactatctgaatttcatcctgttcagtggagatgtgtccacatggaaagagcacttagtccaggccacgcccgagaacctccaggaggccaggacgtttgtgaagagcatggaggataaaggaatggacaatttcctcatgagaaaggggaagacgaaagctaagctagaagaaaggggagccaaccaggactcgaggaatgggagcaaggtccgctaccggagggccgcatcccacgaggagtctgagtctgaggctgctgcctgcatacgtgatgccatggcctactcagtgcatcataacctgaggtgcctggtgtcagttgattctagtgttggtgaaggtttcattgataactgggagcaggagcttcccgtgtctgctgcgtctgattatggcaagctcactgggcccttgcagcaaactcagagaggggctaccacaggttcacaggtggagaaagtgaggtgctggcagggccagaaaatcaactgtgactcctctgctgttgcacaaattcagcagccagtccagggggtcatgtcccagaaggccagacacacttacctggtggccaagcccccttcttccgggaagccgctaggggcctcggggagaactatggagcaattcaccatccacctcaccgtcaatccccagagcaaggtcacgtttcagctgacttatgaggaagtgctgaagagaaaccatatgcagtatgaaattgtcatcaaagtcaagcccaagcagctggtgcatcattttgagaccaaggaggcactccttaaaattctgggggacatgcagccaggggactactttgacctggttctttttgggactcgagtacaatcgtggaagggctcgctggtgcaagcatctgaggccaacctacaagcagctcaagactttgtgcggggcttttccctggatgaggagcaggagcttcccgtgtctgctgcgtctgattatggcaagctcactgggcccttgcagcaaactcagagaggggctaccacaggttcacaggtggagaaagtgagcaagaacgcccatggcgaggagaaggagaacctcacggcccgggccctggacctgtccctcaagtatcactttgtgactccactgacctcaatggtggtgaccaagcctgaggacaacgaggatgagagggccattgccgacaagcctggggaagattctctgggcccgtccgttgttctccatggacatgacctccagaaagttaaagtccacattgtggccgaaacccaggttgtagagcgggaacctgccccggatggcgttgcggacgttcttgaggatttgggaacggccaccaacgacctgaccttcacagaggaggtggacatgaaggagatggagaaggccctgcaggagcgggactacatcttcgggaattacattgagcggctctgggcctacctcaccattgagcagctgctggagaagcggtga

SEQ ID NO: 21473 - DNA, 840 bp, Homo sapiens
  SIMILAR (493)..(837): 1001254mologous to Plasmid F Protein D,accession number M12987,Smith-Waterman Score=584.
atgcttcgtgatctgctcaagaacgttgatcttaaagggttcgagcctgatgtacgtattttgcttaccaaatacagcaatagtaatggctctcagtccccgtggatggaggagcaaattcgggatgcctggggaagcatggttctaaaaaatgttgtacgtgaaacggatgaagttggtaaaggagatcccctgggggacatgcagccaggggactactttgacctggttctttttgggactcgagtacaatcgtggaagggctcgctggtgcaagcatctgaggccaacctacaagcagctcaagactttgtgcggggcttttccctggatgaggccacaaacctgaatggaggtttgctccggggaattgagatcttgaaccaagttcaggaaagcctcccagaactcagcaaccatgcctcaatactcatcatgttgacagatggcgatcccacagaggatcccccagtatttattcgcgataagctcatggagcggcgtaaccgtcgcacaggaaggacagagaaagcgcggatctgggaagtgacggacagaacggtcaggacctggattggggaggcggttgccgccgctgctgctgacggtgtgacgttctctgttccggtcacaccacatacgttccgccattcctatgcgatgcacatgctgtatgccggtataccgctgaaagttctgcaaagcctgatgggacataagtccatcagttcaacggaagtctacacgaaggtttttgcgctggatgtggctgcccggcaccgggtgcagtttgcgatgccggagtctgatgcggttgcgatgctgaaacaattatcctga

SEQ ID NO: 21474 - DNA, 416 bp, Homo sapiens
  SIMILAR (3)..(266): 981254mologous to Homo sapiens inter-alpha-trypsin inhibitor heavy chain ITIH1,accession number X63652,Smith-Waterman Score=439.
gcgaggtgagggccaacctgtcatcccaggccctgcggatgtggctggactatgggtttgtgaccccactgacctccatgagcatcaggggcatggcggaccaggacggcctgaagcccaccatcgacaagccctcagaggattctccgcctttggagatgctgggacccagaaggacgttcgtgctgtcagccttgcagccttctcctactcattccagctccaatacccagcggctgccagaccgagtgaccggcgtggacacttgagtagtgacttagccttatgtactctgttggaatttgtgctagcagtttgagcactagttctgtgggcctatgaagttaatgctgcttattggctcattctgacttcatggagaattaatcccacctttaagcacaggctactaagtg

SEQ ID NO: 21475 - DNA, 462 bp, Homo sapiens
  SIMILAR (213)..(338): 971254mologous to Homo sapiens PRO2769,accession number AF116713,Smith-Waterman Score=231.
ggcacgagagtcatcaaacggatcagcagctccagggaaggcctggctgtcccgggtctaaatgccactccccctcccatcagcgttcgtgctgtcagccttgcagccttctcctactcattccagctccaatacccagcggctgccagaccgagtgaccggcggcttctcagtgaatggacagctcattggcaacaaggccaggagccctgggcaggcatgacggcacgtacttcgggcggctgggaatcgcaaaccctgccacggactttcagttggaagtgactcctcagaacattacgctgaaccccggctttggtgggcctgtgttttcctgggagggaccaagctgtgctgcggcaggacggggtggtggtgaccattcaacaagaagaggaacctggtggtgtctgtggacgacggtggcacctttgaggttgttttgcaccgagtgtggaaggg

SEQ ID NO: 21476 - DNA, 3054 bp, Homo sapiens
  SIMILAR (440)..(1051): 831254mologous to Homo sapiens inter-alpha-trypsin inhibitor C-terminal,accession number X16260,Smith-Waterman Score=831.
  misc_feature (1)...(3054): n = a,t,c or g
ggtctgactgaggtgacagggcagcaggagccttagagcatggacggtgccatggggcctcgggggctgctgttgtgcatgtacctggtatctctcctcatcctgcaggccatgcctgccctgggctcggctacaggcaggtccaagagcagcgagaagcgacaggctgtggacaccgctgtcgatggcgtgttcatccggagtttgaaagtcaactgcaaagtcacctctcgcttcgcccactatgttgtcaccagccaagtggtcaacactgccaatgaagccagggaagtggccttcgacctggaaatccccaagacagcattcatcagtgactttgccgttacagcagatggaaacgcatttatcggagacataaaggacaaggtgactgcatggaagcagtaccggaaagcagctatctcatgagagaaagccaggccttgtcagggcctcggggagaactatggagcaattcaccatccacctcaccgtcaatccccagagcaaggtcacgtttcagctgacttatgaggaaatgctgaagagaaaccatatgcagtatgaaattgtcatcaaagtcaagcccaagcagctggtgcatcattttgagattgatgtggacatcttcgagccccaggggatcagcaagctggatgcccaggcctctttcctgccgaaggaactggcagcccaaactatcaagaagtccttctcaggaaaaaagaccagtaatggctcacactctcgacggttccagggtcatgtgctgttccgtcccaccgtgagccagcagcagtcctgccccacatgctctacatccttactgaacgggcacttcaaggtgacctacgatgtcagtcgagacaagatctgcgacctcctggtggccaataaccactttgcccacttctttgccccccaaaacctgacaaacatgaacaagaacgtggtttttgtgattgacatcacgtggctccattgagaggccagaaagtgaagcagaccaaggaggcactccttaaaattctgggggacatgcagccaggggactactttgacctggttctttttgggactcgagtacaatcgtggaagggctcgctggtgcaagcatctgaggccaacctacaagcagctcaagactttgtgcggggcttttccctggatgaggccacaaacctgaatggaggtttgctccggggaattgagatcttgaaccaagttcaggaaagcctcccagaactcagcaaccatgccttcaatactcatcatgttggacagatggcgatcccacagagggggtgacggaccgttcccaaatcctcaagaacgtccgcaacgccatccggggcaggttcccgctctacaacctgggtttcggccacaatgtggactttaactttctggaggtcatgtccatggagaacaacggacgggcccagagaatctacgaggaccatgatgccacccagcagctgcagggtttctacagccaggtagccaaacccctgctggtggatgtggatttgcagtacccccaggatgctgtcttggccctgacccagaaccaccataaacagtactacgaaggctcagagattgtggtggccgggcgcattgctgacaacaaacagagcagcttcaaggctgatgtgcaggcccatggggagggacaagaattcagtataacctgcctagtggatgaggaggagatgaagaaactgctccgagagcgtggccacatgctggagaaccacgtcgagcgcctctgggcctacctcaccatccaggagctgctggccaagcggatgaaggtggacagggaggagagggccaacctgtcatcccaggccctgcagatgtcgctggactatgggtttgtgaccccactgacctccatgagcatcaggggcatggcggaccaggacggcctgaagcccaccatcgacaagccctcagaggattctccgcctttggagatgctgggacccagaaaggacgttcgtgctgtcagccttgcagccttctcctactcattccagctccaatacccagcggcctgccagaccgagttgaccggcgtgggacacagacccttcaatttcattcattccacgtgccccagaaagagggacaccctgtgctttcaacatcaatgaggagcctgggtgttatcctggagcctgggtacagggaccccaacacagggtttttcagtggaatgggacagctcattgggcaacaagggccagggagcctgggggaaggcattgacgggcactaatttcggggcggctggggaattcgcaaaccctgccacggaacttttcagttgggaagtgactccttcagaacatttacggttgaaccccggtttttggtgggcctgttttttcctggggagggaccaagtttttctttccggcagggacggggtggtggtgaccatcaacaagaagaggaacacctgtggtgtctgtggacgacggtggcaccttttgaggttgtttttgcaccgagtgtgggaaggggagctcgggtcnaccaggacttcctggggcttctaatgtgctgggacaagtcaatcgggatgtcaagcccgggacgcaagggctgctgggggcaaatttttccaccccattcggtttttgaaagtgtctgaacatcccaccccagggttccgacccccacaaaagcccaaatgcccacgatggtggttaggaacccgcccggcctcacggtcacccaggggtttgcaaaaagacttacagcaaggacccgtggcatggggccgaggtgtcctgctggttcatttcacaacaatggggcttgaattcaccgattgtgcctacactgattatattcgtccccgacatcttctgagccctctgggccagcaacgcctgttccntgcccccgggggccaaggcagaggaggaggacgacatcctgacctgctgctgaggctgtacctccttgacctaagctggttcctttgtgtcaaagcacctcatgccttccattaaagagaggccgtgtccaaaaaaaaaa

SEQ ID NO: 21477 - DNA, 1011 bp, Homo sapiens
  SIMILAR (883)..(1008): 1001254mologous to Homo sapiens Human secreted protein clone yd61_1 protein sequence SEQ ID NO:156,accession number Y73467,Smith -Waterman Score=223.
atggccacacaccccgatggcttccggcttgagggacccctggctgcagcccacagccctgggccttgcactgtgctctacgaaggccctgtccgtgggctctgcccctttgccccgcgaaattccaacaccatggcggcggctgccctggctgcccccagcctgggcttcgatggggtgctcggggtgctcgtggctgataccagcctcacggacatgcacgtggtggatgtcgagctgagcggaccccggggccccacgggccgaagctttgctgtgcacacccgcagagagaacctgccgagccagcgcggagccctccttatggacctggagaccccagaggagatgcaggctcggagcctgggcaggcccatcaaatcctcaaagcagtacctgcggcaggtcattgcagagtacgaggcactggaccgagaactcccgtgcatccggaagttccccacaccaccagcttcccagcccctctgcctctgcatggagaccttggacagtttgctgaaaactgattgtgaatttgtcaaagggtcagtcatgaaatctactgctcatgtcagaggggagaccaacgggcaaagaaaggggacgctgacgggggcacgcacggaggacaaaacgagtcctactaatcccggcggggatggatcgactctagactcgcccctcgcttcctccctccgggggcgccatggaacgcagggccctcactggctctggggactgggtgacgtcaggggtgagcctctcgtgattggctccatcaccctgcgtaagatcaaagggaagaaaggagagccccgacagccggagccattgtggctccggccgattgcgccggccctcgggccctcagggaggcgagggttggccccagactcccggctgaaccctcatcgcagcctcctgggcaccggcaactatgatgtcaatgtgatcatggccgctctgcaggggctgggcctggccgccgtgtggtgggacaggaggaggtag

SEQ ID NO: 21478 - DNA, 438 bp, Homo sapiens
  SIMILAR (70)..(435): 531254mologous to Homo sapiens Human secreted protein clone yd61_1 protein sequence SEQ ID NO:156,accession number Y73467,Smith -Waterman Score=264.
atggccgacaggggcccgtggagggtgggcgtggtgggctatggccgcctcgcaggagccgaggacggcatgtcccaggccccgggagcacagccgagcccacccaccgtgtaccacgaacggcagcgcctggagctgtgtgctgtccacgccctcaacaacgttctgcagcagcagctctttagccaggaggctgccgatgagatctgcaagagcaccacctacctcggggtcagtgtgcctaatcataagcagataaaggattgcatttatcgatctactggcacgttcccagattgtacttcggaacaagtgctgtactcgttgctatacggtttttccaggcctgagtcggtttgggaggatttgagccctgttcctcgacttgctctggcgcagcggttccctaccgcgctcaacgccggctctatcgtctaa

SEQ ID NO: 21479 - DNA, 858 bp, Homo sapiens
  SIMILAR (94)..(408): 481254mologous to Homo sapiens Human secreted protein clone yd61_1 protein sequence SEQ ID NO:156,accession number Y73467,Smith -Waterman Score=184.
attcggcaccagggagccgccgcccaggaaggggatgcggaaacccctggctcggtggagcggagaggcaggcgggcaggagccgaggacggcatgtcccaggccccgggagcacagccgagcccacccaccgtgtaccacgaacggcagcgcctggagctgtgtgctgtccacgccctcaacaacgttctgcagccagcagctctttagccaggaggctgccgatgagatctgcaagaggttggccccagactcccggctgaaccctcatcgcagcctcctgggcaccggcaactatgatgtcaatgtgatcatggccgctctgcaggggctgggcctggccgccgtgtggtgggacaggaggaggccccttgtcccaagctggccctgccccaagggactggggtgaatcctgaaccctgccctcgcccgtgtcgctggggctgctgtcactgccgctgcgccggcggcatcttaggtggccctgcgccaggttggaacggtgtcttactacaacctggactccaaagctgcgggcgcccgaaggccctgggggattgaggacggagtcaggggcctttccttggcggctgcgctggcccagggcctgtgcgaggtgttgctggtagtgaccaaggaggtggaggagaagggcagctggctgcggacagactgaccatggctgaccatcggcgcccacagcgcagtccctgggcatccccctccggctgggcacactgcatgcctgggaaaggccagcacttcatggaccctggggaggccccgccccctccccacacccctgctccccactgccgctgctgcctcaataaatctgctgatttgcaaaaaaaaaaa

SEQ ID NO: 21480 - DNA, 468 bp, Homo sapiens
  SIMILAR (314)..(42): 351254mologous to Homo sapiens Human secreted protein encoded by gene 25 clone HPIBO48,accession number Y41332,Smith-Waterman Score=89.
ggttgggagttaacaatgcctggggaaccaagcccttgaagaagtgctggctccaaagtaggagtccaagaatatacagcaagagtaagagttgctctcacctcttcttgtagccccggggcccagcgacctgacagttacaggactgaagtctttctccagcccctccctctgcagcttgaacaccctgctagcaggaacctcacgcctcatggttgcatgactttatgagtcgctgggccagggtgaggacctgggcctcctgactcctggcccagagttcttgtccatcagttcatactgcaattttatgtgaaagcattatgactgtcctacccatgggagagtaaatgtagattgaatgctaggagtcttaaagctggagagtatagattttgaggtccccatttgggaaacatgtgccagaaatgtctaggtgtttaattaaaccggtttttggtttttctc

SEQ ID NO: 21481 - DNA, 1920 bp, Homo sapiens
  SIMILAR (676)..(1326): 1001254mologous to Escherichia coli exonuclease V (AA 1- 1180),accession number X04581,Smith-Waterman Score=1146.
atgcctttgaagagaagatcaaggctgcagttgggatcgagctatttgttggaggtgagcttgacactctgcagcacacatgtccagggccagacccgtgggaaggaggacaagacacaatgcctgtctgcagacagcttcttctgggacaagatgaagctcatcatcctggagcactattctcaggcgagcgagtgggcggctaaatacatcaggaaccgcatcatccagtttaacccagggccagagaagtacttcaacctggggctccccactggtgcgttcttggatggagagggtgccgtggataagggtggagagagtaggcaacaggggccaggtgccctttctgaatcactctcttaccatacctgtgaatccaaaaagtcttttattagcctcatccgcttgcaggtattcatttcgaagcccgaggtcggcgatgtgatccggaccatcgtgcgggcaggcctggccatgcccgggcccccactaggcccagtgctgggtcagagaagggcttccatcaaccaattttgcaaggagttcaatgagaggacaaaggacatcaaggaaggcattcctctgcttaccaagatttttgtgaagcctgacgggacatttgaaatcaagattggacaacccactgttctacttagtgaaggcaggtaccggcccggcgataactggcgcgtcaccagctactctggtttgcaacagcgtggtcacggtatcgcccaggatttgatgcctcggctggatgtcgatgctgcaggcgttgccagcgtcgttgaagaaccgacgttaacaccacatcagtttccgcgcggtgcgtcaccggggacgttcttgcacagtttgtttgaagacctggattttacccagccggttgacccgaactgggtgcgggaaaaactggaactcggcggctttgaatcgcagtgggaaccggtattgaccgagtggatcacggctgtcctccaggcacctctcaatgaaaccggcgtaagcctgagtcaactttccgcccgcaataaacaggtggagatggagttttatctgccgattagtgaaccgcttatcgccagtcagcttgatacgttaatccgccagtttgacccgctatccgcaggctgcccgccgctggagttcatgcaggtacgtggcatgttaaaaggctttatcgacctggtgttccgccacgaagggcgttattacctgctcgactataaatccaactggttgggtgaagacagttcggcttacacccaacaggctatggcagcggcaatgcaggcacaccgctatgatctgcaatatcagcttataccctggcggaccagtgccgaaccccaaagttccgccctccgcccttgcctggggcccactcaccgccgccagccgaccaggcctagaaacgccctgctcaaccggcgcgccgcctcttccgttctcgggagctgtcagctgagccaggcggatcccgctggtgcgaccgccggcatagggaggactctgcgcagccgccgtggtcgcccctgcctctcgggcgcctcccgcaggcccaaggcggcgctgccggcgcgaccaccgtcacccccacttactgcgagcctgtgctcacaggaggctcttttcagtagttctgatggggcccgagaattcgaatttttaccaatctctagaggggatcatgaggcagtggtctacctagggcagagactctcacaacaatcccaacctgttctccggccaggttatcttattcccccaggaaatgaatttggcactcggatcatgggtcccggtgattttggcttcctgcatgccagtagtagcatcgagtccgaggcaaaaccagccagcctcagcccactggtgaaaaggtatatccagatttggccacctggatccccataa

SEQ ID NO: 21482 - DNA, 3261 bp, Homo sapiens
  SIMILAR (251)..(529): 391254mologous to Homo sapiens Human secreted protein, SEQ ID NO: 6261,accession number G02180,Smith-Waterman Score=97.
  misc_feature (1)...(3261): n = a,t,c or g
cttcctcgggtactcggccactcggggcatcgcggcggcctttctagccgtcgatcccaagggttggtctcgcgctttcggctgcgagctctctgtggtgctggcagcgacatgtggcgcctcccgggactcctgggccgagctcttccccagtacactgggaccaaagcctctggagggtgactcctaagtcctccagcccagatgggcctcagactacctcctccacttttgctggttcctgtgcctaacctcgacaggtcaggtccccatggcccaggcacgagcgggggtccaaggtcccatggatggaaggatgccttccaatggatgtcttcccgtgtctccccgaacaccctatgggaatgccatatcttggggcactctggccgtgctggccctgcagcttggccgggcacatccacttccaggcgttcctggccgcaggaccctaagcgggtagaaacactgctccgtggcacagtcccctggaaccgtttcttctcatctcccgttgtggcacccatgctcctcactgcgacaacacatcctccccagccccgatggcccagctcccaggcacactggcctcaagggaacccaaggcttggcaaggaaagaagcctcagctcagccccggaacttctcacacaactctttgagaggagctcgtccttcaggacccctctgaggaagggtcccggtgattttggcttcctgcatgccagtagtagcatcgagtccgaggcaaaaccagcccagcctcagcccactggtgaaaaggaacaagataaatcaaaaactctttcccttgaggaggctgtgacttccattcagcagctcttccagctcagtgtttccatcgctttcaacttcctgggtaaccaaatggaccctgccccaaggcaggagggaacagagaacatgaagagtggcgaccacacggcagccttttcttacttccagaaagctgcagcccgcggctacagcaaagcgcagtacaatgcgggcttgtgtcatgagcatggcagaggcacccccagggacattagcaagatgtctaaaaggcgggcctttattatcagttggctgccagccagggccacagcctggctcaataccgctatgccaggtgcctactacgagacccagcctcttcgtggaaccctgagcggcagagggcagtgtccttgctgaagcaggctgcagactcaggcttgagagaggcccaagctttcctcggggtgcttttcaccaaggagccctacgctggatgagcagagagctgtgaaatatctttggcttgcagccaacaatggggactcacagagcaggtaccaccttggaatttgctatgagaaaggccttggtgtgcagaggaatctgggagaggccttgagatgttaccagcagtcagccgctctgggaaatgaggccgcccaggagaggctgcgagccctcttttccatgggggcctgcaagccccggggccccaacgaacctgacagttacaggactgaagtctttctccagcccctccctctgcagcttgaacaccctgctagcaggaacctcacgssctaccacattgcctcgagcacaggcaaccttggcctcctctgcagaagtgggcatctcggagccagcctggaagcctccagcagggctattcccccacacccctaccccacttgaaaagaattgttgtaagactaggttttggctaaggtgagataaaacatagtccctggtgcctcttaggggccagagcgggcaggaggttggataacaaaaatagagcatcagcaaccctttccaggtagaaattccagcgggagtttcaggttcccaagcaattttcacgtacatggctggtaagtgactgatctttccccccgcttggtagcctcacagatgagtcttggatgcattcacagtcatttctggtctgtgcaccaaaggatgccattcagtgaccctatgaaaaacccctactggaagggtcccagagacccctggtgctcaccttagcctttgtactttgagtcaaataacttaccttcttccttcttatgccctgggttttactcacacttaaatctgtactactgtttgccaatgtctgatgtgtgtatccctgggttcacaagaagattttagatgggtattcaaatttaatatttttctatttagttatatatttaatgtataatataaaaatatgattagcatattgacctgtagtttgatagatgttctgtctaggataaagctaactgtaaaaaaaaaatagtgaatcagtttaaagaaaaacataaccgtaaaagtggggcacagatcccagagaggtaagcaaaatcacaggggtgggttccatggaatgggctggacacttaggaaactctgaattagggccctcctcggggactaggcccaccctttcacctctgttcatcccccgtgggctcataatcgttttcatttcacctttgatttggaaggaagaagtttcttgcccaaattgcctggatgtgtctgcttgactttcagaacttctcacctcagctctaaagagggagcctgtgggttctcagagagatatcacaatttgagtcccaaagaagaggccagatacccatccaccttcccccaaatcttaagcacctgcgccagtacagtcaagaagaggaaagtgtgtgaagacccaggtctggctctgccactttgcctggcccatgtcaccttgaaaactgtgacctgactccctattattgtttcctcagttgtagacccaaaggccaatggtgtcctgcccctccctacccttagaagacaaaatgcaagggcattttcacccacagagaggaccctttgtgcctcactttggccccaggaggcaggtgatgctccatggttgccatgacttttatgaagtcgctgggcccagggtgaggacctggggcctcctgactccctggcccagagttcttgtccatcaagttcatactgcaattttatgtgaaaagcattatgactgtcctacccaatgggagagtaaatgtagattggaatgctaggagtcttaaaagctgggagaagtatagattttgaaggtcccccatttgggaaacatgtgtccagaaaaagtctaggtgtttaattaaaacagatattgggattatctcatcactcttgcccttgagtattatgggaagagccagggagacgggcaggggganntgaaaagctgaggctccgtcc

SEQ ID NO: 21483 - DNA, 1683 bp, Homo sapiens
  SIMILAR (832)..(1191): 451254mologous to Mason-Pfizer monkey virus Pr180,accession number AF033815,Smith-Waterman Score=236.
atggtttccacaggcagcacccttgatgtggaaaattgggacagagcagaaggattaaaatgggctcatcaaaaaggtcttaaaattgatccttctgttttctccacttggagtttagttcatactgtacttctgccattatctccttattattctgtgggacaacaggctgaatctaaaaatctgaaagaatctgttgtcccactcacagctccagatgaaaataaaaaacaggagagggaggataaaaattggcctatacagcctcctccagttgcagaaacatctgtattgcctcctttggtagcagaactagagaccccaatacaaagaattttatgctctgctgccatagctggagagcccctaggaccttgcacttttcctatttccataaggcctgatcccaacaatccacagcaggttattcatgaacacaccccactagatgcatatctgacatggaatttaaattggcaagaaatgtgtgcagaccaggctaaacagaaccatgttgctggacacggagacattacagaggatatgctattaggtaatggcccttattcagacctggaaagtcaaatggcactcccagacgctgcttatcagcagtgtgcacaggctgttaaatgcacctgggccgcaattcctgaagagggagtcccagtacaatcctttttacatatgcaagggtcacaggaaccctatgtgcaatttcttacaagatcacaagaggcagtgaagcgtcagattcctcataccacggctgcagaaatgctaaccttaactctagcttttgaggatgcaaacgcggattgtaaacatgcactggcactgcattttgtaggacaggcattaaagaagcctcggaatatgtttcctactgcttacatcattcattatatggatgatattcttttggctgctcctacagatcaaaacctacatcagttattcagagaaacaaagcaggctttgactaaatggaatctcaaaatagctctagaaaagggatcgtggcaggctacaatcaacattgtcaaccataaagacaggttacagactttaaatgattttcagcaattattaggagatattaattggctacgcccgatgttaggtattgctacctatcaacttacacatctttaccaaaccctgcaaggagattcttcttgttcagcttatgttgtaaatttagccattcgcatagaaactgctacagttaaaaaatataacaaaagtgagtatccgtgggaccttgtgaaagcccatttgcaaggagctttcacatccaacatcacctttgatattagtgaattacaaaacaaaattcttgatttaaataggcacactcaagaatttcagccttctttagaagactggactgaattccaggaaggcctggagagcctcaacccttggacctatctaaagtaccacagtaacatcttatatgtagttcttggagtaatgttgttttgtctctgtcttctgtttatagtctgtaaaatcggatggaccgccaatcggagaatgagagctgcccagcctggtcttacattctttcaattaattcataaacagggggatatgcagggagccgaaggcccatgggacgtgaccaactcagcattccactggaggctatatgatcaaacagcaaactgtttatcatga

SEQ ID NO: 21484 - DNA, 916 bp, Homo sapiens
  SIMILAR (265)..(167): 301254mologous to Homo sapiens Gag-Pro-Pol-Env protein,accession number AF164611,Smith-Waterman Score=66.
ccttcagtggaatgctgagttgatcacatcccatgggcctttggctccctacatatccccctttgtgtttacaaattaatagaaagaatgtaagtccaggcttggcagcacccattttctgattggcggtccatccgattttacagactatgaactattctaagtttgttacacaaatacgagtgtggttaaaatgacaatgcaattgctgctgcaactgcaagatttgtacttgttctcctaaccatagaaacatggatttcaacattggcccttcagtttgtaactcagtgtagccacgcttggttggctgtgcacatccagttctccatgtactgagctgtttgaatagaatgatgcaaagctacagagccgggcccatggttggccaccctgggttcctccagtctcccattccacggctgcatccaccttgaggacacccacacggtttgtcaatctcctgtaaaagtgcacatttacaatccgctagagttaaggttagcatttctgcagccatggtatgaggaatctgacacttcactccctcttgtacttgtgcaagaaattgtgcatagggttcctatgacccttgcatgatatgtaaaaaggattgtactgggactccctcttcaggaattgtggcccaagtgcatttagtggcctatgcgcactgctgataagcagcgtctgggagtgccatttgacgttccaggtctgaataagggccattacccaatagcatatcctctgtaatgtctccgtttccagcagcacagttctgtctagcctgctctgcacacttttcttgccaattgaaattacacatcagctatgcactcgcagacaagcaagttcgcgccaagtgtttcacatcaaagggtaaaagatgtatggcaccaaacactgattctag

SEQ ID NO: 21485 - DNA, 504 bp, Homo sapiens
  SIMILAR (23)..(205): 801254mologous to Homo sapiens KIAA0729 protein,accession number AB018272,Smith-Waterman Score=253.
  misc_feature (1)...(504): n = a,t,c or g
agtgtaaaatgaggactacggatgtgcggaancccggncgaccacgcgtccgattgtatctatgcttttcacatcaatagcaaagttgactcctgaggcagtcaatcctttctttaagttgntgactatgctaatggagtttgctggtggacctccaggaatgcctccctttgcatcttatattctgcagaggatatgggagctgcagcttatcttctggtgtcccttataccaagcaattcattccgtcagatgttccggtcaacaaggtctttgcacatcccaacccgtgaccttccactcagtccagacacaacagtagtcctacatcaggtctacaacgtgctccttggtttgctctcaagagccaaactttatgttgatgctgctgttcatggcactacaaagctagngccctattttagctntatgacttactgtttaatttccaaaactgagaagctgatgttttccacatatttcatggatttgtggaaccttttn

SEQ ID NO: 21486 - DNA, 473 bp, Homo sapiens
  SIMILAR (3)..(65): 1001254mologous to Homo sapiens Homo sapiens fetal kidney clone AK296 secreted protein,accession number W95707,Smith-Waterman Score=105.
gaatggaagttccatcttcgttttcagaagacatgtcaaatatcaggtcacagcatgcagaagaactccagatgaaaataacttgcatcttcagtatacttcctaaagggcaatcagataatggatatgttttatgtaattaagagttcactttagtggctttcatttaatatggctgtctgggaagaacagggttgcctagccctgtacaatgtaatttaaacttacagcatttttactgtgtatgatatggtgtcctctgtgccagttttgtaccttatagaggcagattgcctccgatcgctgtggttcttattatcaaaattaagtttacttgtatacggaacaaccacaagaaatttgattctgtaaagaatcctctttagctgtggcctggcagtatataaatggtgctttatttaacagaatacctgcggaggaaataaagcacacttgatgtaaaaaaaaaaaaa

SEQ ID NO: 21487 - DNA, 2296 bp, Homo sapiens
  SIMILAR (1261)..(2172): 941254mologous to Homo sapiens KIAA0729 protein,accession number AB018272,Smith-Waterman Score=1479.
atgaccctggatggaggtaacagtgctctggaaaatctgaatcttggagaagcaaagaccaaggtcacacagataaagaggtggaggctagattttgccttgagaaacaatgatgatgataatgataatgttaacatctattatgatggtacatttgttgtgactaaggaagcaatcacagtgaaatctagccttgctgatagcgatcatttacaagattggctaaagaaattgactctccttattcctgagactgcagttcgtcatgaatcatgcagtggtctctataagttatccctgtcagggctggatggaggagactcaatcaatcgttcttttctgctattggctgcctcaacattattgaaatttcttcctgatgctcaagcactcaaacctattaggacaacgctcctcgacttagatgccttggcaagacatttggctgactgtattcgaagtagggagatccttgatcatcaggatggtaatgtagaagatgatgggcttacaggactcctaaggcttgcaacaagtgttgttaaacacaaaccaccctttaaattttcaagggaaggacagatgccccagctaaaacctgaaacaattagcatgactggcttaaacctgtttcagcatctctgtaacttggctcgattggctaccagtgcctatgatggttgttcaaattctgagctgtgtggtatggaccaattttggggcattgctttaagagcacaatctggtgatgtcagtcgagcagctatccagtatattaactcctattatattaatggtaaaacaggtttggagaaggagcaagaatttattagtaagtgcatggagagtcttatgatagcttctagcagtcttgaacaggaatcacactcaagtctcatggttatagaaagaggactccttatgctgaagacacatctggaagcgtttaggagaagagtaatactttgtcaaaatgaaaataaatttttttcttgcctcttaaagacacacagtgcatatatgctgttttacaaacgcatggaaccagaggaagaaaatggcagagaatacaaatttgatgtttcgtcagagttactagagcccacgatgcttcagtggattgaactgttgacgaaacagtttaataatagtcaggcagcttgtgagtggtttttagatcgtatggctgatgacgactggtggccaatgcagatactaattaagtgccctaatcaaattgtgagacagatgtttcagcgtttgtgtatccatgtgattcagaggctgagacctgtgcatgctcatctctatttgcagccaggaatggaagatggcaattcattccgtcagatgttccggtcaacaaggtctttgcacatcccaacccgtgaccttccactcagtccagacacaacagtagtcctacatcaggtctacaacgtgctccttggtttgctctcaagagccaaactttatgttgatgctgctgttcatggcactacaaagctagtgccctattttagctttatgacttactgtttaatttccaaaactgagaagctgatgttttccacatatttcatggatttgtggaaccttttccagcctaaactttctgagccagcaatagctacaaatcacaataaacaggctttgctttcattttggtacaatgtctgtgctgactgtccagagaatatccgccttattgttcagaacccagtggtaaccaagaacattgccttcaattacatccttgctgaccatgatgatcaggatgtggtgctttttaaccgtgggatgctgccagcgtactatggcattctgaggctctgctgtgagcagtctcctgcattcacacgacaactggcttctcaccagaacatccagtgggcctttaagaatcttacaccacatgccagccaataccctggagcagtagaagaactgtttaacctgatgcagctgtttatagctcagaggccagatatgagagaagaagaattagaagatattaaacagttcaagaaaacaaccataagttgttacttacgttgcttagatggccgctcctgctggactactttaataagtgccttcagaatactattagaatctgatgaagacagacttcttgttgtatttaatcgaggattgattctaatgacagagggcaaagatgacgtttatgatcgtatgctgctagactacttcttttcttatcatcagttcatccatctattatgccgagttgcaatcaactgtgaaaaatttactgaaacattagttaagctga

SEQ ID NO: 21488 - DNA, 715 bp, Homo sapiens
  SIMILAR (456)..(647): 381254mologous to Trypanosoma brucei CR3,accession number U05313,Smith-Waterman Score=76.
  misc_feature (1)...(715): n = a,t,c or g
aatgctcatctctatttgcagccaggaatgaacgatgggtcagatgatatggatacgtcagtagaagatataggtggtcgttcatgtgtcactcgctttgtgagaaccttgttattaattatggaacatggtgtanaacctcacagtaaacatcttacagagtattttgccttcctttacgaatttgcaacaatgggtgaagaagagagccaatttttgctttcattgcaagctatatctacaatggtacatttttacatgggaacaaaaggacctgaaaatcctcaagttgaagtgttatcagaggaagaaggggaagaagaagaggaggaagaagatatcctctctctggcagaagaaaaatacaggccagctgcccttgaaaagatgatagctttagttgctcttttggttgaacagtctcgatcagaaaggtgaaatgtttcgaatttaaaatgtttaaagcatgtttggttttattatttttacataattgtttaccactagtttttccactagctttttattatatatgtttaattatgtaattgttattcactagcttttattatataattccttttaaataatactactattcatcaactcttgtggcataagaatttcagttttttctaccaaacttttacttcatctatgagtcgtgttagaaatagtcaccgaaaaaatatacagtaaaatatctaacaaaaaa

SEQ ID NO: 21489 - DNA, 508 bp, Homo sapiens
  SIMILAR (220)..(273): 381254mologous to Homo sapiens KIAA0729 protein,accession number AB018272,Smith-Waterman Score=43.
tttttttttttacctttcccctcctccctcctgcagtctagccaccctatgaaaattatctaataggcagagtggtaccttaatccaagaaagatttggagccacttgcagtaactttttcttttcccagataaagttctaatactcaaaaaagaagagttgatttaagtcccatatccttcaggaatgaggtataggatataaataaattcaaagtaccacattctaagatatttcactaaacattggaatgaatttttcccctttatgtactttaaaatatagaaaatatgcagttatgactagaaatagctgtaatattgtacctgcagagttgagtatctcactagtataatttataattataacctgttctgatttcttttcaaatattaggtgtcctagttgcctatgaaggtttgccacttcatcttgcactgttccccaaactttggactgagctatgccagactcagtctgctatgtcaaaaaactgcatcaagctttt

SEQ ID NO: 21490 - DNA, 3209 bp, Homo sapiens
  SIMILAR (571)..(822): 631254mologous to Homo sapiens Human secreted protein encoded by gene 52 clone HPRCE95,accession number W74781,Smith-Waterman Score=259.
cctttttttttttttttttgagataattaggaaagaagatttattgtttacccttgcagtgtttatggggggaaaaggtatttacagaattactgttgctagcgagaatatacagtaaagtttaaaacattttggagaattgattttgattcttaaaatgtgtctttttgcaacatatgctctggttacctataaatacattaatttggcccttgaaaacattcacatcctattctttgttagccttatttttccagtccttgttaactctctcagtgctggataataaacctgcatttcttttaaaacatttgttcagtttcggcatcagtgtcttcccccagcacttcctttatttaaaataggacccatttacttgtatgaaaaatagttgctgttaactaaaaattcaataggtgagttagacatggcttttcaagtaggattttcagtggcttcagattccatcatacacaagtgtatgttttttctgtgtaagttttttccgtgtaagttttttccgtgctcaaccgtaagtgctcaaccatcttctccccactttagtctgctatgtcaaaaaactgcatcaagcttttgtgtgaagatcctgttttcgcagaatatattaaatgtatcctaatggatgaaagaacttttttaaacaacaacattgtctacacgttcatgacacatttccttctaaaggtacgtagtactttggaaactcagtgtgtcatttccaattagttaatgcttgtggtttcattatgctggtcttttggagatttttttaaatcttctttttcaggttcaaagtcaagtgttttctgaagcaaactgtgccaatttgatcagcactcttattacaaacttgataagccagtatcagaacctacagtctgatttctccaaccgagttgaaatttccaaagcaagtgcttctttaaatggggtaagaactatgcagaggcggcggcacacacttttaaactgtccttcagttaactgtgtggccttcatatgattttactctcgcacctttaacttactgattcaaactcataagccatgtgcgacaaaaaaacaagttttaaatacacgtttactatgccttgtatgtacacagcacactctatcaccttggaagctacaagctggtatcattaaatgctgaaaggtaataaagggaacatcttagtggtcttatctctagttgggtatatttttggaaacaatacttgtgatgtttctattactgcctatggctcctatgtaactgaaacaattaatgatctactgatttaaaaaaggcagttaaatctagagcattagttgccttgtgcagaactccatgacagccatgtcctagaataatggaacactctggaaatgggctagaatgttgagcagcagcctcccaaatcacagtatgcataaaagccaaaacagatgacagagctcagtaaggaagaccttactatttgtgacatccatcagaattttaacttgagaaactgatttcaaggtttgtttttaaaattcttatatttccttttccatttttcagaaaacactatttcaggctttggtctgacttactggttcgtgggcataaaataatgctattagtgactttaagaactaatgaggctgggcacggtggctcatgcctgcaatccaagcattttgggaggtcgaggccggtggataacgaggtcaggagattgagaccatcctggccaacatggtgaaaccctgtctctactaaaatagaaaaaattaagccaggcgtggtggcgggcgcctgtagtcccagctacttgggaggctgagggaggggaatcgcttgaacccgggtggtggaggttgcagcgagccgagattacaccactgcactccagccttgccaaagaacaagactccatctcaaaaaaaacaaaaacaaaacaaaaaaaaaaacaactaatgaaatgctgtagtatcttaacactggctttctggttttatcattctaagaatcccagagaaaccagggtattcttaggaaagaatggattcctgggaaaataaacatctgcaattaactgtaaacaactgcatcaaagtgttggctttagaatttgaaatgttcctatctgggtttttgtaggacctgagggcactcgctttgctcctgtcagtacacactcccaaacagttaaacccagctctaattccaactctgcaagagcttttaagcaaatgcaggacttgtctgcaacagagaaactcactccaagagcaagaagccaaagaaagaaaaactaaagcgttagctttatggactactatcattacctttagggtgggaggagggagtaatacacttggtgtaactggtttaagagttgtgtgttcagctgaacctcctaaatataaatgctagaaacaaaattaacttcccacatccccccctaacgtgatcttaatgactttcagagaagtttcccttttggcatgtgttttcacagatgatgaaggagcaactcccattaaaaggcggcgtgttagcagtgatgaggagcacactgtagacagctgcatcagtgacatgaaaacagaaaccagggaggtcctgaccccaacgagcacttctgacaatgagaccagagactcctcaattattgatccaggaactgagcaagatcttccttcccctgaaaatagttctgttaaagaataccgaatggaagttccatcttcgttttcagaagacatgtcaaatatcaggtcacagcatgcagaagaacagtccaacaatggtagatatgacgattgtaaagaatttaaagacctccactggttccaaggattctaccctagcttgaggaagaatctgaagttcccttctacttctatctctgcagttctgtctgacttagctgacttgagaagctgtgatggccaagctttgccctcccaggaccctgaggttgctttatctctcagttgtggccattccagaggactctttagtcatatgcagcaacatgacattttagataccctgtgtaggaccattgaatctacaatccatgtcgtcacaaggatatctggcaaaggaaaccaagctgcttcttgacattaggtgtagcatgtctacttttaagtccctcacccccaacccccatgctgtttgtataagttttgcttatttgtttttgtgcttc

SEQ ID NO: 21491 - DNA, 5449 bp, Homo sapiens
  SIMILAR (2908)..(3813): 401254mologous to Homo sapiens Human secreted protein encoded by gene 52 clone HPRCE95,accession number W74781,Smith-Waterman Score=345.
agaggaagaaaatggcagagaatacaaatttgatgtttcgtcagagttactagagtggatttggcatgataacatgcagtttcttcaagacaaaaacatttttgaacatacatattttggatttatgtggcaattgtgtagttgtattcccagtacattaccagatcctaaagctgtgtccttaatgacagcaaagttaagcacttcctttgtcctagagacatttattcattctaaagaaaagcccacgatgcttcagtggattgaactgttgacgaaacagtttaataatagtcaggcagcttgtgagtggtttttagatcgtatggctgatgacgactggtggccaatgcagatactaattaaggtgccctaatcaaattgtgagacagatgtttcagcgtttgtgtatccatgtgattcagaggctgagacctgtgcatgctcatctctatttgcagccaggaatggaagatgggtcagatgatatggatacctcagtagaagatattggtggtcgttcatgtgtcactcgctttgtgagaaccctgttattaattatggaacatggtgtaaaacctcacagtaaacatcttacagagtattttgccttcctttacgaatttgcaaaaatgggtgaagaagagagccaatttttgctttcattgcaagctatatctacaatggtacatttttacatgggaacaaaaggacctgaaaatcctcaagttgaagtgttatcagaggaagaaggggaagaagaagaggaggaagaagatatcctctctctggcagaagaaaaatacaggccagctgcccttgaaaagatgatagctttagttgctcttttggttgaacagtctcgatcagaaaggcatttgacattatcacagactgacatggcagcattaacaggaggaaagggatttcccttcttgtttcaacatattcgtgatggcatcaatataagacaaacttgtaatctgattttcagcctgtgtcgatacaataatcgacttgcagaacatattgtatctatgcttttcacatcaatagcaaagttgactcctgaggcagccaatcctttctttaagttgttgactatgctaatggagtttgctggtggacctccaggaatgcctccctttgcatcttatattctgcagaggatatgggaggtgattgaatacaatccttctcagtgtctagattggttggcagtgcagacaccccgaaataaactggcacacagctgggtcttacagaatatggaaaactgggtcgagcggtttcttttggctcacaattatcctagagtgaggacttctgcagcttatcttctggtgtcccttataccaagcaattcattccgtcagatgttccggtcaacaaggtctttgcacatcccaacccgtgaccttccactcagtccagacacaacagtagtcctacatcaggtctacaacgtgctccttggtttgctctcaagagccaaactttatgttgatgctgctgttcatggcactacaaagctagtgccctattttagctttatgacttactgtttaatttccaaaactgagaagctgatgttttccacatatttccatgggatttgtgggaaccttttcccagccttaaactttctgagcccaagcaatagctacaaatcacaataaacaggctttgctttccattttggtaccaatgtctgtgctgactgtcccagagaaatatccgccttattgttcagaacccagtggtaacccaagaacattgccttcaattacatccttgctgaccatgatgatcaggatgtggtgctttttaaccgtgggatgctgccagcgtactatggcattctgaggctctgctgtgagcagtctcctgcattcacacgacaactggcttctcaccagaacatccagtgggcctttaagaatcttacaccacatgccagccaataccctgggagcagtagaagaactgtttaacctgatgcagctgtttatagctcagaggccagatatgagagaagaagaattagaagatattaaacagttcaagaaaacaaccataagttgttacttacgttgcttagatggccgctcctgctggactactttaataagtgccttcagaatactattagaatctgatgaagacagacttcttgttgtatttaatcgaggattgattctaatgacagagtctttcaacactttgcacatgatgtatcacgaagctacagcttgccatgtgactggagatttagtagaacttctgtcaatatttctttcggttttgaagtctacacgcccttatcttcagagaaaagatgtgaaacaagcattaatccagtggcaggagcgaattgaatttgcccataaactgttaactcttcttaattcctatagtcctccagaacttagaaatgcctgtatagatgtcctcaaggaacttgtacttttgagtccccatgattttcttcatactctggttccctttctacaacacaaccattgtacttaccatcacagtaatataccaatgtctcttggaccttatttcccttgtcgagaaaatatcaagctaataggagggaaaagcaatattcggcctccgcgccctgaactcaatatgtggcctcttgcccacaatggtggaaaccagtaagggcaaagatggacgtttatggattcgtatgctgctagactacttcttttcttatcatcagttcatccatctattatgccgagttgcaatcaactgtgaaaaatttactgaaacattagttaagctgagtgtcctagttgcctatgaaggtttgccacttcatcttgcactgttccccaaactttggactgagctatgccagactcagtctgctatgtcaaaaaaactgcatcaagcttttgtgtgaagatcctgttttcgcagaatatattaaatgtatccttaatggatgaaagaacttttttaaacaacaacattgtctacacgttcatgacacatttccttctaaaggttcaaagtccaagtgttttctggaggcaaactgtggccaatttggatcagcactctttattacaaacttgataagccagtatcagaacctacaagtcctgatttctccaaccgagttgaaatttccaaagcaagtgcttctttaaatggggacctgagggcactcgcttttgctcctgtcagtacacactcccaaacagtttaaacccagctctaattccaactctgcaagagcttttaagcaaatgcaggacttgtctgcaacagagaaactcactccaagaggcaagaagccaaaggaaagaaaaactaaagatgatgaaggaggcaactcccatttaaaagggcgggcgtgttaggcagtgatgagggagcacactgtagacagctgcatcagtgacatgaaaacagaaaccaggggaggtcctgtaccccaacgagcacttcttgacaatgagaccagagactcctcaattattgatccaggaactgagcaagatcttccttcccctgaaaatagttctgttaaagaatacccgaatggaacgttccatcttcgttttcagaagacatgtcaaatatcaggtcacagcatgcagaagaacagtccaacaatggtagatatgacgattgtaaagaaatttacagacctccacttgttccaaggattctaccctagctgaggaaggaatctgagttcccttcttacttctatctctgcagttctgtctgacttagctggacttgagaagctgtgatggccaagctttgccctcccagggaccctgaggttgctttatctctcagttgtgggccattccagaggactctttagtcatatgcagcaacatgacatttgtagataaccctgtgttagggaccattggaatctacaatccatgttcgttcacaagggatatctgggcaaagggaaaccaaggctgctttcttggacattaggggtgtaggcattgtcttactttttaaagtccctcacccccaacccccatgctgtttgtattaagttttggcttatttgtttttgtgcttcagtttgtccagtgctctctgcttgaatggcaagatagatttataggcttaattcttgggtcaggccagaaccccccagatgaaaaaaaacctggccaccctccagtatacttccttaaggggcaatccagataaatggatatgttttaatggtaattaaagagttccactttagtggcctttccatttaaatatggcctgtctggggaaagaaccggggttgcctagccctgtaccaatgtaattttaaacttacaagcatttttacctgtgtatgatatggtgtcctctggtgcccagttttgtaccttatagaggcaggattgcctccgatcgctgtggttcttattatcaaaattaagtttacttgtatacggaacaaccacaagaaattttgattctgtaaagaatcctcttttagctgtggcctggcagtatataaatggtgctttatttaacagaatacctgtggaggaaaataaagcacacttgatgtaaaaataattgttttatttttattgacatgactgattgattgattgctattctgtgcacttaattaaactgattgtgatgacttttcatttgtttacatacgttgcttcagtcttctcaggtgaaagtagtgagaaaaccgtgaaagaggggggaaacatttatccattatatgctgtttcactggaagtgttaccagcagtccacagaactaatctgtccccacagacttctcaatcctctccacaccgaagtgcaaaaccacagcagggaagatgtgcagggagatgtggagcaaaacacagccaatttgccctcacctcaacatgcttttgaatgcaatataccactgttttacgacctaaggatctacacaccttaaaaaccctaaaggtaaaataaagggaataggtgtcaacatcgccatttattttttgtcatcttggaacttaaaagtacagctgcaagcaagcttgctataggacaagcttcagcttgggcaaacatcaactatctgcactcaggacttacctatttccagaggaatatcgatggaaggtcaggttaatacttaatttcaggttgtttgctacttttaaatcaatgcagtgtctagttataataaagagtcaaacaatgctttacattgtatatatgttcatagatttcatccaatataaaataaagacagtccttttaaacaaaagatagggaagaggtaaatgtgacactttttccgcttacaaaaagtaatgccttataataaattttaattcaaccatttaggggggtcagctgcagtgaaccttttatttcttcaaaatgctgcttctgccaacagaatttcatgttgctcttcttacagatagataggaac

SEQ ID NO: 21492 - DNA, 243 bp, Homo sapiens
  SIMILAR (175)..(98): 1001254mologous to Homo sapiens gamma-parvin,accession number AF237772,Smith-Waterman Score=135.
aagtaggggcactcagaaggctcacaggatgagagcaatcagtattcaccatcgtaatccacaccgtctctcatctggagagaagaggttctagctcttttgagagctcctcctcggctgggggctccacccccttggggagctgcagcaggtcgtacaagaactccggctccatcgcctcccaagcccaaccgctttccacgcaggaaaacaaaggcctagctgagtgcaaatggtggtccc

SEQ ID NO: 21493 - DNA, 1196 bp, Homo sapiens
  SIMILAR (832)..(1185): 891254mologous to Homo sapiens gamma-parvin,accession number AF237772,Smith-Waterman Score=539.
cttctacagagctagaacctcttctctccagatgagagacggtgtggattacgatggtgaatactgattgctctcatcctgtgagccttctgagtgcccctactgcaccagcacctcttaccaatagcaactcatttattctcaagggctctttctcacagggcccgtaccccctgcctaggctggcatgctgacgtgtccccagaacctggcttctaccctccttctgtgcctccaggtctagagaaaatgaggggctcagtgagtttggggcttctcagaccgtgacgccctctcctgcctcctctgtgcaggcttgggaggcgatggagccggagttcttgtacgacctgctgcagctccccaagggggtggagcccccagcggaggaggagctctcaaaaggtgtgtgcaagaaatacctgccacccacttcccggaaggaccccaaatttgaagaactgcagaaggtacagcaggagtggatcaatgccactcttctccccgagcacattgtggtccgcagcctggaggaggacatgttcgacgggctcatcctacaccacctattccgtaagtgggcggcgctcaagctggaagcagaggacatcgccctgacagccacaagccagaagcacaagctcacagtggtgctggaggccgtgaaccggagtctgcagctggaggagtggcaggccaagtggagcgtggagagtacgtggaacaaggacctgttgtctaccctgcacctccttgtggccctggccaagcgcttccagcccgacctctccctcccaaccaaccaacgtccaggtggaggtcatcactatcgaggtagcagcgaactttgtcaaccagaagctggaccgcctgggcctgtctgtgcagaatctggacacccaggtagggactggggtcatcttactcttgctgattggacaacttgaaggcttcttcctgcacttaaaggaattctacctcactcccaactctcctgcagaaatggtaagtttcgtcaccctggcgctggagctgctgaaggacgagggcctgctcagctgccctgtcagccctgaaggtgagtgcaacaaggatgccaagagcacactgagggtgctctatggtctgttctgcaagcacacgcagaaggcacacagggacaggacgccccatggagccccgaattgaccctcact

SEQ ID NO: 21494 - DNA, 1592 bp, Homo sapiens
  SIMILAR (277)..(876): 781254mologous to Homo sapiens gamma-parvin,accession number AF237772,Smith-Waterman Score=758.
  misc_feature (1)...(1592): n = a,t,c or g
ggaattcccctttcgacgatattcggcggaagtctgcagccgagagtccagagaggaggaagctcctgccggctgagcgggtctggaggaagtgagcagcggggctcctgcctcccggcctggtccccgaagaccccagaagaacccggaacttgcttccattcggaatccagggaccaccctttgcactcagtaggcctttgttttcctgcgtggaaagcggttgggcttgggaggcgatggagccggagttcttgtacgacctgctgcagctccccaagggggtggagcccccagcggaggaggagctctcaaaaggaggaaagaagaaatacctgccacccacttcccggaaggaccccaaatttgaagaactgcagaagcctgcaggtgttgatggagtggatcaatgccactcttctccccgagcacattgtggtccgcagcctggaggaggacatgttcgacgggctcatcctacaccacctattccagaggctggcggcgctcaagctggaagcagaggacatcgccctgacagccacaaagccagaagcacaagcttcacagttggtgctggaggccgtgaaccggagtctgcagctggaggagtggcaggccaagtggagcgtggagagcatcttcaacaaggacctgttgtctaccctgcacctccttgaggccctggccaagcgcttccagcccgacctctccctcccaaccaacgtccaggtggaggtcatcactatcgagagcaccaaaagtggtctgaagtcagagaagttggaggaacagctcactgaatacagcacagacaaggacgagcctccaaaggacgtctttgatgaattatttaagctggctccggagaaagttgaacgcagtgaaagaggccatcgtgaactttgtcaaccagaagctggaccgcctgggcctgtctgtgcagaatctggacacccagtttgcagatggggtcatcttactcttgctgattggacaacttgaaggcttcttcctgcacttaaaggaattctacctcactcccaactctcctgcagaaatgctgcacaacgtcaccctggcgctggagctgctgaaggacgagggcctgctcagctgccctgtcagccctgaagatatcgtgaacaaggatgccaagagcacactgcgggtgctctatggtctgttctgcaagcacacgcacaaggcacaccgggacaggacgcccccatggagccccgaattgaccctcactgcctccaaagcccagagcctgcctgtcagcccagctggagggcccgaggctgcagggtgtcctcccacagtcccgctgtttcctgtgcattcgtgacccgcttccctcccaccctgtctcctgtctccatcgttggattatctttgaacccccttgtgtggatcattttgagccgcctggccttgctcagtttattttaataaaagtatttctgggagggattctggaaaaaaaaacaaaaaagcaanaatatgaattaaaataaaatgggaagccaaattcctaatgcctagatagagagagctaaactgtggccttccaggggggatcctctttt

SEQ ID NO: 21495 - DNA, 477 bp, Homo sapiens
  misc_feature (1)...(477): n = a,t,c or g
ttcgtccacattccagggcctcctggaagacttaaccttttgtctttgaaatgcatcaaggaccattatagaaaggatcccctgacctaaggatgaaatcgacctagggttaatcatgacagctgcatcagttgtattggatgcaagtcaactctggagtcctcatcccttgaatggacttgtcagctacctccccaggaggagttcagaagcttctgttggccatcacttgagtagatgacaagctgtaaggtatctgctgctaacgtggctgcttctccgagagcacattgaggtccagacagatccaaaccttggccctaaaaaatgtgtgctgtaaagttacttgatgtatatttattataattatttatggttgcatttaacaaacttttcattcaatctgatgctatntacaccatgctgtgtaaaggaagctcactaaaggaaaaaagtcacaccaataaataaccttca

SEQ ID NO: 21496 - DNA, 277 bp, Homo sapiens
  SIMILAR (212)..(135): 481254mologous to Human immunodeficiency virus type 2 envelope glycoprotein,accession number AF023894,Smith-Waterman Score=62.
caaaagcaaacagcacaaacagacattttcttttcctattgtaggtgaatgaactggtgcaggtagaaacgtacctccgcagtgaaggtgtgctggtgcgatactggtatcctattgacatgttggaaaggcccccagcaggctaccgaaggactgccaccaatgggctggtcacactggacaataccaaccttcaaattcacaggtacaattgggcccttctttctactgggtcacagaaatccaccaacttcgctctaccacatggaccatgtac

SEQ ID NO: 21497 - DNA, 731 bp, Homo sapiens
ggtgtagattaaaagctttttatttacatttctaggtctgtgatgcacgtgagttgtgacaggtgttgtccttacagctcggctgttttgatgtgtgtgtatgaagacacttaacataccattatcaaattgcaaatgtgctgagaaaattcaataaaacagggtggtaaggcaagttcaggtactcaccagcactacattcctgggctactaggttaagaacttcaacagctgctggacattgttgtatgaattcttcacaaaataagctgtcttctaaaagctgggccatgaccaggcatgctcttaatgttaaaagatttacaatatttcaaagtcatcagtgttcattgtctaaaaaagtcaacttgtccttatttcagcaaggagccgaacgactgccatcacaggagctgacccatctcctgttgcaggaagtgaggtgtgaatagagagacttccctcctgaggaagcaacatggactggactgcctgtactaccttctcagtaatggacagtttatgaagaggcaatgcctctgatcttggaacacaaagtctagacaatggaatagtcaatgtgtctgacgcttgcgaagtctttctacagtctatgggtgggaatctgactgtagctataccttcctgttcattgatagaagccactactccaatgcttcctgaaattcctctacctaaaacctgaacgaaatcgtcgacccgggaattct

SEQ ID NO: 21498 - DNA, 387 bp, Homo sapiens
  SIMILAR (376)..(47): 331254mologous to Streptomyces coelicolor A3(2) putative glycolate oxidase,accession number AL035640,Smith-Waterman Score= 83.
ggaaatgattggtaatgaagatttggaatttactagagcaaatcagaggcgtcgccacgtgaccagccaccgcagcagctcctttacactcctgcagtcgctggccattgaggacagcagggacgagccacagagtgctgtggcaaccaggctgctgggaatgacgcgctccaggatgtccttagtcttctcaatgatctctcaaggagccacataggtaaagccatcctgagccagccagcttgtgtgtccaaactcctctccctgctgcttgaccaacgcccgtctccaaagctagtccttattattctccagctgtgccgggcggcgctgcccctgatgagcgtaaaagactgtggaaacgtggagctcccaccctggagctac

SEQ ID NO: 21499 - DNA, 587 bp, Homo sapiens
  SIMILAR (343)..(215): 391254mologous to Homo sapiens Homologous sequences to antibody IOR-T1 variable region heavy chain,accession number R92997,Smith-Waterman Score=66.
tttcgtgcccctcgcgagtgtttccgcctgttcgagcctgcatgttctcatctcaccttacctcagtcaccttcctggctgaccccagcgctgggggaggcctgccccggggcacttttatctatgccacttcaccactgccagttcaggccccgtctttttactgggaaattgaaatcgtttcctatggagacaccgatgatgacaccggacccatagtttcctttggcttcactacagaagcagagaagcgagatggggcttggactaatccagtgggcacttgtcttttccataagtaagtaaaagaagtagctcagtgtgacagagagcagtagcctcccacaaggtgtgtataggtgttcaggaagtcaaaatagagttctgtcttcaagtgagtttggggaaaggagagcattatttttcctttctggagatttccagtgcacattagtaagattccttcctagttgacctgtaattttttaaaaatctgtttattttgcaaattctataaccctttattctaggaatacagtttgggaaatattggtgtgggtattttaatactaaagtgatactataat

SEQ ID NO: 21500 - DNA, 11331 bp, Homo sapiens
  SIMILAR (8797)..(9009): 561254mologous to Homo sapiens GR AF-1 specific protein phosphatase,accession number AF174498,Smith-Waterman Score=171.
cctgtgtcccctagcagttatactcgatgctgctctgtagaggcctgtggggggggacagtgcagggtggggcagcacaggtagcagcctctgccagtgtacactgaccagtgtgggttacccctttctgcattgtaggagtcttcggaggatgtctcaggaggcttgccctttctggtagacctgggctttaggtctgtctgtgttagcttgttccatgttaagaatcctgtacaatgggaccagaaattaccaaagaagaagaagcctgtcaggagctattgcggttccaaacttttacaaagagaagtgattcagccagacgtgatggaggaaatggtggtatcttgtgttattaagcacttgaacttggttgatgcactgcagtctctaataaatttccaatatcaagaagaacatgctgaagaatatgatttattatgtaaaattatgggagagacctttaagaaactcaatgccatggagagacagctgcagaacaaaatgaaagaactagaacttttatgttcaatgaaggaagtctcctttgatgggaatgatcttgaaaacatggtcctatcactgagggagaagttcctacaagaagtgaattctcttattcagaaaccctcacacccactggctaaaacaaagacgttagtgaagagtttaatgaaccgagccgagctgttgctgcatgtcaccatcgcagcccagtcgggcctcacgagaagcatctctgggacccctgctgaaacaccagcttgtaaatcagcttctgaaacaaaagtgatatctcacgctgtcaggcagcctgtttttcttcgcagcatgtcagctccttctgacctggaaatgattggtaatgaagatttggaatttactagagcaaatcagaggcgtcgccacgtgaccagccaccgcagcagctcctttacactcctgcagtcgctggccattgaggacagcagggacaagcccacctacagtgtcctgctagggcagctgtttgctttcatcggcaccaaccctgaccaagctgtgtccagcagcagtttccttttggctgcacagacaaggtggcggcggggaaacactcgcaagcaggcactggtgcacatgcgggaattgctgacagctgccgtacgagtcgggggagtgacgcatcttgtgggtccagtgacgatggtccttcagggaggacccagaattgaagaactcacatgtggtgggatggtcgagcaggtccaggaagcctttggcgagaccatgacctctgttgtgtctctgtgtgctcgttaccctatcgcttgcgcaaatagcattggactcttatgtaccataccttacaccaggagcgaagagaagtgcctggtacgcagtggccttgtgcagctcatggatcgactgtgtagcttgagcaatcagaccgagtccagctccagtgagaaacagaccaagaagcagaaggtggccaccatggcctgggctgccttccaggtgcttgccaaccgctgtgttgagtgggaaaaagaggaagagacaggatcttactatgttgcccagctgtgccgggcggcgctgcccctgatgagcgtagaagactgtggaaacgtggagctcccaccctggagctactctgtcccctccttaaacagtgagcaggaggatcccagcgacccagcttccaagatcgcctccctgctcttagcaaagctggcagattatgtggttccaggatgtcagacagttctttctccaaccgcttctgaacctgacaccacattgacaaaaaccagtcccaagaattccttgaaaggagataaagatcctggagaagagagtgaggctgtggatggcaagctctcgatattttatccacaagcgggaagaccagtcatccccatgaaagtcctccagccattgctaagtagttcagaaggacggcccttccgacttggtactggcgccaacatggagaaagttgtgaagatggatcgagacatgaccaagggtggctgttgcgaagtgattacagaagaggctgcagccgccctgcggaaagccaccaagtgggcacagtcaggcctcatcgtcagcattgggccacctgtagagtctatcaacccagagactgtgagtggactatccacaggcgacaaaaagaaaactgcccaaacttccatttgccgagagaggaactcggagcttgcaaggactgatcctgtgcgtcccttcatcagtgggcatgtggcaaacagcatggctgcagaagtgatcgccttgctacatagcttgctcatggcacctgaatcaaatgctgctcaaatatggaccacaacagcagagaaggttctgtctagagcactgatgtacattccacaattggggaaatacgcagaaagcattctggaaaatggcagcagcagtggcaggaaacttgccaaacttcagagaattgcacgccaggccgttgccgcactgtgtgcacttggaggcttcaaagagacaatcaagataggatccgaggttcaggcattgcctcttcataaactgtccattactgagaaggtagtacaggcagtccagtccatgttgcttcctcaggagggaagtctctctattcacacctcacttcctgcaacaggagatgggtcagctcctgtgatggcagtcgttcggctccttgctgaaataaggacaagagcatgcctggtcatggcccagcttttagaagacagcttattttgtgaagaattcatacaacaatgtccagcagctgttgaagttcttaacctagtagcccaggaatgtagtgctggagagcgacttgcagttgtggaggtacagtgtgaacggctgaggatgctctaccgggactgtgctcggcccccaccacctcctttgcaggctgaccgaagacaggccccgtctttttactgggaaattgaaatcgtttcctatggagacaccgatgatgacaccggacccatagtttcctttggcttcactacagaagcagagaagcgagatggggcttggactaatccagtgggcacttgtcttttccataacaacggccgagccgtgcactataatggctccagtttgttacagtggaagagcgttcgcttagacgtgactctctcccccggtgacgtggcaggaattggctgggagagaactgaggggactccacctcctccgggacagccagccaagggccgggtgtacttcacatactgcgggcagcgcctctcaccatatcttgaagacgtctctggtggcatgtggccagtggttcacattcagaaaaaggcagaaataaaaataaacgtaagtctttccaaatccttcatttggtctcctttccagaacaccaaaacccgagctaactttggctcccggccgtttgcctacgcggaagggcaggcccaccgcaatgctgctgacctgtgcactgacctagcagaagagatcagcgctaactttgaggccctgcctttcgccatggcatctgacagtgacaatgatgctggcaccagtattgcatcagacccaggcactcatgggccaccatgccggattgctgccgtggccaccgctcagcaacaatatgatagtgacacctcctgtcattataaagtcgagctcagctatgagaatttcatcacctctggcccagaccctcacccgcctcccattgcagatgatgaaagcgatgatgatgacgatgatgacatccctcaggaggaccactacgccctgctggtgaaagcatgggagaccaaggtttttcctaccatccgaagacgcttccgcaatgaagcagagcggaaatcgggcctggaccagataaagggggccttacaactaggtatggtggatattgcccgacagacggttgaatttctctacgaagagaatggtggcatcccaagagacctttatcttcccaccattgaagacattaaagacgaagcaaacaagttcacaattgataaagttcgaaaaggtctcacagtagtaacccgctctccagacagcaataatgtagccagcagtgctgttggaactgctctgccaaaatttgccatccgagggatgctgaaaacctttgggcttcatggagtcgtcttagatgttgattcagtgaatgaactggtgcaggtagaaacgtacctccgcagtgaaggtgtgctggtgcgatacttggtatcctatttgacatgttgggaaagggcccccagcaggctaccgaaggactgccaccaatgggctggtcacactggacaataccaaccttcaaattcacagggagctgctgcgctgcgaggctgcgctggccaggctgtactgccgcatggccctgctcaatatcttcgccccgaagttgcctcacttgttcactcgcctcttccacatccctgccatccgggacattaccctggagcacctgcaactgctgtccaatcagctcctcgcacctcctctcccagacggcaccatcagctccagctcgatcctcctggcgcagtctttacagcattgcatccattcccagaactgctccgccacggacctcttttaccagggcaactcccagacagtgagagagtggctcaacgtggccatcacccggaccctgcaccagggcgaggagagccttttagagctgacgaaacagatctgctctttcctgcagacagcaccagagcagttcccctccgaagagttcccaatttccgaatccaaagtcaacatggacgtgaatttccccggggcagcttttgttgttgtgtcttgtaaagaaagtcaatctggattccgcaaagactcctctctgtacaaggcaccgtgggcacgggtgctcgtatatggcctcggccacaaagtgaagcgaaatggccagctgaacctcatcgaggccgcctgttacccgcgggacgcgtccccagccaacactgggcttgcacctccccccaccgctgaccagtacccctctgtggtcctctccacagacagggtccacatcaaactgggggtgtctccacctcctggagcagtcctggtgttacattccctgcccctggagttcccactggctatggccttcgcagagcagctgctgtcctggaaatcagaggacagtgaagggaagtccgaagatgagcctgacaccattccgacatccgtcctcctgcaggtggtggagctgctaggaaacttcttgtggaccacggacatggcagcctgcgtgaaggagcttgttttccatctcctggcagagctcctgcgcacggtgcacaccctggagcagaggcggcaccccgctggcctgtcctcctcaatcgccctccagctgaacccctgcctggccatgctgatggccttgcagtcggagctccacaagctgtacgacgaggagacgcagaactgggtctcaggcggcgcctgcgggggctccgggggggcggcggccggtgaccagggcaggttctctacgtattttcatgcactcatggaagggtgcctggctgtggccgaagtgaccctgcctactaacatgagtgtcacagccagtggggtgacctcagcgaccgccccaaatctcagtgactcgtcctcctcctcctcgtcctccccaggacagaccccacagagtcccagcctcctctccaagaggaaaaaagtcaagatgaagcgggaaaaggcctcctcgtcgggcaagcgccagtcttcccgcaccgtggactcggaccccaccgtgctcagcatcggaggcagcaagcccgaggacatgctgtggttccaccgcgcactcaccctgctcatcatcctccgccacctcaccaggaaggacccacaggggctgggcgtgacgagtgacgccatcgccgatgcctgccaggccctggtgggccccaccgcccacagccgcttgctggtgatctccgggatccccacccacctggacgagggcgtagtcagaggcgccatccgcaaggcctgcaacgcccacggcggggtcttcaaagacgagatctacatcccgctgcaggaagaagacaccaagaagccaaaagacaaggccgagggcggggacgggaaagttgagcccgagaagacactggccttccccggcacagacagcatggaggtcagcacgtccagcagcctgacccccgccatgagcatcagcgcctccgcctccaccagccaggcctccatctgcagctcgcagggcatctcccaaaccgtcagcgacctctctgtggatccgctgcctgccggcctcgagctgcccatccctccgggcctgttggagccccacgcggtgtccagccaggaaagcctggacatttccctgtgcagcaccggcagcctgggcagcctgggcagcctgggggagcccctggacaatgcagagacggcctcggtgtcggacatgggctccatgtacacagtcacttccctggacaaccagcccctcgccgcccgccccatcaaaggcttcgcagtcgtggagataagatcccgagccaaaattgagaaaattcgagcaagtttatttaacaataatgacttgattggtttgtcaagtttggatggtgaagatgaattgatggaaatgtcaacagaagagattctaaccgtgtctgtagtaaatcagagtctctttgatactcaagggagcccagggttagaagattatttcaatgataagtcaattaaaggggagaagctggtgcccggagccagagaggttctgacggagatatttaagagttgtgcccattcagagcagacgctgagcctgacaccagcgaagcccatcagagtctctgacatttatcttagcaaagagcagatcaactcccagaccccaggcaacctcctccacctcttcttcaccaatgtccggccgccaaaaaaggtgctggaggatcagctcacccagatcctgaggaagtatggcgtgccaaagcccaagtttgacaagagcaagtacagcaaggccgggaaggagcagcaccccgtgaaggtggtgagcaccaagcggcctatcaccaagccgcccgccaaggacaaggctgtgctcaacagcgtcagcaggactgccttaagtgagaagaagccaactgtgaagccaaaatcaccagaaaagagcaaaccagatgaaaaggacccagaaaagtcacctaccaaaaaaacaagaagtccctgaggaaaaatacctgacgctggaaggatttcacaaatttgttattgacccgagccaggcaagatattccgtagcgtctggagggcgatcttgtcctgtggttacgatcttcactttgagaggtgcgcatgcatcgatgtccgacatgcacagaaggcctcaagaaagtggaccctggagatggacgtggcacttgtgcagtacatcaaccagctatgccgccacctcgccatcacacccgcacggctccatccccatgaggtgtacctggaccccgcggatgctgctgaccccagagtggcctgtctcctgaacgtgcccatcgagagcctgcgcctgcgcttcgccttgctgcagtccctcaacaccacactggagaccttcttcctgcccctggtggagctgcgccagacacccatgtatacccacagcatcgccgccctgctgaaggaggccaaagggctgatcttctatgacacgaaggtgaccgtgatgaatcgagtgctgaatgccactgtgcagaggacagcggaccacgcggcccctgagatcaccttggacccactggaaattgtgggaggggaaatcagagcttctgaaaactcctacttctgtcaggctgccaggcagctggcctcagtgccgtcgtctcagctctgcgtcaagctggccagtggcggtgaccccacatatgccttcaacatccgcttcactggcgaggaggtccatggcaccagcggctctttccgccacttcctgtggcaggtgtgtaaggagctgcagagttcctcgctgtcgctgctgctgctgtgccccagctcagctgtcaataagaacaagggcaagtatatcctgaccccgagccccatcacctacggggaggagcagctgctgcacttcctggggcagctgctggggattgcaattcgggcagacgtcccgctgcccctggacctcctgccctccttctggaagacgctggtgggcgagcccttggaccctgagcaagacctgcaggaagcggatatcctcacctacaattacgtcaagaagtttgagagcatcaatgatgagaccgagctggaggccctgtgcgctgagatcgcctcccagcacctggccacggagagccctgacagccccaacaagccctgctgcaggttcacctacctgaccatgacgggcgaggaggtggagctgtgcagccggggccggcacatccttgtggcgtgggagaacaaggacatctacgcggcagccatccggagcctgcggctgcgggagctgcagaatgtggagtgcgtgacggccgtgcgggccggcctgggctccatcatccccctgcagctgctgaccatgctcagcccactggagatggagctgcgcaccttgcggcctcccctacatcaacctcgagttcctcaaggcccacaccatgtaccaagtggggctgatggagacggaccagcacatcgagttcttctggggggccctggagatgttcacccaggaggagctgtgcaagttcatcaagtttgcctgcaaccaggagcgcatcccgttcacctgcccctgcaaagatgggggtcccgacactggccatgtgcccccgtaccccatgaagatcgcccccccagatggcacagcaggttccccagactctcgctacatccgcgatggagacctgattgttcatgatcaagcttccccagtactcctctctgaaaatcatgctggagaaacttcgttgtgccattcactaccgtgaagaccccctcagtggctgatgggagggagccccagaattaggctgtcactgaggcacccactctgctggcttgggaagccaccactgcggcccgtccctccagggccctgcgtgaggagttggcaacattttgcttttccaaactttcgtccacattccagggcctcctggaagacttaaccttttgtctttgtacgtttcgtgatgggttggttcttttgctgcctgtttgtggtctatttgtaggatagtttagttcccagacagtttgtgtctaatttgatcttcttggacattgtccctcatggccaccagattctaatgccataaggccccagctggttccccatcacagaaccacccagcaggaagccgggggtaacaatgaacctcgggccacacagagcgttcgtggttttcagcagagcgccttccacagacaagcctgtggccagccctgccctccagcctcgagctggagttgctccagaggcagccccagcaggcctccctccacatagaggtggctgggccaattgcccaaacacgtgagacacacagggagctttatgtgttcatcttcctgctttagaacttgctcccggtcttggtttttctgaggaaaagcccacagtggttcccctgcccctcccatacctccctatctgccgtctgtctctttgggccctggtctgacagttttcatctgaggcctcctcgggagcaggagacttaagggttcatcccgaccttagttcacagagcctagctgggtgcatcccagccggcaggggggtgaggaagacacccagagatgggggggacaatggttcaggtggggggcctcctccgagactctggttgagaggaaagcacatgattcaagcctaccccacaaaaaaggagcacaaaatgctcagaaatgggcccttcctccctgcagtgacgtagggacaaggggaaaggggccacaccctttttcaaaagagtggactgaggtgctctgctcaattttgggggtctgctttagtgacccagacacttcaagtccagatggagactcccaggggggtccttctgcccctctggccagcccccaccccagcactcccccatcacccccatgtaagtgtgtaatccccagggctgaggctgcctcccaggctcacccactgccccagtgcatctttgccccaaataaggtctttgtccaagtggtactttgttcatgagcagcacaggccatcttgttggacactgtcactttgggccttgccaggtctcacagaatcacatcgctgtatttattgtataaatattgtggaatattgggaagttttggagtggagtgctgtctaggaaggttttgggagtgtgggatgctgggtccaaggaaagaagatgttgcccggcctgctgggaaagattgtgaattctagagatagagccgttagcatccatcttcctccctgttaactcttaggaaatgcattcaagggacctttattagaaagggttcccctggacctaagggttgaaatcgacctagggttaaatcatgacagctgcatcaagttgtattgggatgcaagtcaactctgggaggtgagtgccccgcaagcagttccccctgcttttgaaaagaagatggtcagcccgctgcttcccccagcgggccacagctccttttggagtgtgggggggttcacagcctaggatgtattcctgacaataaggatccttttattttccattcctgccataatggaaagagccctttcgaatttaattaagaaagtggtttttccctcccccaacatcctttaaaaattccttggttcccctttagtcctccatccccttgaaatggacttgtccagcctaccctcccccagggaggagttccagaagccttcctgttggcccatccacttggagtaggatgaccaagctgtaaggtatctgcctgcctaacgtggctgcttctcccgagagcacattggagggtccagacagattccaaaccttggcccctaaaaaaatggtgtgctgtaaagttaccctgatgtatatttattaataattagtaatggtttgcatttaacaaacttttcattcaatctgatgctatttacaccatggctgtgttaaagggaagctcactaaagggaaaaaagtcacaccaataaataacctgcatctaattttgatttaccttaaaagttgtgtgaacacctacccttgctgagcaagttcaaaggctggcatgcttggatggctctgatatttaagtgctgccaagtggctaggaattaaagtgtttctaattattatggtc

SEQ ID NO: 21501 - DNA, 2712 bp, Homo sapiens
  SIMILAR (2058)..(2099): 1001254mologous to Escherichia coli porin,accession number U49400,Smith-Waterman Score=75.
ttatccacgggatctgatttttacggtacaaggcttccacttccgcgacttcatcctgcactgacgaagcgaggcatagcgactgttctcccgacgttcccgcgaatcgccgccagacgttccgggtcgatagtcaggccgaacaattttgctgaagcggtttgagcgacgcgggtagcaccagattatccatatcgtggcaataaaggggtagtttgccgcgcggataccaaacgggtgagtgaggaaagccgccgctgctggcatcgtgcggcctgaccgtggagcagatgataaaccagatggaccggtgtacacgccggcgcgaaaaatccacctgtaccactgcgaccatcgcgcctgccgctggcgctcatcagcacggaaggggcaacagcgtggtgcgcgaatatgatgaatggggcaacctgctgagtgatgagaacccgcatcatcgcagcagctcattcgcagctgcgcgataacacactgatactcagtgataacggcggcagagcctgtattttgagcacctgtttcccggtgaggacggttacagccgcaggagtcactgtggctggtgcgcggcggcgtggcgaaactggatgaaggtcccggctggccgcactctggcaggcgctgccggaagaactccgcgggtactgaccggctggtggaccgcttcgggcgcacacagacgttccaccgcgaagccgccgtgaattcagcggcgaaatcaccggcgtgacggatggtgcctggcgtcattccggctggtactgaccacgcaggcgcagcgggcagaagaagcccggcgcaggccatttccggcgggacggaaccgtccgcttttcctgataccctgcgggttacaccgaatatggccgggacaacggcatccgtctgtctgccgttggctgacgcacgacccggaatacccggagaatttacgatgataaataccggggcggatggtggcgcaccgtcacacgggccggccggaaatccgttaccgttcgacagcgacgggcgggtgacagaacagctaaacccggcaggcttaagcacacgtatcagtatgagaaagaccgcatcaccatcaccgacagcctggacgccgtgaagtgcttcggttatgttccttttgaggcctgataagacgcacagcgtcgcatcaggcatcggctgccggatgcgcgtgaacgccctatccgacctacggttatgttctggctcgttggccttggcaacgattatcgcggttggcgctacacttcgttgatttgcggtcgtccagcggacccgaaatgtgatagcgcaaaatggagactttgctcccagcggccccagcactttactggcggcaaacacgtcgcagaaatcgtctgtgcgacaaccgctgtccatattcaggtcgcgacgtaccagatttaccgaccgtgtcatggcgatagccgcctccaggccatccaccagcgtgtcgtcgtgtgcataacgccgtcggcgcgatttgctgcaaggcgatgtaaacccccgcatggcgctgctgtcggcaatgatcaggtctggtttcagagcggcaatggcttccagctcggctgcgcgcgcgttccgacggactgccacggtttcaggtgcgcagcattcgggcaggatgcgttttgcatcgttatcgtcggcaataccgatgggatgacgtccacggcggccagcgcatcggcgaacgagagttccagcacacaatccgttgtggcgttttttcgagtgtaaacgtgccgtgttcgtccgaaccgtggcggcaaaggcgtggctgatcaccagcagcaggccttcaacgaatacgcttgccttgcgagtgactattatctcgagcgcggcttcaatatggacgacagccgcaataacggtagttttccacgcaagaaattcgcgcctatttgccgctgacgctcggcaacactcggtgacgccgtatacgcgcattgggctggatcgctggagtaactggactggcaggatgatattgaacgtgaaggccatgattttaaccgtgtagtttattttacggttatgatttccagaacggactttccgtttcgcaccgctaactgctgcggaatagcaatatttttcctgctgccgcacgataaatgggtaccgagatcgattggtatactgtcggtaaaggtatctccggcagctaggtatcgacagcctgcacccggaattcaggtacgcgctgaccttcaccagcgacgctgagcccatgactacctcgactgtgcctgcgccgccttgcgctgcatgttcatcagtttcaacacgaataccggtgagcttttgctggcttccgtttcgtttggcgtaatgaatgtgccaccagcgccagcagttcgtcaggaagtcgcgagccggagccgggttgaagcgcaacgatatgcttatgtgatgggggattttgcgccgcggccatgcacactgtcgagtggtgattccagcttcgccattaactaaaatcagcgccacacctgttgattcgccctttatcacgctttgttccgggcaaaggctagccaggtcaggcccgaggcggttttcagaacggcaaacgtcgcccgaccattgcccggtgaaaggataagcggctgaaaggtgagtggtttcgcgtaccaccattgcatcaacatccagcgtggacactctgtcggccat

SEQ ID NO: 21502 - DNA, 1548 bp, Homo sapiens
  SIMILAR (1)..(306): 981254mologous to Escherichia coli 79-kDa multifunctional protein,accession number M74164,Smith-Waterman Score=500.
atgggcggcggcatcgcttaccagtcagcgtggaaaggcgtgccggttgtcatgaaagatatcaacgacaagtcgttaaccctcggcatgaccgaagccgcgaaactgctgaacacgcagcttgagcgcggcaagatcgatggtctgaaactggctggcgtgatctccacaatccacccaacgctcgactacgccggatttgaccgcgtggatattgtggtagaagcggttgttgaaaacccgaaaataaaaaaagccgtactggcagaaaccgaacaaaaagtacgccaggataccgtgctggcctgctgccgcgacggcgcggatttccgcaagatcgacaaagtgatggaaaaacagtttggctggccgatgggcccggcatatctgctggaccttgtgggcattgataccgcgcatcacgctcaggctgtcatggcagcaggcttcccgcagcggatgcagaaagattaccgcgatgccatcgacgcgctgtgtgatgccaaccgctttggtcagaagaagcgcctcggtttctggcgttataaagaagacagcaaaggcgtgggcctgtgctcctatctgctgatcgggttctattacaccgatccgaagaatggcgcagcggcaatgaaagcgttcgtcgtgacccgtgtgggtgacgtgttcttggctttcgcactgttcattctttacaacgaactgggcaccctgaacttccgcgaaatggtggaactggcaccagcgcactttgctgacggcaataacatgctgatgtgggcgacgctgatgctgctgggcggtgcggtcggtaaatctgcgcagttgccgttgcagacatggcttgccgacgcgatggcgggcccgacgcctgtctccgcgctgatccacgccgcaaccatggtaaccgcgggtgtctacctgatcgcccgtacccacggcctgttcctgatgacgccggaagttctgcatctggtgggtattgtcggggcggttacgctgctgctggccggttttgccgcgctggtacagaccgacatcaaacgtgttctcgcttactctaccatgagccagatttggctacgatgttcctcgcgcttggcgtgcaggcatggatgcgggggatccttagagtgcctgcagcatgaagggattccctactctcgcatggggagaccccacactacatcggcgctacggcgtttcacttctgagttcggcatggggtcagcgtgtttcaccctcggttattttttcatgtacaaacaagctgttattctcctgctgatgctgtttaccgcaagtgtcagtgccgcgtgcaccttgccgatagcgatcgaccatggcacgccaggccctgcggagctactgaccgtggcgctgcgctacaacctgagcagctacgacgctgcctacctcgagttggcgctgcggctcgaaatcccgattgccaaggggtccccaaactttgcttttcgtcgagcagcaaccgggaacgaggggatcaaaatgcattttctccggaataaaggaatcctatggatttga

SEQ ID NO: 21503 - DNA, 1440 bp, Homo sapiens; identical to SEQ ID NO: 17676
  SIMILAR (1440)..(1102): 981254mologous to Escherichia coli penicillin-binding protein 3,accession number K00137,Smith-Waterman Score=571.

SEQ ID NO: 21504 - DNA, 804 bp, Homo sapiens
  SIMILAR (447)..(250): 871254mologous to Escherichia coli ornithine transcarbamoylase (argI; EC 2.1.3.3),accession number J02842,Smith- Waterman Score=294.
atgatgcgtcagtgccagccaggcttaattcgccggcatctaacggctcggggagctccaaccagagaaagtaaccactgtcattatgatgaattttcacttccgcaggcagataaagcagcaaatcttctccacaaatataccaactcagtcacaacagggctgaataacgcgcgctttcagtttttcaactggatgagcggtctgctgtgggtattgatcctgacaactctgagttacatgggatccatacatgcgaccaagcacgcgggcagtgtctttaatcgactctttatgaccaatctggctgccgcttgggccgagataagtaacgcgagcaccctggtcatatgcggcaacttcgaaagagcatcgggtacgagtcgagtctttttcgaagatgagcgcgatgtttttaccacttcgcggacctggtttcctccacgaagtcaaggcatcaggttacctggaggccccaatcagcggatccaggtccgctatatgagtccacatggattttgtaacccaaaacccccgcggggccggtggagccgatgcaccaagtgccctcttccaaaagggtccctacccgggacaaaagaaccaggggagacagcacccggcactcgggacaaagcaaacccacgaaacggtacaaccacgcatatgaaatatagcccagaatcaagtggttcataccagatgcaggatgttaacaagcaagtcataaagggaaacaccacacaaacagaattaaacagaaaatcagatgatatctcaatagatgcagaaaaagcatcgtga

SEQ ID NO: 21505 - DNA, 2559 bp, Homo sapiens
  SIMILAR (1962)..(1276): 891254mologous to synthetic construct Fusion protein encoded by pURLP1.9,accession number A11178,Smith-Waterman Score=1068.
tcaataacctgactcaccacatcccccttgtgtgctacccgcaccctcgccatacgactcgccgcagaccagaccgttctggcacaccgccctgaacatgcccggcagcatctggtacgaactggtgccatcgtgagagttaagcaggataatttccggaacctgtttaccggtaatttgcccctcccgacgtaggcgcagcatatgcttagtatgctcacgacgacgggggtcacgtacccgtgtctgacaggcaaagaatggctggaagccttcccgctgcaggctgtccagcagggaaattgtgggtatatacgtgtagcgttcactgcgggattcgtgtttatcctcactgaatacgctgggcaccacgcgaaataactcttcacgggttaacggacggtcacggcgaataagatttgcagcgccaaagcgcgaagccagacgggtcataagcagactcctcagtatgggtaaaacaaataaagaaagccctgccgcacttgcgacagggctcggagaataatagggcagaattaaacactcagaagaagaaatcccagacagcgcgggccacgtatcgagtatggcacctacggtttcaccgaaatcgtcacgtgcctgctcccgggctaccgggtaccgagcacgattgcgtaaccctcccttgtccttttgtgcattccgaacatcagggttaaacgatccaactttctggtcattgacgtagacgtcgaactgccgggccttacggatatccatgatgaagctgaaccaggcattatctccgttacgccagccaagggttgagggaatggcatattgcttatggtccatcaccactgtgatgccggtactgtcatcatgcgagctgaccgttttatccccggcgaggatcagaaaaaccgagtgctggtaaataccgttctggtccggatttcccgtgcagttgatggtaaacatctttccgctggcatccgtcacactgtattccgcatttgccataatgcctgcacccagcaccgcggcctgtttcggggtttcaacgtctttggtgagtttcttcgctttgccttttacatattgatcgttaaggaaaatgccgaccagtgcgcgggcttcgttggtattatcgaactgggcgaaatcgatcgcgtgatgcaggcgctgccggatgtcgaacaagccgttacccacgcctgtgtgattaaccaggcggctgccaccggtggtgatgcgcgtcaattggtgggctatctggtgtcgcaatcgggcttcaacatcaacggtaatcgccatttgaccactaccatcaatccggtaggttttccggctgataaataaggttttcccctgatgctgccacgcgtgagcggtcgtaatcagcaccgcatcagcaagtgtatctgccgtgcactgcaacaacgctgcttcggcctggtaatggcccgccgccttccagcgttcgacccaggcgttagggtcaatgcgggtcgcttcacttacgccaatgtcgttatccagcggtgcacgggtgaactgatcgcgcagcggcgtcagcagttgttttttatcgccaatccacatctgtgaaagaaagcctgactggcggttaaattgccaacgcttattacccagctcgatgcaaaaatccatttcgctggtggtcagatgcgggatggcgtgggacgcggccgggagcgtcacactgaggtaatccgccagacgccactgctgccaggcgctgatgtgcccggcttctgaccatgcggtcgcgttcggttgcactacgcgtactgtgagccagagttgcccggcgctctccggctgcggtagttcaggcagttcaatacaactgtataccttgtggagcgacatccagaggcacttcacccgcttgacagcggcatccagagccaccatccagtgcaggagctcgctatcgctatgacggaacaggtatcgctggtcattccgatggttgcccggataccggacctggcacaatgctccggagtcaggctccgccacccgctggtcaccattgatggcgaagacgcccgtgactttgacgatgcagtttaccatcgcatcagttgtgatgatttttcctttaatatccagcatgttaagaagttcagggatagctgtgatctcattggatttcttatccgtcttgatctgcccgatgaccagactgtgcattgttgagaacgcactaatgacatgaatcgctcccctgcggcgactcttgtcataagagtgccggagcgtttttccatcaattgcaatgacgtctttatcatttgatgaatggcaatcacgcatccagttaataaagcactcgtgaaattttgcaggactgatacaggatacaactctggcaatagtatcgtgaacaggaataccattttcaaaatcaccatattgcttcaagaaatcgagatgtgtttccccgaaatcctctatatcttcccaactttcttttggaggaggttgacggtttctaaggatgattctttctgagtgaaatattgtcagtgtcattgaccttttcat

SEQ ID NO: 21506 - DNA, 1656 bp, Homo sapiens
  SIMILAR (1656)..(928): 971254mologous to Escherichia coli FdrA protein,accession number D42020,Smith-Waterman Score=1171.
ttagttatcctgatggtagtagaggctatcgacaccgctcagtgcggcgctctgtactggcacgcccagcaccggcaccagcgttttggcggcaatcatgcctggcagatgcgctgcgccgcctgcgcccgcaataatcacctgataaccgttctcttcggcgctttcggcgaagctgaacagtttatcgggggtgcggtgagcagaaaccacttcaacgtggtgcgggacattcaggatttcgaagatttcggcggcgaactgcatggtagcccagtcgcttttggaccccatcacgatggcgacacgcgccggattattgcgggaagacatgcgtcctgtcccctcgccttgattaatcacaaattcatttttatcgcccgttgtcagcgcatccggctcgatgttcatggtacgcaatacgccgcccatgatggcaccaaagaccggcgcggaaacggcgccgccgtagtatttacccgcctgcggatcgttgataacaacaaccagcgcgaagcgcggctgactcgcaggcgcaacgcctgcggtataagcaatatatttattgatgtagcgaccgtccggcccgacctttttcgcggtaccggttttaatggcgatacgatagcctttaatcgccgccttcacgccgccgccgcccggtagcgccacgctttccatcatatgcaccacggtgcggacaatggattccgggaagacacgttcaccgggaaccggggggtcaactttggtaatcgacagtgggcgataaatgccgtagctgccgatagttgcgtagactcgcgctaatgtaacggtgttaccattagcccgtagccgaaagagaaggtggccctctaagcgaccaatgcgccgcgtttccaccatcagtggttgccggacgagctgcgtgtcgaaaaagggtttagcccggatacgctcaagctggcgtgaaagcaggcaagccaggcgtgcggcctcatccagcgaggaggcaaaccagacattctcgtcgcgggccaccgccggggtataacctaaaaacagcgccaccgtcggtttgccggttgctttcatggcattaacaattttcagacgcacagcttcggcaggtggttttgaaacaaatgccagcacttcgcttttctcgtctgcactgagcatttccagcgctgttagcgcactgatgccgcccacttcacggctgaggtcgcgcccgccaaggccaatcgcgtgagtaattccctcccctgccagcgcaatctgcgaacacagctcctgaatcccggtaccggaagcgccaatgacgccaatattgccttccggcatcacgttagcaaaagccagcggtgtgccggcaatcatcgacgtaccgcagtccggccccatcaccagcaagcctttttcccgcgcgcgggttttaagttggatttcatcttccagcgtgacgttatcggagaacatcatcacgttgaggttgcgatccagcgcctggtttgccagctccgccgcatactcgccagccactgaaatcagcgccagattggcatcgggtaatttctgacaggcactgtcccagcgacgcacctgcgtcaacgcctggctgctgcctgacccctgcgccagttgttttagcgcctcttcaagctgctgcat

SEQ ID NO: 21507 - DNA, 1396 bp, Homo sapiens
  SIMILAR (905)..(177): 961254mologous to Escherichia coli cadA,accession number M76411,Smith-Waterman Score=1233.
  misc_feature (1)...(1396): n = a,t,c or g
cttccaagtagcttggatttccaggtgccgttgtggatgtgctctaaagcgccggcaatcactgcagtgcggttgccgagcaggcggtcggcaagccagccgccgagaataggggtaacgtaaaccagagaagcatatgcgctgaacaggctgatggcatggttatcatcaaaaccaagcttaacggtatagcggccatcagcctgacggtatgcaccgtgaatatcggtttcaaagcccggatagtgagcgccgatttcacacagcatctgcaggaactccagaaccggacgggtttcttcggtgatcatttcacccggcattaccagaggaactcccggcgggtacggaaggatcatattggcgttaatacgacctaccatttcgtcgagggaaacttcttcggtcataccgtgcagctctttctggaatgcagcatacggagtcattaccatcgncggcagcacttcaaatgcgcgatacatcagatccggcagattgtggtgaacaatcagtttgtggatattctgagccagttcctgaatacgcatgttttcatagaattcaggatcttcacgatacagagacggcagcatgtttttcacacgcaggttcaggtcgaacgcacgtttaaagtcagtcagagcacgcagcaggctcagtgctttggtcttatcgataccgatgctgaacaggaacagcaggttatacggaccggttttctcaacaacgatgccatgttcgtcgaggtatttcgccacgatgctggccggaataccaaagtcgctcatggtgccgtctttttccatccccggagtcagcagggtgactttgatcgggtcaagatacatgtgctcgttatcgatgtttttgaagccgtgccaggtgagtctcagcttgccgcagtggagacagcggaagagataaccctgacaatgaccacccttttgcaggcatttagctagatcagaatttctaataccgaaattctcacaatcttcttcaaggttggcaaattcatcgaggcgatcttttatatcattccagcccacatagccgataaaaacacagaaatcgccacaatgcgcgagccagaattcctgctgccatccatgataacctggcgtgcgttcaaccaactctttcagcatttcatcaggatatgtgttcttaataccggcaaattcgtcctcttcatcatactcaaattcaacaccttctatgctggcatcatcctgaaaactacctgcaaacttttcagcagcagaaccgtccgcaatacaccacggacagagatgttcaacttcatcaacgcaataaaagggacccgagtaataaactgacgtctgttgttcacagcaatcgcactctacggctttatcctgttcaaatgcgc

SEQ ID NO: 21508 - DNA, 3738 bp, Homo sapiens
  SIMILAR (2347)..(2895): 981254mologous to Escherichia coli Biotin sulfoxide reductase 2 (EC 1.-.-.-) (BDS reductase 2) (BSO reductase 2),accession number D90829,Smith-Waterman Score=981.
atggctgaagccagtgtttttcaaactgtggatccctggaggcccggatttgccaccatccccgattttctgaaggaacgttatgataaaacgacgcgtattatcatcgacttctgcttcttaattgccaccggcgtctgctttctgccgattgttctctactccggcgcgttggcgctcaacagcctgtttcacgtcggggaatcgctacagatttctcacggtgcggctatctggctactggtaattttgcttggtctggcgggaattttgtatgcggtgatcggcggactgcgcgcaatggcagtggcggactccatcaacggtattgggctggttatcggcgggttgatggtgccggtatttggcctaatcgcgatgggcaagggcagctttatgcagggcattgagcaactcaccaccgttcacgccgagaaattaaactcaatcggtggcccgaccgatcccttgccgattggcgcggcatttaccggtttgattctggtgaacaccttttactggtgtacaaatcagggcatcgtgcaacgcacgctggcgtcaaaaagcctggcggaagggcaaaagggggcgctgttaacggcggtgctgaaaatgctcgacccgctggggctgaaacccgatctgctggcgtataataccgcgctacgtgcactcatcccacagcggctgatcgctttcgatgacgcggtacgtagcacgttgaaagaggaggaaaaactggtcaactccagcgactggggctacgacgctcaggccttttgcccgctggcgaccggagtagtgaaccaaatcggcggtaaagagcgttatttctttggcaatattttgtggcagacacgggcgttgatggaccgcgcgatcggtcataagctggcgaaaggccgcccggagcgcgaatatttacagactggcgatgcggtggatagctggaaagtgattgtcgttgaaccggaaaaacaacttacgttgttatttggcatgaaagcgccggggctgggacgactgtgttttagcctggaagataaaggcgactatcgtactatcgatgtccgcgctttctggcatccgcacggcccacattggatcgatgccaagagtggcctgacccacagcctggtcaccaccgcggccaacgagcatgacctcaatcagctgggtaatctgctgcatggagaggagcaatttgtctcagccgatgccggctaccaaggggcgccacagcgcgaggagctggccgaggtggatgtggactggctgatcgccgagcgccccggcaaggtaagaaccttgaaacagcatccacgcaagaacaaaacggccatcaacatcgaatacatgaaagccagcatccgggccagggtggagcacccatttcgcatcatcaagcgacagttcggcttcgtgaaagccagatacaaggggttgctgaaaaacgataaccaactggcgatgttattcacgctggccaacctgtttcgggcggaccaaatgatacgagtcggtatgatgattttggtgacggggggcgcacggagcgggaagagtcgccacgcagaggcgcttattggggactcttcacagctcattcacccattcggcgagcatcgcaagctgcgcctgacggtgcgcctcacgcaggcccagatgtacgcacatcacatgaatcgcttttccggtcatcggcggcacaatgcggcagtagagcacgccgcgcttttccgcaccatcgaccgaaacatcgcgattctcataatgttcaatgggataacgcgacagtacggcgttgccgtgatgcccttccgggtatacggcattgcgaccgtaggcaaaatcgctccacatagtgtcggcgagaaactcgtagtgcgaggtatcgggccagttttccacatgcagcggatgaacttcgtgcgcgcccatcacttcctgcaggcaaacaatatcggcgctgacggtacgcacggcgtcgcgaagttccggcaaaatgaagcgtcggttaaacgcggtaaagcctttgtgaatattgatggcatccccacctccaccggcctctctgccttgcgccagggcacggaccggcctctaggcggcttccacggatgcatccatgaggtgcgcatcaacaacgagctgcaggacttcaaggccctcccaccacagtccctgggggtgtcaccaggctgcaagtcctgcaccgtgtgcaagcacggcctgtgccgctccgtggagaaggacagcgtggtgtgcgagtgccgcccaggctggaccggcccactctgcgatcaggaggcccgggacccctgcctcggccacaggcatctagagcagaaaccgaagatgatcgtcgtttctgaatgctactggaccgcagcagccaaacacgcagatatcgtattcccgatcaccacatcgtttgagcgcaatgacttgacgatgaccggtgattacagcaaccagcatattgtgccgatgaagcaggctgttgctccgcaatttgaagcgcgtaacgattttgacgtgtttgccgatcttgcggaattactcaaacctggcggaaaagagatctataccgaaggtaaagatgaaatggcgtggctgaaatttttctatgatgccgctcagaaaggtgcccgtgcgcaacgcgtcactatgccaatgtttaatgccttctggcagcaaaataaactgatcgaaatgcgccacagcgagaagaacgaacagtacgttcgttatggtgatttccgcgccgatccggtgaaaaatgcgctgggtacgccaagcggcaaaattgaaatctattcaaaaacgttggaaaaatttggctataaggattgcccggcacacccaacctggctggctcctgatgaatggaaagcaaaaaaaccacccggcagcgaaaattcactgccgggcgcggttttatttcagccccagagcggctttcatggtgtagaagagatcggtctggtcggtcagtccaacaacattggcggcatgcgggccatacgccgcaatacgcaactgactgccgcggtgctgcgcggtgaactggaagccattcaggatggcgtgcgtaaattcacgccggagacggtggcgtctttacaggcggaggtcggtacactgaccaaactggttgacgatctccatcagttgtcgatgtctgatgaaggcgctctcgcctatcaaaaagcaccgacagtattaccgtatttggcgatcgccgaccgtttaatgcagttattcaataacttactggaaaacagcctgcgctacactgacagcggcggcagcctgcaaatctctgccgggcagcgcgacaaaacggtgcgcctgacctttgccgacagtgcgccaggtgtcagtgacgatcagctacaaaaattgtttgaacgtttttatcgcaccgaaggttcccgcaaccgtgccagcggcggttccgggctggggctggcgatttgcctgaacattgttgaagcacataatggtcgcattattgctgcccattcgccttttggcgggcattacagtagagttaccgctggaacgggatttacagagagaagtatgaccgagttaccaatcgacgaaaacacaccgcgtattttgatcgtggaagatgaaccgaagctggggcagttgctcattgattatctgcgtgctgcgagctatgcgccgacgcttatcagccacggcgatcactttagagccctatag

SEQ ID NO: 21509 - DNA, 1449 bp, Homo sapiens
  SIMILAR (1119)..(472): 941254mologous to Escherichia coli mhpR,accession number Y09555,Smith-Waterman Score=1011.
ttagttgactgtcagctgtccttgctccaggatgctgtttttgacaacggatgttttattgcctttgatgttcattaagaagcttggcgcaaatgttgcctttttatcctcgaagaagcctctgtttgtcatgtagcttgtgataaccacattgttgcctttggcttgcggcactgcgaagtgagagtaagtgaatgtcacatcgtttggatcaagacccatttgcagcacaagccctgttttgttcagcggcttgtaagggccggttaaagagtttgatacataaccaagcatgtaaatatcgtttgagttaataccatcgatcgtcatttttgaaccgcgtgaatcagtgaacaagtaccatttgccgttcattttgaaaacattcgcgcgctcgatttcatcagttaccgtgtttgtagtgatcagcggcttcactacttttttcaatgtgtaatcattatttaactccccttctttgagcgcgcgcgccagaatggcttccagctttaacggttcccgtgccagttgatagtcatcaccggggcgggaggctaacatttcgattaattccttgcggtcttgttccgggcaaaaggccagccaggtcaggcctgaggcggttttcagaagcggcaaacgtcgccagaccattgcccggtgaaaggataagcggctgaaacggtgagtggtttcgcgtaccaccattgcatcaacatccagcgtggacacatctgtcggccataccacttcgcgcaacagatcgcccagcagtggggccgccagtgcagaaatccactgttcgtcacgaaatccttcgcttaattgccgcactttgatggtcagtcgaaaactatcatcggagggggtacggcggacatatccctcttcctgcagcgtctccagcagtcgccgcacagtggtgcgatgcaggccgctgagttccgccagcagcccgacgctggcaccgccatcaagtttatttaacatatttaataacattagaccgcgggttaagccgcgcacggttttgtattccgtctgctcattgttctgcatattaattgacatttctatcgttgcaagtttacacttatgtttgcctgttgcattagcacatttattacttactagcacagttattctgtccttgacatgcttaattcctgtaaaggctgtctcatcagctgcagtcagtgtctggccaaggcaataatgcccaaatagtgatgtttcatcggcattataagcttgttctaatgtcagattttcatcatcaatgaatttatctgctgctttgtgatcaccacaaacagcagatgctttatcatcacaactctttagaaatctaatgccttgtcttttcttacatttctgcaaccagcctgctgaatatttatacttcccttcaattttcagttcactgtgatagatctttgcttgtttcat

SEQ ID NO: 21510 - DNA, 1866 bp, Homo sapiens
  SIMILAR (1548)..(799): 931254mologous to Escherichia coli fatty acid oxidizing complex,accession number M59368,Smith-Waterman Score=1151.
  misc_feature (1)...(1866): n = a,t,c or g
ttagcggtattgcttcagcaccgcacgacccagcgtcaggatctgcatttcgtcagatcccccggagacgcggtctacacgcagatcacgccagaagcggctgatgcggtggttgcccgcaatcccgacaccgcccagcacctgcattgcgctatccacaacttcaaatgccgcattggcgcagaagtatttgcacatcgctgcatcgccagaggtgatggtgccgttgtctgctttccacgctgcttcatacagcatgtttttcatggagtttaatttgatcgccatgtgggcgaatttttcctgaatcaactggaaacgaccaatagcctcgccaaactgcacgcgctgattggcgtagcgcgccgcatcttcaaaggcgcacatcgccgtaccgtagttggtgagggctaccaggaaacgttcatggtcgaactcttctttgacgcggttaaagccgttacccggcccgccagagaaaaaggcatacaccgcaaaggccatcactaccagccagatccccatatccgggattagccccaaaagcgccagcgccagcgtcatcatggcaaagctgccaatcaacaatggacgccgtccggcagtgtttaaccacagcatcggcggaatacagccgagcataaagaacaggctaatcaccacattccctagtgccgcgtttttgccaacccccaatcccaacaaaccaacgatttgcgggccaaaggtgtaaatggcgaacattgggatcaccacatcgcggcaataaagctgatggaaaacgcccgctgacgggtattttttcactttcgggttttcaacaaccgcttctaccacaatatccacgcggtcaaatccggcgtagtcgagcgttgggtggattgtggagatcacgccagccagtttcagaccatcgatcttgccgcgctcaagctgcttgttcagcagtttcgcggcttcggtcatgccgagggttaacgacttgtcgttgatatctttcatgacaaccggcacgcctttccacgcagactggtaagcgatgccgccgcccataatgcctgcacccagcaccgcggcctgtttcggggtttcaacgtctttggtgagtttcttcgctttgccttttacatattgatcgttaaggaaaatgccgaccagtgcgcgggcttcgttggtatgcgccagcgggacaaaacttttgttttccaggtttaaggcttcttcacgaccaaaacgggccgcagcttcaatggtttttactgcggtgatgggggccggataatgtttccccgctgtttgtgcgaccatccctttagcgatggtgaagctcatggtggcttcaatcttgctcagttttagtggttccagcttcggctgacgttttgctttccagtcgaggtcgccgttaatggcctggcgtaaaaccgcctttgcgccttcaaccagtttttctgctttgactacgccatccaccagaacggttttcagncgcgtatacggggcgcaatctttaccggggggaatattttcccggacgttttggcgccccttctgtgcttcttctaaacgccagccgtgttgttccctggtttcgtcacccattgattcgttgtccacaaatttttcgcccatttgtagccccctcattggaagggggggcggcgcctcctctagtgaccctagaggatcccgaacaggtgcaccgctaaagcgttcctcgcggaacatcagatagtcccggaatcgttttatccggtggtgcgggcgcggctgacggcgattaacgataagccgacagaaggtaatgaagatgaggcgcttaaccgcgaactcaatcttacctggcaaaatacgcggcccgatcat

SEQ ID NO: 21511 - DNA, 1399 bp, Homo sapiens; identical to SEQ ID NO: 15111
  SIMILAR (520)..(897): 891254mologous to Escherichia coli cadA,accession number M76411,Smith-Waterman Score=597.

SEQ ID NO: 21512 - DNA, 5356 bp, Homo sapiens
  SIMILAR (1429)..(1746): 961254mologous to Escherichia coli 79-kDa multifunctional protein,accession number M74164,Smith-Waterman Score=520.
atggactggctggctaaatattggtggattctggtgattgtctttttggtaggcgtcctgctgaacgtgattaaagatctcaagcgcgtcgaccataagaaatttctcgccaacaagccggagcttcccccgcatcgtgatttcaacgataagtgggacgatgacgacgactggccgaaaaaggatcaaccgaagaagccaggtaatctgtcttttacatcatttcaatcacatcatcatcgccaggcttaccgccacttagaataccgacagtatgcgcgtgtgcacctgcgcttgcagcagtgccggacaggtccggcaacttccgactccggtatagaagttaaccagaatatagctgtcgccagagcgggtgacattgtaagcgccagattcggcattccatggaacgccaccatccgcatcggcatatgtatccgttgcccttctggcaaaagcagccacatgcgcggcgccaccataaacatcaccttgattggtaagcagcaggaaaaagaagctaatggtctggacccggaagtgctggcggagattaaccgcgaacgcgaggccttcctggcagcacagcagggaagtacttcaacggagttgtttaccaccattgaaggcaactacgctgatgctgtgcgcctgctgacgactgctcatagcgtaccgtttgacggtaaagcgacgctgtttgttgctgaacgcacacttcaggaaggtatgagtcccgaacgcgcctggtcgccgtggatagcggagctggatatctatcgtcaggattgtgcgcatgtggatattatctctccagggacgtttgaaaaaattgggccgattattcgcgcaacgctaaacaggttataccccatgtcatcactgaatattaaacagggaagtgacgctcattttcccgattatcctctggcgtcgcccagtaataatgaaattgatttacttaatctaatctcagttttatggcgggccaaaaaaacggtcatggcggtcgtttttgcgtttgcctgcgcaggcttgctgatctctttcatcctgccgcaaaaatggaccagcgcggcggttgtcacgcctccagaacctgttcagtggcaagagttggagaaatcattcactaagcttcgtgtgctggatctggatatcaaaattgatcgtacagaagcatttaacctgtttatcaagaagtttcagtcggttagcttgctggaagagtacctgcgttcatcaccttatgtgatggaccaattaaaagaggcgaaaatcgacgaactggatttgcatcgcgcaattgtcgcattgagcgaaaaaatgaaagcggttgatgacagtgccagtaagaaaaaagatgaaccgtcactgtatacctcctggacgctaagttttaccgcgccaaccagtgaagaggcgcagaccgttttgagcgggatgttcgcacaaacagcggggaaacattatccggcccccatcaccgcagtaaaaaccattgaagctgcggcccgttttggtcgtgaagaagccttaaacctggaaaacaaaagttttgtcccgctggcgcataccaacgaagcccgcgcactggtcggcattttccttaacgatcaatatgtaaaaggcaaagcgaagaaactcaccaaagacgttgaaaccccgaaacaggccgcggtgctgggtgcaggcattatgggcggcggcatcgcttaccagtctgcgtggaaaggcgtgccggtatgtcatgaaagatatcaacgacaagtcgttaaccctcggcatgaccgaagccgcgaaactgctgaacaagcagcttgagcgcggcaagatcgatggtctgaaactggctggcgtgatctccacaatccacccaacgctcgactacgccggatttgaccgcgtggatattgtggtagaagcggttgttgaaaacccgaaagtgaaaaaagccgtactggcagaaaccgaacaaaaagtacgccaggataccgtgctggcgtctaacacttcaaccattcctatcagcgaactggccaacgcgctggaacgcccggaaaacttctgcgggatgcacttctttaacccggtccaccgaatgccgttggtagaaattattcgcggcgagaaaagctccgacgaaaccatcgcgaaagttgtcgcctgggcgagcaagatgggcaagacgccgattgtggttaacgactgccccggcttctttgttaaccgcgtgctgttcccgtatttcgccggtttcagccagctgctgcgcgacggcgcggatttccgcaagatcgacaaagtgatggaaaaacagtttggctggccgatgggcccggcatatctgctggacgttgtgggcattgataccgcgcatcacgctcaggctgtcatggcagcaggcttcccgcagcggatgcagaaagattaccgcgatgccatcgacgcgctgtttgatgccaaccgctttggtcagaagaacggcctcggtttctggcgttataaagaagacagcaaaggtaagccgaagaaagaagaagacgccgccgttgaagacctgctggcagaagtgagccagccgaagcgcgatttcagcgaagaagagattatcgcccgcatgatgatcccgatggtcaacgaagtggtgcgctgtctggaggaaggcattatcgccactccggcggaagcggatatggcgctggtctacggcctgggcttccctccgttccacggcggcgcgttccgctggctggacaccctcggtagcgcaaaatacctcgatatggcacagcaatatcagcacctcggcccgctgtatgaagtgccggaagtcggtgtggcggtgggcctgcacggcgccagtgtgcagcagcaaaaatcattctgtccttctgttagtatctactcacagccgatcccgggcctgcagcaactctgcgccgctccccccccccccggcttagtgcaccgaacggcaatctccgagggggtcggaatgcctttacacgtcgtcaatttaccgccgaaaagatttgcgcgtaaacgcctggagcccaaatgggtacggataacttggcagttcgctgatatgcaagatatcggtaagacgccgctcaccgcctgccgttgccagcaagttttcagcaatgttacgcgccgacatcagcgcccgcagcatcggcataacgccacgtttgcgccagatttgccgataaccatcgaactcttcgactaccacatcccacgcatcgtttcgatatccagcgcgttcagccccatcattgacgttgccagcgcactacgcagggtgttctcacgttcgggcgtcatcaccgcctgcaacaaccaaagcatttcctgcgcttccagagtttcaaaaacactgtcgcggttcgaaagtgtagtgggcgtgaacttcgctacgcgccttcatataagtgaagatatccgcaccccggaatgcatatattgcctgcttcgggtcgccattagcaacaatgcggttcccgctgatggtgccagataccgcgaaaaatcggtactgctgggggaccgggtggccccgagcggcggcgagcggtgcaagagggggaacggaggggcccgtaaaggggggcgcgctagaggaggagcccctagggatccgaagggagcagcaagggcgaaggccaatgcatggccatggacggagccaagagagtgttccttgattgctggcgaaatcgccatcgaatgccagcgtgggattggtcaccaggatcgttttcagcgcctgatcaccacgctacgtcaggtgctggagtgcgatgcgtctgcgttgctacgttacgattcgcggcagtttattccgcttgccatcgacggtctggcaaaggatgtactcggtagacgctttgcgctggaagggcatccacggctggaagcgattgcccgcgccggggatgtggtgcgctttcccgcagacagcgaattgcccgatccctatgacggtttgattcctgggcaggagagtctgaaggttcacgcctgcgttggtctgccattgtttgccgggcaaaacctgatcggcgcactgacgctcgacgggatgcagcccgatcagttcgatgttttcagcgacgaagagctacggctgattgctgcgctggcggcgggagcgttaagcaatgcgttgctgattgaacaactggaaagccagaatatgctgccaggcgatgccacgccgtttgaagcggtgaaacagacgcagatgattggcttgtcccctggcatgacgcaactgaaaaaagagattgagattgtggcggcgtccgatctcaacgtcctgatcagcggtgagactggaaccggtaaggagctggtggcgaaagcgattcatgaagcctcgccacgggcggccaagctgctgagggtgttgcagtatggcgatattcagcgcgttggcgatgaccgttgtttgcgggtcgatgtgcgcgtgctggcggcgactaaccgcgatttacgcgaagaggtgctggcgggcgattgccgcgaccgatttgtttcatcgcctgagcgtgtttccactttcggtgccgccgctgctgccgttgaggcgttgcgtgaccatctcaatacgctgggcggcgagcaccatgaccccgtgcagttgctgaatatttactacgaaacgccggataactggctgcgtgggcacgatatgggcttacgtattcgtggcgaaaacggtcgctatgagatgaccatgaaagttgcaggaagagtgacaggcggcttacatcagcgcccggaatataacgtggcgttgagcgaaccgacgctcgacctggcgcagttaccgacggaagtctggccgaacggcgaattgcccgccgatctcgcctcccgcgtgcagccgctgttcagcaccgatttttatcgcgaaaaatggctggtggcggtcgatggtagccaaattgaaatcgccctcgaccagggggaagtgaaagcgggtgaatttgctgaacctatctgtgagctggaactggaactgcttagcggcgacacgcgcgcggtgctgaaactggcgaaccaactggtatcgcaaaccggattacgccagggcagcctgagcaaagcggcgcgtggctatcatctggcgcagggcaatccggcgcgtgaaatcaaaccgaccaccattttgcatgttgcggcaaaagccgatgtggaacaggggctggaagcggcgctcgagctggcgttagcgcaatggcagtatcatgaagaactgtgggtacgcggcaacgatgcggcgaaagaacaggtgctgcagccattagcggccagccaggaggctggaccaacgcatatgtga

SEQ ID NO: 21513 - DNA, 728 bp, Homo sapiens; identical to SEQ ID NO: 17675
  SIMILAR (150)..(602): 941254mologous to Escherichia coli UDP-MurNac-tripeptide synthetase (MurE),accession number D10483,Smith-Waterman Score=711.

SEQ ID NO: 21514 - DNA, 2231 bp, Homo sapiens
  SIMILAR (1341)..(2225): 991254mologous to Escherichia coli f404,accession number L10328,Smith-Waterman Score=1534.
atgatgaggacgagcggaggaacacgagataatgagtcgagcagtgacgatgagagagagagagagaaccgtctctcggatgagaaatcgaacgaatatgccaacctggtcggtggtgagcgttacgagccagatgaagagaacccgatgctcggcttccgtggcgcgggccgctatgtttccgacagcttcctgcgactgtgttcgtcgctggagatcgtgaaggcacgtgaaacagtggcgttgattcaggggctgaaacacgaatctgctggcggatgataccgcgctacgtgcactcatcccacaacgggctgatcgctttccgatgaacgcggtacgtagcacgttgaaagaggaggaaaaactggtcaactccagcgactggggctacggacgctcaggcctttgcccgctggcgaccggagtacggttattttgccaaacaggcggggtttaccgttaaaacgtccgccagccttgctgctttatggcaggtagtgaaccaaatcggcggtaaagagcgttatttctttggcaatattttgtggcagacacgggcgttgatggaccgcgcgatcggtcataagctggcgaaaggccgcccggagcgcgaatatttacagactggcgatgcggtggatagctggaaagtgattgtcgttgaaccggaaaaacaacttacgttgttatttggcatgaaagcgccggggctgggacgactgtgttttagcctggaagataaaggcgactatcgtactatcgatgtccgcgctttctggcatccgcacggcaaccgggctgaacgggaaaaaccaagattccagccttattctcgccggaagtcgtttatcggccagaacatgttgctcccaatgtccattatgccgcccgttttccgcagggtaatctgcccccttggcgtggcccggctcggcaagttccgggacccggtttacctcgtttgtgtcttcacccgtcagattttccgctactacacttcaggcgatgagtttctgcaaatcaataccaccggcggcgaagatattgatgacattgatgatatcaagctctttgtctatgaagagagctacggtatcagtaaagagagtcactggcgcgaggcgatcaacgccaaagcgatgggagcaatgaccttaaactggcaggaaaaacgctggcagcgattttttaacagcgaagaaccgggaaatatcgaacccgtctacatgctggaaaaagtagaaaatcaaaaccatgccaaatgggaggtccataattttaccatgggctaccaacggcaagtaaccgaagatacttacgaatatttgctgctaaatgtggtgggtgttccggttccggacaatattcacccgatgaccaaagacgaagcaggagtctggtcgtggcgcacacctatcctgaaaggcaacctgtacgagtattttttcaatgttgatggtgtacgcagcattgatacaggcaccgcaatgactaatcctcagcgccaggttaactccagtatgattctggtgccaggcagttatctggatacgcgttctgttgcgcatggtgatttgatcgccataacttaccactccaacgcattgcaatctgaacgtcagatgtatgtctggaccccgccaggatacaccggcatgggcgagcctttgccagtgctctatttctatcacggctttggtgataccggacgttccgctatcgatcaggggcgtatcccgcaaatcatggataacctgcttgctgaagggaaaattaaaccgatgctggtggtgatcccggatacagaaaccgatgcgaagggcattattcccgaagatttcgtgcctcaggaaagacgtaaagtcttttatccgctgaatgctaaagcggcagatcgcgaactgatgaacgatattatcccgctgattagcaagcgttttaatgtccgtaaagatgccgatggccgcgcgctggcagggctttcacaaggcgggtaccaggcgctggtttccggaatgaatcatctggaaagctttggctggctggccacattcagtggtgttaccacgacaaccgtaccggatgaaggtgtcgcggcccgactgaacgatccggcagctatcaaccagcaactacgtaattttactgtggttgtgggggataaagatgtcgtaaccggcaaggatatcgccgggctgaaaactgagcttgagcgagaaaaaaattaa

SEQ ID NO: 21515 - DNA, 5793 bp, Homo sapiens
  SIMILAR (3092)..(3136): 861254mologous to Escherichia coli cadA,accession number M76411,Smith-Waterman Score=64.
atggatgcgtcaggacaccatgtgcgggggttcgcgtcggggatgggatgctgccgcgttaggcgaaccatgaagcgagaaacggggggtggacgcttggccggtttccgcctggtgggtacattgggtcagcatctgggtgcgcacaggtcagccagcaaggggcatcagatcctggcggcggcacgtcatgtcgacaggcttgcaaaggctgcaactggcaaagcgtcagttgccatgaagtcgatctcagctggccggataacctaccggccctgttgcaggatatcgatacggtctattttctggtgcacagcatgggcgaaggcggcgattttatcgctcaggaggcgccaggtggctctcaacgtccgcgatgcgctacgtgaagtaccagttaagcaattaatctttcttagttcgttgcaggccccgccacatgagcagtcggatcatctgcgtgctcgtcaggctacgcaaggaaattcggagtgaagggaatgtaccccgtgaccgaattgcgggccgaaattatcgttggcgcaggttcccgcggcgttaggaagtcatgctgcgatatggtctacaacctgccagtgttaacgcctccacgctgggttcgttcacgcaccacgcccattgctctggaaaactttctgcactatctggttgcgttgttagatcatccggccagcgaacaccgcatcttcgaagcgcgccggaccagaggtgttcagttatcagcaacagtttgaacattttatggcggtgagcggtaagcgcccgctggtttgatcccccatcccccctccccaccccgctggatttcggtgtggtttctcaatgtgattacttccgtaccgcccaccaccgccagggcgttgatatcaggggctgaaacacgatctgctggcggatgataccgcgctacgtgcactcatcccacaacggctgatcgctttcgatgacgcggtacgtagcacgttgaaagaggaggaaaaactggtcaactccagcgactggggctacgacgctcaggcctttgcccgctggcgaccggagtacggttattttgccaaacaggcggggtttaccgttaaaacgtccgccagccttgctgctttatggcaggtagtgaaccaaatcggcggtaaagagcgttatttctttggcaatattttgtggcagacacgggcgttgatggaccgcgcgatcggtcataagctggcgaaaggccgcccggagcgcgaatatttacagactggagatgcggtggatagctggaaaatgattgtcgttgaaccggaacaacaacgtacgttgattatttggcatgcaagcgccggggctgggacgactagctgttttagcctggaagataaaggcgactatctgtactatcgactgtccgcgctttctggcatccgcacggtatgccggggcatgattttaatggttattgatgatccccgcgcatctgtttatttttcgcggaatggcaaaacaaatcgccagactggcagtaccaagcacagatttaatcgactaatacctgcgttattctttcatgtttcccatggcatcaatgggggaaatcacggaagaatgcgcacgttattttctcaacaacagtggattgatatgaagccacaccttgcgctatcgcctgcgggatatatcgacgcccgtccgcctgatgacctactacagctacaaagagatcgcccgccgcagccacacggctgtcgagtgtcatctctcgcagtgctcgcgaagcgcatccggctcgatgttcatggtacgcaatacgccgcccatgatggcaccaaagaccggcgcggaaacggcgccgccgtagtatttacccgcctgcggatcgttgataacaacaaccagcgcgaagcgcggctgactcgcaggcgcaacgcctgcggtataagcaatatatttattgatgtagcgaccgtccggcccgacctttttcgcggtaccggttttaatggcgatacgatagcctttaatacactgacgtcgcgccctaatgatgagtacgctttccaccagctcaccgatgcaacttgcgctggtggattacctttccacgtcgccgatacgacgcccatcttcgtgcgcctgcgtcgccagcttgcggaacgtaaacaacgtgcctggcaggcactgctgcgttatctgcctgcggaagtgaaaattcatcataatgacagtggttactttctctggttggagctccccgagccgttagatgccggcgaattaagcctggcggcactgacgcatcatatcagtattgcgccgggtaaaatgttttctaccggtgaaaactggtcacgttttttccgttttaataccgcgtggcagtggggagagcgtgaagaacaggcggtaaaacaattaggcaaacttattcaagaacggctcgtcgggctgctggcggaactcagcggcctgcatcgcaccactgtgcggcgactgctggagacactgcaggaagagggatatgtccgccgtagcccctccgatgatagttttcgactgaccatcaaagtgcggcaattaagcgaaggatttcgtgacgaacagtggatttctgcactggcggccccactgctgggcgatctgttgcgcgaagtggtatggccaacagatgtgtccaagctggatgttgatacaaccctggtacgcgaaaccactcaccgtttcagccgcttatcctttcaccgggcaatggtcgggcgacgtttgccgcttctgaaaaccgcctcgggcctgacctggctggccttttgcccggaacaagaccgcaaggaattaatcgaaatgttagcctcccgccccggtgatgactatcaactggcacgggaaccgttaaagctggaagccattctggcgcgcgcgcgcaaagagggctacggacagaactaccgcggctgggatcaggaggagaaacacgcctctatacgccgtaccgtgcgcagtgaacaacgagtgattggctgtctgaatctggtgtatatggcgagcgcaatgaccattgaacaggcattggtggtcttacgaagacgaacgatgtacgccaatctatttccgcccgacccgtatcgctaccggtattcttgtggtatcccacagagtgaattccagcacgctaccattgctaagcgcgtgaaagaaacaccaaacgcaactgggccggtacatgctgtaattaccaactctacctatgatggtctgctgtacaacaccgacttcatcaagaaaacactggatgtgaaatccatccactttgactccgcgtgggtgccttacaccaacttctcaccgatttacgaaggtaaatgcggtatgagcggtggccgtgtagaagggaaagtgatttacgaaacccagtccactcacaaactgctggcggcgttctctcaggcttccatgatccacgttaaaggtgacgtaaacgaagaaacctttaacgaagcctacatgatgcacaccaccacttctccgcactacggtatcgtggcgtccactgaaaccgctgcggcgatgatgaaaggcaatgcaggtaagcgtctgatcaacggttctattgaacgtgcgatcaaattccgtaaagagatcaaacgtctgagaacggaatctgatggctggttctttgatgtatggcagccggatcatatcgatacgactgaatgctggccgctgcgttctgacagcacctggcacggcttcaaaaacatcgataacgagcacatgtatcttgacccgatcaaagtcaccctgctgactccggggatggaaaaagacggcaccatgagttttgatagttgttggtggttcggtgtttgtgattattattgtgatttagcccacgttggtggggagtttttatggtgtgatttggtcgttgagcgtatcacattgttggtggttggaaatgagttttcggcagcggtttcaggcgctggaaaatcggtcctggtagatggccgtagtccaaagcagaaaaacttggttgaaggcccaaaaggcgtttctccgccaggccattaccggcgacttcgactggaaagcaaaacattgaagccacccatgagcttcaccatcgctaaagggatggtcgcacaaccagcggggaaacattatccggcccccatcaccgcagtaaaaaccattgaagctgcggcccgttttggtcgtgaagaagacataaacctggaaaccacaccttttgtccgcgtggcgcataccaacgaagcccgcgcactggtcggcattttccttaacgatcaatatgtcaaaggcaaagcgaagaaactcaccaaagacgttgaaaccccgaaacaggccgcggtgctgggtgcaggcattatgggcggcggcatcgcttaccagtctgcgtggaaaggcgtgccggttgtcatgaaggatatcaacgacaagtcgttccgcatcggtttgaccgccgccccgaaactgctgaacaagcagcttgagcgcaacaagatcgatggtctgaaactggctggcgtgatctccacaatccacccaacgctcgactacgccggatttgaccgcgtggatattgtggtagaacaaatctactcagccaatcaaacacctttgtgtacacacaatttagtgcgtcaaccagctcaccttcaacacttcacactctcacgacagtgcgaacaactaaagtcgtttcacctggctcccctacccaagagcttttttttacaagtatttcgccccatttgggacaacgttcccagggagccccaaaacacgcttcttctttcacactctcttacccttgtaacgtggattaacacccacacatttcctatctacacggctacacagttacgtacgcgggatactttacagccagctgcattcccatcaacacaccgagtgcatggacgaccatgcgcccctgctgaatctctgcggctaccagcgcctgatgcagttccgctgaaagtggcgacacaagggaaagatgcgctgcaggagctggaaagatgccaaggccctgcctgtagcgaagcccatctcatggaaatgcgtcgggtatcttacagttatcgctatattcaggaagtggcttatatcgataaccacgttccccagtgttcgtctctggagcatgaaagtccgcccgataccttccccgagccaggtaaaatttcgaaagatggttatcgtgtctggttaacatcgcataacgatttaggcattatccgtttacatggccgccaatggaaacgggcacattatgtcgtcatgatctaccccgcttcctttattgatgtcattccctatagctcatggcaaattgatgccgccattattggcaatgcccataacgttgtcataaccagcagcgatgaaattgctcagggaattattaccaggctacaaaaaacacccggtgagcatatcgaaaataatggaatcatttacgatatcctgcccttaccggagatgaatatttcgatcatcacatgggcttcaacgaaaatgttgcagaaaggctggcatcggcaagtctttatttggttaccgctcgggttggtgattggcctgctggcagcgatgtttgtgctgcgtattttgcgccgtattcagtcaccgcatcatcggatcgctgacagcactgttatggaaggtgcgaataagcggggaaattcttctcggctgactcagtcatttcatttcttcatgtttgagccgattttttctcccgtaaatgccttgaatcagcctatttag

SEQ ID NO: 21516 - DNA, 499 bp, Homo sapiens; identical to SEQ ID NO: 14628
  SIMILAR (193)..(498): 981254mologous to Homo sapiens Human G-protein coupled receptor GRIR-1,accession number Y28279,Smith-Waterman Score=511.
  misc_feature (1)...(499): n = a,t,c or g

SEQ ID NO: 21517 - DNA, 606 bp, Homo sapiens
  SIMILAR (541)..(38): 391254mologous to Fowlpox virus gag,accession number AF006065,Smith-Waterman Score=282.
ctccattctctttgccattttccttagggcttactgcatccctgtttatgaacacctggctagctatttctagtaattgtgatggattcatccctgcaagcccagcctgtttctgcagttttcttctcatgtcttctgcgctttgacggactaaagccatgtgaatcatgtgctgattttcagggctatcgggatcaaagggagtatacatacgataggcctcacacagtctctcgtagaattgtgctggactttcttcttttccctgaatgacctcagagagcttgttaacgtttgtggccttctgagctcccctcattaatccttccaagagagcttccctgtctcggtttagcctttgcatctcctctctttcatgtgggtccaactgggggtcggttcctggcaactgggtccttccatattcttgggggttttgataatcagctagtgcatgttcctctagccacttagttcctgcttggaggactctccgcctttcttcaccaaaaacacgcctctccaccacgtgaccatcctcgtctatcccagtataacgctgcactctcaggggcatttgtgtccccgttttgggtcgtaaacgag

SEQ ID NO: 21518 - DNA, 716 bp, Homo sapiens
  SIMILAR (591)..(31): 521254mologous to unidentified PROTEASE,accession number A69020,Smith-Waterman Score=466.
tcacctgccttctggtcttaggctccggtagattacaaatgacctgctttctttctgatcccaggctgcactccccgacggatagtaaatcccaagtaacgtacctgctgttggcagatctgagctttttttcttggacaccttatacccacagtcctccaggtgccggagtagagcatctgttctcttggcgcacccgactgccgtggggtgtcccagcaaaaggtcatcaacgtactggagcaacacgcagcctaggtctctggtgggaaacttctggaggtctcgagccaatgcctccccgaagatggtgggggagttcttgaacccttggggaagccaggtccaagtgtactgagtagtgacacctgactccggatcttcccactgaaaggcaaacagcttctgcctctcaggggctaatctgatgctaaagaaagcgtctttcaggtccaagcaggtgaaccagctgtcctcagctggcagcaaccccagcaatatgtacgggttaggtactgttggatgtaaagtcactgtagcctgattaaccaagcgcaaatcctgtaccagcctgtagtccttggtcccaggagtacaagtccggggcaagcagaaagcttgttttgctgaaactcccatggctccgatgatgtcaatagtctttttggataagggggcgactgggccggttactaccgaatgttcagcaccggtat

SEQ ID NO: 21519 - DNA, 582 bp, Homo sapiens
  SIMILAR (5)..(304): 891254mologous to Homo sapiens Human G-protein coupled receptor GRIR-1,accession number Y28279,Smith-Waterman Score=457.
aagctcagaggatccagaacggcagccggtcctcactgggctgttcctgtccacgtgcctggtcatggcgctggggaacctgctcatcatcctggccatcagccctgactcccacctccacacccccatgtacttcttcctctccaacctgtccttgcctgacatcagtttcacctccaccacagtccccaagatgactgtggacatccaatctcacagcagagtcatctcctatgcaggctgcctgactcagatgtctctctttgccatttttggaggcatggaagacagacatactcctgatcttttagatgcccagctgtacaatttgattgccttacaaatgacctgcttcaaggatgtggaaattcctaatttcttctgtgacccttctcaactcccccatcttgcatgttgtgacaccttcaacaataacataatcctgtatttccctgatgccatatttggttttcttcccatctcggggacacttttctcttacgataaaattgtttcctccattctgagggtttcatcatcaggtgggaagtataaagccttctccacctatgggtctcacct

SEQ ID NO: 21520 - DNA, 574 bp, Homo sapiens
  SIMILAR (321)..(572): 471254mologous to Baboon endogenous virus strain M7 gag-pol precursor polyprotein,accession number D10032,Smith-Waterman Score= 158.
ctcgtttacgacccaaaacggggacacaaatgcccctgagagagcagcggtatactgggatagataaggatggtcacttggtggagaggcgtgcttttggctaccagcccatcacctgcgtcaaccttctcaactggaaaaacaatacacagaactataccgaaaagccacaagccctaattgattttctccaagctgttatccagacccacaaccccaccttggctgattggcaccagttgctcatgttcctctttaacagcgaagaaaggcggagagtcctccaagcagtaactaagtggctagaagaacatgcaccagctgattatcaaaacccccaagagtatggaaggacccaggaatcagtagactgggaactatacgtggatgggagtagcttcttcaacccccaaggagagagaggtgcagggtatgcagtgataaccctggacactgttgatgaagacagatcattgccccaggccacgtcagcccagaaagctgaactcattgctttcattcgggccttagaactcagtgagggtgagactgtcaacatttacactgattctcg

SEQ ID NO: 21521 - DNA, 195 bp, Homo sapiens
  SIMILAR (49)..(171): 631254mologous to Pongo pygmaeus olfactory receptor,accession number AF127886,Smith-Waterman Score=122.
ctctgtgtcttcttcgtcttggtgtcctttttccttagcccgttggattcccagctggcagttgtttgctgatttgatggaacaggcattggcatgtacctgacttcagctgtgtcaccaccccccaggaatggtgtggtggcgtcagtgatgtatgctgtggtcacccccatgctgaaccttttcatctgcagc

SEQ ID NO: 21522 - DNA, 457 bp, Homo sapiens
  SIMILAR (197)..(448): 521254mologous to Reticuloendotheliosis virus C end of pol protein (reverse transcriptase),accession number X01455,Smith- Waterman Score=212.
gggacaccagcgagcttccaccttgctgggtttgcggaattcccgcgctgactcagaggctcgaaaagcagcatcttcccccttctgggcatcagggctccctcaagcacctgatctgggacctacttcttctaacgaagaaaaggactttctccagcatgatatgaggcaaggtctagctgttctgcccggcataagagcttctggagcagccccctttgaaggtctccaagtggacttcacagagatgtcaaaatgtggaggtaacaagtatgtagtagttcttgggcatacctactctgggtgggaggaggcctatcaaacacgaacagagaaatctcgtgaagtaacccctgtgcttcttcgtgatctgattcctagatttcgacggcctttagggatcggctcagacaacgggcctgcgtttttggttgccttggtacagaagacggcaaag

SEQ ID NO: 21523 - DNA, 559 bp, Homo sapiens
  SIMILAR (90)..(365): 771254mologous to Homo sapiens Human G-protein coupled receptor GRIR-1,accession number Y28279,Smith-Waterman Score=358.
ggggttcagcatgggggtgaccaccgtgtacatcactgaggccactgcacgctttctcggggaagatgacacatctgaaccgaggtaccctcagtcttttagactctcagctgcacaacttgattgccttacaaatgacctgcttcaaggatgtggaaattcctaatttcttctgggaaccttctgtgacaccttcacacaggaacatcaacatgtatttccctgctgccgtatttggttttcttcccatctcggggacccttttctcttactgtaaaattgtttcctccattctgagggtttcatcatcaggtgggaagtataaaccttcaccacctgtgggtctcacctgtcagttgtttgctgattttatggaacaggcgttggagggtacctcggttcagatgtgtcatcttccccgagaaagcgtgcagtggcctcagtgatgtacacggtggtcacccccatgctgaaccccttcatctacagcctgagaaacagggatatgaaaagtgtcctgcggcggccgcacagcagcgcagtctaatctcaatatctt

SEQ ID NO: 21524 - DNA, 1128 bp, Homo sapiens
  SIMILAR (445)..(780): 871254mologous to Escherichia coli MukF,accession number D26440,Smith-Waterman Score=469.
atgctggagattattatccagcaggccacagtgccggtggttgtcgatgctggcatcggcgttcccagccatgccccgcaggcgctggaaatgggggccgacgcggtgttagtgaatacggcgattgccgtcgcggacgatcccgtcaacatggcgaaggcatttcgtctggcgcccgctgaccggatttctggaggcatcggcatgaaaaccttcagcgatcgctggcgacaactggactgggacgacatccgcctgcgtatcaacggcaaaacggctgctgacgtagagcgggcgctaaatgcctcgcaactcacccgcgacgacatgatggcgctgttatcgcctgccgccagtggctatctggaacaactgcgccaacgggcgcagctcggctattactggacgacgactagatcctcgctggacgtgacgtcgcctaccacgctaaaccgcgagcgtctggattttgagatgagtgaaggcgagctggtggatgcattccgccatgtgagtgatgcgtttgagcaaaccagcgaaaccatcggcgtgcgcgccaataacgcgatcaacgacatggtgcgtcaacgtctgctgaaccgctttaccagcgagcaggcggaagggaacgcaatttaccgtctgacgccgctcggcatcggcattactgactactacatccgtcagcgcgagttttctacgctgcgtctttctatgcagttgtcgattgtggcggaaattttcgacagtatcgacctgacgcaacgtctgatggacgaacagcagcagcaggtgaaggacgatatcgcccagttgctgaacaaagactggcgggcggcgatttccagctgtgaattggtgctttcgggaaattccggaacgctgctctccaagatgattgtggacatccagtctcacagcagagtcatctcctatgcgggctgcctgactcagagagacatcaatcgtttccgccgccagccgcgcattcagtgcagcgctttccagttccgctttacgcgcattcagcgcctgctgaacatgctctttcgcttcgttgataaccgcaccagctgccggacgctcttctggcggcagctcacgcagggtcgtcatctgaagggttaa

SEQ ID NO: 21525 - DNA, 1390 bp, Homo sapiens
  SIMILAR (218)..(48): 501254mologous to Feline leukemia virus gag-pol precursor polyprotein gPr80,accession number M18247,Smith-Waterman Score=147.
tgccagaagtttttcctttaactcatgaaagacttgctgttgttgggatctgcattccaaaggttcgcggtccccgcccccttggtgaccgcatacaaagtcttggctaatactgcaaagtttgggatccacagtctacaaaaccccacagctcctaagaattctctcaactgtcttcagctcttaggatctgctagatggcaaatgacctgctttctttctgatcctgggctgcgtctcgagcccctgtcggatagtaaatcccaagtaacatacctgctgtcggcagatctgagctttttttcttggacaccttatacccacagtcctccaggtgccggagtagagcatctgttcccttggcgcacccgactgccgtggggtgtcccagcaaaaggtcatcaacgtactggagcaacacgcagcctaggtctctggtgggaaacttctggaggtctcgagccaacgcctccccaaagatggtgggggagttcttgaacctttggggaagctgggtccaagtgtattgagtagtgacacctgactctggatcttcccactgaaaggcaaacagcttctgtctctcaggggctaatctgatgctaaagaaagcatctttcaggtccaagcaggtgaaccagctgtcctcagctggcagcaaccccagcaatgtgtacaggttaggtactgttggatgtaaagtcactgtagcctgattaaccaagcgcaaatcctgtaccggcctgtagtccttggtcccaggcttgggaacaggcaggaggggagtgttccatggagactgacaaggaactataattctaaaggttcttaggcacttgagatggacctggataccttcaagagcttctctgaggaccgggtactgtttttgcctaaccggctggaccccaggcttaacttctataagcacgggggcttggttgactgccaaccctggagggttgtcttccgcccacactcttggccaccgcttagccagagctggtcttatctcttggcccggctctgttaagaaaagtctccattcctcctctcgggggagcataagggtcataatgactcctgttccgggtaactttagcagcaaagagccgtgctctgtaaaagagatagtggctctcagtttgctaagcaagtctcttcccaacaagggcaagggacaatcaggcatgtacaaaaactgatgaatcactttatgtcctcctatagtacaagtctggggcaagcagaaagcttgttttgctgaaactcccatggctccgatgatgtcaatagtctttttggataagggggcgactgaggcagttactaccgaatgttcagcactggtatctacaagaaaatcaatgtctttacccccaactgtcat

SEQ ID NO: 21526 - DNA, 857 bp, Homo sapiens
  SIMILAR (180)..(611): 841254mologous to Homo sapiens putative taste receptor HTR2,accession number AF073924,Smith-Waterman Score=627.
tggacacctaatacccacagtcctccaggctccagtagattgtaaatgacctgcttactttctgttcccgggctgcgttctgacacctgtcggatagtaaatcccaagtaaggtaccagccgtcggcagatttgagctttcttcttggacactataacccacagtcctccaggagggtcctaagtgttttagactcccagctgcacaacttgattgccttacaagtgacctgcttcaaggatgtggaaattcctaatttcttctgtgacccttctcaactcccccatcttgcatgttgtgacaccttcaccaataagataatcatgtatttccctgctgccatatttggttttcttcccatctcagggacccttttctcttactctagaattgtttcctccattctgagggtttcatcatcaggtgggaagtataaagccttctccacctgtgggtctcacctgtcagttgtttgctgagtttatggaacaggcgttggaggttacctcagttcagatgatgtgtcatcttccccgagaaaggctgcagtggcctcagtgatgtacacggtgatcacctccatgctgaaccccttcatctacagcctgagaaacagggatattaaaggtgtcctgcggcagccgcacggcagcaccgtccaatttcagtatcttcttatctgttccattccttttgtagtgtgggttaaaaaaggcagcaaggtcaaataagaatgatatcacagggtgaacacacaatgtgatattaggagtaatacctccctaggatatagaatatactgtcacagagtatacacagatggggtacacccactgtgatatagaagcaatatctcc

SEQ ID NO: 21527 - DNA, 1979 bp, Homo sapiens
  SIMILAR (1022)..(1522): 551254mologous to Homo sapiens BC62940_2,accession number AC004659,Smith-Waterman Score=456.
atgggctcctgcatggcccgagcctccccaatgggcgccaccccctgctttgcggcggtgggtcccatcgactgccaggctgaggagtgccggcacacagtgtgggactggtgggtagctttgcctaccgccgctgtgggggatccaatagggcagcccatccagtatgctcgctccacctgcgaggccggcgtgggtgagctccacatccaggatgccctgccggaggaccatggcacctacacctgcctggctgagaatgccttggggcaggtgtcctgtagcgcccgggtcaccgtccgtgagggcacgtcccctggcccaaaggggaagactggccactgtgggctgggcagtgtcagtcccttagggatgaaggaactggcactgatggagaatgtggccgagcctggctccgtgaagctctctgccaggactgtccaggtccagccctctcttgcccttagtgtggcaccaggccatggtggggagcatggatgtggagccagcggcctgggtgttgatgaccttctgctgggacaccccacggcagtcgggtgtgccacgggaacggatgccccacaccggcacctggaggactgtgggtataaggtgtccaaaaaaaaagctcagatctgccaacagcagcatgatgcgaggcaaggtccagccgttccgcccggcatacaagcttatggagcagccccctttgaagatctccaggtagacttcagagagatgccaaagtgtggaggtaacaagtatgtactagttcttgggcgtacctactctgggtgggtggaggcctatccaacacgaactgagaaaactcgtgaagtaacccctgtccttcttcgagatctgattcgtagatttcgaccgcccttatggatcggctcagacaacgggcctgcatttttggctgccttggtacagaagacggcaaaggtattggggatcacacggaaactgcatgccgcctcccagcctcagagttccggaaaggtgtccaagtcacacagagccacggaatctcacaggagcctgagaactcctcctcctgggactctcagaggatccagaactgcagcccatcctcgctttgctctccctgtccctgtccatgtatctggtcacggtgctgaggaacctgctcagcatcctggctgtcagctctgactcccacctccacacccccatgtacttcttcctctccaacctgtgctgggctgacatcggttacacctcggccacggttcccaagatgattgtggacacgcagtcgcatggcagagtcatctctcatgctggctgcctgacacagatgtctttcttggtcctttttgcatgtatagaagacatgctcctgactgtgatggcctatgactgctttgtagccatctgttgccctctgcactacccagtcatcgtgaatcctcacctctgtgtcttcttcgttttggtgtcctttttccttagcctgttggattcccagctgcacaggatccttttgtcttactgtaaaattgttccctccattctaaggatttcaacatcagatgggaaatataaagccttctccacctgtggctctcacctggcacttgtttgcttattttatggagcaggcattggcgtgtacctgacttcagctgtgtcaccaccccccaggaatggtgtggtggtgtcagtgatgtacactgtggtcacccccatgctgaaccctttcatctacagcctgagaaacagggacattcaaagcaccctgcggaggctgctcagcagaacagtcgaatctcatgatctgttccatcctttttcttgtgtgggtatccactgtcaggtctctgagcttgatgctgtcatgtcccttgacaccgcttccggggcttttcggtggatggcttttggggtggaagtggcagccccagcttaccagccatcatgctcatgtccgggatctcagtcctctggggaag

SEQ ID NO: 21528 - DNA, 2901 bp, Homo sapiens
  SIMILAR (1290)..(1679): 601254mologous to Homo sapiens Human G-protein coupled receptor GRIR-1,accession number Y28279,Smith-Waterman Score=361.
gggacaccagcaagcttccaccttggtgggcttggggaattcccgcgctgactcagaggctcgaaaagcagcatctgcccccttcggggcatcagtgctccctcaagcacctgatcttggacctacttcttctaaagaagaaaaggactttctccagatattaggaaaaaatgtccctggggatgtgaacagccctgcgatattgagagtagtatcatcctctccccttgcatactgggaaaaatatcacagattatatttggatcaatatcaccggctgtgtgtacacctactgcgatattgaacgtagtatcatgctctctccctccctggagattaggagcaatatcacagctcgtttacgacccaaaacggggacacaaatgcccctgagagtgcagcgttatactgggatagacgaggatggtcacgtggtggagaggcgtgtttttggctaccagcccttcacctccgtcgaccttctcaactggaaaagcaatacaccgccctataccgaaaagccacaagccctaattgatttgctccaaactgttatccagacccacaaccacacctgggctgattggcaccagttgctcatgttcctctttaacagcgaagaaaggcggagagtcctccaagcagcaactaagtggctggaggaacatgcaccagctgattaccaaaacccccaagagtatgttgatgaccttctgctgggacaccccacggcagtcgggtgcaccaagggaacagatgccctacaccggcacctggaggactgtgggtataaggtgtccaagaagaaagctcagatctgccgacagcagccttgggcatcagtagactgggaactatacgtggatgggaacagcttcttcaacccccaaggagagagaggtgcagggtgtgcagtggtaaccctggacactgttgttgaagccagatcgttgccccaggccactgcagcccagaaagctgaactcattgctttcattggggccttagaactcagtgaagatctgattcctagatttcgactgcccttacggatcggctcacataacgggcctgcgtttttggctgccatggtacagaagacggcaaaggaaatgactaacaaggtcacgggggagtgtactccccctgcaatactggcagtaatctcgtcctccccaaacctggatgtgagcgacaagatcacagagggggtgtacacaccctgcgacattggaagtaatatgatcctctccccacctggatattgggaaagatatcacagcgcggaggatccagaactgcagcccatcctcgctgggctgtccctgtccatgtatctggtcacggtgctgaggaacctcctcatcagcctggctgtcagctctgactcccacctccacaccccaatgtgcttcttcctctccaacctgtgctgggctgacatcggtttcacctcggccacggttcccaagatgattgtggacatgcggtcgcatagcggagtcatctcttatgcggactgcctgacacggatgtctttcttggtcctttttgcatgtgtagaagacatgctcctgactgtgatggcctatgactgttttgtagccatctgtcgccctctgcactacccagtcatcgtgaatcctcacctctgtgtcttcttagtttcggtgtccttttccttagcctgcattggcgtgtacctgacttcagctgtggcaccacccctcaggaatggtgtggtggcgtcagtgacgtatgctgtggtcacccccatgctgaaccctttcatctacagcctgagaaacagggacattcaaagcgccctgtggaggctgcgcagcagaacagtcaaatctcatgatctgttccatcctttttcttgtgtggtaagtactgagtattgtgagaggaacaagcaaaaggtgtccaatctctacagacccacagaatctaacaacagatgtctcaatattcctcgtcctagaactctcagaggatccagaacggccagctggtccttgctggactgttcctgtccatagtgactggtcatggtgatggggaacctgctcatcatctctggccgtcagccctgactcccacctccacacccacatgtacttcttcctcatccaacctgtcccttgcctgacatcggtttcacctccaccacggtccccaaagatgattgtggacatcccagtctcacagcagagtcatctcctatgcaggctgcctgactcagatgtctctctttgccatttttggaggcatggaagagagacatgctcctgagtgtgatggccctatgaccggtttgtagccatctgtcaccctctatatcattcagccatcatgaacctgtgttctgtgggcttcctagttctgctgtcttttttttttttttctcagtctttcagactcccagctgcacaacttgattgccttacaaatgacctgcttcaaggatgtggaaattcctaatttcttctgggaaccttctcaactctcccatcttgcatgttgtgacaccttcaccattaacataatcatgtatttccctactgccatatttggttttcttcccatctcggggacccttttctcttactataaaattgtttcctccattctgagggtttcatcatcaggtgggaagtataaagccttctccacctgtgggtctcacctgtcagttgtttgctgattttatggaagaggtgttggagggtacctcagttcagatgtgtcatcttcccccagaaagggtgcagtggctgcagtgatgtacacggtggtcacctccatgctcaacccctttatctacagactgggaaacagggatattaaaagtgtcttgcggcggccgacggagcactgtctaatctcaaaaaaaaa

SEQ ID NO: 21529 - DNA, 2853 bp, Homo sapiens
  SIMILAR (1912)..(2496): 991254mologous to Escherichia coli CG Site No. 507,accession number U28377,Smith-Waterman Score=1005.
atggcagtggggacagcaaacagagcacaggttgtggtccttgtcatcaaggatcttccaattcagatggtttggtcacatgtcccccgaatccactgggacctgtccacggagcgggtcctcctgatggagtttgtggatggcgggcaggtcaatgacagagactacatggagaggaacaagatcgacgtcaatgaggattttggagatggaggtgcttttccagagatccatgtggcccagtatccactggatatgggacgaaagaaaaaaatgtcgaatgcgctggccattcaggtggattctgaaggaaaaattaaatatgatgcaattgctcgacaaggacagtcaaaagacaaggtgctcgttctggctgtgaagcagctgttcccagagtttgagtttatgtggcttgtggatgaagccaagaagaacctgcctttggagctggatttcctcaatgaagggaggaatgctgagaaggtgtcccagatgctcaggcattttgacttcttgaaggtcatttatagcaaatacactgacctggttccaaaggaggttatgaatgcagatgatccagacctgcaaaggcccgatgaagaagctattaaagagataacagaaaagacaagagtagccttagaaaaatctgtatcacagaaggtcgccgcagccatgccagttcgagcagctgacaaattggctcctgctcagtatatccggcccacagtcctcctggagcctgagtccagcacagcagaaggcctggagacatgcagtcagaccggcagatttggagtcaggctgctggctggagccccggctctgccacctaaaagctgtgtgactgtgggggatctttggcaatgtctggagacatttgtgattgtcatgacttgggagatgctactggcatctagtgggcagaggtcaagtgtgttgttggacatcttacaatgcacagaactggccttcacaacaaagaactgtccagttccaaatgtcaacagtatcactgtggagaaaccctggtcaatctatcaggtgacttactataaccgtagcaaattctgcggctctggctatgctcgagaaaattccataaaatgcatttcaaatatactttataaattaaacaaaatgagtaagaagatgcagagcgataaagtgctcaatttgccggcaggctactttggtattgtgttggggacgatagggatgggatttgcctggcgctatgccagccaggtttggcaggtcagccactggttaggggatgggctggtgattctggcgatgatcatctggggattattgactagcgcatttattgcccgactcatacgctttccgcatagcgtgctggcggaagttcgccatccagtgctgagcagttttgtgagtttgtttccggcaacgacgatgctggtggcgattggttttgttccgtggtttcgcccactggcggtgtgcctgttcagttttggtgtcgtggttcagttggcttatgccgcctggcaaactgcgggattatggcgcggatctcaccctgaagaagctaccacgcctggactgtatctgccgacagttgccaacaactttatcagcgcaatggcctgtggtgcgttgggctacaccgacgccggtctggtgtttttaggcgcaggcgttttctcatggctaagccttgaaccggtgatcttgcagcgtctgcgcagttcgggagaattacccacggcactgcggacatcactcggcattcagctcgctcctgcgctggtggcttgtagtgcctggctgagcgtcaacggcggcgagggtgacacgctggcgaaaatgcttttcggttatggactgctgcaactgatgtttatgctacgtctgatgccatggtatctctcgcagccatttaaagatccgaaagcacgcgttgcttgcgaaacctacgtaaaaaccggcatggttttagttggcggcgaaatcaccaccagcgcctgggtagacatcgaagagatcacccgtaacaccgttcgcgaaattggctatgtgcattccgacatgggctttgacgctaactcctgtgcggttctgagcgctatcggcaaacagtctcctgacatcaaccagggcgttgaccgtgccgatccgctggaacagggcgcgggtgaccagggtctgatgtttggctacgcaactaatgaaaccgacgtgctgatgccagcacctatcacctatgcacaccgtctggtacagcgtcaggctgaagtgcgtaaaaacggcactctgccgtggctgcgcccggacgcgaaaagccaggtgacttttcagtatgacgacggcaaaatcgttggtatcgatgctgtcgtgctttccactcagcactctgaagagatcgaccagaaatcgctgcaagaagcggtaatggaagagatcatcaagccaattctgcccgctgaatggctgacttctgccaccaaattcttcatcaacccgaccgatccatcaaaagtggaccgttccgcagcctacgcagcacgttatgtcgcgaaaaacatcgttgctgctggcctggccgatcgttgtgaaattcaggtttcctacgcaatcggcgtggctgaaccgacctccatcatggtagaaactttcggtactgagaaagtgccttctgaacaactgaccctgctggtacgtgagttcttcgacctgcgcccatacggtctgattcagatgctggatctgctgcacccgatctacaaagaaaccgcagcatacggtcactttggtcgtgaacatttcccgtgggaaaaaaccgacaaagcgcagctgctgcgcgatgctgccggtctgaagtaa

SEQ ID NO: 21530 - DNA, 2243 bp, Homo sapiens
  SIMILAR (636)..(1697): 671254mologous to Homo sapiens nuclear protein Skip,accession number U51432,Smith-Waterman Score=1028.
  misc_feature (1)...(2243): n = a,t,c or g
aagaagatggcgctcaccagctttttacctgcacctactcagctatctcaggaccagctttgaggctgaagaaaaggcaagatcccagagatcacggcagccctcgctggtctcctcccgaagagaacctcccccgtacggatacccgaaaggcttggatacctcggttattagaggatttttgagatagaggtgcttttccagagatccatgtggcccagtatccacctggatatgggacgaaagaaaaaaatgtcgaatgcgctggccattcaggtggattctgaaggaaaaattaaatatgatgcaattgctcgacaaggacagtcaaaagacaaggtcatttatagcaaatacactgacctggttccaaaggaggttatgaatgcaagatgatcccagactggcaaaggccccgatgaagaagctattatagagataacagaaaaggccaagagtagcccttagaaaaatctgtatcacagaaggtcgcccgcagccatgccagttcgagcagcttgacaaattggccncctgctccagtatatcccgatacacaccatttcaggcaaaggagtggccattcaaacttcttggagctaaaccaggagggttattcgggatggtagaaatgcaggaaagatccaatgggagcctcccaaggttcaagattaataagaaaattccccgggggnccaccttctcctcctgcgcctgtcatgcattctcctagccgaaagatgactgtaaaggaacaacaagagtgggaagattcctccttgtatttcttaactgggaaaaatggcaaagggttattacaattccattaggacaaacgtctggctgctgatggggaggagggactacaggacagttacacattaaatggaaaattttcggccaaattggcagaagccctctacattgctgatcggaaggctcgtgaagctgtggaaatgcgtgcccaagtagagagaaaaatggctcagaaagaaaaggaaaaacatgaagagaaacttagagaaatggcccagaaagccagggaaagaagagctgggatcaaaactcatgtggaaaaagtgaagtacttttcaactgttcacacagaggatggggaggcacgtgagagggatgaaatccggcatgacaggcgaaaagagagacagcatgaccggaatctttccagggcagctcctgataagaggtcgaaacttcagagaaatgaaaatcgggatatcagtgaagttattgctctcggtgttcctaatcctcggacttccaatgaagttcagtatgaccaaaggctcttcaaccaatccaagggtatggacagtggatttgcaggtggagaagatgaaatttataatgtttatgatcaagactcttataggtggtaaatatatggcccagagtatttataggcccagtaaaaatcgtggacaaggacatgtatggtgatgaccgtagaagccagaataaagaccaacagatttgttcccgacaagggagtttttttggttcagacccgtagacagagaggccgagaaggaccaagttcagtttgaggaagatcctttttggtttggacaagttttttggaagaaagcccaacagccatgggtggctcttaaaagaccctcaggatagccagccgccccaagggaacacggagcatggaaggcaaggaagaggaggaaggaataaggcacaggtcttcttccaaagttgaattgaactctttaccccttaaccctaattgattgcaagtcatatggggggaacactttgtaaatgggtcagggataaaaacccaaatctgggtgcccagatccccagcactacttttttatttccttggaggaattgggggggggatagggaaattcttccttttgaattattttaggtttttttttaaagagtgggttgtgtttgtgcttctccccccctttcagcatttatagaacatgctgccccacatacaaagtcaaggcccccttacttttaatgtgacactagtagtttggggttaatgtttttgtgtaagaacagctgcatatgagtaaagttaccccaaccacagtgaggaggaagatgttcacatactggaactgtcctgccaaataaattttgccccctattgtgctctgttttaatttgggagtggcgcaaacgtaacctcttgcttggtgcaactatttgtttcaaataaaaacatttagacaaaaaaaaaaaaaaaaaaa

SEQ ID NO: 21531 - DNA, 1588 bp, Homo sapiens
  SIMILAR (216)..(482): 341254mologous to Volvox carteri f. nagariensis hydroxyproline-rich glycoprotein DZ-HRGP,accession number AJ242540,Smith-Waterman Score=125.
atgcctaaggcgcgccctgcctggcagcatcgagtctgcgccgacggcgcccccgccgcctccgagtggcgaaggcagccaggcatacatctcccgccttcctgcaaccctgattgtgcttatcctagaaaggagacagctgttgggggtgtggaggcgagctcggtgctgctcccttatcaacctcgcgcaccggaggcattgtgggatgcctacccgggaatccccgtgcgccatcctcgcgcggcgatacgaaggccgacgatcgccttccacagttgcgcagcccccccccccacccccccccatcgagctcgccccctcaacgtcggaaaccccgatacaggccacacgcggtgcacaccctgcgcagccgtcctcaggccacccgcgcggcacggcccccggaacgcccaccggtccccgaacagggcccaagcggtacacacccagacccgacgccacgggcccgacaaacgcgccacaacgcccctcggcaccactcgaacacgactaactgacccactaggcatatgcaccaattgccggatgcggcgtaaacgccttatccggcctacggttcggactatttgtaggcacgataagacgcgacagcgtcgcatcaggcatcatgcaccaattgccggatgcggcgtaaacgccttatccggcctacgccaaaatcgagcgggcataagagaacccggtgccgtccgcaatcaaaatcatcggacgctcttcatcatcgggcaggcaagcttctccgtggggaatggcgacccgcattggaggtcttggagaatgggcccgaatggttccggaaagagaccacgtagagcagcagaaagaatttcgtgctgcagaaatgctcagggtaggactcacagtcaaaaggcgtatattcaacagcagccacaatgttgtgtcaatgttcacttgcaaccaccagatcaacacctgcacaacatcacaaacactgtcaccaccagattcacagcaccgccactaccagcatatccatccaccaacatccaacagcaccaccacccacatcatccccaatgtcgtcagcattgtgaagccccacccccaacactgtggagcaagacctggtcaaggcaaggaacgggacgaaacggaacggaaggacgcgaaggaacggaaccgaaggaccgccacaccgacgacacgtcatacggaccggctgccacgcacggcacacggaccgccgccgccccgccccccccccccccccccccccccccccccccccccccccccgcgacagcccacgccgaccacgacggagagagaagcccgaacagcagaaggagggagggcagacagggaggacacagcgcaaggagacggcgaggcgaggggaagagagggaaacaggaaggaagaagacgcgaggggcccccccaccgaggcccgccgcagcgagaaggccacacgagacggcggagacgaaaaggcggccgccagcgcgacagcaccggccgccgcgccgccgcccgagcgacggaacagagagaacaagacaccaactgggatttataatgctggggttattgagttggaatga

SEQ ID NO: 21532 - DNA, 608 bp, Homo sapiens
  SIMILAR (181)..(321): 701254mologous to Homo sapiens F18547_1,accession number AC003682,Smith-Waterman Score=168.
ccgcgtcgacatttgttcaactaactattgttggtggctgtaccccatgaccagtgggcctagtttctcctatgtttgaggaccttgagaggaggatgtgcgagagtagatgtgtgggagagatggattgtgatacctcagcataggggtggtttgtggtttcatctgtcaacatcataacagggcacagtgacttttgaagacgtggctgtgaaatttacccaggaggaatggaatctccttagtgaggctcagagatgcctgtaccgtgatgtgacgctggagaacctggcacttatgtcctccctggggaaagaaacagtagctccactcctgccggtccctcccctaggggagagggaagcagaggagaaaacagcagcataggtggctggcaaagacaaaggaaagaccaatagaagagaaagaaaccaaaaacagcaagcgcagagccaaacagccaggcaggtaggccaaaggttaagtccctctccccagccctgcggtttgtgaaaaagagggtgggcaccggctccgggaggagagcagaggaggtgaaaaggcgtaattcttgcaatttgcggcaggcatatctgccaagcctctag

SEQ ID NO: 21533 - DNA, 2484 bp, Homo sapiens
  SIMILAR (850)..(1896): 691254mologous to Homo sapiens zinc finger protein zfp6,accession number U71363,Smith-Waterman Score=1324.
  misc_feature (1)...(2484): n = a,t,c or g
aggcccagggttggcaccctggctgtctgcctgtggatttcatttctgccttttagtttttacttgtttctttggaggcagaaattgggcataagacattatgaggggtggtctcctcccttaacagcacaaacgcttaattaacatttctttttcttttgagacaggttctgtcgcccaggctggagtgcagtggtgcagtcatagctcagtgcagcctggaccacctgggctcaagcagtcctgacacctcagcctctcaaaatttgggattacaggcgcgcgccaccgtgcgggtcaggaggcttccctgagggccccggaggtggagctgggcttttccttccgaagcgcccctgggaatctctctctttacggccttggaacctgggaaactacattacccagaaagctctgcgtcaaatgacagcacggcagagccagtgagagttcacattgaaggcgtttccgtgtgcgcaagtaaggtagaggcgggactcccggcgccctttagtagcgaccatttccattggcgttagggagtccttggagcgctgtgttgggaccgtggtggtgactggatccaggaggtcgagagtcgttcttctctttgcacagacgtgactctgcagctctttaacggcgcccgctgctctcaacccagcttaccccacgtggtcccatggcggcggccgcgctaaggttccccgttcagggcacagtgacttttgaagacgtggctgtgaaatttacccagggaggaatggaatctccttagttgaggctcagagatgcctgttaccgtgatgttgacgctgggagaacctgggcactttatgtcctccctggggttgttggtgtggagtggaagatgaggcggcaccttctaagcagagtatttatatacaaagagagactcaggtcaggactcctatggcaggtgtgtctcccaagaaggcccacccctgtgagatgtgtggcccgatcttgggagacattttgcatgtggcagatcatcagggaacacatcacaagcagaaactgcacaggtgtgaggcctgggttaatatattgtatgacagtggcaactttcatcggcgccagaatgagcacattggagagaaaccctacagagggagtgttgaggaggcgttgtttgcgaacaggtgtaagttgcatgtgtcaggggagtcatctgtcttcagtgagagtgggaaagactttttgctcaggtcaggattactccagcaagaggccactcacactgggaagtcaaacagcaaaactgagtgtgtgtctctgtttcatgggggaaaaagccattacagctgtggaggatgcatgaaacattttagcaccaaagatatactcagtcagcacgagagactgctccctacagaagaacattttgtgtggtgtgaatgtgggaaatcctctagcaaatatgacagcttcagtaatcatcaaggagttcacactagagaaaaaccttatacgtgtgggatatgtgggaaattatttagcagtaagtcccacctccttgtacaccagagaattcacactggagagaagccatatgagtgtgaggtttgtcagaaattttttaggcacaagtaccacctcattgcacaccagagagttcacactggagaaaggccatatgaatgcagtgattgtgggaagtcatttacccacagctctacattccgtgttcataagagagttcacactggtcagaagccttatgagtgcagtgaatgtgggaaatcttttgccgaaagctccagtctcactaaacacaggagagttcacactggagaaaagccttacgggtgcagtgaatgtgaaaaaaaatttaggcaaatctcttcacttcgtcatcatcagagagttcacaaaagaaagggcttatgagtgcagtgagtccagtctcattaaatattggagaatacacacctgagtaagatcctgtgattgcagcaaatgtggaaaatgtttacccaaaggtctgctctccttggatattggagagttcacactagagaagagtccttacaagtaaaataaatttgggcagttttgtagccacacctctgtattccttcaggattatagttaacactgaatgaaggccttactagtgtgacaaatacaggatatttatccagaagtctggctgcataactcacaggagagctgttcatgttgggaggatttctacatggggaggatttgcttgagcccctgggaggcagaaggttgcagtgagccgagattgcaacactgccagtcccagtctgggcccacagagtgaggaccctgtttcaaaaataaaatatataaatgacatccaataaagtatgcatatttgagctgcaggataagtcttgaattttctttttcttttttttgagacagcctcgctctgtcacccaggctggantacagtggcataatctcggctcactgcaagccctgcctcct

SEQ ID NO: 21534 - DNA, 1974 bp, Homo sapiens
  SIMILAR (1420)..(1611): 501254mologous to Escherichia coli K12 putative cellulose synthase,accession number AE000430,Smith-Waterman Score=137.
tcagcgcaatgttacgttcatattgtaggatcggttccctagctgcagcgacgtcaatgcgaggcgtacagccgccagcatgaaagatgacgtcaacgcagccagtaaaattttcattgtttgcctcacactctgttccttgcggacagtcatttcccggcagacgtgcgtttgctccagccatgccgcgcagacgaataccgtccagcgaccatttacccgaaccgggccaatctcaccagcatgtaaatcgccagagatgggcttgtcgagaattaatcgcggcttttctaccgtcatcgtaccgattgtaactggtcgaaaccggtggagagatcggtcagcgtaatcgtgcttcatgccactcaccttttcctgccggcagctccccaggaatctttcagactgagatcggaaagccctgcctcttgccatgatcgttaaatccattatcaaagaaggtggtgtagttaatactgccccaacgtaaggacggaatttgctgctggcatcaccaaaataccacgcgccatcagtgttggtggcagatgatgaacggttgcaatatcgccggtgcccgggtgccgattttatggcggaacggcgtcgctgccagtaattccaaccaatgttgtcggtcgccatataagtaaacgtaaggcccagttgcgtgtattggtcacgctgaatccacccagacttcctaacgtaccaccagcacctctgttggacgtacggttgcagaacctgcacgcataaaaaattcgcctgttcatgcgcaaaggcacagcgtttcaacgtggcttgccggacgcgcatgtacgccgttaggtagccacaaataaattccacaatcagggccattgcctctctcccggtacggtttccgtcagcatttaatgacgggcgtttcacactgattcccttcgtggtatcgggcggtattttgctggcggtttccgtcatttgtatggcaaaggcgcagtgccggatgccgtagccgatccaaatctgaaaaactgtttgatatcggcgttgcgggcttgacgctgattgtgcctttcgcgtatcgcgattatcgtcgtcacggtgcgtggctttcagcgcgacgctcggctgtttctggatgatcctggcctggattttattccgctggagcacccgcgtcagccgtttaacccgctggcgcagtttatcttccgatgctgctgtggggggtagcgctgatcgtacggcggatgccggggcgctctcggcgctaatgttgattgtgctgtcgctgaccgtttcttgcccgttatgatatgcgaaagcaggcacatcaacaatgcgctgaaatatgccaaaggcgagttcgtgtcgattttcactgcgaccacgtaccaacgcgatcgttcttgcaaatgaccatgggctgttccggacccgtttgaacgcaacctggggcgtttccgtaaaacgccgacgaaggcacgctgttctatggtctggtgcaggatggcaacgatatgtggacgccactttcttctgcggttcctgtgcggtgattcgtcgtaagccgcggatgaaattggcggcattgctgtcgaaaccgtgactgaagatgcgcatcttctctgcggttgcaccgtcgtggctatacctccgcgtatatgcgtatccgcaggcggcggggctggcgaccgaaagtcttctgtccggtttcaccagaatcttgcgcaagtgcatataacgcgtggtgtagctggaccatgacgaatagccacataataacctgctgcgccactgcgtttggcaccaccacttcaccgtcacccactgaaagcactggcgtaccctgcggcaggcgaaatcaacacctcttctgaacgcaaagtacgcccagcagctggctttgctcacgtttaccatcaagcatttctcggacattaacaccgcaaattcatcgccttttttcagtttgcggaaatccat

SEQ ID NO: 21535 - DNA, 1086 bp, Homo sapiens
  SIMILAR (350)..(3): 451254mologous to Escherichia coli No definition line found,accession number U00039,Smith-Waterman Score=190.
cccttaccggtgagcgggttatcgagacggaagatttgtaccatcccgcgcgccagcgaatacgctgaccgatatgcgccgacagactttcggtcgccagcccgccgcctgcggaatacgcatatacgcggaggtatagccacgacggtgcaccgcagagaagtatgcgcatcttcagtcacggtttcgacagcaatgccccaatttcatccagcggcttacgacgaatcaccgcacaggaaccgcagagaaagtggcgtcccacatatcgttgccatcctgcaccagaccatagaacgcgtgccttcgttcggcgttttacggaaacgccccaggttgcgttcaaagggtccggtgagaagaagtggtgcggcgtctgcatcatcgccagctgttttctttcaggaaccagcccatggtcatttgcaagaacgatcgcgtggtagtggtcgcagtcgaaaatcgacacgaactcgcctttggcatatttcagccattgttgatggttgcctgctttcgcatgttcatgagtggtgcgggcgaatatttcacccccacgttttgcgcaaactggcgaaactcttccctgccgcgtcatcaaggatccagatattcagcttatctttcggccagtcgataccagcgaggccgggacaaagatatccaccgacggccacagcgacatatctttcggcaatgcaccggctgacgattcagcggcgcattattcagatcaactcgaaatccgcaaagtgggcagcaaacgcaactctggctacagcgcagcgaaatttggggcgtcgggctgactcaatcactggcgctggatctggcggagtacggcatacggtgcattcactgatgctcggtaacctgctgaaatcgccgatgttcagtcactgttgccacaatacgcgaccaagctgggtatcaaaccggatcagtcgagcagtattacatcgacaaagtaccgctcaaacgcggctgcgatttcaagatgtgctgaatatgctgctgttctacgccagtcctaaggcgtcgactgcaccggacagtcgtggtgtcggctccagtcccccaaattag

SEQ ID NO: 21536 - DNA, 1743 bp, Homo sapiens
  SIMILAR (1743)..(1045): 991254mologous to Escherichia coli No definition line found,accession number U00039,Smith-Waterman Score=1243.
ctacttacgggcaacgtccccgtacgtgccacgaccggctccacacgcacccgatgcccacccacgctgcgcacgcgctggaccccgcaccccgcgatagcgacccgacaacccgtcgtaaccgcgcccgagtactctgaggttccgcaaactcacgatggtgtcgataaatacttccagcaactgcggcatcgcttcaccgtggatcaactgacccgcgtcaaagtcgatccagtgttttttcttcgccgccagttcactgtaggtggcgattttcaccgtcggcacaaatccaccatacggcgtgccacgaccagtactgaacagcaccatatggcagcccgcacccgccagggcgctggtcgctacggcatcgttacccggcgcacttaacaagttcagccctggcgttttcagacgctcgccgtaacgcagcacgtcaaccacgacgctggaacccgctctcatggtgaccagtttttcaaacgttgcttcgtcgcggcaatggtccatcagcaactgctctgcgccaaacatctccggcacttcggtcagtacggtagtaccgccgttagcaatcacgtagtcagagaaacgccccagcatcgggttagcagtaataccagaaagaccgtcagaaccaccgcagttatacagctgatgcaaatgctcgattccggcttcgatctcatcatcctgctgttggcagatcatgaaatgaacgcgttcaggatcgatatcgcccagcgtttcacggaatgcggcaacctggttgttttcacagcccagaccaatcaccagcactgcgcctgcgttcgggtggcgcaccatgttttgcagcatggtgcgggtattaatgtgatcgtcgcccagctgtgagcagccgtaggtgtggctgaagaggaacacgccgtcagtaccttcggcgttgttggtctctttcagcaaacggttctggatctgccgcgcgatgccgttgacacagcccacggttggcaggatccacagctcattacgcaccccgacatcgccgttagggatcctcatcccgcgcgcccagcgaatacgctgaccgatatgcgccgacagactttcggtcgccagccccgccgcctgcggaatacgcatatacgcggaggtatagccacgacggtgcaaccgcagagaagtatgcgcatcttcagtcacggtttcgacagcaatgccgccaatttcatccagcggcttacgacgaatcaccgcacaggaaccgcagaagaaagtggcgtcccacatatcgttgccatcctgcaccagaccatagaacagcgtgccttcgttcggcgttttacggaaacgccccaggttgcgttcaaacgggtccggtgagaagaagtggtgcggcgtctgcatcatcgccagctgtttttctttcaggaaccagcccatggtcatttgcaagaacgatcgcgttggtacgtggtcgcagtcgaaaatcgacacgaactcgcctttggcatatttcagcgcattgttgatgttgcctgctttcgcatgttcatgagtggtgcgggcgatatatttcacccccacgttttgcgcaaactggcgaaactcttccctgccgccgtcatcaaggatccagatattcagcttatctttcggccagtcgatacccagcgaggcgtaaatggtatttttcaccacgttgagatcttcgttgtaagtcgggacaaagatatccaccgacgggcacagcgacat

SEQ ID NO: 21537 - DNA, 2196 bp, Homo sapiens
  SIMILAR (2109)..(934): 991254mologous to Escherichia coli K12 putative cellulose synthase,accession number AE000430,Smith-Waterman Score=2104.
tcagcggaatgcctgtctgcaatcgcttcgcccattgcagcggatatgttcgcgtaagtagctgatgcgatagtcgtcgttaatctcgccattggcagcaaattcatcttttgcgcccaggccgttttccaccagaaacagcggcttctgataacgatcgtacatcatattcatggtgatacgcagaccgagtggatcaattccccagccccagtcgctcacctgtagatacggattacgcagcgatttcaccacgttcgccgcactgctgttgttggcgttcatctccgccgaggcgcagcgcgaggcgtaatagctgaaagagacaaaatcgacggtgtttttcaggatttcatcatcgcccggtgctttgttgatggttacccctttttcgcggaatacgcgggcagagtaagccggatacgtgccccgcgcctgcacatcgataaaaaacaggttttcccggtctttctccagcgccgcccagacatcttccggcttgcaactgtaagggtagaagttaccgcccgccagcatacagcccacctgattttgcgggttaacctcatgggcgattttggtggctagcgcactggcaaccagctgccaggatgtcggtttgccactcatttttgagaaggtgatcgcgaagttgtagccgcgaacggtgcagctcaaacgatcgtcttccagcgtcagcggacgcgcattatttggtgcgaaaggcactggctgcgcggtgttttcctgcaaccgtacaagtgccgccagcttcgcttcccaacgcagcaacatgcggtgattttgcccctccaggggcttgagtaataattttgccagccccatcagcgccccggtattaccggcactgacacaggcttgcgctcgaccttctttcaccagctccaggccacgcgcattgaactcccacgactggcgcagaccatagaacagcgtgccttcgttcggcgttttacggaaacgccccaggttgcgttcaaacgggtccggtgagaagaagtggtgcggcgtctgcatcatcgccagctgtttttctttcaggaaccagcccatggtcatttgcaagaacgatcgcgtaggtacgtggtcgcagtcgaaaatcgacacgaactcgcctttggcatatttcagcgcattgttgatgttgcctgctttcgcatgttcatgagtggtgcgggcgatatatttcacccccacgttttgcgcaaactggcgaaactcttccctgccgccgtcatcaaggatccagatattcagcttatctttcggccagtcgatacccagcgaggcgtaaatggtatttttcaccacgttgagatcttcgttgtaagtcgggacaaagatatccaccgacggccacagcgacatatctttcggcaatggcaccggctgacgattcagcggccatactacctggaagtagccgagcaccagcacaatccacgcgtacgtttcagcgaagagcagaataagcccgcacaccaggctgaccggatcgtcccagttcagcgtagaggtgtaacgccaccagatataacggcaagaaacggtcagcgacagcacaatcaacattagcgccgagaagcgccccggcatccgccgtacgatcagcgctaccccccacagcagcatcaggaagataaactgcgccagcgggttaaacggctgagtaacgcagattaacgccagaatcagcgagaaggtgacgatgataccgaggatcaaccgccgcgccccggcactcaaatgaccgagctcttttttctcatccagatgctgtgttttatggctaacgcgctcaggcagctcgttcatccattgatggtaacgtccacgaatattttgcagacctgaaaatgcccgcctgcgcggtttcggcgtttctttgcgcgatgcaccgatcaataaccagcatgtttgaatgagataacggaccgggtccagcggacgcggacgcgaggcgttgatatgcggatacaggtttttatgttctgcgcgaatacgctgccagcgcgggtgctccagcggaataaaaatccaggccaggatcatccagaaacagccgagcgtcgcgctgaaagccaacgcatcattgaaaaaggtctgaagtgtatccagggcaaaggcattgttaactctatctcgatgaaagagggcgtcgatgcctttatccat

SEQ ID NO: 21538 - DNA, 1147 bp, Homo sapiens
  SIMILAR (34)..(843): 841254mologous to Escherichia coli HyfG,accession number M63654,Smith-Waterman Score=1092.
atggactggttggttttttatttgaaaaaggggcgactgtgccctgaaccgacgactgattccgaaacgtatccgtttatcaatgagggcaacagcgatgcgcgggtgatccctgtcggcccgctgcatatcacctccgatgaaccgggtcacttccgcttgtttgtggatggcgagcaaattgtcgatgctgattaccgcctgttttatgtccatcgcggcatggagaaactggcagaaacgcggatgggctacaacgaagtgaccttcttatcggaccgcgtgtgtgggatttgcggttttgcccacagtgtggcctataccaattcggttgaaaatgcactggggattgaggtgccgcaacgagcacatactattcgctcgattctgctggaagtcgaacggctacacagtcatttgcttaaccttggcctctcctgccatttcgttggttttgataccggctttatgcaatttttccgcgtgcgggaaaagtcgatgacgatggcggaattgctgatcgggtcgcgtaaaacctacggtctgaatctgattggtggtgttcgccgcgatattctcaaagagcaacgtctgcaaacgctgaaactggtgcgcgagatgcgcgccgacgtgtcggagctggtagagatgctgcttgctacgccgaatattggaaacaacgcactccaggggcaattgggcatttctccgaacccggaacaagaattccggccccggtggaatatttggcggcctttggaattcaaccccttaagcccgaatacgggcaatatttccaaagaaacatggtttaaccttttaccggccgggcgaagtgttttccttcccgggttgaatggctccggtgttcaagagaagaacgcttgtgaatttcgccgtggggcaagtgccgtgggcacatttctgtgggccccccttttcgagaaacaaaacccatttgtgcccgggcagcctggggttgttgatgaccttaatgggattgttgatcgtgctgtgctggctgccgctggcgacgcggatgtcgcatcaggggcagcccgtttaagcgcacgtcaccgcagcatcgtcatcagctccatgggagaacgatgctgctttatcagatcacgcatcacccgcatatgcg

SEQ ID NO: 21539 - DNA, 557 bp, Homo sapiens
  SIMILAR (116)..(307): 501254mologous to Escherichia coli No definition line found,accession number U00039,Smith-Waterman Score=137.
atgcgaaagcaggcacatcaacaatgcgctgaaatatgccaaaggcgagttcgtgtcgattttcactgcgaccacgtaccaacgcgatcgttcttgcaaatgaccatgggctgttccggacccgtttgaacgcaacctggggcgtttccgtaaaacgccgacgaaggcacgctgttctatggtctggtgcaggatggcaacgatatgtggacgccactttcttctgcggttcctgtgcggtgattcgtcgtaagccgcggatgaaattggcggcattgctgtcgaaaccgtgactgaagatgcgcatcttctctgcggttgcaccgtcgtggctatacctccgcgtatatgcgtatccgcaggcggcggggctggcgaccgaaagtcttctgtccggtttcaccagaatcttgcgcaagtgcatataacgcgtggtgtagctggaccatgacgaatagccacataataacctgctgcgccactgcgtttggcaccaccacttcaccgtcacccactgaaagcactggcgtaccctgcggcaggcgaaatcaacacct

SEQ ID NO: 21540 - DNA, 1650 bp, Homo sapiens
  SIMILAR (1017)..(412): 1001254mologous to Escherichia coli No definition line found,accession number U00039,Smith-Waterman Score=1061.
ttactgacggtggacattcagtccggcatagctttgggtaaccggcatcatttccagggtattgatattgacgtgagcaggcagcgttgacacccaccagacggcttcgctgacatcttctggcgtcaatgcaacggtattttgataggttttttctgctttaccgtcatcgcctttaaagcggacattggaaaactcggtaccacccaccagacccggttcgatgtcggtgacgcgcaccgccgtaccatgcagatccgtacgcagattcaggctaaactgacgaacaaacgctttcgtcgcaccgtaaacgttaccaccggcatacggccagctacctctcccgttgcgattggcggcggtgattggtttccagttgccgtataacgcccagcgcagcgtgattgcgcacgccagcaccgtttcgtagatttcactccagaaagagtggcgatatttgccctggatcttggagttggtcaggctggcatggatcatatgcggcagcacgaatagggcgatcatcaacgctggcgcatagatgatgtaggcatgaagcagcaggaacgccagcggcgcagtcaggaagatcagccgtggaatgcccgacaagaagtggaacatggcgttgacgtaacatagccgctgagcaaacttcagccctttaccggtgagcgggttatcgagacggaagatttgtaccatcccgcgcgcccagcgaatacgctgaccgatatgcgccgacagactttcggtcgccagccccgccgcctgcggaatacgcatatacgcggaggtatagccacgacggtgcaaccgcagagaagtatgcgcatcttcagtcacggtttcgacagcaatgccgccaatttcatccagcggcttacgacgaatcaccgcacaggaaccgcagaagaaagtggcgtcccacatatcgttgccatcctgcaccagaccatagaacagcgtgccttcgttcggcgttttacggaaacgccccaggttgcgttcaaacggagagatcgtggtaacgctattcgccagcttgccgctgctaacattttccctggcgacatgctgtttaaaaacttcggtgtcacccgtcacgggcgtgtggttttttatgattacgatgaaatttgctacatgacggaagtgaatttccgcgacatcccgccgccgcgctatccggaagacgaacttgccagcgaaccgtggtacagcgtctcgccgggcgatgttttcccggaagagtttcgccactggggtatggggagatgcttttttgagtaaagcttccatataatttttctccgcaatgtatcgagggttatccgtaaagccaaagctttcagccatcttatttaatgtattaaggattaattcagcaataacccggtgaccaaattcaaaagccaactcaaaggcagatatttttgtggggggggacttcatagagtggtcctgcaggcggtgtatgtttgccgccaatgtccgcgcaggcgagtaaggcgttacgccgcatccggcatcaaatgactcacgttgtcccgcttctggtttgcgcgatttttgcccagtaaaaatgttcgcgcaaaccttccgccgactcttccgccacagcccgcaattcatcgctgtccgcttcat

SEQ ID NO: 21541 - DNA, 931 bp, Homo sapiens
  SIMILAR (462)..(4): 981254mologous to Escherichia coli HyfG,accession number M63654,Smith-Waterman Score=804.
ttacttcagcggcgaacggttacgatcaatgccgtagcgttcgatctctttatacggcacggtttttgactggcgcttgcgcacatctaccagcgtcacacggtcggtacaggagtagcagggatcaaggctaccgataatcagcggtgcgtcagaaacggtattgccgcgcagcatgtaacgcaacaccggccagttggcgtaagtggcggcacggcagcgccagcggaacaatttttggttatcaccgagcatgctccagtgcacgtcttcaccgcgtggcgcttcaacaaagcccagcgcgaatgcgtgaggtttatagctaaagccttcggtcagcagtggggtatccggcatgttgtcgagggcaaattccagcattgccagcgaatcaaacgtctctttgacacggaccatcacgcgtgagaaaacatcggcggcggtaaaggtaaacagtgttttttggaatattgtcgtattcggcgtatgggtgatcaaagcgcaaatcacgggcgatttgtgggtcgagaatgccaatgccctgagtgcgttgttccatattcggcggtagcaagcaagaatttctaccagcttcttccgagaatcgctgccaagccgacatccggttccccgatatcggccgcttgaagcgttctggacgccatgcacccgaggctattaccgtttttttttttcgccggcaagggagaatgcggaataccgcaccctgataacactgggcaaaatttttgctagtgcgtgctagctttccgggcgccagcacgctatgctgtaaatcaccggggcgcacaatcagcgtctgataagtcggcacgggtgcgttacgaattctccataacgtcatcagtccggcgatgactatcaccagcgcagtaacgtaacgcttcttcacggttttccgctttttcat

SEQ ID NO: 21542 - DNA, 1719 bp, Homo sapiens
  SIMILAR (208)..(663): 871254mologous to Escherichia coli Sorbitol dehydrogenase (EC 1.1.1.14) (L-iditol 2-dehydrogenase),accession number D90821,Smith -Waterman Score=630.
  misc_feature (1)...(1719): n = a,t,c or g
atgaaaattatttcagcagaaataccagtgcctaaagaagatgaagttttgattaaagtagaatatgtcggtatttgtggttcagatgtacatggttttgaatcaggcccgtttattccgcctaaagacccaaatcaagaaatcggcctgggtcatgaatgcgccgggacggttgtggctgtgggaagccgcgtgcgcaaatttaaaccgggggatcgggaccacaatgaaagggcctctgttgagaccctcccacatccggaatcacatcccgcgatgctgccagatgttaaaccggttaagaagataattattctgggagcagcttgtattgctttgatgacgttgcaagcgtgcaaatgcctgggagcaacggaaattgccgtcgttgatgtgctggaaaaacgtctggcaatggcggaacagcttggtgcgacagtggttattaacggcgcaaaagaagacactattgcacgctgtcagcaatttaccgaagacatgggcgcagatattgttttcgaaacagcgggttctgcggtcaccgttaaacaggcaccttatctggtaatgcgcggcggtaaaattatgattgttggtactgtacccggcgattcggcaatcaatttcctcaaaatcaatcgcgaagtcactatccagacggtacttccgctatgccaatcggcgattcgatgtgaaatcgatggtgacgcatatttacgattatcggaatgtatatcggaactgcactctaatctgatggtgcaatcgttgtttgccgactttgcgaaaatcttcccgggtcgtttcaccaacgtcaccaacggtgtgacgccgcgtcgctggctggcggtagcgaacccatcgctttcagccgtgctggacgaacacctgggccgtaactggcgcaccgaccttagcctgcttaatgagctgcaacaacactgtgatttcccaatggttaatcacgctgtgcatcaggcgaagctggagaacaaaaagcgtctggcagagtatatcgcccagcagctgaatgtggtggtgaatccaaaggcgttgttcgatgtacaaatcaaacgtattcacgaatacaaacgtcaattgatgaatgtgttgcatgtgattacccgctataaccgcatcaaggccgacccggatgcgaagtgggtaccgcgcgtgaatatttttggcggtaaggcggcttcggcctattacatggcgaagcacattattcatttgatcaatgacgtagcgaaagtgatcaacaacgatccgcagattggcgataagctgaaagtcgtgttcatcccgaactacaccgtgtactttgtggctcacaacaancgncagccaggccatacgcacacgacgaccgttggattcatcaatgatcgacgcccgtcccagcagatcggtatcgttcggatactgttcctgcaaggttttcaggaaatagtcgttgatttcaaagatgatctgcaggtgacgcggcagaattttacccagcatatcaaccggccaggtttccagcgcctcgctcatcagcgtgtggttagtgtnaggagaagacctgacaacacacctcaaacggtaccgaggcgtcggcaattagaagagcgactggtactgcaactgcgaatgatttcgaaaggggcttattactggtatcgccgtgaacaagagaaaaccgcaattattccgggaaatgtgaaggacgagtaa

SEQ ID NO: 21543 - DNA, 1323 bp, Homo sapiens
  SIMILAR (163)..(1092): 751254mologous to Escherichia coli sulfite reductase (NADPH) flavoprotein beta subunit,accession number U29579,Smith-Waterman Score=1109.
atgggcgcctgtgtgcgcagacggggcaggagcggacagaactacggatattcacggcgtagtcactgggagaactctttctatccctactgggtctctgtcgagcatattggcgaggtggtccttgagaaaatctcgttcctagctgtgccgcaggcgtgtgctgtggcctctagacaccgtaaaattaccgggcgtaactctgaaaaagacgttcgccatatcgaaattgacttaggtgactcgggcatgcgttaccagccgggtgacgcgctgggcgtctggtatcagaacgatccggcactggtgaaagaacttgtcgaactgctgtggctgaaaggcgatgaacctgtcaccgtcgagggcaaaacgttgcctctgaacgaagcgctacagtggcacttcgaactgaccgtcaacaccgccaacattgttgagaattacgccacgcttacccgcagtgaaacactgctgccgctggtgggcgataaagcgaagttacagcattacgccgcgacgacgccgattgttgacatggtgcgtttctccccggcacagcttgatgccgaagcgctaattaatctgctgcgcccgctgacgccgcgtctgtattccatcgcctcctcgcaggcggaagtcgagaacgaagtacacgtcaccgttggtgtggtgcgttacgacgtggaagggcgcgcccgtgccggtggtgcctccagcttcctcgctgaccgcgtggaagaagagggcgaagtccgcgtatttatcgaacataacgataacttccgcctgtcagccaatccagaagacccggtgattatgattgggcccagcaccgggtttttggccgagagagactctatttaccaaaacaactggacagtttcgacagtgccggaccagcatactgtagcttctcaggatgaatttgaaaacctggttcgtaatgtcgacgtaaaatcgcgaattatggatcagtatgctgactggaaaggcgtacgttatcgtctgggcggcagcactaaaaaaggtatcgattgttctggtttcgtacagcgtacattccgtgagcaatttggcttagaacttccgcgttcgacttacgaacagcaggaaatgggtaaatctgtttcccgcagtaatttgcgtacgggtgatttagttctgttccgtgccggttcaacgggacgccatgtcggtatttatatcggcaacaatcagtttgtccatgcttccaccagcagtggtgttattatttccagcatgaatgaaccgtactggaagaagcgttacaacgaagcacgccgggttctcagccgcagctaa

SEQ ID NO: 21544 - DNA, 6813 bp, Homo sapiens
  SIMILAR (1836)..(544): 921254mologous to Escherichia coli formylglycineamide ribonucleotide synthetase (EC 6.3.5.3),accession number M19501,Smith-Waterman Score=2030.
  misc_feature (1)...(6813): n = a,t,c or g
ttaattgccagccatcgccgccgcagtcagggtctggtgctgatcgtgtttatcctccagcatttccaccgaaagcaccgttcgccgcagccagataaatcgataacgcgccgccagatcaaacaaccgttcacgcatttgcagcaaatagtgagaaccacagcccgccacaattgccgtatgaaacgcctgatgacgcagatcccactcatcaagcattttctcgctggcgtcacaggcctcaagcttactcagcagatgcgcttttgcgagaacgtctgcctcccactcatcgccaccgcgggcaatcgccagactcactaacatcgcttccatattggcgcgggcgtcgaaaatatcgagcagctcctgctctgacatagacgccacccgataccctttttgattcaccaccgtgaccagccgttccgccaccagttgcgaaagagcttcccgtaacggcccaacgccaagtgcataacgcgatgtcagcaaactcattcgtaatttttcatccggtgaaaatacggaataatatcgttcttcagccagcgatagccatccagagacgtaatggtcatggtgtgactcgctgtgcggcagcgctgcactcgcgtcatggaagcctttcagttgcgcgacatcgcgtacatctgccggtttgtcgccaagctgacgataaacctgcgccagcgccgttgcgcccagcgcgttattgcctttgcccaaatcaatcagcagcagtgcgttatcttcggtagaaagctgcggcgtgatggtgtgacgtacatcttccacgcgggcaaatgcagaaatcaccagcgacagcggcgacgtcatttcgcgctcttcgttaccttcctgccagcgggttttcatcgacatggagtctttacccaccgggatcgtcaggcccagcgccggacaaagctcttcgcccacggctttaacggcttcatacaggcccgcatcttcaccagcgtggcctgccgccgccatccagttggcggaaagtttgatgcgtatgatatcgccaatttgtgttgcggcgatgttggttaacgcttcaccgaccggcagacgggcagaggcggcgaaatccagcagcgcaaccggcgcacgctcgccaatcgccatcgcttcaccgtagtagctgtcgaggctggcggtagtgaccgcgcagttagcgaccggcacctgccacggccccaccatctgatcgcgcgctaccatgccggttacgctgcggtcgccaatggtcaccaggaaggttttttccgccacgcgtctgcaactggtgatcccttcacgggccagcgcgtcgcctttcgctttcagcgtttgtacatcgcgggtcatcttcggcgttttaccaagcaggacgtccagcggcagatcgatcggctgattatcaaaatgacgatcgtgcagagaaagatgcagttcttcggtcgcttcaccaatcaccgcgtagggtgcgcgctcacgcttacacagttcgtcaaacagcggtaattgatcggcagcaaccgccagcacgtagcgttcctgggattcgttacaccagatttccagcgggctcatgcccggttcgtcgcttagaatctcgcgcagttcaaatttaccgccgcgcccgccgtcgctcaccagttccggcatggcgttagaaagaccgccagcgccaacgtcgtggataaacaggattgggttggcatcaccaagctgccagcaacggtcgatcacttcctggcagcgacgctccatctccgggttgtcgcgctgtacggaagcaaagtcgaggtcggcatcagactgaccagacgccatagaagacgctgggtaccgaactcgagtcgtaatctgtctcttttgctcctgtcgggttggtgttcgttgttctgttgtgtggttgtgaatattttcgacataagcgtaggcttcatgtccacgagcgtagccgtaagtcagcttgctgtaatagggtttctggctaagtaaaggcagacgctgttttacgtcagcccaactgtcaggattccctttggtttttgccgtcagggcgcgggcatccagcatatgcgggtaccgagctcggtagccacattggaaagatccccaagggttcccgcgcggcgtaccgccgcagtgctcggcgaagtggcgaagcaggcgccgtcgacacgccgagaagcgcgcatcggtgatgagcgacacgtcttgccccacgagatatgcttgtagcgcggaggtgagnctggtaggtctcttccatgccggtgccggacggccgccgccgatcaccaccatgatatcgccctgcacaatctcttcccgcttgatcgccttgatcgcctgcgcttccgagacaaacacccgcacccggccggtgtggtggtatacgccatcttcgcccaccaccgacgggtcgatcgccgtggccttgatcaccgaaccttccggcgcgatgttgcccgtcgggaagcagaccgtcgaggtcagccctttcgcttttgccttctccggcggcaggatcacgtcatccggctctacgccgtcctgctcgcgcaggcactggcggaagcgcgcccggcgctcggacgcctgccaccattcaaggttctcgcccaccgtctggccggtcacggtcatggcgtccagatgcagcaggccgaggtcgcgcaggtggagcatcacctccggcacgccgcccgcgaggaaggcgcgcacggtcgggtgatagtccgggccgttgggcagcacgctcaccagacgcggcactttacggttgatgcgcgtccagtgctcaacgtccgggatcgtgcagcccgccgcgtgggcgatggccggaatgtgcagcagtaaattggtggagccgccgaacgccgcgtggatcaccatcgcgttttcgatggctttatcggagaggatatcccgcgtggtgatgccgcggctatccagctcgctgaccgcgcgcgccgactggcgggcgatctccagccacaccgcctgcccggacggcgccagcgcggagtgcggcagcgccagacccagcgcctccgcgaccacacccgccgcccggcgaggcgcaggcgcgacagcccagttcgcggcctcctgcagggagagttcgtggttggcgaaacgcgcgccgatggtctgcaccttgcccgcgtcttctacgacgtcgcgcagctcgccccctacccaggatgtcggctcgcagaggaagtagtggtttaccgtaccgttgtaacggttttcgatacgacgcagttcgccgtaacgttcaccggggctgatgttacagccgatggaacattgctggcagatgctcggcgcaaactgcatatcccatttacggttgtaacgctcggagtgcgttttgtcggtaaatacgccggtcgggcaaatttcgaccaggttaccggaaaattcgctttccagcgtgccgtcttccgggcgaccgaagtagacgttgtcgtgcgcaccgtaaacgcccagatctgtaccgtcagcgtaatctttgtagtaacgcacacagcggtagcaggcgatgcagcggttcatttcgtgagagatgaatggccccaaatcctgattacggtgggtacgtttggtgaaacggtagcgacggaagctgtgtccggtcatcacagtcatatcctgaagatggcagttaccgccctcttcacataccggacagtcgtgcgggtggttggtcatcaaccactcgaccacgctttcacggaactgtttcgcttcttcgtcgtcaatggaaataaaggtgccatcggaagccggtgtcatacaggacatcaccaggcgaccacgcgtgtcttccgcgttttggtattgcttcaccgcacactggcggcaagcaccgacacttcccagcgccggatgccagcaaaagtcgggaatatcaaggcccagagacagacaagcttccagcaggttgtccgctccgttgacctcgtattctttgccgtctacatgaattgtagccattagcatgcttccacagcgctctttcagcaggttcggctgaatcccattaatcaaatgggtattgctgaacggctgtttgattcccgcctcaaattcttcgcggaaatatttgatggcgctctgtaacggctccactgcaccaggtgcgtgggcacagaaagttttacccgggcctaagaatcgacacagttgctcaagtgtttcgatatcgcccggctgaccttcaccacgctccagcgcacgcagaattttcacgctccacggcagaccgtcgcggcacggcgtacaccagccgcaggactcacgggcgaaaaactcttccaggttacgcaccagcgacaccatgttgatctcatggtcaaccgccatcgccagcgccgtacccagacggctgcccgctttaccgatactttcgaattccatcggcagatcaaggtgcgcttcggtcaggaagtcagtccccgcgccgcctggctgccaggctttaaatttcagaccatcacgcataccaccggcgtaatcttcgaggatctcgcgtgcggtggtgccgaacggcagttcccacagtcccggatttttcacccgaccggagaagcccatcagcttggtcacggtgtcgaaagctatcgcaccactggcgcgccgcgtatcagtcctactcactttatggacagcgacggcaaagtgggcgcggaagtggctccgcgtcgttatttctgtctgcaatgtcacgtaccgcaggccgataccgcgccaatcgtggggaatacccccagccgtctggcgctggggacgctgctgttgatcggttttgttggcggcatcgtcttctggggtggccgggcttgccgattcgaagatattcctgtaaatcagctctcgccgggcaacaacgccgcgtcgctttagcgcgtctgtgctacccgtgccacgtatgatggcagagccaacaatcccgcaatcaatgccgatatatttcgggttttccgggtgttcatagcttacgaagatgttgccaggtgcatatcggcatggaaaaagctgcacgccgcgttccgccagcaatttcatgttagtgccgtttttctccagcgccgcaacatcagacaccggaatgccgtaaatgcgctccatcaccatcatcccttcactacaatagtcagggtaaacttccgggatgtagagcatcgggctgtcttcaaaattgcgccgaagctgaatggcgttggcagattcccgcagcaaattcagttcatcaatcaatgtcttttcgtactcgcgcaccacttcggttgggcgcagacggcgaccatccggcagcaaacgcggcacccagcgagccagacggtagataagtttcagatccgctttaataaccggcaaaatatccgggcggatgactttaatcaccacctctttaccattcgatttcaatcgcgcggtatgaacctgggcgatagaagcagaagccagcggcttgatttcaaaatcgtcaaaccacgcttctaccggcaagccgcccattgcagcttcaatctgctgcttcgccagcttgccatcaaacggagcaactttgtcgaatagggcgatcatcaacgctggcgcatagatgatgtaggcatgaagcagcaggaacgccagcggcgcagtcaggaagatcagccgtggaatgcccgacaagaagtggaacatggcgttgacgtaacatagccgctgagcaaacttcagccctttaccggtgagcgggttatcgagacggaagatttgtaccatcccgcgcgcccagcgaatacgctgaccgatatgcgccgacagactttcggtcgccagccccgcctgcctgccggaatacgcattatagcgctggcaggtattaggccacggagggttatcgacagcaatgccgccaatttcatccagcggcttacgacgaatcaccgcacaggaaccgcagaagaaagtggcgtcccacatatcgttgccatcctgcaccagaccatagaacagcgtgccttcgttcggcgttttacggaaacgccccaggttgcgttcaaacgggtccggtgagaagaagtggtgcggcgtctgcatcatcgccagctgtttttctttcaggaaccagcccatggtcatttgcaagaacgatcgcgttggtacgtggtcgcagtcgaaaatcgacacgaactcgccttgggcatatttcagcgcattgttgatgttgcctgctttcgcatgttcatgagtggtgcgggcgatatatttcacccccacgttttgcgcaaactggcgaaactcttccctgccgccgtcatcaaggatccagatattcagcttatctttcggccagtcgatacccagcgaggcgtaaatggtatttttcaccacgttgagatcttcgttgtaagtcgggacaaagatatccaccgacggacacagcgacatatctttcggcaatggcaccggctgacgattcagcggccatactacctggaagtagccgagcaccagcacaatccacgcgtacgtttcagggaagagcagaataagcccgcacaccagggaagcgatgatcgaatgatcatagcaagcgggcatggctttacgctcttcggcgccgagctgggagaactcgccaccgctgcccaggaagaacaggccgtcaacgcctgctttgatcagatcgtcgatcagcgcggcggtgcccggcttatcgagctggccgtcggcggtaaaaatggtggagacagggggaatgattcccgtgaacaacgcggactgcggcatgagatctccttgctgaatcat

SEQ ID NO: 21545 - DNA, 1875 bp, Homo sapiens
  SIMILAR (801)..(19): 991254mologous to Escherichia coli No definition line found,accession number U00039,Smith-Waterman Score=1377.
tcaccgagctcggtccactagggcgttcatcatcgctggcgcatagatgatgtaggcatgaagcagcaggaacgccagcggcgcagtcaggaagatcagccgtggaatgcccgacaagaagtggaacatggcgttgacgtaacatagccgctgagcaaacttcagccctttaccggtgagcgggttatcgagacggaagatttgtaccatcccgcgcgcccagcgaatacgctgaccgatatgcgccgacagactttcggtcgccagccccgccgcctgcggaatacgcatatacgcggaggtatagccacgacggtgcaaccgcagagaagtatgcgcatcttcagtcacggtttcgacagcaatgccgccaatttcatccagcggcttacgacgaatcaccgcacaggaaccgcagaagaaagtggcgtcccacatatcgttgccatcctgcaccagaccatagaacagcgtgccttcgttcggcgttttacggaaacgccccaggttgcgttcaaacgggtccggtgagaagaagtggtgcggcgtctgcatcatcgccagctgtttttctttcaggaaccagcccatggtcatttgcaagaacgatcgcgttggtacgtggtcgcagtcgaaaatcgacacgaactcgcctttggcatatttcagcgcattgttgatgttgcctgctttcgcatgttcatgagtggtgcgggcgatatatttcacccccacgttttgcgcaaactggcgaaactcttccctgccgccgtcatcaaggatccagatattcagcttatccgtagcagaatgctgagtcgccagtaacatgcgcgaatcctggcgcggattatggatttgtcgggtaaccagcagggattgcgtcatcgcctcacggaccatgtaatccggcaaaaaaccaattccttcacctaaaatctggcactgacatttggtgttgaaatctggcaccagaattgactcctgcccgtgcagcaaccagcccacttttttattaatcgtatgcgcggtgtcctccaccataatattagggtagagacgcagttggctttcggcgatgggttccggcacaaaggctaacgggtgatccggggcgatagcaaaagcccagcgaatcgcgccaatttcagtgtaatcaataccgccgccgtccagtagtgtatcgggtgcgccgatggcgatattggcctgattattaataatcgcatcccagacgccgttatacacttcggtggtgacggtaatctggcaggtaggaaactgctttttcagcaccttgcccgcgtcttccccgacggtcggcggcagcgtcgccccgcccggcaccagaatagtcggcaggtcgtgcatcgcggccagcgcaatcatggtggcgggcagccctttatcgcaggtcgctacgccgatcaccgcccgccgcgtcggcagggagcggatcaggcggcgaaacacgatcgccgcgtcgttgcggtacggcagggaatcgaacataccgtgcgtgccctgcgagcgcccgtcgcacggatcgctgacgaaggccgcgaacgggatcccgccattgcgggtgatctccttcgccgccgcctgcatctgcatgccgatctcccaatgcccggtgtggtagcccagcgcgattgggcgtccgtctccggcgcggatgccgccctctttgccggtgagcttgttggcgtcccagcccatcccggcgttctgcgtcatgccgaacaggttgccgctgggagattccatcagcatctgcggggtcagcggcagagcgccctgcggccccgccgcgtgggtgatcaccgcataaaacgcgtcgtcctgcggggtgaaaattttctcaatggtcat

SEQ ID NO: 21546 - DNA, 1145 bp, Homo sapiens
  SIMILAR (188)..(898): 931254mologous to Escherichia coli Protease II (EC 3.4.21.83) (Oligopeptidase B),accession number D90827,Smith-Waterman Score= 1178.
atgcgtcacgccatcggtacgccagcatcgcaagataaactgatctacgaagaaaaagacgatacctattacgtcagcctgcataaaacgacctcgaagcactatgtagtcattcatttggccagcgccaccaccagtgaagttcgcctgctggacgcggaaatggccgatgccgagccgtttgtttttctgccgcggccgcaaagatcacgaatacagccttgatcactaccagcatcgtttttatctgcgttccaaccgccacggcaaaaactttggcttataccgtacccgtatgcgtgatgagcaacagtgggaagagttaattccgccacgcgaaaacatcatgctggaagggtttacgctgtttaccgactggctggtggttgaagagcgtcagcgcgggttaaccagtttgcgccaaattaaccgcaagacccgggaagtcattggtattgcctttgatgatccggcctatgtgacctggattgcctacaatccagaacctgaaaccgcgcgattgcgttatggttattcttccatgactacaccagacactttgtttgaactggatatggataccggtgagcgtcgtgtattaaaacaaacggaagttcctggtttttatgcggcgaattaccgcagtgaacacctgtggatagtcgcccgtgatggcgtcgaagttccggtttcgttggtctaccatcgcaaacattttcgcaaaggacacaacccgttgctggtgtatggctatggttcttacggcgcaagtattgatgccgatttcagttttagccgcttgagtttgttagatcgtggctttgtctacgccattgtccatgttcgcggcggtggttgcaaaatcaacctggtcgtcgataacggcaaaatcgtccgggcggaggcagcgcaggggaaaaccaaccagggtaccctgtgtctgaagggttattatggctgggacttcattaacgatacccagatcctgaccccgcgcctgaaaacccccatgatccgtcgccagcgtggcggcaaactcgaacctgtttcctgggatgaggcactgaattacgttgccgagcgcctgagcgccatcaaagagaagtacggtccggatgccatccagacgaccggctcctcgcgtg
